United States Patent Application Publication US 2014/0057251 A1 - sequence listing, part 38

SEQ ID NO: 41148 - DNA, 7760 bp, Cannabis sativa
  modified_base (191)..(201): a, c, t, g, unknown or other
aaaaaatgcatccctactatagaagtgtcctataattatatacattattataaattattagtaatcttttaaaattataaacattgatataataacataataagcacacatttaaattttatttatttttgtgttttttaattttaaataaacacacttttaaaatttatatacattaatgtttataattnnnnnnnnnnnttttattaaaaaaaaaaattattaaattatgataattcatactaaaataaataataaacatctactctttaataaaaaaaaaatatttaatttgtttatttttataaaactgtttgttatttatgtaattaattgtacgaaattatttattttgtgtttaataaacatattatattattaataatttttaaaatactgatataataaacaaaatatattacaaaatagcattataaacataaattatattaatatataataaacaataataagaatattgtttagcttaaaaatcaataattatataagaactcaatttaaatatcatttatataataataattatatttacaaatttaatattattttaaacataatgtttacaactataagtctattacaaagtataatattatatatacaaaaatatatttatagtttagtcattaatgcattatattttaattattaaaatgtatagtttcgtgtaatatggtttcaaaatgtataagttttttaaaataattttattttacacattttttgtaattattttatttttattgtacatttatgaaaaaatccctaataaaaaaattacattaacttcgtgaagagcgactatataacttaatttatttagggtaactttcaattatatacataatactaaaattatttatacacataccgataaaattttaaatataaatattatgtatatttttatacttaatataaaataatacatgtgcatattctaattttttctttcgcatgacagtctttttctttgatattttatttctcaattatgcgaagatcaaccactttttttatttttttttcttttatttattttttttctgtacaattcttttttttaaaaaaaaaatcttcctacataactatttagtttttgtttagttattattcttaccaaaaaaaaaagttactattttattttagatattaacatcagtattgttttcaagatggtcatccgataatatatttaaaattaaaagcaatatttaagttacttttgtaatttattatcaaataagagtaattaaatattataattaaatatatatatacaaactaattagtaacttattatttcatattcaaaaactacttgatagtatctaaatgaatattttatagaacgattttaattgattttttataaaatttgtaaggaaactaaataatatcttaaacaccacgaaattaatttcattacaaaacattcttttaactactattatgttacattgttgtttaaaatacttatacatttattttttttagcaacatttatattacttcaaaactagtttaagaatttaataaggtacaataaagtataagcacttattagtaaaattagtatacataactatttcaaaaaaaaatagtatatatactaatttttcataatgtaaataattttgttatttaaaacacctttcgtcacccataatataaagtatacttaatatgaaaattagtagagttaattttttaatataaacgattctaatactgattaaaatactatttagtttttttataaatttttttagtaatttatcaaaattatttcaataagataaacttatttagaatactatgaggtaacttttaaaatgaaataagaaaataatttataatctattaaactttgattaattttatagtttgattttttgttaacaaaaaataaaagaaattaaatggttgttgttgatttcgatcattttttcttgattgagcgaagaaatacatgattctcatatattaaaataatcattttaaaaagtaagccatgatgacttgagctcaaccgactaacgttgtgttgtaaaaaagaaaagagaagagagacgactgggtatacttttttagaaatttatcaaaattgctctacaaaagaagcttatgttgaatacgatttagttacttttttttagatatttaccgagattgctctttaaaataaatttatgtagaatattatctagtatataataaaatactttttagcagcccatgaaattagttggtacattaaagttcgttttaagtgtaaaatttaatatgttgaattcactattttagaatttttaaggtaatatcttattttttcataagttatattataaacttttgaaaagcgttttataatattaaaatataatttagtaatatttaaatatgaaataattatacataaaaaaatattaacttattaaattagttggtattttaaattttttttagaagaaaaaaagaatagaagaagtttttttttaatattaaaaaaaactattaataattttatgttcgtatttaaaaaataaaaaaggaagcaaaaaaacaaaaaagagaataaacgaaaaccaaactatcaatatcaacccatttgcattgatgcgctgcttactatctttggcctgtatacacattcttcaaaaaaaaattaaaatagcacggtattatagtttaaataaaaaaagcagtggtatttatgggattaatttcaaattttagtctcccagcgtaaatttagttatcatgaaattatttttttaattatttaataacttatttatatttatttataattgtcaaattaatttttcgttattttttaattatttttttaccttttgctaaacaaaataattttaaaactttataaatgtaattttataattaaaaattttaaaccataaaattataaataaaataaaaaagtatttttaaaaattcccataaaattatcccattagatgataatcttaaatatttctcttcaatcttagaataaatttcatatttaaataattttgtacaactttttacagcaatatatcagatttcttatagtgcaattgaataatctagctaaatattgttaggtataactcagtaataccatattctctgttttaatattccaattaatcatattgttttttaactcttcataccaaataatatattagatctataagcatattctggacaagaaataatatcaggacacaagactaaaagctttagattgtctactatatcaatatggaattataatctcacgcgaatttatactagaaaatgaatcaaaaattcatgtctttgagttgaaattctacaagttgtggcgagaagaaagaaaaaaaaagcaaatatttctaactctgtaactggagataactcaagaacataatacagcatggcaaaaattttgcagagcctcatagcactacagacacctaaattaaatccttcttgacctctaacttacttcctattaccataaggattgattctgctgaatccatttcggcttccttcaaccctgcgtgtagtctttctgaatttcgaagcattgctgtctatgttcaggttcaccttaggtgggttagaaaagcagaacgaagcagcaaccgcctgtataaaatcaaaaaaaaaataaatgcattaactaatgcagagcacgaccataaaatacatgcacagcagatggtttttaagtggaataaaaattcagggatctcataagatgacaggcttaatcaactaagcaatattaaggctgagagtgaaggccagagacaactgtagtaaaatagttctgtttgcttttccacaacagattatgtttgaagagttttagagaattatagccttgacctgacgaatgccataggagggagaaaaattggttgattgggtatgatgtatcacaagaaatagtgatggacaatttttatgcactcgatgtagtgtgcaagcaaaaattctacaccctaacattatttatcaattcttgttaatattttaggactagccatccaagcattacaaaagcagtgtctgtaatagtgaaaccttaatgaaactaccacagataaatagattaaataaaactaatatctggtacctgcatgtcaaggcggtgaacattgaaaatgtccttcatggagtgggaattataggccaatatatatgatctatatgcttcttttgcagacttgttcaaatagtagttattacccaccaacttctcctgcatcagtccaagtaatattattcagtttcttttgatttttagtctcaaaataatacaacaatccaacattgaggaatgagtaagttaccaggtgagactgcacattagaaagcttcttttcactaaattcatactctttaacagggacttttgcttcctgaaaattaatattacttgtaaatatcacatatggcaaataagaatgaatagaatacacaataatatacaagtgtaactataaatatatatacagggagcttattagggcatcactttttccctaccgtagggacgtggtatattttcactacttaagagaaattatctcatttttttcgtatagcattgtatattgaaattataacactcacctgttatcagaaaattatgaataatttataataaaactcaaaatagtcacttgcccgcacatatatttatattttcttaaaaaaaaaaaaaaaaagtacaactaattgtttgaatcttattttcggtataatagattatgtaaaattttctgagcctaccataaccataatagatggagttagtgacatggagtcagggaggctgtagccctagcaaaaaaaattatatactatcttatatatgttaaatatgttaaaaaataattatatcattactgattatttgcccccgcacaaattatttttttcacaattttaccctaccatcttccaaattctccctccgtcagtggagggtcatataaaaaaaattgagttataattcctcaatatatcgatatagaaagagtgatgaccttaccaaatgagcacttcatgtttttagtatatataaactaattcattttttgtatgatgatatacattaatttatcaaaatagtgagttgcacatgcaattaaatatcttggactttatttttaataccgcaaattattcagaatttaccaataacgggtaagatgtctattataattatataatatacactatcatataaaaaagaagaaatataatttttccaagtaccaaaacgagaaatgtcccctacggcaagagcaaaggtaatgcccttaacctaagcagctccttatataaatatctctctctatatatataatttaaggtaatgcccttaacctaagcagctccttaaataaaaaatcaattttgcctttagttttctgacaagaaacaaaaactgcctcaagtttgtttcatactccttttttttttttttttccattcaagtccaaattttcaaagtagcaagttccatataccttaagatagcgtagaaacggcatttcttccggaatgagaaacagcagagcatttcccttagcaccttctccacgggctgttcgaccaaccctgtggatatattcctgcaaaaagtaattcaaagttcagcatcagaaatacagtacataaaggaaagttgcagagtagtaaatgtaataagataagctaaagatataatgataagcacctttggttcatcaggaggatcaaactgaacaatccagtcctacaggaaatgagagattgtgtcagatatagagttgttatgagcactcaaaagataaaataacgatgtgtgatttatctatctatttaatttagactgcaaatgacgtcgcatctttcaaagtgaatgatgccatggaaatataacttgattgtcaaacataaagatcctgaaaaaggatcctacttaacatcattttaatttctaccagttagacaaaatctttaaatcttcttcaagagaaatgttataaatccttgatttgcaataattctttttcaagagcacagcaactaataaccacgcaaaatgttgctatacatagaagaagatatggaacaatttgacaaatgaataaccaagaaactaaggaaagaaataaacataccacgtcaggtatgtcaagccctcgagcagcaacatcagtacacagcaagatgcccttctctgctttgcagaagtcaaaaaatgtcgttgttctcttctgttgcttttgtttcccgtgtatatcaaagcaaggcacctgaatgtatcttagaagctcactatggtatttgacagaattgcaagaagagaagaagaccatcacttttttagacagatttctcttcaagaaagaatagagaagtataaatcttttggcacaaggtacaacacaataaccttgttccagcccttcatttgtaacctacaataccataatttaataaaattagagaactggaacaatatattataagattagcacaaagaataaaaaagatggcaatctatattaaggtcatcatatttaaaatgtttaaaatacaaagttaaaactttgaccttagttctattatcatctacatcgacataatgaggctctgtctgaaaagacaatcgggcaagatcctcaacctgcagattattggaaaaagtataaaacatgagagcattcttcaaaaattatcatactaagtaaccatatgtacaataaatagatggtcgatcaaatacacaaatatacaactacacactacagatatgatgcacaaaccttctgagtttgtgttgccgaaaataaagctgttctcctagtctgcaaattgatcaagaattcagtcagctaaacaccttcaaactagtatgtaaccatatgttattggcgcggcacaaatataaacaatgaaatagttgtctgctgagttcaaaatatcccaagaaaacattttgaccaaaaaaatataaactattgccaaagttatcaaccaactatgtagctgaccactatatattcaacaagacatattgaggaatctttatgaaacatccagcattttcaccacatccaagttaaggtggcacttgattcttttgatccttcaacaaactactttagcagttccacaagcaaaatatttgtgaaagaaaaagtacactttaatccactgattcaaatggtgcttaagaaatagctcattcccgtttgtacaagtttaaaatactagctaaaccatttacctttggtaaaatcttgagaatttgcatcatttcatccataaaattagcttccaatatcctgtcagcttcatcaatcgtcaggcactgcactccaagaaaagtagagggtcagtaattagaatgcaagatacaaattcactccaacaaaacaacacattgtctgaggtgagattttctacggagaaaacactacatgtatgatcaaaactaatataacagaagaaaaagttcacagttctggctagccccataaaagtttcaatgatgaagtaattgaataaatttaaaatagtttgcaatattgaaagaaaaaaaaaagacaccagaacatataaaacgcctatggaagaattcaaaggaaaatttattctcgcaggacctcagctgaatattatatgacagaaattttctcaaaatctaatgatgacaagaatcttaaccaaaaacaagt

SEQ ID NO: 41149 - DNA, 1469 bp, Cannabis sativa
  modified_base (1318)..(1335): a, c, t, g, unknown or other
agcaatgttaatcaaaccaaaaaacatgtgaagacaaagcatgctagaaaactccagttggtcgtaaaatcagtcatcattgcaggaagcagcacccgtgtatatacaaggacttagagtagaaatatacactatcagctataacccaaaataaacactagttaaaaaatgtgataaagttacaatatcgagctttcaccaggctcgtttctccaaattcccaatctttcgagaggattggtcctccacatagagtctattcctatttaattccaatctagttgaaatgaatccctcacccctatatttatagggttcaaccatagtacagggttcaaccatagtacaatgggacaactcagccccttaattttaaaacaactactgatacaaaaatagggaaaaaaaaatactaaaagaccagaatgcaaaataattccatgccaaagccattcccttggtctcctagagtaaacaaagtgtattgtggcttattaataccccaaaaaccttcattttgtccttaaggtaaaaacgtggaaattattctttaatggaagagatatcttcctctgtagcttcaaaatctaagatagagagagagtgccacttgatcaacaatccatatattttcgatttgtattctcctttctattgtttttccctcatcaaaaatccattgaatgtaaaaaaactctcagtgtattatgcaccccattcatacaagtttcttggtcgacaaagatcatcaaactctaaaatcttagcagttgtagtgacactaccagtggcatctttctctcttcaagcagcagctgtccattgcagtgctacttggtagagagcaaatgtgtctttcttgcaacgaacaagtgctttatgaacaatatgcaggggcataagctgagataaagacttagctagtttgcggcatgttatgagcatgttttgtgtttatgggaacactggtgttgtatgggacactgtaagccgaatgattcagagagcatatgccgatgggagatagcggattgggatgacttcaagtcttaagagtaagacttggtgttatcaagtttgttaaaagttagcgagtcattggagaatgcagggttgattttggaaaatagacttgtgacacagttttgagagccgacacaagcaggagccacagagcaactttgtggttttgggtgattgatagatcattgaccacatgaaagtagctcagaggagtgagtatgcagttgttcagaggggccttttgcatgaagccatgggtgtgcggtagggcaggagggccaatgttgagaacttnnnnnnnnnnnnnnnnnnaagagtgcacttggtgctgcattgggtgcagttggcttgcgagcctcacccaggtgggacgcacaaaattttgtcctaccatcaaagtgtcttgctcaattgtcatcagaaggatggtgcgccatagagttggc

SEQ ID NO: 41150 - DNA, 2304 bp, Cannabis sativa
gattattttacaaaaacataaaaagaataaaaaaattataaaaatacggttgtaataaattttaaataattttacaatttttacgattttatttacagaaaatataattttttaatgtattcaaagccgtattttgaactctaaatcttagttgttaaattaataaaattaccactgacttccagcacatatttaatattatgagtattattatttattttaaaactaactatattttaattttttttttgaaatggggtcctgaacagtgggggcctaaggcggccaccccttcatctcacttcaaggtcggttttgaatgtatttgttgttgatttttttttttgatgttgtttaaatgctatttttatatgttttttaatataattttcttgttgttttcgtattaattttataaaacactataaaagtataaaattttacaaaaaaaataaaataaaataatgctttatataattatttcttaattatatatgctcaatatagaactaatgactatatattatatttgttagtgtgatctaaaggctgggatttaatcaaggcattatgatggtgatgatgaaatcatgcactatatagtttaattaattaatatgagaaatagtattaattaatagaatagtaatcataataataataatacgtagaggaaagcctacaaagcaatacaatttatttttccatggtcggtaaatagagacaattaatatatataatgtgccatattatatattatgtattatatattaattatttttcatgatcatttcatttgagtaaagtatatataaaatacagataatagtttacttttagctccataaatttaattaattaattaattagctagaatagagataagaggtatatagtataaatatagagcatcaaattagaaaacgacaaaaaagcatatataatcttttttatttattttactttattattattttttttttttgtaaggaaagcatatgtaatcttaattatttgtactcaactaataaagctattttttttctattaattaattaatataattttctttttgtggatgagataggagcttatatataataataatgtcttttaatttgtcatatccttaatggtgactttggactaattatttcttgtctttattaactaatcaaggctgctacaagtgattataaaatggtgcctgagtttgagattataaaataatttatttataatttgtttaagaagattcttaatactactatagttattaattaagaatgttcaaaatttcatctgcatttgtataaattagattagttgagcataattagatacaatacataaatattaataattaatgggatccataaatacttatatgcaattttatattggaaaatattattgtaaacaaataatagtataaggaacatttcatatcaaaataaatttatgaatttttactatttatgtattgttggagcttgttgatgaagttgatgtttatggtttatgaattgttgttatggagtataagttttgtatttaaatttatgactctccttgtttatgttccatgagggattctcggaattttattagctccctgatttatgttatgattgtttgttacgctataattggttgtttgattattttcatttattctagattgaatattgaggttgttatgttctaatttttattggaagatcattggctaataatcattgatagatgtatttttttagatgttcatttgatttggaagcctaatatattcttcacacttttttgatgcttaaccgttgatgacttattggatccgtagttgaggttgcagttagaattttctgacatatcatctgaatgtaatggactttgtcagatttacctatcagggaataaatcttttttctctaaaaaaaaattgaaatccttaatattaaatgttttgaatccaacttaattttattatcatgattgagctatatgtaatattaataaacatttccacaagtcactttttttttctttttcttttttaaattggatttctcatgactgattcctctttctcatcacaaaagtttgaaaagataaaagtagaagagacagaaaaagtgaagggtattttctattatacttgtttggtacaaaatacaatgagaggaaagaaaataattttctttcatttgtttggtattttaagttaaaattaagaggaaacaactttattttgacatttttaattagccttaaattagtattcttatttattttatatattaatat

SEQ ID NO: 41151 - DNA, 1117 bp, Cannabis sativa
caataacactccaagtggactagcatattaccgctgaaagggggtgaaccactataaaattcttgtgttcatctttagtgaatttactttggcaaaccagtttattttgattcactattgcttgtgttcatctttcttattttacgatcttcttagatccgttgacgaaaaaccgcgccaacagtttggtgctttcattgagagcagtgaacacaagtgttaatcaccttttaccatcatggtgagtacaagacagacaaactatgaggaggaccatgatgaccccataaacaaaggaaacaccatggaacaccatgaagagtaccaacccactgagcccgctggcgaagggacctctcgacgttcgggcaaacaacctatccttaacgatgaaggtcacgtccaagatgcaggaagcccatcatcaccatcccatggtgtacgactaactactaatgtccatgaggtgttcatggagaacgaggcattgagccagtgtttaagccacaaagaagaagaacccgcgggcgtcctggtacagcgagaaaggggctgtaaaatccattttttaagaaaaaaacttaagaatttaattctatttttacttcaatttttttttattttagtattttgaataaccatgatattgtgaattaaggattttaatgacaaataaattttattgtatagtgacaaatacttttaaatggagatgaattactctagcatgtgcataattcttaggaagtaaatagtaattgtgacaaaggaataatttattttgtgagtgttgttgttacggtgagcataataataatacttgtaaaatttctttatagtatagtttgacatatttttataatatggttaatatatatctattatttaaaagattataaaaaataatttgtgattgattagataatatatagaagcattaatttaaattatgatttaaaatattatgtgatttaaagttttaattaggtgataactaataataaaattaaatatctatttatcagttattattatgattattattatatatgaaaaataggtgtgtatttgagaaaccgatatttaggggagggactcgttcaacctaatcggttat

SEQ ID NO: 41152 - DNA, 1281 bp, Cannabis sativa
gtcccggtatgggttgtggtttgagtttgggtttaggtttgggtcctattactgtcccaggtccgggttctagtcccaaacctagttcgattctgattccaggtctgggattaggtttggatcccggtctgggttcgagtctgggcttgggtacggattcgggtcttggcttgggtacggatcttggcctcaagtccagagtcaaatctcaaatcttagtcttgttctagttcaggtcccgagtctttggctaggtcctaagtttgggtttgggtccgagttcgaggttatgtctcgatagtagggtcctgggtttcgggtccggggtcgagtcccgtgtctcgagcctggggtccacttttgggtctcaatctaggttcttggccccaatttcgagtccaagtcccccatctaggtctagatcctttgtccaggtctgggtccaggttactgtttggggcccaggtcccccatctaggtccggatcctaggtccaagtctaggtccatgttcaggttcgggtttggatcttaagtttgggttcaagtctaggtcccagtacgagttcaggtttgactgtgggtccggaaactgatcttatttcaggaccctattggggtccaggtcggtttcccgatgcaggtcccagtcaagctctaggtcccaaacaaagttcttgtctgggcttgggtccgggtttaggtcctgagtttggatctaggttaaggtcttcattcggtccaggtttgggtgatgggttccgatctcaatatgggtatgggtctgggcccatgtctaggttagggtttagggttttgggtttagtgtttagggatttagggtttagggtttacggcttaggtttaggggaaaatgtaaagagtttaggatttagggttcaaggctaagggtttatggtttaagggtctgcttcctgtttcggttccaatttcaggtcacagggtatgatttaaggtttgggtgtcggtctgggtccgagtcctggtctgggtctaggtccgtgtttgggtcaagtccaagtcttcgtcccaaatccaaacaccaaccacatgtcgagtctagttcgatttctggtacgggttagggttcttgtccgtgtctggatccgtgtcccggtccaattcctagatttagacaccgactatgggttgggtccaaccttgggtcttgggtcctaggttccgtgatcaaatcctgatcctaattgtccagttctagctcatgtcttgggtcctcgttcgattctcagatccaagtttg

SEQ ID NO: 41153 - DNA, 1232 bp, Cannabis sativa
gatcttctaatcgacgaattccaatcttatgtgtcctcttctcaaatgttgatattgttaataactttgtaaataagtatgtatgattgacacttgattgaatatgttggacactaatatattcattttcttgaagatcatgagtaagaatttgatgaaaatatctttagttgcatctcctttattatagctttggttgagcattgatgacatagctttattaagtgtaatccatatgttttctgaatatgttatgtcaatgatctcactctcacacattctccacttacttcataatgtgcaaatatattagcatgatttaaagttgactcattaaaaacattattaggaaaactcaatgggacaaaacctgagctaagaaaaagagagtgcaatatatatatatatttcatatttgtaatatttgcaagttttctcgttaaaaaccctatcaggaaatctcagtgggacaaagagtgcaacatgaatatgtctccccctcatgcacatataatccataattattttggtgataatatacatcataagattattgttatcacttttaaaacatcacagtatatattatctatgatcaaatatttactataactctttcaaagtatgtgtggacttctaaattatggatgagggattctaggaacttcaatgtaacgccctactaatttagacacgttacaatatttttctaattactgtgtactactttgttaatcaaagagtttactgaaaaatgtgactaattaaaactttcttgcaacaaacataaacttaaataaatacacatagatacataattttgagatcctattttaaagttacataagtttacaaaacacttgtacaccaaaagtcgtcgtctagtgactatcaaaagtgagtgtaaactgtctcgaagacccaaactgaaatgaccgcatagttaaatcatgagaattagcagataattaagaggtttaattattattatgtgattttgtgcctcttagtagaaattagggcttattgtcaaaaatagcctttaggaaaatattttctcaaatacagagatatatttgaatgctagatacattatatatgttatatgtgaatttttataagggtaaatggcgacaaaaacctcaaaacttttattttggtttcacttaacccccaaaacctaaatttgggcggtaaatttcccaatactcgtattttgttagcaatttacc

SEQ ID NO: 41154 - DNA, 2254 bp, Cannabis sativa
  modified_base (35)..(76): a, c, t, g, unknown or other
cgctcttccgatctttagaaagttcatatttaggnnnnnnnnnnnnnnnnnnnnnnnnnnnnnnnnnnnnnnnnnnaaataatttccaacacctttttctcagagagataaatatttggaataaatagaataccaggtatcagcagggttgtggttttacaccattttacccctaggcttaaattgcttaagttataagttgcaatggcattttggtaattttatttggtgtgatttggtggctgcttgaggtttggacagctggctatttgtttattcagtttgattttagtggagttagaaattattcaattaagaaattagaaaaaatcaaaaattcaagataaacactaaaacttcatctcccctcttcctttgtgttcgaacacccacaagaaccagaaagaaaccaacaactttcaccatttttactagaatttaacaagaaatcaagggggaatcaaattgaggtaagccctagcactttaatcctttagttgttcaagcttaagtttagttattgtgtacaattttgtgaaactgtggctgttagggtttgtatgaactttagttcaatttctaaattcattttgagttaggtttaagttctagctgctggtttaggggtttggtatggtgaatgcacaagttcgagtttgaaaactcaagcttggttcatctatggcatattttgattctgatgtatttctgaattctattgcttggagtatgttgtttgaggtcattttaggtgttctggaaggtttggtaaagtttgggcacgaattgagcaagtttcaaacttgtttgggttacctggtgcaaaccggttaactagaacaggtgcaggttccctgaattgttcaattcgtcaattcgtgctattttaaaagccttggttggttaaatccttgttaattagggtactatggtattagtagttaatcacagaacctttagttaggggtttggctttcccggattagggttttggcatgtcatttacccgtatacgtgaatgtgactagggcatccatccaacgcgaggtattctgttcgggttagccaactcaattgaattaaaaaatgaggtaagaatagcgtagaacatattatagatatgtgaatttatgtatgtgtgatatatatgcatgctgtgtttatgatatatatgtttgggagatatcatagcgacacaaccattgtgttggttcagcagtacgggcatctaactggttaagagtgatattcacctcagaaagtattaattggcagtatcatagcgacataaccattgtgtcggttcagcaatacatgcatcgtactggttaagagtgatatcatggccaattatacttttgggtgctattgatgctatcatagcagcacgaacatagtgtcgatcctgcagtgcaaccatagtgcaaatagtggatgatatcatggtcagtagcattaatcgttaagaacgttcttaagtcatctgataagccttgtggatgggtgtatgggctcctagacacaagtcgtgattatatggttgtatgtcttttactgagttcacagttgctactttcatgtgtaggtaaaggtttggtgaaggctgaacaggagtgagctttgggcttggatgaagattgtacatgtagagacgatgcgacctggagtgttcagtctcgggacatatgaggtttaattttgtagtcactttgtgaccaaattataaatgtattttgataatgtttgtaaaagttttaatacggtatctcgacttatgtaaataaccctataaaagtttgtaaggtttaatagttaaatcaaaagttttattttgacatgattttcaatgaaaaccctttgattagcaaaggtggcacgttaattggaaaatcactgtagcgtgcctaagtatcagggtgttacattattgatgttgtggctagcctagactccggcgatcccaatctaacgacttcaaactctgctccacctgctcctgcacatctatagatagtatttttcacttattagtattcaacatcatgtttgtgtaatatagacaatattttcatgttctgtagggcctgtggccttttacttttagaacactacttattttcatgttttgtgtggcctgtggcctttttagagcactacttattttcagtcccagggccttcatgttcgtatctttggcctataggccctctatttttgaacactactattctttggccatgttgctttttcatca

SEQ ID NO: 41155 - DNA, 1643 bp, Cannabis sativa
gcgagacgcagacacttggaagttgtacgtggatggagcatctaacgagcatggctcgggtgcatggatgatactaattttgccaaaaggctttaagtttcactatgccttcagatttcaattcggcacttcaaataacgaggctgagtatgaagccttgattgctcatttaaagataactgaagtgttaaaggtcaaaaatcttatatgccatagtgattcgcaattaattgtaaatcaagtcctaggggaatatcaggctaaaagcttaaaaatggaaaaatacctagagaaggtttggaagaacttggaaaagtttgattattttaaaattgaacaaattccaagagaacaaaactctaatgtcgatgccttaggaaaactagcctcgcagaacgaacttgatgaattgaacttggtaccggtggagatgttaaacgagctgagtaaatgtgaaaaggaagaagttgagataatagatagctcacccacttggatgacacccatagttaattatcttctcaacgggcaacttccaattgaaaaaaatgaggcacaaaaactcttgtattccgtgcctcgctacacgatagtagaaggcaaattgtatcaaaggggctactcaatgcctctcctacagttgtgttctccccacagaagcaaacaagattatcaaagaaatccatgaaggattttgtggagaccatacaggttggcaaagcttgtcaaagaagataattagacaaggatactattggccaataataaataaagacagacgcaaatttgtcaaaaaatgcgacaaatatcaaagattttcacatatacctcgcgtaccaccaacagaactaagaatgatgacctcgccttacccatttgcaatatgggggattgatttgattggggcactccccacaaggcgaggaggagcaaagtacgtagtggtggctgtcgacttctttacatagtggatggaggctgaacctctagtttccataacctacaagagagtttgtcgtcaagaacataatttataataagtttggaatacccattaagatagtatccgataacggaactcagtttgatggagagttattcattgagttctgcgagaggaacaagattattaagagcttctcgtgagtatcaaggcctcaagcgaatgggcaggtagaaactgttaataaaaccttgaaggatactatcaaaaagaagttggacactgcaaaaggtaaatgggtcgatgaactaccttaactactttgggctcacagaacaactgagaaaacagtaatagggcattctccattctcactgccatttggctcggaagcaatgctgccaataaaagttaatattacgaaccaagaagaaaaccaagaactcttgaaattgtccttggatctacttgaggaaaaacgtattaattcgcaaatttctaatgcagcctatcaacaccgagttacgagatacttcaacagaaagtgacgaaaaggctctttgatgtcagtgatttggtgttgaggctagtgttcgtaaacacgatagatgcatctgcaggagtattaaacccaaattgtgagggtcctcatgtgatcgaggcaatagtaggaatcagggtttataaattagctcggctt

SEQ ID NO: 41156 - DNA, 1696 bp, Cannabis sativa
  modified_base (43)..(54): a, c, t, g, unknown or other
  modified_base (252)..(260): a, c, t, g, unknown or other
  modified_base (1103)..(1103): a, c, t, g, unknown or other
  modified_base (1248)..(1276): a, c, t, g, unknown or other
  modified_base (1491)..(1493): a, c, t, g, unknown or other
aataataattatttgatgaaaggttaaatttctctcttttggnnnnnnnnnnnnagttagggggccaatagtagtggatacgatatactgaacccaatcatccttcacatgaatcaactgtaaaaggcatatttgtcttatttaaataattgtattaggctaattatattagtttaccctaattaaaaattgattagcaacataattaattttaaaatatataaaattaatttttcattagattattttaannnnnnnnnagaaaaatacacttaatttaatgaaatgaattctatatagtaaattctaataattaatttatattttctattatttaattaagtagaaaaatatagttaagttgaaaattaatttataattaattttagatcaacttaaattagaatatttttcttagaatttaaattagaattaataattaagttgatttgattcaagatacttaattatttatttctattttaagagattaaattaaatagtaaaacatatttaagttaaaaattaatttataattaattttggaccaacttaaattagaatatttttcttgaatattaaactagaattaattattaagttaattttgttcaagaaacttaattatttgtttctattaataaattaaatagaaaattacatttaagttggaaattttaaatttcaaatcaacttaaattaaaataatttttaaagtatattttattttaataatcattttgtttgtaatttttcaaaatatattttattttaaatgtagatattttaaaaaatttaaaattagattacaattaaaattaattttatatcaacttaatcaactaattttgttcattaatgatttattaaaaataaatagactaaaatgtattatattttaagtagaaaatcaataattagtttatgaaatatctagacaattattttctaagtagacttcgatatttttctacatatatttaattaaatagaaaattaatatttgagttgatttgttcatgatatttaaatattatatatgtttcaagcaatttaattaaatatgaaaattatatttatgttgaaaattaatttattaattnattttagatcaacataaattaaaataatttttcaagatttattttattttattttaaagtaaaatttgaaaatgtattttaaatacattggaatacgaatttaactaattatatatttactgaaaattaaatttgagttaaaaannnnnnnnnnnnnnnnnnnnnnnnnnnnntaaattaagtaattttcataatttttattgttaatttaaactaaggattttatttattttcagatctacctaagtatataattttataaaaattaaattaaagtttatctttagatttatctaaattagtaattttaattaaataaatatatgaattttaaaataaatagattaaaatgtatatcaaatgaaaatataattctttaaaataatgnnntttagtttaaggatattcgatctccattgttggttctacaaggttcttgttttaatgagatttatctctagtagatgttcattcataagcaatttaacatcgtagaatctcgaaagatgagtattattgtaaagcttttgttcttagtaacgatcgtcccaatagtgactactaagaacagggcttacaaagtatgaaacaat

SEQ ID NO: 41157 - DNA, 1493 bp, Cannabis sativa
caaaattttgaaaaatttaaaatattttacaatataaaaaatggtattcaatagtctattgcacacacgtatatatatatattaaataaaaaagtcaaacatgcaataaactgcttgaactctgctttctgtgagttaattttttttttgaatttttcaaaattctacagaatattttatataaatgtacacgatcattaaaaaaaattaaacaaaaaaatttctcaataaccaaataaaagtgtatcgatgcgcttcttttttaaggaaatgtattgtataattttctaatagctataatagctttaaaaaaaaactataaatacttaaccaaattgaagaagaaaagaaaaataaaaaaaaaaattatatatatcttagattttcgaaaaaaaaaatgaaaatgaattattttttttatatatattcactaaaggacaactcattatatatataggtttacgttttgaatgaatagtgtatatatgaattctttttaaatatgtaagatttaatattttaaactatattttttttagatgagattgaatccatccaatattttagatctagtatgtattagataaaatattaaatccattcaattaaaaaaaaagagtaaattaattttcatatatacacctagaacaatataaatttaattacttctctaaatttaaatttagtgtattgtttttcatgagttttgaagtttgtttgggaaaagttatatgatcttcttgttcttattttgacacgtgttaaaatgtgtagttctctatataaaattgtactttttagatatgttttttttttttttgaaaagaaactagtacgtctattgataaaaaagttagatctcgcggttattacacaagatatttttcgggataaaggatacataaaaccaaccatactgatagtgggtaaaaagtctactttatcatattatgggcaacaaaattacatcatctactaatacaagaaaataaacatcccaaaaaatgaggagaaagactattacaaacagaagagtaattctcaacttcccatggagcctccttgtcattgagagaattgatcattacccttaagtcgctctccacaatgatgaatctgtaacctttcgccatggccatgtcaagggccaaacaataagcagccgctttgccgtaaagggcattagaaaattccaactttgtcgttcatacccaagccacctcgccttcatggtttctagctgccaccgcaatacgcatgattttcaatcccaatttaacgtcacaattcagtttaaatcaatcttgagggaggggggacgccaagcttccaccaagattggagtaggattagggaggagggaagctctataatctgcataagtatgataaatataatcaatatagcactgcacattatccaaattattattatgtaccttatcattttaaatcatcgagacaatatcaacagcaattgaagcctacaaaaaa

SEQ ID NO: 41158 - DNA, 1154 bp, Cannabis sativa
  modified_base (345)..(354): a, c, t, g, unknown or other
atttgagtttctatatgcacttgttaaaaaacaagtgatataaatgtaaaatgtagttcatttttatagaaattttgaggaaaaatctttctttcatttaatattgaattaaagaataaaaaattcaaagaatgatttggagaaaagaaaaaggaaaatagaaaaacaatagtggtatggatttacaaaacttttttgtgtgtgaaattgtgatgcaaataaaaagtgaactaaatttaaattacaatatagtatgatgtaaaatttatatttattattatagtatgatgtaaaatgtacattataataaatattatatattatatttattattatgtcattttnnnnnnnnnnttattaaattttagttaatatgtttttttattttttatttttttttaaaataattgtctattaattagaaaattagacttcgtgatcattatgaaataagtctttcggaatatgagaaataagtaagcaaccaaaccgattgtaggtgaaggtccacttaaccaaattatgggcaacaaaattacacattatgtgattacatgtaaacaaacaaccatcaaaatgatatattaaattttgaattaagatttacaattatgcactgaagtacaataataaaaattaatgtaaaaatattccaaaactactttttgtgctaaatatagctaaactttacatctccaattggagatggtcttactctctacaaaatttgtataagcattgatattgggcacctataatgtttagtacattctagacgtgtttttgtgcaattggttagaccatctccaatgaaagatttgaaatttgtgtaaaatttagtacaaaaaataagtttataatatgtttggcccactgtttataattgtactttaatgcaccaaaattattattttttattcttttattatttaaataatagtaatatggtaaataaagaatgtaaagtttagtaaaattcaataaatcattataattagtggcattatagtaaataaaaaaatatggttaatagtggcataagtacccaaagttttaggtttgtaagtggtataaaccaaatgattttttttttttttgaaagaaagtatgttatttattcaaatcaaatcagctgttacaggagcactaataaa

SEQ ID NO: 41159 - DNA, 1217 bp, Cannabis sativa
  modified_base (193)..(197): a, c, t, g, unknown or other
ttatgataaaaaaatacaagctaaattattatgaataattttttttcttagaaaaaaatatattattaataattacaaggatgtagggtggactttccttctatcttccaattttgtaacaaagcattttttattttattttaaaattatcttccgtagctcacaaatcctatttattattattattattatnnnnnttattattattattattatgaaatcatgtgcgttgtacgtacgctcttgccattaaccttttattcccctcttatccaattattatctttaatttatttattgaacaaagcataatttttttgaaagaaaatgaataagccacttatataaaataaataaatattgtatatatatattataaattagtcaaaacatgttacgtatacataataagcttattgtagtcaaaatatgttaaccatctattactattaaaataaactcataaattgtatttgaagaaacaaatgtaattatcaatttatcataagtgggtgaaattatgggttttaattcattttatgtagtgttacatatatatatatatatattaatatatattagaccagcatttattaggcaccacccaaaaatagcacggtaaataattacactaaattttatatttagtaatactctattcaaaaataacttttaatttattataaaaaaaatctcaatttaacataattatataaaaataacttgttaattataattaattatatattttttaagtcacatattaaaaaaatataatattatatttactcaaaaataaatttattataatataatattaaggattgtttattgttattgttaatacatcgatattttttggtgttttgatttttttcctactgtaactctatttaattagttataacttctcaattaaaatataatttgtttcatcctaagtgtattcttagataaaatttctactgtaatattatataatcaaaattaaattaaattatatgagatttaatatttaattatattgatattaatatgacactttaaggaatgctagcctgctaggcgtcagtgatacattttaacattaattgttatattattttataatataataagtgtagattaaaatgtagtaatatatattattatgtgaataatatgtattaggtgtttggtaaataaattgtgtgacatataatttatttaacctaaaa

SEQ ID NO: 41160 - DNA, 2541 bp, Cannabis sativa
  modified_base (27)..(29): a, c, t, g, unknown or other
  modified_base (428)..(433): a, c, t, g, unknown or other
  modified_base (489)..(491): a, c, t, g, unknown or other
  modified_base (1033)..(1044): a, c, t, g, unknown or other
  modified_base (1355)..(1367): a, c, t, g, unknown or other
  modified_base (1510)..(1513): a, c, t, g, unknown or other
aaaatagattacattgaaatggagttnnntttagggcataaaactcaacacgtgagttgttggaacaagctacaaattaacttttagagacagtttgtcgcgaaaagaaagataaacctcgaagttagtgccctaactaatataaataattacctacataaactttcaaaatgttcatcaaaaggtttaaggaggaggcctccaaaatgaaaaaaggtagatgacgggcaaaagttggctctattgcaggcatggatccgaataggtactcttttctagaaagaaattcaacaagaaggtgtagccagtttgtaagacttccataatcgagcccaaaaatacatcaatcttgaataagctcagatcaccgtgtttggaggatactgttaaaatatattttaccggaatttagatttactaacaagtannnnnnttaacatcctaaatatgaatttataaaacaacggaatttaaacacatataaagttnnnaaaccttacattgattgcaacggaataatatgtctcctcccacttagatctctaacccttattcctttctgtcgcagagtattgttaagatctgagcccgattttccttcaggttattagattcttcacagtcttagacaatatgattgagtactagacttgctatgggtgggcatgcactcactcactataggctcaaaatttaatgaagagcaatgaaagagattttaaaatagaagaagaaagaaggaggtctcaagaactctagttgtctgacaggatgtacactaggttataagagttggatgagaatgagaccatcctagtccttttgtactatttcacctaggttaggatttaaattatatggaataaaaaaaagataaaataataggaaaaatagccctaagtggccggccatatagatgtgtcccactagttataattttgccattttttcaactacttatcttttattttacaaataccatattttttaattttaatcctataaataccaaaaatatttatttaataattannnnnnnnnnnnaaataaaattatcatttatattttttaataaatagactccacaaagtctcttaattaacaaataaaccctacaacctcttttcttcacaattaagtcattgctgagtataaatttataaataagacatagtctaactttagaattataattaattaattaaaactaattaactgggtcttacaagtagtattgtctcaactagtatgggtgttgtgatattttgcacacgcaagtgcacatatcgtttacaagtactagactcaacaagagtgaggtcgatcccatgaggattgtagttaagtacgttaannnnnnnnnnnnncttctatttggttaaataaaaatttagaatagcttaaaactagaaaataataaagacagtgaaaggagaaacaatttaaggaaattaacagttcataaaaactatggcttcgatttcaattgtttctattgattatggcctannnngattatctccctattatcaatttctatgcaatagcagttttactaatgtaatttatagtcttctcagatacataaatctcaattacatgcaaactttctattcccctgataaatttaacttgcaacatgcattaaacacagaaactctataagctatcttaaccatataggtactctcgtcctatatcaaaattcaattctatttcactatagtaattgacactcacttctcagatctcgcatcaaaatcatagacagttaattggtgatcagataattaaaagtagttaagcatcaatgaaatagaatacatagaaattgggaggaaaataaatcatattaataccataaagcaatatcaaaaaatattcatctaaccctaataaagtgtttagctactcatgtttatgaaagcaaaatcacacatattaacttaagaaaagagaagaaaatagagaagaaaagaatgttgaaaaccctctgaaaaatgcctccagtattacagttgatctctaaaattcgtgctctatattctgttgtttgtttccctccgaattgtttgcctcaaatcaactccagttcaccctttatataggctttcagagactaaaaaagatataaaaatgcatatgttaaatgcctattcgaattaggaaaccacaaaaacccacgtgagagaaaaagacgatttttgggcaggttacggggcgggtcgcgcccatgttggagtttcaccagatggcttcgtttcaacgatgttttttctacagcgttgactgacagtattttggctataactctctcaatattgctcagaattggacaattcaagatgttccggaaagataaaagagatatctagaacttttatgtcttgactttttccaaaatctaatatgaagatagtcgattttaggcatgaagtgtcaactttattttcttgtacaattttctctattttatatatcgtctttttttgagagttttttttttatcttttttctattttattcctttgatattttcta

SEQ ID NO: 41161 - DNA, 2362 bp, Cannabis sativa
aacagatctgataacaggcaggatcattttgataatcgtcctatttgctctcactgtgggatacctggcgacacaatagccaagtgttataggattaatcatggctaccctccttgtcaccgtttgtttggaaggtctcctagagaacctcctaaaccaggaagtcaacaagaacgttcatgagccaatttctcttctggtggcagcaattttaatgaaggaatgagtgaggaacaaaccttggctattcaatgtcagaggctcatggctatgctaacacaaaagatgcaagaaagttctcagcaatctcagcagcctgagcaacctgttgtgtccaacatttctggtaatccctatcctatttctaaatttagttggataattgatacaggtgctacgcaccatgtttgttccaatcctaattggttccattccattcaaaagaatactagcttaacacatgttaaattgtcaaatggaactaacattaggatatcattcataggcactgttaaactgctcaatatcaccctcacaaatgtgctttgtgttcctgagtttaagcataatctgatttctgcatgtgccttgtctgattcttgtaattattctttcatatttttgcctaaacaatgtgttatccaggatatcaccaagaatcgtgtgattgggatgggtgaaaggattggcaacctttattacttgtctgaaatcgatttccttgttatttgttcaatttctgattctaaaatcaatgatgacacattgtggcattatagtctaggccatgcttcttgtattaaaaatcattctttgaataaagccttacaatttcaatactcacatgattccaattttcattgttctatatgtcatcttgctaagcaaagaaaattgccttttgtttccaatcataatatttccaagcaatgttttgatctcattcatattcacattcggggaccatatcatattcaaactattgaaaggtatagatactttattactattgttgatgattgttctagataaacatgggtcaatcttatcaagaataagtctgatgcaaaaatagccataccagcctttattcacatggtcaaaacccaatacaatgtccaaataaagggggttagatcggacaatgccaaagagcttcaatttcctcaacttttctcttctcttggcattgttcactatcactcttgtgtccgacggccacaacagaattctgttgttgagagaaaacatcaacatttgttgaatgttgcttgtgccattttgttttagtcacatgttcctttaccatactggggggagtgtattagcactgcagcctacatcatatataggactcctacaaccaatctcaagcataaatccccttttgagatcctaaattttagagcccccaactatgatcatcttaagatatttgggtgtctagcttatgcttccacgcttgggggagctagatcaaaattttcccctagagacattccttgtatttttctaggttatcctatgggaatgaaagcttacaaattacttgaccttaatactaataggattttttgttctagggatgtcatattccatgagcaaatttttccttttcttaaaaatggtcaagtgtcacctgatttttttgagatttttcctgctaatgcatctcaaaccacaactggtttttcccacaccacttcggatgcacagcagcctactccttccagtttcactcctcccatagttgatcatgatgacattgtttttaataatccctttgttctttagagatctaatcataccagacccgtgcctcctgttcttcaggatgatgttcatgatttatcacagcagattgttaatagtaggcctcttcgaaatgtccaaaaaccctcttatttgcaagattaccaatgctatttgtccacgaattctgttcacacacaagagctcaaggcttccactaactattctatttttgagattgttgattacagcaggttatcacctaaattttgagtcattgtgttagctatttccagtcattatgaacctgatcgatcatgccatggacattgagattgaggctcttaaagctaatgatacttggattattgttaccttacctgctggacaacatgctattggttgcaagtgggtatataaaatcaagtataatgctaatggttctgtggaaaggttcaaagctcgacttgttacgaaaagatacaatcaacaagagggtgttgattatgatgaaacctttgctcctgttaccaaattggtttctgttaaactagttcttgctttggctgccattcaaaggatgggttcttcatcaacttgatgtaaataa

SEQ ID NO: 41162 - DNA, 1880 bp, Cannabis sativa
aacagtgtaagagaattgtaacattaggtatttttgcgtctaaaaataaacattaagtatttaaatgtataaaatctgaaacattaagtatttatgccgcaatttaccattgttcaaatatatacattatcctatttttaggattataaattattcaaaaaatttaattttttttacaaatagttttatataaaaaaataaaaacaaaaataaactcctaaaagatgtactatatgacttatcctgtttttaattttttgaaattttaaattatcaggactgattatattttaaaaaattaatttttaaatataaaaatgaaatttcatataaaaaaagttattttttttctttctttttgaataatttaaatttacttatggaaaaaatattttttatgaaggagattataaaaatagtcatttagtacattgtgtttttataaaaaacaatatatttgttaccttatatttttaataatatttaattgttatctcatgtttttaaattgtacatatttagtatcctagtaaaatttaattaatacaatttaatcaatttaaccaaattgtaatcaactaattaaatttgaattcaaaattcataaaattttagacagctaaattgtattgataaaattttatgaaaataaaattaatttaggatactaaatatatataattttcaaatacaagctaccaaataaatattattaaaagagtaaatactattttggaccccgtgttttacaaaagttacagattggactctctattttgttaaatgacaaaattgaccctgtattttctaaaatggtacaaataggaaataggatcccttctcttctctctctttctctgtctgagtctggaaagagaaagaacgaaacgcaccgtgttggtccaactaagaaaggggttgagttgagtgtgcctttacattttccaatatatatttttatattttttcagaaatgagaacctgttgttcgcgccgtcatttttcacatcaaaattagtggattaaaactcttaggagaattctaccattctaacttaaaaaaaagagtatattgatatacctctaaaccagtttgttttaaatgaattgtgggtaatttttaagttggtaaggctaatttatttattaaagagaaaagttaaagggtattagtggtgtttatcattcttttatgtgtaaataacgctattggtcaaactaagtattgagtctcatataatttaatataataaattttaaagagtaccgctagccaatcgcaatgcagtatatcgagaaggtgttaggcatcactggtgccctaataacaatgcgcttacttttagtttgatacgcttaatttaaaaataatacgataataatttatgtaagagtatatgcttttaaatttataatatgtaaattatatttttttagttaaataagatataaatatgttaaattccacataaatatgttataacaagattgtaaacatgttaagttttttataaacatgttaatgagttgataagttaactaaaattaagcatgattttttatataaacaggataagtcaggtcaatccatttaaaaaacgattgagtttgggttttaatttttgacacaattaataaatgggtcgggttaggtttgatatttgtttgtaaacctaagtctcgacacaacaccaacatgatcgacgaacacaaattgccacctgttttggcatccgagacaatttattagttcaattttttttatagtcatctacattataattatttaagacatcctataaacttttaaaaaatttaaaaaaatttaatacgctgaaatatgaatatgttgcaaacgtgactcttttatttgtgtgaaa

SEQ ID NO: 41163 - DNA, 1618 bp, Cannabis sativa
  modified_base (64)..(73): a, c, t, g, unknown or other
ccaataagacagtcagacggactcactaggccttgaaatagactaacgagtgagcctatgggcnnnnnnnnnnatcatcccgcaaccgggtccgagcccagccagtaagccaaacaggtaaaatcaagtaaatattaaaccagtcagaaagacagttactactccctgagaattggtgaagcaaccaacttgaacgagtccaacgggtgacgtggacagagggcaacagtactgagaacacacgataaaaggaaccatacaataaacgctggataaaaaacattcaatactcacactactcactgactcaagtagacagtcgccctttctaagcttttctcttaagcctcaccatcggagttgctcctttagtccgtctgtccgcttgtccactcatccgtccggctaccatttatattacatttattttccgttattgttattttttactacaattgtattgacttgagcgtcggagtccctttggctgacaccccaccggtgcttccaattgaaattttgtctctctctttgttcttgacaagtttttcgtgcccaaattccgtaattatagatttcaccctctacaatcaccacattgaacatttgtattatggaaggaacctaacaataaaaattgtaatcaataatgcaattagaaaatatataataaaaaaaccaccaaataaatttcataacaattataataaaatatgaatgtacctttttaggagatgtattctcttggactatttttttggaaaatttcatttaacatacataaaaaaacccctatttcaaaaaaaaaaaaaaaaaaaacactctcaattattttgtacaaaataattctattaacttcccactttaccgaaatacctttattattttttttttcaaaacctaaaaataaataaataaaataccatttttattaacatccccccaaccaccacatcaactaactcctcctctttctcatctccattaatggttcttctccattttttcaaaaaaaaaaaaataaagccctcctcctttctctctagctccaccgcctacaaccattgaggacgtctagccagctagtcacaccagccaaccaccgtgaaggacgctgaccatcattcacacctcattccgaccaccgcgccgcccctcctcggcctctctttcgttgtggattaatgggtaagtgtttttttttaaaacatttattaaataattgtaaaagtatagcatatttcgatagatctatggtgttgtttgtagaatttttgtcaaaatcgcgagatctactttttcagagtattctgggttttctatttttctcgactggttatcgattagttcttgaaagcttctcgaagcagatgttctaaggtcagggatgacctttctcgaatgctttacgattggttcttgaagccaatatttatcgatatgagtcttctaggttttgtatttttctcgactagttatcgattagttctcgaaagtctctcgaagcatatgttccaaggtcagggatgaccttcctcgaatgcttttagttaggtttttgataggttctcgaagccaatatttatcgatatgagtcttttgggttttgtatttttct

SEQ ID NO: 41164 - DNA, 1046 bp, Cannabis sativa
  modified_base (624)..(633): a, c, t, g, unknown or other
atttattaaattaaaatgtgttgaactcaatattaaaatgtaccaatatatgccttgacaatttataaaatcacttatgaataatggagttgattgagattgaaatccattttttttaataataaacaaactttcattgaaaaagaaaaattaagttgagtacgtcataaataatagatggaaattttttcatccaaactaactcactattcatttaaaatatgtatacaactaattcatgcatagtcatatttattgaataatttatatgaataagggacgtcttaggaaaattgaacattatactaaaaaagaacatctaaaaaagagcctaaattattataaaaaaaatctcttaaaaaaacagatatcaaaactaaataatcaggatagtcaaattccaacaaccgtgtaagagaggcagatattaataggggcttttacaacacatactaaaatttcaattttttttactttttttattgtggggtagaattttttttaaaaaatactgtgtaagttttatactgtgtactgtgttaagttttcatggttattccacgattattatttagttgtttcgcttgttttaattgttttattttgttgttttacggttgtttnnnnnnnnnncagtatttttgtaaaaaattccgctccatagtaaaattgtaaacttttgtcataccatattaatatttctattttaacgtgtatcgatgtaaatttttgggaaatttgcggcataaatgctcattttgtttattttgttgctaataagtacccaatttttaaaaattgtggcattaatactcaaaatttcactttttaaactctgccgttagtacccacttaacagagtaatataaggacacgtgtactgtcctcataatttctcttttttttcttcacctaattaattaagaaaatacataaaactaattaaaataaaaatatacaaatcaataatggtatgataaaaaaaaaaacatccgctagtacactcctccaccatcacatccgcgttgagggtccggcccacaaaa

SEQ ID NO: 41165 - DNA, 1215 bp, Cannabis sativa
  modified_base (884)..(905): a, c, t, g, unknown or other
ttgagcatttatttttcatatgctcggtgtcagcacaatgtttgttggaagtacaacaatggctgcaatggcgctcacgaggcaattcaatgaagcagctggtgagagggataagaacagagcaaagctgtcaagtttcaggaaaaaggttttctcagcagttattgcatctttgatttataacctttggaaagcaaggaatgaacacatatggaacatgaagacagtgagcataaaccagattattcagcaaacaaaagagatagtaaggacccgtgttttggtgctttggccgaaacaaatcaagaggaaggatcaagattggttttccaatttataagatatagtaagtagcatggatgtaaataatgatataattatatacggttcatataggtccttgtttctatgacgatgctattttgtttgtacaaaagagttttatgagcgatacaactatttgattcataaaaaaaagatgcaaacatatccatgctaaacaaagcatataagttggcaattgtagagatcagtctcgtcgcctccaagacgcaaagacaatccctataatcatgggattgaataagagaataaaggaaacataccttattttctcattccttacattgtaattatagaattaatgtagttttctattttattcattatagattaaggaaaatcattctttatgtattaagcccctataaatagtggcgtaatctcactatggaggggaatgaaagaattaatccagaaacacactcaagagagaatagtgatctaagagagaaaataactcagagatccattgtaagagctttagagaggaagaacacattattccttctgtcaagtaaatacaaatacaaggggagtaggcnnnnnnnnnnnnnnnnnnnnnnaacctctttaaaatctggtattcttttttactttactatttttgctttcttttatttatcttatttaatcgctttattttgactcactattgttggccagaagcgaggtcaatattttgatgctttcattaagagaaaaaacacaagcttttgtcttgatcttgacatgtgaacatgatggttgtacaaactcaaaggggaggccttactgatcaaggcaatccaatggtgacagatccaaacgtgcaaactcttggaaactcgagaggaccaccatggactaacgccgaacaagttaatacacaaccac

SEQ ID NO: 41166 - DNA, 997 bp, Cannabis sativa
  modified_base (46)..(49): a, c, t, g, unknown or other
  modified_base (956)..(972): a, c, t, g, unknown or other
cttaactttatatgtgttttccttttatcgttttagaagttcatannnnggttgttaatcaacatacttgtgaatagatctaagatcctggtaaaattaattccaacactgccacccttagagaaagccacatattcagcaattaggaaataccaaaaattcccttcaatctaataagctaaacaaaggtaagcctaggggtaaaatggtcaaaagccataacccccgcttagacctgacattctaaatatttcaaatgtttgtcccgctaggaaaaaggttctaaacttactcatgtgactcaaacggccatccattgcatttttcatcgtcgctgagcaaaaattataaaaaattacataattcaatttaacttaaataatactcttagagtttaatcaaatctccacaattgagaaatttcaactctaatgcccatttctaataatgagacccataacataataaaataaaacataattataaaaatgtaattaattaatactaattgtctttactaatccatattcatgcagtcattatagctgacctctctgttgcggcgatccaactgtgcttagtgggatcgaagaatgtactctcggtcatccatccacatcaggaatttgcgtctctactgagcgaaaatatcgcaatcagcaatgtgtggttcttcagttaggctagcttggccaacgaattcttaagtctgactatccaagatcttctcccaaatccacatgggactcaccaatcgtaggctcgccaactcctggtcctgtgtctccaacgtagtactggagacgagatcctactactgtccctgagggctgtcgcccatgagtccttccttcagtgggaggcgccagcgaaaggtccacccttagaggtaagggcctgctattctgatccactgggataatggtgttggaaagtattttaccaggatcttagannnnnnnnnnnnnnnnnttattaacatcctaaataagaactt

SEQ ID NO: 41167 - DNA, 1915 bp, Cannabis sativa
tatataaaaggatataaaaaaaatgggcctttttaattttggggccttgtgcaatggcccaagctgctcaatgcttgggccggccctgcacacactactacaaatttgaactttagaagcagtttttatgaccttttagcattggttttgacaaaattcgttaccgacactgattcaggcaacattatatagggttgaaaacaactaacgctaaagtgtatcctatgacgtcagttatatacaaatataattgacgccatatgcactaataaccaacgttaaaagcttaaaaaccgacgccaaattcataataattgatattttcagtttaaaacctactattaattcaaaaatatcatttatttaattattattttttaatttattataaatattattaaatattaaatatttaatttttaaaaagctaaatcaaatattatttgaaataattttatgattagccagtatacttaaattaattttatcgatgcaattaaaaaaattacaattatattacaaaaaaaaataaaaaatagtccatgtgttaacaagttaataaatctaattacaacttaacctaaaaaaataagctaggaaaaaaagatcttatacatttcagcatcaatcgcccaagccttcgtgaatcaccgccagcaatcgttccagccattgtctctgtaatggtagcaattcaatttttggattgtatgtctacttttccccaaattataaaaagaagtaaaatttatattactttatatatattattctttgttaatataataaatacgataatgaataattaaaacttacagctttttgatcgtgtttataacagttagggtttgcctgtgcgacaatgacagtcatatgtatttcaaagcataaaaaccacattcttagtttttaggttgtcttggacaatttgatagtaagattttgggccacaacccaagatatgcatttgatgcccctataatctcgtatgctcttttttaaaagttatattaatatttcaattcatcaacatcaatatatataacttagttaattaaaagatttgttacattaagtgttgatagtgagaacgcgacaactaagttagtagtcggaaaatgcaaggttacccaaaaatgtgttaaagataagataaagatgacagtacaaaaatttctgaatattcttctctatattgaatttaatatctgagttacacaaaatgatttttcaacccccctcacatctgagatgggggtatttatatgctataatggctgcgtgtacaaagaagtcccatgggacaagatgtcgctttcccgttgcattttgtaggtgctagaggtagcttagcaccacgtacccttgtctagtgtcatatggtccgcagttgcaggctataggaggatggtctcttagtacatgcacgtgatccctagctacatgtggggtggtccccaagtataggtgttaggttatatttagcctatgtttcgggtctattatgtaagcattttcttggttattggtgtcttttgcagcaattttatgcttgattttccttgtttcaggttcccgaggtatcaaagttcaatttcagtcaatggatgaagagacgagacaaactggtgaaaaatcaaaaaaatctgctcactcggtgtcagtagtcgcgactagccagaagccaggtcgcgacccttttctttggtcgcgaccatggtcgcgacttgggagatttggcagaaactttgtttttcgagttttgcctttagtcgcgaccatcctttaagttggttgcgaccaggtagggaaaaacgctgttttgacctaatttagatttttttctcaattggaggcacacctttcatccctatataaggaatacgactcagaaggtcaaagtaagcaagaacag

SEQ ID NO: 41168 - DNA, 1530 bp, Cannabis sativa
atggagtattcataatatctggattgtgcggctcgagctcctcgtctgagtcgtatctagattgttttcttaattcccccacttgaaatctctcgaacttatcctccaactcgtctattcgcaattggataggatcctcttgctttggaccaagatgttggcgaagatcagattttttctgattcaagtgctctcgcagatccagctgggagtaattactagcagaccttgttctactcatagactgtgtcttacttacggacctcgtcttgctcatggacttcatcctcatactttcttgatcattagcgcgtcgagcaatctctcctcttcgagttgatcgacagtgggtccttgagtgccccgaggtcgaacttgcttcttcacaccctattcttcctccctgagcatggtttgttgtatttccccccactgggtttgtacaagacctctctctatgggttcgggaagaacgctggtgacctacgttccccgggttgtatcccagggtcttccttatttccatgaggaatttcctattcattggtttctggttgcctcccattctcttttctatgacagggtttaggctgatcatttggacttttaggggcaacctcattatccctaggttgttcttcctgagcgatttcccgtctcctggtttatgagcaacgaggtttgcctcgtggtcttctcactataggaccaggttgattttgagtgttattcccctgtgccgccctagctgtggctgcatcacattctaattcagtgttccgctagttcgcctcctccaggcggcgcctaagatggcggttttccatttcataattaccttcaattatgggctgagcacctccacgattgggcccttcatctctcactctgggattctgaccattcttatgttgagtcctcctcgaacgtgtcattcatgtactgggaccaacctcaggttgggtcctcctggaatgagtggttcgagtgctggggccacccttaggttgggtcctcctggaacaagtggtccatttagactgtgatttggaagaccttctagagcccatgggctcctttccaggacggtaatgagtttcttcatgcggcgtgtgaacgttctctctgttttcaaccatgaaggagattgttttttatttgtaaggagagttttttgtgagcttttacacgaacgctctcaatgaaagcaccaaactgttaacgcagatttttgttaaccaaatttgagcctgaatagtgataaacttgcagagaaaaacaaaaacagtgaaaagaaaaggataaacacgaaggttttttatgtggttttacattaaaattctgcatagtcaacgagtagtcttattagatttatgatattgttctagggccttttctcttatgaatttttagtccctttttctatctgacttgcctctatttataattacatagtcaggcagttaattatatagttgactgtaatctttacaacaattatccccgcaaatcgtggggtttaattacata

SEQ ID NO: 41169 - DNA, 2201 bp, Cannabis sativa
gcatcaggaacccggggaaagaggtaaaaaaagtcgcaagcatcgccctaccgacttaagacagaagcttaatgataagaatggtgaccttaggaagcacttggagaaaaagaagcaagcaataccggtgtcggagggtgccctaaatgaaggaatttttgtcgaattggcaatcctcagcaaagacatcgctagggtctcacgaaggcaaaagggagatgactcgaagtccgactgtgaggaccgggagccctgggctaggaatatcttggaggcggaactccctaaaaatttcaaaatactcgaaatggaaatatacataggagatacggaccccaatgatcatctttctcaattaaacagagtaatgactgtcatgagagtcagtattgacgcaaagtatttatgtttcttgttaacattaggtggatctgccaaggaatggttcaagaagttagaactcagatctgtagactgttggaacaagctacaagtcagcttttgacgacattttgtggcggcaagaaagattaacctcgaggtaagctccctgaccaacataaaataactaccaacggagaccctgaagaatttcataaagaggtccaaagaggaagcttcaaaaaccaaaaaggtcgatgatggacaaaaattggctttactccaagccggaatccggaccgggattcctttctggaatgagctacagcaggaaggagctgctagtctccaagactttcagaagagagtccaaaagtacataaatttagaagaagagaaaatagtggcttaaggcgggtattacccaatggaagtatcgggatatgcgataggaacgcaacttcctggagctgcgctcccagctgctccacaaacaagcggaatacaattttctgccactccgagatatactcataatctttccttcactccagcactatcaaacttgggggccccaataagcaatccctccagggtgaacacacaacttccaactcagtccacgtcagccacaagcatggcaggagcgcccaagtttctggagtaagaggtcttgtaaaggtagtacgcggtctgaggacaaaaggcaaaggagagggtatgcgccccaatatacacagtacaccgagctcatggacacccaagaatgggtatacttcgcgacttggaaaaatacgcattactagaaacctcttcctttgtatcgagatagttcccgaagagatcccaactgtgactatcacaacaacatcggtcacaccactaatgaatgcaaaaatttgaagcacgaaatttagagtttaattcgattgggccacttgtacgagtggatcaaaaacaggttgcacacctgaacccgacccaaactggagtcccagtgcctcaaggagggcccacagtagtattggaggggcaggtacctccaggagggatgccctatcagtaggcacccagactgcccttagataaatggaagggtcgctataatctctagaggtcctcatattgggggaaccactagaaacgagctgaagcgttacgctggggccctgaaacatgacaatgagatatgggaagtcacttagcttccggctcagaggcccaaactcgtggatcaacccattacttttactgaggaagatgcaaagccagtacgctttctgcatcatgaccccttggtcattgagactccaatcgcaaacaaggtcgtggcaagaatattggtagacaatggaagcgcagtaaacctactgtttaaggatgctttcactgccattagactcactgacaaaaactgtgatgaacacaatcgaaggaggagaagattcaagttcaaatcttgataatgctctgctatagacaggaatcaagggctagagatttgaatagaatgagtcattttattctactgccatcactgtatggattttttaatccctaatgtgttcatttatcgtttttaggaattttatatttaggatgttagattataaaattataatcaatatacatgttagtaaatttagatcatggtaaaataagtttccaacatcacttcccttagcacactatcagaaaggttcatgataatggttggtcgagcttactttatcacagtttttgcatcacctttcttggatgcatcagagtctttctcaaccttctctattttttctttttagtgttgaatccagttttta

SEQ ID NO: 41170 - DNA, 2165 bp, Cannabis sativa
agatgtgtgcctgaagaggagatgtactctattctcaatcactgccatgctttaccatgtgggggacatttcagtgggacaagaacaactgctaaggtattgcagagcagattcttttggtcaacactttttaaagatgctagtacttttgtgaaggcatgtgatcgttgtcagcgcacaggtaatatcttaaggaggaacaaaatgcgtttgacaggaatcttggaagtggaattgtttgatgtttgggggatagacttcatgggtccttttccttcatcttttggcaatctatacatcttattggctatggactatatgtcaaaatgggttgaagctgcaacaaccccagccaatgacggtaaaacagttctttgtttccttcaaaagaacatattcactcggtttggtactccccgagcaatcataagcgatgaagggagtcacttatgcaacaattagtttgaagcactcctttcaagatatggtgtctgtcatagaactgctctaccgtgtcatccgcaaagtaatggccaagctaaaatttctaaccgggagataaagatgattctagagaaagtaatggtcaagaaagttagatgatgcactgtgggcctatagaaaagtattcaagacgccaatcgggatgtcaccatataggttggtgtttggaaagccttgtcatctaccggtggaattagaacacaatgtctattgggctatgaaggctctcaacatggatttaaaagctgcagaagagaaaagattattgcaattggatgaattggaggagttcagaaatgaggcttatcagaacgctaagatctacaaggagagaaccaaaaagtggcatcaccgaagaaaagtcaggaaggagtttcaacctaggcagcaagttttacttttcaattcaagattgaagttgtttcctggtaagctaaagtcatggtggtcagggccatttacagtggtcaaagtgtttccttatggagcggtggaactgaaaggtgaaagccccgagactttcaaagttaacgggcagcggttaaagctctacttgggaggtcattttgaccaagccaagtccgcgatgattctggcgccattatgaagaacttggtcaacgtctagctgagcgacgataaagacagcgctaattgggaggcaacccaaattttcttgatgctttagttgaactttcttatgtttagttgttatttttattttttttgttctttttagttatgtttagagaactggtaaaacaaattttggttttctttaaatttttgtactgtatagaaaaaaaaaagtttttttttggggtacggcccaatggccgcagccagatagagtgccgccgcggccatataaattgggcagagagaccaattttcggccctcatctcgtcgcggcgagggagagtgccgccgcggccatataaattgggcagagaggcattttttgacctctatctcgccgcggcgaggtaaactctagccacggcgagacagggtcgggcggctataaagaggcaaaagaatatcaaatttcaaaaacacaatttcctcaaaatctctcacttccacctccgaaaatacctctcaaacaccattcttcttcatctaatctcaccctaaaccctttttctttaaatctaaccacaatctttcattccaaaccattctaaatcattaatcctctcatcaaacactcttttcctttcaaaatcaaccccaaatccctaaaacctcacccaaatttcaaaaaccactattcatcttcttctttctcaagaacttcaaggttttcttcaatggaggttgaataaaggtggattctcattgaggtaacaattctaagactctctatacaaattttggtggagaattttgggattttagtgtgaatttttgggatttttgctcaatacattgttcaatagagttgtttgtgattaggaattggtttatttgtgatcgggttgatacccgggaagtggattataaggggaagtgctgccaaaacttttacaaatcttgaatgttagaatatttggtgagatgggtcctaaaagagctagagtgggtgagagagggggagcttcatcatccaacccacctaggggtcgctctaatgctgatagagcgaggtttgtgaatat

SEQ ID NO: 41171 - DNA, 1538 bp, Cannabis sativa
  modified_base (882)..(883): a, c, t, g, unknown or other
  modified_base (1181)..(1182): a, c, t, g, unknown or other
  modified_base (1270)..(1272): a, c, t, g, unknown or other
  modified_base (1408)..(1411): a, c, t, g, unknown or other
tggttctaagtccttggttctgatcctggtctgagttcgagtttgggtccgggtctgggtctagctttgggtctgattctaggtgtcggtgtttcagttcgggtctgagtttgtgtttggttttgtgtttaggtctggaccacaatctgggtctaggttcgggtcgaggtccaagttcaggtccctaatgcgggtccaagtttacgtctgggtcaggatcttcgtccagatcaaggtccaccatttatatcccagtcagggtcttggtccgggtccaggttcatatccggatccctatcaaggtccaggtccgggtctcagttccagtctgggtacacgaccatgtccggtcccgagttccagacttagtttgggtctgaggctcagtctgtgttcggttctaggtctgggttagggtcttcttgttctagggtcctggttcggcaattcttgttcacgttctaattttgggtcctaggtctaggtctttgttcgggttggttcttcgtctgggttcttgtcctagtctgagtcccgaatctagacaccgaccactggtctattcgaggccccgttgcccgaagcccgagtcaagatctggatcactatcacgggtctcggtctttctggttcaggtcccaggtcccatttctgagttgggttcaggttcgagactggggtgtggttcttgatctgaccctggttctgtttccctagtctggttccatgtttgggtttgagtttaggttcgggttcgggtctcgagtccaggtttgggttgggatccgggttccgctcccaattcgggtctaggtttgatttggagtctgggtcctggtcttgatctaggtccaattttagttatgattccaagtccaagtnntagttccagtcccagtcaacttcaagttttggttccaattttgggtcacaggggactagttcgggtccacttttgggtttgagactgggttcaggtctgggtgtgtgttcgggtctagggctgtgtcccaaatctagacaccgactacgggttttgtccaagcccttggtccagattcggatcccagtctcgagagccagtttggttccattttttgtgctgggtcacgagttgggtcctaggttcaagtttgggtgtggttcaggtactagatcccggtcctagttttgtttcccanntccctatcctgattctaggtcaaggtcccggttattgtgtgggttttagtcccgatctaggttcaggttcgagtcctagtctcggttnnngtttaggtctctgtctgggttttgatctcggtttaggttcgggttaaggtcctggtcctggtcctagtcctagttcggttctagttccattcgcaattttgactacgagtttaggtttgagttcgggtcggagttnnnntcctggtttgagtttgggttcgggtctggatttcagtccaggcccaaatcaggctccgggtgtgggttcacctcctaactcttggtctaggtttggtccgagtcccaagttccaatcccgatctgag

SEQ ID NO: 41172 - DNA, 1799 bp, Cannabis sativa
gagagaaatctcactataacaaaccaataagtaagaaacctaccaacaatttcaattagagtagtactctcttttatactatttgttggggtttatgctctaaacataagtatttaatggataatatattatagaatataagaaatacaattataagataaatgaatacattaattatagaagtataattaatagatatttaaaaatttcttattcatatggagatggtataatcttgtaaggtcgtataagagaaatttagattataaatatgaataaagtaagtcggtagtgtattaaagtaagagatctttaatatgaaactactaagtatgatttactatacaatgtactctagtctgtgtgattttgattcagattacatagatggatatacatgtagtaaatgtattgtgtatatacatgactggactgatgtgtcaataacatcttttattaacatcccgttttattatgaaagaagtattcatattacaatgataatcattagtagatcagtttgaatcctgagtatacatgaactcctatttgtcttcattgagttctttgattcacttgttaaagtttttcagagaagataattcttacaaatttgttttggggacttaataaaatgagtgactgagaacatattatacaataatggaattcaaagcgctttctggaaaggatcaaatattagttcccttatagtgttaattctaggagtgctaacagttagatccaaatatataattagattattgattaattgttcacattgaatttatgatacataaagaatcaagagataattagaagggtaaacagtaattttgactaactaattggagggcaaactacttatattgattatattaatggactactagttagaattttgtaaatatacttttatattgtcaaagagtgaaatttcatatttatagtggagtaataacgagtttaagaaattgaattgttctattgatgagttcaataataatcaagtatttacaacattgtacatgggaatcgttaatttgatgaaaaaatttgagtgagaattaatttctatgagaaataattcttaaggaaaaaattgtaattttatggaaattattattttgaataattatatcaattatgaattatataattagtatttaactatttaattttatatgtttaaaactatattaattagttaaatataatattattcttaaataatattaaaaaaagaaatatattgtttttgtgaaaataatattcattttaatcctagtgaaatatgagattaatgataattaataaattgttatttattgacaaaataaataataaatcttatttgtggtaaaatttaaaaatcaatttgaaccttaaaatatggcccacacatgtagggtgacatatgaatgcccatgagaattttattattaaaataaatcaaattaaattaattattatcttttaattattatattaaatatattattaaataatgtatttaaaagttaatattaaatagaaggctataactaatttacgttaatcagttatatgatatttatatttaaatttaaatttaaaagaaatattatcttttattttataagattggataaagtatttatttataacattatgtatatataatgatatgtattagaataactaacaaatgaaaaatatgtgactttagagagaccagttttaggtttgaaaatatgactggattttccaaccttctctctctctctctaacccacgtctcattctctctctctctctct

SEQ ID NO: 41173 - DNA, 1195 bp, Cannabis sativa
ctctcaatccctcctacttcccatcccctctcatctcttcatcaacccttttctcttttcatcctaccaaacataacattaattactccctacttgtcccaaaatataaacaaagaaaaagtctttcactattgattccatcgatataaaataacaaagaaataaacgtaatttaattgtccataaccaataagtgaatcactatgacactgtaatttttatattaacaaatatttttttaggagagaaatgcttaaagatactatatatctatcatttttttaatgttaggatgtaattaagtatcaaatttcaagacaataattttaaaaaaatattgttaattaagggtagataatatgcaatccaatctaattacaaaaaattagatatttaattacaactggattgtattagatgctacaaattgaattctaatagaattatatcggttattaaatctcaaaattcaattaaaaatcgattcaatccagttacatttatatatgttaaaaaattatttgtataacaaaaatgattaaaaaaaataatatatattaaataatttttgtgttgaatttgtaatacttgattgttttgtgtatttatttattatattttattttattatttaaaatattgttgttttaattatttaaaattttttagttatattatacttgtaatcatagtatatttttagagtattaaatttaaataaaagagaaattttttaatgatttatcaattcaagagtaaatatttcaagtgaatttagttacttcatgagtattattaatgatgattgagcgtgaagaaatgcattgcataaaagatgaatataacacccttggaaagagtgggatgcatgttcaatgtgctagtctagagtagcaattttggagagattctcgcaagacaacttgatatttggtgaataagtgtcttttaattgctattaactttctcaaaccacaagaaaaataagccatataaaataggtcaaacttcagctaaaagttctcaaatgttattcttagaatacttgggtgatgttaatggttataaattgtggtgcttagtatatagttcacagagatattgtgtttaataagaaggaaatactgatgaaggaaattctggtggaagaacactcagcacccgatgcagcatggaacgaaatacatcaaaaatt

SEQ ID NO: 41174 - DNA, 1525 bp, Cannabis sativa
aaagatgtctggagttgaatagtgtaggtaccatgagcatgtctccttatagcaggatggatgcctcgctatttgttgctcaagttcacccaactgttatgcttagtttttataatgtacattatacgctaagtgttctaacagttaacatgtctcgcttacttttcttcatacgtagcgaggttggtgcctcgctttggattaatgatgtcgtcctgccgatcatatcttcatatacgaaatggttttgtcgttaatatgtgaattaatagtttgtacagctttttcttgcccaagactttacagtcagcgagttgtagatatactctaccagttcagtatttaataagttatccattttaagatcttttaatataattactattatatttgttgattcgtattctcccaagttgacacgtgcccttctctgaagtaccagtagaattttgggtataacaattgcccctgaaaaagttatttttaataaaaaatgctttttaaatgattacaaagggtatatttatcataatctcttttgaaaaaatgcatgtcctttgattttggcagttttgtggtttcgaggtacatcagtatttaaaaaccatcttttccacttcttattcaaatcctacccgtaggatcaattatctccctgatctaacagtgattaacccaagagtataaaatggaaaaaggaaccatctttgcatgaccttggccattttagaaaccctgagaattttttaagcttttccgtcgaaaaacctttaccaaattttctcgaaaatttgcatgccatctctgtctttaacattttttctatgagtttcatctgatttaatttttgacttcaagcattcggagggatcttcacgacgttcgttgatttgtagatttcagagctgttcattgccccgaaacccaacttgaaacagtaagtgacttttctcattgttttcttacatgcttgttacgttgtatttctgggtttatttaccatcttcttggttagcatcattgttatcttatttggttttagaaatttttagggctgaactgtatctaggtaaatgttagggcttagacagtacgcaaattttctaaattctccaatttaccaatttcttgtttgataaatttcttccagtaattgggattgctttctccttgtagcaatgtcccaatctggttcagaagtttatcatcccaaaaatttagaaattgagcatcctactgaatttgccatcccctacaaacccaagatttcaaaacccaaatccaaattagaggtaaatgaagccaaaattagggatcacctagtaaaaattcaccaagaagacattgctagtcgccacagatgcttcttgcaagagattactgaaggcaaatgccatttcttgcgagaagctacttggcccgaacctcctagtgtgtcttctatattcctttagctgagcctctgtttttacccaaggtcacaattgcttttgaaccaggtgacttggattttgaaataatgtct

SEQ ID NO: 41175 - DNA, 2822 bp, Cannabis sativa
gttcttttctaaatgaatccataaaaatttgaaacctcccttttgaaactcagttttacaacttaacatcgagaaaagacaaaaatctccttgttgacgtgtaatatccagtacaagtatattattatttggtatattattgtgtgttataatattttatcgttgcactaaataagatatgaattggtatttgctaagtataattattttttttatttttagagattttgatagttagattaaatgttagtaaattttaattgtattagaaaataaaatttattagtgaatattggtatgaaataataagattgtatatatataataggattatataatatatatacgtataattattattatataaaaaaattataatgtataaaagtttagaaaaaataacataaactttagtaaaaagaaaaaaaaaaaattagttcaaataatgaattgacggttaaatttgttagagtacatatttatttaaaattatcattttaatattctaaaaataataataacaataataatttgaatatataattagtcagatttttaatttaaaatttaaacctattatacggttggtatatatgcgtatatacctgatatacgatacattttttttttcaaagccctagcagccatatacctatcatattcttcttttctctaaaagtataaccatctttatgtcaccaaatagatagttctaatcttgaaagttttggagtcaacaatcagccacacatatctgaacaccagtattttgtatcttttgaactgagcaactcgaaatcttgaggtaatttatttgggtattaacgataatataaactaaattcgtagttgtatttttattttcgttttcaaagagatagcctttcataaaactacaatatctctctcctcgtgcgttcatttttagtaatctaggtactgttttaaagataatttaatgatctacatttttcatgaaaagaattttacctaattctgattattttggtgtaaaaaaattcatgttttcatgttggctgtcgaattacagttttttcagatttccttccgatattacctcagtataagtatgatatctctctcgatatctattcttttctagcgattctagtaccgttagaaagataattcggtaatccatattttctttgaagaaacctttccctaattctgggttcttacttatcaaaaattagtatatttactcggttaggatatctcgttttaagttttatttcagaaaaagtgtccttagtaaaaactcaatatctctctcaattttgatccattttaaaatatctttatctatttttaaaattaaaaaaagcttacattttttatgaaggaagtgttgtctagattggagtgtaactatatttaaaattattatttttaggctatatctagaaatcgacatgatccagaattttaaagaaaccgttttagtaaaatatccataactcctaggttataactctgattttgatgatctctatacctttagaaaggtcttttgcttatctaaaaactttgtgaatattaggatttctaattcaaatattttatgagtcaaattctgagctaaacttgttatatagtaagaattataaatattttgagtttattagtagtctaagggttggctaattattgatagagcctagaagatatcgtaagacttaattacaacagagttgaggtaaggaaaaatagttatactttatacttttactttttatatggtttgagtacttagtgagatttattgagttagttgtattgaaactgtggaatatgatagtttcggtgaaatagtgttttgtcgatatattgtatatgactatttaatcatgttccaggcacttggacatggttggaaaccacacatgtatgatgatgtggttagtggggcagtgtacttaagggtgcactggccattggtattgcgtacaggttaagaacgtaagacactagacttgtatggaagctagagtttgagtgtgtgataaatctgtattagtgtggctgcctctatttaaaaacaggatggatttgttgtatgattgatttatatgattgtgctatgatgtgtgagtgcttgtacatgatatttttttttctttactgggctttgcagctcaccccttatttactccccatgtgcagataagtaagactgtaaacttttggtgggaagttgggtctgaaaaacatggggtgtatctcgcgagatcatgtaactgcatgtgatcttggccatcttctgctaaaagtcacttttaaattcataaaacttattatggatgttgttttttagttttctattgcatttacttaaatagtaacactttgatttcaactgggtacccatattttgaaaattattgttttttttttttgaaaaaataaagacaacattagtactttgatgccagtttatttatggcattttattttaaataaatgaggacattacatatggtattagagccacagttacattgatcttctattcacacgacatacacaccattgctgtaaaggatcaacttgtcatcaagtaagtatgtttcatttgtgttatgtcttatatgttaagtttggttaatttcaatctaatatttattttgggttgtacagcgttaataataaatccaaacatagttaaggcaattaagggctggagacacttgccaacatctaacaatagaagtaaactaaggagaataatagaagatatggataaaattaatccaggcatggggtaattatgaggagagagtgtgtgttgttaatggcac

SEQ ID NO: 41176 - DNA, 2568 bp, Cannabis sativa
aaatcttatgcctgagagtacttttaaaatccttccaggaaggggctaacttatcaattagtacaacgacttgaaactgttcatcttaagtcataccttctgagataatctcatgtgcaatattttgaagctcgtgagattaggcttccacagatttgccgtccaccatttgatacttgaggtagcgactgacatcatacttttaattccagcttcttcagtatcatatttcatttgcagagcatcccaaattttgtttgccgattaatctaagttaaaatagtcagataaaccgttaagaataaaattcttacagagaaagtcatttttgacccaggagttcaaatctttttgttgcttctcgcgttcagcctctttgtcctcgtcgatagaagcttcagaggcgacaagcttcagagcagtgagaacaaaagcaactttcttcatcgttatgtagaacaactttcttaggtggatcgaattaccgatagaagattatggctgagtcgcagacaatgtcgctttctttaagacgttttacggctctgcccaaagtgtgcacgacagtctagctagcaactacgacgtcccctagataaaacagactttgtgtacgatatgttatacaacgaacaatatcgttcgattataccctaaattattgcattgagaaaaatcgtaagaaagaagaaatttttttgttgttgaaaggatgtatccttacattgttttgatatgacttatatagagaagtcgatctaagattaaatagtaagaaaatggtaatataatcatggaggagttggatcacggcagtgaaaagcagatcattaattgatcgctttttactacttcatttaatgttacaaataaaaatgaatatttatttaataaaataattttttctttaaaaaattaagtgacacttcacccgcccaccattccagctcggcccgtcagacggcggcaacgaaacgcgtgtgtggtagtccaatgtgtgagtcctcacccatgcgcacaaaactgagttggggcccaaacccaaacctcaaacttgcacattatatatacttttaatgatgtgtttctatctcacgtgggactccattcactcacacacttaatttttcattttttttatacaatttcacaaagttccaacagaagaagccatcgatgaaatgaataataagagtataaagaaagaagcaatgcagtgagtttgatatgtatacaacttagtatttatatatataaataaatattctagtgttttttattaattgcatggccatcatgttaattgttttatgatttcgatgcaagatctgagaagtgagcgtcgattattctatagtgaaatggaattaaatttcgatataggacgagagtacctatacggtttagatagcttataggatttctgtgtttaatgcatcttacatgtttaatttatcacgagagtagagaatttacatgtaattgagatttatacatttgagaagactataaattaccttagtgaacctgctattgtatataataagaagataatcatattaagtcatcatcaatagatacaattgaaatcaaaaccctactttttattaactattaatttcctttatttatttatttgcttcctacttccgctagttttcttattttaattttctctcttaattttatttaaccaaatagaagtatgaatttaattttaaagtacttaactacaattctcgtgggattgacctcactctttgtgagtctattacttgttaacgataggtatacttgcgtgttgaaaataccacaacaaggacatataaaaagtagtcggtataacttataccgagaataatgtctatggtaaaacctttgtacatattaaaaaagtacaaataagttatattattatatccatataaaagataaactacccaaaatccatcagccaaagcatttaaggaaaatataatacaaaataaaaatttatcctaattctaccaaaatttcgacaatataacgactgtaattagacgtttccaaaaattttaaacatgcctaaaataacaaacaaaaaaaataatacaaaacaaacaaaataacataaaaatacaaaatttatccacccatttaccatagtacatgtattcacaaaacctacttcactctgattgaatatttaagatattcaaactcaacctacttcaatgccttcttgttcggtaaatcccttggcaacaagtcttgccttgtaccttggaccttcaccccctagtattccttctttctgtttgaataaccacttgcatttgatgattttctagttttccggtttattaaccactatccaggtcttattctttttcagagatactttctcttccttaatagctttcagataagccgcactatttttactagttattgcatctatgtaactagatggctcaacactgtctatatcttcagctacactaagagcataagcactgaattcagcatagccatatttatcaggagcttttgtggctcttcttactctatctctagctagttggtaat

SEQ ID NO: 41177 - DNA, 2818 bp, Cannabis sativa
  modified_base (390)..(390): a, c, t, g, unknown or other
  modified_base (2752)..(2752): a, c, t, g, unknown or other
aataacaataataaattatttaaatatctataaataatttcataattagacataaacaactgctaatttccaaattaactaagcgggctttacaaggctcatcaaattcatcgtactttctggagatttagcaagattcttgtgagtttgaagcaaaggtaaaccctagatcctttgattttatgtatttaaagctttagattggtttcatgaagtgattttgaaaattaggggctgttagggtttagtgtttgtgtagtttgagttataatgttcatttgagttgagtatagcttcttgtagctggctttgagctatggagatagatttgagtaagtttgagctttgaactcaaagctttggtcattaatggcataaattgatttagtntgtttctctgtgaaatactggctggaatatgctgtttataccctaattaggtactctggaaggtttggttacatttggtggaggattgaacaagaaattgaaattttggggtgaactcgtgtaaaccggctagtcggtttgacagttttacgtgtaagccggttttggcagggtatcccgaatgtttcatttcctcaattcttgtccattttagttccttagttgggtgtttccttatttcttcagttagagtaatccctagagggtataatagaacttagggttgtgggttcgggtttcccgaattagggtttcaatcatgtgatttacccagttttaatatgtgattagggcatccatccagcacgtgactttttgttcaggtcggccagcacacttgaatctggaaagaaggtaagaactgtgtataatatgtaatatgaatacttgagtgtatatatgtgctaagttacatgcatgcttttgtgttagttgcactaccaacatttgtacagttatggtacagagtgcattggtatagtgaatgttgtttaagagtacattacagtgatgccggcacaagtacgagaaagtactgagtgtgtgtggtgtatcactgagtggtactcggggtacaaaacaaaccctaccaacactcgtatagtgaggtacatagtgtatgtggtatagtggttgtaccctattaaggattgttcttagtcatctattaagccttgtaaataggtgtatcgccgcttagatacaagtcggtgttttatgatatgttatatgcttttcttactgagtctatcgactcatagttctgcttccatgtgtgcgtaaaggaaaggcgaaagctgaacaagagtgagcttgagctgggatgaggttgtacatgtcgtggcagcgcgacctaaagtgttcggtctctggacatctgcggttatattttgtagtcgctgtgcgacttgaaaattgtattttggtatattttgtataagagtttagaaatgggatcccggtgtttgtaaataatcatgtaaattataaagtttaatatatattataaaaagttttaatttgatatgtttttcgagaaaaatctttgattagcaaagataacactataattgaaaaaatattgtagcatgccttagcattagggcagtaaaattttggtatcagagccgccaggtttgtctaccgaagcttgccaaggcatgtacaatcttcatcagagaaagctcagttcacagttcagtaagtccgtacttgtttagtattatatatgattattaaagtatgttaggaagcatattagattataattatttattttcagtgtgttgcctttaagtccataagagcgatattaagcattatgatcgctgtttaacctgcctggcttatgggttcgcaggctaagtcctatggttaagatcggggtaatatggttaagatcggaggtggccagggaaatcaaattccccagaattgctgtggtcgcggtcgtggctgtggcagagcttaaggtggccgtcttgtaaatccaccacaagctcctccggattgggagcagaggtttgcggaaatgcaagatttaatccgccaataagaagaagaaattctgatattgaggcagcagggtcttcctactgcgcctccacaacaagctcaggccgctgtagccccagtggtgccagcagaacaacctgttgttgccaaccatatggagccgctatatgaaaggtttcgtaagcaagcacctctagtgtttctgaaaggtcctaatgtaatgaaggctgagaagtggctcactgtaattgagcgaattttgagtttcatgggggtggttggaaatgatcgggtgacctacgctactttcaattttaggaagacgccctggtgtggtaggaattggtgtccctcactcgggatgttactgctatgacctgggaacaattctgagagttatttaatgctaagtattataatgaagccgtacgcagtataaagctgaaagagtttactgaattggtacaaattgagggaatgtcagtcactgagtataccacaaagttcgatcgtttggccaagctcgccgtgggtattgtggcaagagattttagtaagaaagtaaagtacatggccggtttgaatgtgaagattagacatgatctggtgatcactactaatgaagcaacaacatatgcagagatggtggaaaaagacttacgagccgagggtgcagtaaaattccttcaggagccccaagtaactccgaatgttggtggaacctccacccttcctactcttgtttatggcaggggtggtggtgattcctgttggaatttattttacnaggatcttagatctacttacaagtatgttgatgttgagttttgtgccctaaataaaaccctttaca

SEQ ID NO: 41178 - DNA, 1200 bp, Cannabis sativa
ctcctcacacacatggtttgagcgtttaacttgatattgccaccttcaacgggcatataacctcacaaatatagaagtgaatagaagagatcgagattagggtcatctaagcaagaaaattgtagtcgagatagcaatagtacaatgagtatggataatgaagataaagttcatataatctgaggtataaataaaagaggaattttagtgtaacttaggatgtcaggcacatcaggccacttgagatacaatgttattaggtgtgaaaatgacttagcattctatggttttgagatctagtgaagttgtaaagtatcaagggctcactataaataaagcccttgaactcactgtaaaggggactcttttttggttgaataatacaataatttctagagatcaaaggttgtgcgatttttattctaagtatttttctatcaagatctttaaatactattttaagtccttgttattttgttgacgagttcttaccaccaacaatttggcatcgtctgtaggaacgacaagctctagctacgttagttcctaaatcattcacaatcactttcaagatgtcaagacattctcatcgtctccgaaaaaatgggggtctctcagatgaaaactagccggccaccatatttagaggacaccaacctcccgtctttggacaaggccgaaggaagaataagtaaagtgtggacttccaagaaaacacttgaagagagcccccaacattacatgactcgataacgacactgatggctaacctcatcaatagaagcattcaactactgagaaagtcatctctggtgcggagcattctatcatctacatcatcaaaccccgactcatcaaggcatggacatagaaaggaaaggcaagtgtacttgttgggttcaagctccaggctcactactatgaagctaaaataagtgacctccaccaaaagaacaaaatgctagaaactactatgactggtatacaaaaagtattgaatggcatactcaaaggtaaaactcaagcctcacatttccgtcacaaaagccaccagagatctcaactgcatgagctaacaaaggtgataccctatcactaatagcaccccaagagatgagcacggaaggaacctgtcacaagacaagagcccaatgggccggttgagacaactcgagcctacccactataaggagattacat

SEQ ID NO: 41179 - DNA, 902 bp, Cannabis sativa
  modified_base (115)..(117): a, c, t, g, unknown or other
aaaaaaataactttgttttttccctttttttttgtttgtatttttttttatcaagaagtttgttgatttcaatgatggagtcactcaaatagatgttgaggctactgttcaatcnnntgtgaaagcagttgagattatggtaacgttaattgtatgattttttttttggttgtttaatggttgtgattgtttagatttttctaattatttttttaagatataaaagcagatgtcttcagggggaatttttggtgattctggtaaccaggttccagattctaaaaatgttgagcctacggatggtcatgttgtatgtgttgttgaggtatggttgttttaccatttttgttaagttgctcaacactttttgtattaacactgactttatgttttttccctctttgtttttatatttattcttagatgggtacagcaggtgtcactgttgattctaatattcgacttgttgaagatcatcaaattctcgttaaagaaactccgcttcttgacaaaaggaaatctaagaaaccaatagctttgacgtctctgtttatggagtttgactctttgttttcaagttctaaacatggttctggttatggagttgttaagtacgttgctggtttgtgtcctcttgacgataaaattggagaagatgtagaccataaagacgagaatgattttgacttgtgggttggtgaaagtcggcgatcaaagaacgaccagtatgtattttatttagcgttttttttttttctttttgtgtttcatatttcttttcttttatttttattttttgtttttaacttactatttatattttctttttttagccttgacaaggacaaggtttacttgaagagcaaggataagattgctccaccttttcgttttggcgtgga

SEQ ID NO: 41180 - DNA, 1813 bp, Cannabis sativa
  modified_base (993)..(998): a, c, t, g, unknown or other
  modified_base (1075)..(1089): a, c, t, g, unknown or other
atctcgagggagaaaggggttccacgtgctcggtctaactcgagatcgttgttcctctgaccagctagggcttggaacatattttttagttcgttcaactttgcttgcacggctggactaacttgttcggcctcttggccggcctgagtcacatcagcatccctttgagcaggattttaagcgcgggttccgggttgcacgattggcgtgtcaagctgatcgtccactcccctcctcctgttcagatcgtctctgagatcatgagtgttccccaatctatcaaataaggaaatgcctggctatctcagtgactgattggtttggccaatttgctgatcgaggccattaactttgttgaaattattgggtatgacttctcatgatgaattaccagacaagatctgcccacctaccacttggcccacagatggaacctatgaccggggatttggcggctgaccatttatagtctgagaggtatttatcgctggatcttcatatattttgcccaagtggatgacggttacaggctgttgtccggtgcagttgcctgccgactatggtcgtcaatgactgcttgctgagcccttaacgttttcatctccttatctctccattaagcgaacatgcgcctctactcttcaaatgcgagattcaccgtagcaaggagttcctcctgatcacatgattctaagagcagcacggaggttctggatttcagtgtcatctccaatagttgtttgaacattggtagcgggcggaatggctgtgttatgaatgcccttattggctgctaaactagtattcccagtctcttgcacaccaggcgcgatttcaaccataggagtcgtcacaccgcaacctacagttgatggttgttcaagatttgtggttggtggaaccctcattttcccagggttctacagtgcaggatccaccgcctgtggatttgctagatcaaccacacatctacgagtctgtaccaccattgtnnnnnngattagatttgagataaagaacgatctttgagttcagtctctcaataaaagaaccaaaatgttgacctcgcttttannnnnnnnnnnnnnntctaatttgtaagcgacaagtagtataatacgagtgtaatataagaaagcgaataaagatacaagaattttatagaggttcagcccgagcagttcggtaatagcctaattctcgtagttcgtattgacttaagaacaaggagaatggttccttttgttagagctcttacaataatatctctgaatatgaattcttagacaaatgtttcgaccctttgcccagtgagtatgaatcactatttatagggctatgaccttgggagggaagtgtttcccttctggttacaattgatataagtggaaagattgcacaataaatacagaatacactaatcgtgggattcggtcagcttgccatatctctgtaatctgatcccaaagttatagggatttctttgatgactcacgatgggaaagctgaatttgctaactgttggcgtgttgagcagcttgcagactgtccgacttagaggatttcgtccgagcgaatgtatgtggtgccctatttggcatatttcttgcgagcaggtacatagagttgattccacgtgacaccatcgtgtgatgccacgtcagggtgcaaaaattgggataacaacatttataggttgaaataaagtgccaaaaatctaattggaaatttgtcccttaatatgcacggccaagaagtgatttttgcccaatattttattcttttttaattcatataattcaaccctaagccc

SEQ ID NO: 41181 - DNA, 1584 bp, Cannabis sativa
  modified_base (713)..(715): a, c, t, g, unknown or other
tttttgggggcaaaaatgtctaatattacaattctcttacacccgttactaccactcactacaagaaatatcacttttactgcagcacaacattttgcaaactgcgctagtaaaaatgtcaatgttttaccagcgcacatttgtaattattaaaatctaacttttaccagcgcatttacgcgctggaaaaaaagttatttttgccaacgttttttattttgtgctgacaaaaattctaatactaacgttgatttgccaatccctttgcatgccaacacatcagaattaaatttcattttaccaacgcaataccaaatttttgccaacacaaaaatttgcctctaaaaataaagataagatatttaaatgtataaaatttgaaacattatgtatttatgctacaatttatccattttttttattactacactaaaatatgctagaattattatcttaataataattagtatatatttatatagggcccaaaatttaattttgcaaaccccatataccttaagactaacaggaccctcatcatagctcagttttattattcatactaattaaaaaaagaaaattatattttatatccactttattttacttgttttaatttttacctttattttcatattctttaagatatacccacttttatagataatgtctccattagaccccttagtttaatgtaaattatatgctagacnnnagtagagagtgagggtatattaggtaacccactcaataaagttgatatattttaataaaatataatatgatggtatttttgattaatagatataaaaaaggtatttatcaacttatcccaattaaaatagtaggggtgagcaacattcaatccaatctaattgaaccggaccaatctaattcaatccaattataaaaagttggagatgtgcaattataaatagattggattggaggttaaaagttatattttaattggattggatctgttataggatgtcattcccaaaatctaattaaaaactcattcaatccaattacatttatagatattaaataacagtttaatatatttatgtatgaattttttatttttacttcaaaataattccttttttatatttttacaaaattttacattaaaacccccataggaactaacggagcaacctaaatcgcattcaaaatccacataacaacccacataaataccaccgaagaaactaccggagcaacccaaaccttatatttgaaaaaaaaaaagttaaaaaaatagtactatatgagataattttccaaaaaaactatatattttaatcatgttgttagtaggctttattttgtgttgaattagtaatatttagttattttgtctatttattttcatgatattttttttctattttattactttgtaatgttgttgttttacatttaaatttttagttgcattacactcataacaatgatatttttatagattattaaatttaaataaaaagttatttagtttttacgtattttttatcatatatttatgttagtattaaaaattaagtgtgtaactggatatctaattaaaaaatcgat

SEQ ID NO: 41182 - DNA, 1373 bp, Cannabis sativa
  modified_base (1157)..(1158): a, c, t, g, unknown or other
attttaattaacaaagtaaataaagataattttataatttattgtaaaagcccaaaacaacattctcacttttatatagttatagatatacgattaatctaaaattttaaaggtattttatgcatttattattttttatttatatatagattagtacatttttaataaatattgagttttttttggttaaattctctcaactattactctacttacacttaattctctaagcttaaattttgatagtaaaaccctctaaagtactgaactgcttgtaaatttaagacgtcatttatttttttacagtcaattgccgatataaactgcttgtgtgtacatttttgtacatgtgtcaaatttatatttgtacacctaataatattattttaaaaatataaaaattatttcaaaatttataatatatatatatatattttttattgttttaaatattatatttttattttttataattttaaaatgaattttgaaaataatttttaaataataatattaggtatactaatataaacgttccatgaatacaagattgtacacataagcagcccataacagttaactgaatgacaccttaaacttcctactaattcaatagtttggagggttttacggccaaaatttgagctcggagggttaaatataagggaaacgatagttgggaaggttttgccgcaaaaaactcataaatatttcttatttttgtttttgtaagaaatgttgtttttttttttttttttgcacatgatgctggtatcttttttaatcaaaataaatattttgtgtgtgatgtttttgttggactttgcttttccaccttgttgggggctaactcattttagtttttccccattagtaggatattatctgctttgggtctaagctctcacggttttatttctgggaacctttccaaaatacttcatattaatggagtagtgtccatccttatatacccatgatctttttcatttctagccaatgtgagactttagttgcacacccaataatcctccccttaaatcaaggaccacatacccgtggcctcccctccagcgaaaccaccttgcactgtcgttatcaacaccaatggaactcgccgcttgaccatcaactttgtgaggaagacttttgacacnntcctaacatcgatctccatcttgtaccaccgtaattattaacgagacacgccacctgactacctcaatatcagatagactttcaatgcaagacacaatatagatttttaatcgcaaggtcatcacattaaagacttctcccacacatcgcaaatgcaacccattatcccagcactcgtgaatctttagctttgataccacttgttgggccccatt

SEQ ID NO: 41183 - DNA, 1419 bp, Cannabis sativa
ttatgtttattagttattgaagaaaaaagtgttttcaaaaaaaaataaacgaaattgtaattaattgtggccttatgtataaattaatactatgtttacattattatagataataatgtttattaattattaatctaatatatttgctatgataattaatgtttgtgatgatatattttttttgaccaagtatgtgatgatatgttaatataatgtgtttattaaaatttaaatataaatttttaaataaagcatgtatgtttattatttatgtttacaatatataatttgtacataaaaattaagaatatgtttctcattgttagtaaaatgtatagtaaattgtaaatatttttttttgcacatatcatgtaattaagtactataatgtatataaatttgtaaattctcctaacttataaatatactttatttagggggctactttacttttacactgtcacacatagaaatttacaaaagtactatcctcaacttaatttttttcttttatactgtacagaggccaaaacgcacaagaagccttcattctcaaaacctaccatcggaaccactagagcaacacaagaatagctagaaaacaactattattccagtcagaacgtaagtattaaatattctgatcctgaaacaataacataaaaaatcaaataaaacactgtaagccaacagtaaaactacaaaataaactaaccaaataaaatcacaaaaaaaaaaaatactatacctcaataactcttttgtcaatgaggacttctataacatcacgagacagaaccttcaccttggaaaatttctctatacgttaaaaaccaataccagaacaaccaaaaattaaccgttaagaaacataaaaattaagtatataatactaaacatccaatatcacatatgagaacaacaaaatatatgaaatttaacaaaatcagagagtgatgaacaaaatctcaaattgatatttgagactgaacatgcacaaacaaaaaaacaaaataaaatctaaaatgaagcttaagaagctgaagaaaattttgaagatgatggatataagaagagcaagaagtaatggtaaccacgattgagaaatcgtggttcaatttttcaaacaaaatgaagaaaaaaatctgaaaaaaaaacttaagaagaagagagttttgaagatgatgaagatgagaatatcagtaagtaatgggtttggggaaaagaacaagtcagtacaacaacaaaacaactgttgaaaacattaaaattatgcatacaataagaaacaaaaaaatatgaaatacacaacaacaacaacaatagaaaatatggctatttacaaaaatatgggaaaagaaattaaagttttgataaatatggcatgcaaacttaattgcattaaatatgacatttttt

SEQ ID NO: 41184 - DNA, 2035 bp, Cannabis sativa
  modified_base (44)..(52): a, c, t, g, unknown or other
actaactacactttatattttctttttaaatttatttacgcccnnnnnnnnnttaaattctgggtccgccactaaacatgagtaagagatttatatgttgttcttatttattttaccatgcaactttcattatttgcttatctgtttgtctttttattttttataatttttttttcattattatttggtaatcaagaatggttcatgcaattctgatgatgcttattttcagagtgtttcatgtttttagaaagtatttagtttaaatcatatttggctttgtatcaatttgtttagttttctactaaattgattattgagatttgtggtttttctatcattaaaataaattatttgtatcaaaccagagatagtattaaaattatttgatttattagttgaaataaaaaaagagctaatttttttaccacaatgtctgttattggcttttattttagtatatatatttatatatatatatattcgttactattaattaacttattgtgtctttatctacagggatgctggcaaaaatgaaaaaactaaagttaaattatatttataaaaaaatgtattggataagtctctgatttattaaatgtcatcttctttttcaacaagatgaagataaaaactttagaataatatatttatatcataataaaagcttttgtgagtgtaattgttacaataacttcaaagtggtagaatctagatgcttttaatttcctagacgatgcaatattaagtgtatgtgagtttaattatatcatcccaacaatatattaacatgtattatttattttttttatatttgtatattgtgtgtgggtacaaattatgttgtatccatggaaatatgggaatcaatccaactttaataatattttgttttactttttattttaagtattgttaaataccaactagacaaaacttgacatcaaaaagaagaagatttaaataaataaataaaagaattaagagagtttgtgcataacaaaattgaattatttgttttacagatgcatggtaaagattccaaaaagataaatatttttttttaatatgaattagtaaaaaaaaaaaaagatattaataaaaaatattgtataattttgtaatgattttttttttaatctatattgtaatgaattttatatgcataaattttatctacgagttctttaatacatcgcaaaagttttttaaatgacaatgtcaataccatttttactctaagtgtaacgagaaaaaccttattaataaattttttattaaaatggtttataataattaaccaatgatcttttcatattcttatttattaattgttttctccagtataaagatcatttatattaataaataataagttaatttcttcatacataatatacaaatattaaattgagaatataaaatagtttagctaataattttaattgtgatataaaaaaaagtgtatatgaaaagccaatctcaatttatattaattaataaattttcaaatatcttaataaattaatttttcgagttacataacatataattattaaacaacataatgactatttatatatttataaacaaacatcttatattatatagtatatataccttttattagtaataaataatcatatcatatcataaaaatatttgtgtgattgataattaaaaaattaattacactaaaataattaaaaaaattataaaagtagggtcgaatccgcgcgaagcgtagcttagttccctagttatacaataaattattctagcacatatggtaagttgtcctaacttatgttaagtgacatgagttcaatccttgtaaccttcatttgatgattttatatcacttaatttttttctattttattttatttcatttttttaggagttttatctccactttatcatttgggtgtttatccaatccatttcgcactaagtgcagattttatatttttggattcaatgtataaaaaatattattgatgtcttatcacacgtcttattttattgtata

SEQ ID NO: 41185 - DNA, 1619 bp, Cannabis sativa
agtaggagataagagtgattttgctttccatgatagatgtgatgccttgaaactcaatcacttgagctttgctgatgatgttctacttttctgtcgaggtgattataaaagaatcattctcttactacaaggtttgaagcttttttcagcctcatccgggttgcaacctaacaaggcaaaatctgcaatttattgcagcaatatgcctgaatctgatatcactagagttttggaggcttcggggttctcgaaacaacagacaccattcagataccttggcatacccatatgtagcaagagaatttcgaaacaagaatgcacagtgttgacagaaaagatgacagcaagaattcgatcttggagcaccagaaatatttcatttgcgggaagggctgtgctcattaattcagttctaaccacaatacattcttattggtgccaaatcctcaaactaccaaaaaaggtaattcgtgagcttgaatctatttgtagagcctttctttggaaaggccaatatatgatgcagggagcaggactagtggcatggaaaaatgtatgccaatcaaagattgcagggggctcgggtattaagagaactgctgaatggaattcatcagtacttttcaagtatgtatgggctttggcaaacaaggaggataacctttgagttaaatggatgcatgcagagtatactaaagaagagaattggtgggagtatcaagcaccaagtcaaggaagttggtattggaagcaaatagttgcagccaaaaatcaaatcaaatgtcttacagatgtacaatagtttgctcggggaaaatacaaaattttagatggctataacttgatttgtcctatacagaatcgagttgcatggagtaatgaggtttgggggagatttaacacaccaaagcatagttttatcctttggttggctgtacaaaatcgtctcaaaactaaggaaaggctgcagcggttcagtctccttgatgatccgacttgcggcctatgcatgttacaaactgagacacatgagcaccttttcttcagctgatccttttactgaatattgtcttcagcaggtgaaaaggtggctgtcatggggagcacgaaccagcagcctctcccaactactcaagtggattcataaggcaaaaatcaacaagtttaaaaggaaaaccatggcagcagctgtagcaaacttagtttactccatttggcatgctagaaatgaccaaatttgcaataatcactaagaaagtgaagatgtaattgtacaaagagtaaaaaatagtgtaaaagatagaataaaattgttttggccacaaaagattgatcaacaagatagagattggtttcattctttgtaaaaaaaaaatgggggaaaaaagggagatattgtacatgagatctttgaaccaaagattctcttcattgtaagccattgtaaatgattgtacaaagtattgtggattaatcataaaacttgctgatttatcaaaaaaataaaaaattagcataaaattataatttgagagttataattttatgtatgggagttatatattaattttatattaatatatgagttacatagcataataatgctaatagtaataaaa

SEQ ID NO: 41186 - DNA, 1445 bp, Cannabis sativa
ttagggatgggaacaaaatttcacttatttaaatacagaatttttctaatcaaagtcaaccaaaccctaacgaaaccgatcatttggttggttcaaattacgtgttcaaagggaaaatttaatagttggttggatttgttcaacttacgtttttcaagggattgaaaaaaatcagatttacattggggtaatatcaccccttctttagtcctaccacttatattaattattattttttaatttctgacaagattacacaacacaatcacatctacaagtactatatattcctctacctctccttactccttcacacctcaatttagtattgttttgtttcctagagaagtcactccctatctgtagacgtatgtatagggataatatatataaaaaataaattatgtattgttgttgcactgaagtgaagatgtgtaaacagatggattggtatgcactacaaccgtgtgttgtaggtgcatcaagggaatttcagcaatccaataaatcatctcataaaaaattcgggtaaaaactcaactctttatacgtatttatttcaatgctatattattagaaattatttctaaaaaattttatgtatgtactatatgtatattcaggaaatgttgacaaaggcttcgaatgggtggattagggtaggtggaactacttctaacacagccaaaactgccatccaactgagcctctacctctcacagtccacaaggccatcgcgggatgagtgttttgatatttgacaaactcaaccaccggtgcgccagacactcgaacaaaaccgagacgcgggaggaaatcgtcagcgttgagttccatttaatggtccctagttgctattttgtaatgttagttgtttggtcgctttatttttttaaaaaaattgtaatgttcattacattgttaagaaatcactattttgccctatcttcttatgtttatttaaattagaaatattaaatgtaataacagtgctgatattatagtatacatacaactttatctcactacaatctatatttacagtgtcaaataaaacatcctaattaaatacctcaaattaaacatcacatatctttgcacccttctgtacacaaaaaatatacctgtattatttaaaaaatagttcatcataattaattaacaaataatgaaggtatctttatagtaataacatatttctaagtaagtattttttttaggttatgcaagtagatagtacaacctactgatttgaccatatatggattgatgggagaatattaataaaatgtttatttttataaaaaataaaaaaggtcatggtcaaatcgttctttagggttttctttaaaaaccacaaacactatcagctgcattgtttaaaaagtttattggaaacacaaggtattttgaggtgtttttcatttccaagggtatacatagca

SEQ ID NO: 41187 - DNA, 1320 bp, Cannabis sativa
tcacgaataatagcataaattctgtgtttgatattgttaccctcatctctaagaacgttctcagttggcattctttcttaataacctctggcggaactgtgcgtcccttcatgtacaaggaacaaatctccaattttaaatcatacgccaaaggatcaacctccaactcttcatataaattttggcgcatttgctgtatggttgtgtcagttctaactatcaacgtcaaactgcctccagctttataaatccaattataaccctcaacacactaaacaccattgtacgatacaacaagaaacacagtcgatcccgcaatttcaaacaaaaaaaggtaagttagggaaaaataccaaaaaatactaaaaataaaaatatcaacatcctatcgatatcccatcgatattctgtcgacaaaaatatctacaattcgggtggcagtccctatcgacaaactatcgacacactatccatatagactcgacaatgcacattgcatgtcagacacgtgtacaattagacatttaatgctaattaatttttcctgcctttccaactatcgacatattatcgacacactactgatatagactcgacaatgaacattgcatgtcaaacacgtgtacaattagacatttaatgctaattaatttttcccgcctttccaactattgacattgtattgatattcaatcgacaaatacacattgcatgcgtttcacttgtacagttacacatttaatgttaattactatttccttcattcccaacaagtattcccaacaagaaaattgcatgtcaaacacgtgtacaattagacatttaatgctaattaatttttctcactttccaattaccactctatcgataagctattgacataacatcgacatcatatcgataatgtgtagattgaatttcttttgttcaagttttatcgataaactatcgacattgtatcgataaatacaccttgcatgcgttgtatttgtacaattacacatttaatgttaattaatatttcctacattctcaacaagtattctgctctataaaagcatatttctttctaattcataagtgttcttctcttataattctcttatacttcaaaattaaagggaaatttctcttatacttcccttataattctcttatgttctaaatgtctattagaaagaacaagggcaaatacctaattctaactcctgaagagatcaagaaggagcctggttgtggtaaaattactcctcaaatgtagaaagttctagatgactataaacattttgaaaaagaacgactggcgaacgagtggagcta

SEQ ID NO: 41188 - DNA, 1362 bp, Cannabis sativa
  modified_base (26)..(40): a, c, t, g, unknown or other
aggatgttaataaaacatacttggtnnnnnnnnnnnnnnntggtaaaatatttccaacagggtcgtcatgccgtgccctgcagttgtagactgtccaggatttagtgccggcagaacccttgtgtttcctgggtttcgcagtgcaggatccaccacttgtggattcactggatccaccacacccctacgagtctgtaccactatcgtacttgtgattaaatttgaaataaagagcgatccttcagttcagctctcaatgaaagcacgaaaatgttgacctcgcttttagccaacgaaagtgagtctaattttgtaagcgacaagtagtttattacgagtgaaatatagtaaagcaatttaaagacacaagaatattatagaggtttagccccgagcagttcggtaatagcctaatccttgttatttgtattgactttagtataaggagaatagttccttttcttagagttcttacaagagtatctctaaatattaattattagacaaaatctttcgaccctttgcccagtgaacatgagtcattatttatagggctataagcttggagggaaagtatttccttctggttacaattgctataagtagaaagattgcatagtaaatacagaatacaccaatcgtgggatttggacagcttgccatatctcagtaatgtgatcccaaagttatagggattttcttgatgactcacgatgcaaaaactgaatttgctaagtgtttatctttctgcgcgggctgctcactgcatcgtctgagcaagcgtatgaggtgtcctattcggcctttgtcttgcgggcagatacccagagtcaattccacgtgtcaccatcgagtgatgccatgtcacagtgcaaaaattgggataacaataagtactcttaaaataattaaaacgtcatgagttcaatcctttagaagtaatattttttttctttatttatattaaattaaccatttcaattaatttgacaatttcaaaattttatcatattatattaattaatattttctaagattataatgttcaatgtatttatgaaaattagatatagaattaattattttatttatgtaatcatgaatgaaatagaaaataatacatattcataatatattgattcttcaacttagttcgagttaagtgttcaatgtatttaaattttctagatattaaattaattatttattttaaatacactatttatgtaaataatgcatgaactagttagtagtacacatataaagtttgaaagagtacacacacgttattacaatggaaagcacatgtacatatttatattttcatacacaacaaaatataaatcaataagaatcaattta

SEQ ID NO: 41189 - DNA, 816 bp, Cannabis sativa
catagaaaataaaaaggcctgaaaataggcagtaccttgggggataagattgttaggagctagtcctacaaagactaaaaagtcgataaagtagttttagagtggaagacttgcaccagacataagatgtagggccactgtctgagatgaagaattggacgaaactttaggatttgacatcttggtcttggaatagagttctagaatttcttggtcaaatgcataaatgtcgtgcccatgtaggtctctcaagacttcgctcatctaaaaaaagaatgcactaagcagttagcacccatatcaaacccaaaacaaagaaaggaatgggggtcctctaaccactgagaagagactccctcaggatgctagcatttttaaaaaattgtaaatttcctatgccatgaattgggtgctaattgcaccatgcacaagtagaaatgatacaaggggcgaagggaaagagaaatggcgagttctatataccctaagcatcgaatcccgacctaagatgtaaactaaagacgaccaaagaaaatacccaaataatagtcatgcagtataaatattgcatttaagtagaaagatcaccaaagaaaaaaaaatacaacaacaatgaaagaaaaacatatggcaagcagcttacgaaaagaagaagcttgtatggtcgtaagtactggtgcgtgatgaagataaaactgagcttaacaccgtcggagaaagtgcaaaagaaaatctagagtgtctggaattttggctagtttggagttctaagaagtatgaagatgaaaatttaaaaagaaagaggtaaaggaattt

SEQ ID NO: 41190 - DNA, 1296 bp, Cannabis sativa
tacacacccaaaaaatattgggcttttatcgtccccctatcggacccccatcaagacatcacccctaatctctaaactgaaaactcattggaccactatcataccaatatcagaaaccatcaagcttatcaaaaaaatttaaaaattagaaaaacgcaaaattttcaaagaagaacaattcacacaaaaaaatcaacaaaaaatactgacaacccacagatcaaaaatctaaataacattgtaaaataaatataacaaccaataacaaacaaaaacaaataaagttactaacccattgcttaaaataatactttccgtggttgctcaaaaaaaaaacgtaccacctccaatccaccttcgatctatgattggagcagcttaaatcttcacttatagtaaaatattagtgtgatttagttagaaaaaagagagaaaatgagtgagattgtgaagtgagaaaagagaggaaaaggaaagggaagagaaaataatgttaacttatacaagaggtattttgagaaaaaaatcataaagttagcctaaaatacatatggcgctcaacacagatttaatatattatttggaaaatttgactttatatatatttattagttcaaaatttattccctagtcactagtgtactaatattgttagattaggtcaatttttcattaaactcaagattacccctcctatttttcaactctctcctgtctctctctctctccattctcgctcgctctcttcaacagaactgaaccaccatgaccactgccaccatctaagaccaccgttgccaccatccaagaccactcgacctgctaaaaaaccaattggaacaaccctctcgactccatttcaatccgtccgagcccatgataatttccttcctcaaccgcgaatggagagaccactaccacgaacatagaccacaaacattggccacgaatggaaagaacatgaacgaagacgttctttgtaattttttgtttttttttttttgtttttttgagtcggtccgatagtctttgatataggtgtgacataggttcgataggaggttctaaaatttaagtttttgagtttgatggagaaaatctgatagtagtccggtataagttcgatggtggtctgatacataggtggacatatttcgtgtccgatggagggtccgatactatccaaatggagtccgatgggtatatatacatatttattatgtatataaacgtgtgcttttcttttctctttcttgttcgaatacatgtaatatatattattatgttcgtttaaat

SEQ ID NO: 41191 - DNA, 1071 bp, Cannabis sativa
tgagagaccctcagcacacatgaggaagagatatggagagagaggatcaccctgcctgatacctcgagtaggagtgacaagtcccagggcttggccattgagattgaatttgaaggttgccgtggcgatacatttcatgatcaaagtggtgaaccgggggggaacccaaacctatccatgattttattaaggaacttccattccacacgatcaaatgctttggccatatctaatttgacagccatccaactcaccctaccttgtttcctattttttattgagtgcaagatatcctcggccatgagaatgttgtcagagatgagtcggcctttgaggaaggcactctgattaggagagatcaagggattaaggacctgtttgagtcttttagcaaggatcttcgagataatcttgtaaatcgtggtacaaaggctaataggtcgatagtccttcagagtagaaggcttctttaccttaggaatcaaagtaacaaaagtggtgttaaaatgggagagacactgatctgttttctatccctattattattaatattgtctttattggatcccatataataatgaactaatggtacttttagttaggttgcatgaaatataagggaaataattaaaaatatgaatatataaaattaatatgcattaaaaagagtaataaaaaagttaccattggaatgacttaattacaaatatagtagaatttctatctaaaactactagagattaattaaatagaaattatttttatttataattgaaatctctatctaattaagaatataattggaatgacttgattacaaatacagtagcaaattctattctaattcaaaaatataaaatataacaacaatagcaataaatgattcttaatatatgttgcccctgattttgcccaatatacgtggattaaccggacagggacacgtggaccaaaagatcttaacatttgaattaattgctaagtctttatgaagaaaggcagcatccgggacctgcctcccggagaaggcatatgaagtcccctatgctcccggagaaggcatatgaagtc

SEQ ID NO: 41192 - DNA, 1329 bp, Cannabis sativa
  modified_base (747)..(753): a, c, t, g, unknown or other
caccatcgtgtgatgccacgtcagagtgcaaaaattggataacatttgcccccaagtctgtatgggacttccaaagttggatgtagactttatccaagccgtctttatgtttggatgggtgacacgtattaggtgcgtctgttcgcgattcgatgtgaggctgactaggcgtctcttcggtttttggctaataaatgctgtgacacaattaatgctttgaaatccgtttttctctcaccacgtttgatagttacacttgaattgttttgatttccaatatttgtttttggggtaaccgagcatttgttcacaaacttattttcatcaaccttctttgttaagcaagtttagagcaaaaagagagaccttgagcttcaagtttgttgaaaactttcataaggactattcgttcgactttgcgtaaactgaatctagatgtcaatccttgtgtaagttctcgatttcttttacttttactttgcacattttactttctgaatgcgatcttaactttgctgtagaagacatgtagaaaccctgggtttagaaactttgcgattttccttcgtaacgattcatgagacttcaccatttataatgcttgctttttgaactgcacaatgtctgtctttgatttttcttattcaaagcttcacaaaatttttgccctagctcacaaaaatttcaaactcttgagtcttgacttttcgtcgaatattttaattctttaatctgttgagtactccnnnnnnncatattttcctgtttaatgtttgaaatcccagccaaacactcatctcgcgtgttgtcttttgtagatgaacccaagtgagttttagggaagcgaacacaaaatcgaccaggatctgtttcaactcctgtgcgaggatcaccctcgtctttgttctagtccgccccttcaatcgatagacattttcattcaatttttccgtccagccacaagattatggctcgcactaaacaaacaatgcgtaaatttagcgcgtctgactctcacgtggcctagcacgccaccttgcccagtgccgaacaggatccacccgtgcaacaggagggggatcatgaaggggacgttgaagtccaggagatagaagaacagggcgatgtccgtcctggcagtcctttcaaggcggaggaagaggaggaggctgcatccccaaacttaggaggacacaatgaggctggggaactagtgcacacagacggcgatgtcctggtggagggcgcagattacgtcactgaggagcttactgccccagttcttcaaaggaggcaaagtgccttgggtgccaggtgggtgagccctcc

SEQ ID NO: 41193 - DNA, 1833 bp, Cannabis sativa
taatttattagatttggccattttcttaattttttttaaaaagtggacatttactaacttagttaccaaatttagggccattttacatctcaacccttttacttaatctagaatataaggaaataatgaagatagcgttaataataataatcatgcaaaattgaaaatagtgtgggatcaaatcaataagaccttactaaagccacatagtaaggttatttaggcctgcccctgttccgttgaagacaaaaggacgctgactttaacttcattcttgataatctcacttcaaagctacaggactggaaggccaagactttgtcaaaggcgggcagggctactttgattaaatcggtgggtctctcgttgccaatgtacgctatgcagaccaccaaactctctaaccgcatggtcaaccgtattgatgggctggttagggatttctggtggggttttgagaaaggaaaccatgggctccatttaaaagcttgggacaagctgtgccttcctaaatctcttggtggcctcggtttccggaaaactagagaaatgaaccaggcttttctggctaagtgggggtggcatatccttactggtagccaatcgttgtgctgcagagttttaacgacgaagtatttaaaagggaaggattttctaaaatataaatataaaaactctaactcttggttctggaagagtgtggtgaaagctaactcaattttaaagagaggtgcttgtaagctggtggctaatggagagaatacatctatttgggaggatccctggattcctcattctaaaggtttctgtccaaaaccaatcaggggaggtgcaacaaatctcaaccgtgtgtcgaaactgttacttcccaatggtcactggaacgtaaacaagctgaaagaaagctttgatcatgcaactgttgaagccatcttaaaagggggccacccctctggccttggtaccgacagatggatatggactcaaaatagtaatggagtgttttcttgtaagtcggcttatcttgttcaagccatggatagagctccccagtgcgtcgtggccccgaatctctggaacaagctctggaatagccaaatcctggaaagacacaaggtcctgtggtggtgtattctgtctaatgcgcttcctacaagagctgtgatcaataaaagattccacattgaggatactagttgccctctttgtggatctagggaagaaactatggaacaccttttcctttcttgtgatgtggcctttcacctctggcgttcttctccttggggtttttatcccatttgcgatacgggaatccgggtttgggattaggttaagttcatctggggcctaaacagtagaggagttctagtgaaggatgcattcttgtatgcctccataatcgtggatacaatctggagggtgcggagtgaaaaagttcacaataattgccttgttgatgtgaaaaaatgtgttgatgatatatactttgtctatgctgatttgcatgattctttgttatctagtcctacttctcatctagaggaagtttggtcccctcccccgcgggattggattaagctgaattgtgatgtaaaagtggggtttgacaatatgtgtgttgcagttgtcgccaggaaccatctctgagtagtggttaaagttcagacggcgcgggtggatttctctgacgctctttgtggtgaagctgaggcatgctgccttgcgatttcgactgccttagagatgggctacaagtttattatagttgagaatgactcgagggtggtgatcaatgctctcaatggattggaatctcgttgggcgcttgaa

SEQ ID NO: 41194 - DNA, 1262 bp, Cannabis sativa
ttaatttcttaataaataaaaaattaattaacgtgtcatattaattaatcaatataaatatataaagaaagattaaaatagaagtgatgttaggggtgcacattcgttgggttagaggtaatgattgcagtttaaaaaccctacttagtacaataatataggagtgggttgggttggattcattgggttgagatgaatattttaaactttaatatttatgttacaaacaggataaaattattcaacctagtgcatacacaaaaaaaaatgatacatatatgtgtgtgtaatatagtgctttaaaaaaaactaagatagtagtagtatcattgtgtgagtagcaaagttaataatagtgattaattctcacattaagcttgttagtagaagtagtagggtaactatagattacatgttagcgatgtgttttgattaattcatgttctaaggttatcacaatataatttttttatttatgaaaacgtaaaatatatatttgtatatattttgtgaatataaaatatatttcatgtatgaaagttgtcttaaatttggaacatcttttaagaaatgggttggtttgggttatatagagttaaaatgtgtccaacccataaccaactcataattatatggcctatcacttttcaacccagtgagccatgacctactcttaacataaccctttactacaaaagataagttgggttggccggattgaatggtttgccccatattttgtgcacccctaggtgatgtggcattttatgtgaattttatttgcttttctttttttttctcatttttcacattttttttaatatttttatatgcttttagtaatacgagagtcatgttaaaaaagtctcatatggtttaaaaattattgtgggtgatatacttttacattatatagatcactattcttttgctttagtttgttccaaagttaggattatttattatttttatgaaggtgattgataaacctaatcttccccaattaattgtaattttttttaaaataaatgcaaaatatatttttcaatatctgtcaagtttaaaataattattaataaaatcattttaattatttttcatattttatttaaataattaaaactacattaatttattaatacatgatattttatctgaataataaaactctttaaatatatatttttatatttatttttggtgagatgagactattgtgaatattaaatttataggttatacatattttatttgttagaaag

SEQ ID NO: 41195 - DNA, 2787 bp, Cannabis sativa
  modified_base (1255)..(1258): a, c, t, g, unknown or other
atctacaccagcagccacaacggggcactttccacccttcactccggaagcggtgtccgagggttttgtccaactgaccactgatcagtatgccgcaatccaagaccagctacgcgccctgcaagccgaggtggatggacagaacagggcccgacgtcctcctcgagcacccactactcgcacagaaaaccctcaggtaactaactctagacgtcgtaataaccgtactcgcagggaacgaaggatcaacccagaaggactcgacttgaatcaaccaacctcgagggaccaatctgcgagatatccctacaagaggcaaagactgaagaagaccctgaacgatgcaatcctcgcacaagacctcagtcgcgagacaatgacgtggaatccgcctcctcatcctcgcatggtcgcacacccagcaggtatactaggtccagttctgcggagacaccatagggaggacgatatcaggtgcacaggggttatctacgcgatcaccttaacgctgttttcaaggcacgctcccagcacctcgtgacgttgaagagccccgtgatccccgaatgggcgatcagggtgtaaataatcgcaccaatccgcctaacgcaccatctgcgactactagagtcaatatcccagcaaacctcgctgcattagcaacaacacctacagcaacaccagtccctactcccttagctgggaatattgatcaaagcatgcttttgcaggctttgaaaatggtcgagcagcagagaaagcccatatacaagctgcacaggacgtctccttttaccgcagaagtgcgacacgctcgactctccaagggattccggttattcgaatccctaaaatataaaggtacctctaatcccattgaatatttagagaaatttaatactattatggaagtggatcaggtacctcagctcgcaaaatgtcgcattcttgtggcaacattggacgagaatgcccacgattggttcagccaattgcctgaggcttctatctcgacatgggagacctttgtcgaccttttcctcatgcatttccaagccatgatgacctataggccgccctataccactctagctaacatcaaacaagaacctggtgagtctttacaggactattttaagcgttttaatgctgaggtaacaaaagtagagaaggctcccgagtcttcgctagtatgtatgttaataacaggtgtcttgccaagaaccgatttctggaaggaactgcaagctcgaannnnagaatcgctggtcgagttctttgctatggcagaaccgcataagaggattgagaattctctagcagaattagagaaaggcaaagataagcgtaaatcactagtaccgcgatcacgatcctgcagtcccagagggaagaattccagaggacgaagcccaagaagacgcagtccacagagacagcgaagtccgaagttagccaagtcccctccaaagaaggaagcctccccaaaaaggaaaggtggctcacgcttcgtaaactatatcgagttggcaatacctcaagaccatatctacgccatcaaagagaaaaatggggtcttcaagaagcctcccccaatcaggggaaaccgcgacaagagagaccctaaaaaattctgtaagtaccataaagagattggtcacactactctgtagtgttggtttttgcaggacgagattgaagagttgatcaggagaggaaagttcagcaaatacaagaagaatgtggaaagtcatccccgagcggatgataaagaagagaatcagaatgggagtggttcgagaactcctcgcaacatcttgaccatcataggcgaaccccatattgctggtgactccagaaagtcggaggagagatatgccagagaagccaaagaaaagccactcaccaatgtgaacaacctgagcgagctaccagagaagatgttcaagagggagtgcgatgaaatcacattcatggaaagtgatgcgagatgggtccaccacccacattttgacgcattggtcatcgttgccaatattggcagagataacgtccaccgtatactcgtggacaatgggagttcagtgaatctcttgaacttccaagccttcaaacaaatggggttgcatgagaaggatctgcgacctgtaacatcaagcatataaggttttactagcgacatcatcgcgttaaaagggatgatcaagctcccaattactttgggaactgcccctgtagtagctaagtcgatggctgacttcgtagtaatcaacgaatactcgacatacaatgccgtgattggtcagcctattctaaatgagatgaagatcgtgacttccatctatcatctcacattgaagttccctactcccgttggagtaggttctgtgcgaggagtccagtcagactcgcgagaatgctacaacaccgcggtcaaacttgcagaaaagaagtcagtcaatgtcatctacctgctagaggcaccacttcctcgtcaggaggtcttcagaatagaggaagtaccgcataaagacgagccagatttggatcctaggatcctcgactatgccgcaaccgctcaagccgtggaagacaccattgaggaacctattgatccaatagataataataaagttttcaaaattggttataaactaacttttcaacagcgagaaaaatttgtcacatttctcaaacaaaacctggatgtttttgcctggaaacattcagatatggtcggaatatctccgcaagtcaagtgtcattgattgaacattgaccccgaag

SEQ ID NO: 41196 - DNA, 944 bp, Cannabis sativa
attgtatacatgtagtcttatcgtaagagtatacactttacatattaataactacatgatctaaattcaatggtcaaaaaaactttcctacgggtaggaaacttatgctaagtcctaccatagtcttgccctatatatataatataatataatatttcactgtaaagctcatgtcaatgtcaacttaaataattgaactatatttttacaagcagcactattatttggtaagaacgctcaaagtttttaatgttactatgcagttactctgatgactaacagttataaaataaaggtacctcactaaattcttggcggtcaaatataagaagctaaagttattttctatatcctaatatacaacaaaataacttgataatttaggaaccgaaataactatttctatatctagatgtcatggaaaaatctagcagatcaactaaataccttacacatcaagtgcataaagacactagaattctctttttctatataacttgttaggtccttttttggtaatttagttgtcaaaatattttttaattaatgtgcattttattgagcttttaaattgtttttattacattgattttatgtattttattgctcttttatatcttaggaaagaatcatttttcagctggacttttctttgtttagaaacttcttgtaagagaagaaattctattatggaaagttgtctaattttgggacacttgactttccctttttctaattgatgatttcaatttcgcctttattagaacaaatcaaattatctttatttggcagctttgaagtccaaattcgtaattttgattcaatttagaaatagtttcctttctggtcctgatctgctactacgaaacccgattctgatgctgcaaatcaggaatttttttaggaaagttttgtaaattgtttttgttcctgtctctagggtt

SEQ ID NO: 41197 - DNA, 1944 bp, Cannabis sativa
gggagttgttcgagagacgaaagtgtgcacgaggcacacggtcgcgcgaaaaatgagcccactgttactcggatggttggaaggctaatcctggcttagagaaatcaaggtgtcgtacgggtgttccgctgcttgaaaataaatttttttttttaagtttttaatttagttaaattattttcatttataaaaaacagaaaaatttaaactcgaactcaagactttctctatgcaatgagaaacttttcttgtatcaatataaaagagagagccttgagaaagtgatgcggtatctttttctaatattctctactttctttatttttagtcttcccttattttttctattcaacacttactaataaccaaacttaatcaaagaacatgaaattctaatataggcaaattgtgttaatcaaaagttctatattatttgacttctaattatagaatatgtcataaatgataatccatacttataaaaaggattaaaaagcttgataacaaatccttatcatcagagtcggtccaaacatatggcagcttgggccattgcacaaggtctcttatattaaaatgtcccattttgttatcatcccttatatatataatataataaatatattttttttaataatgtatagtatacatacaataaaagtttataacagtaaatatgcactttaaaaaatgttaaaatattgtagtcccaatacacatgattctaaattttttgtctattttagaatttataaagtatttttttgttcaaaattaaatttatgtagtattaattaatattttttttaataaaaggctcaatttttattttttgtccaaggcccccaaactacttgggccgcccctgcttatcatgctacaatattgttgtccacatatattttattgtaaattttatagtcttttttatcctttatgtcctatatatgtatcatttataataatttaaatgatttttatttttgtttttttttattttatttttacaaaaatgcatgattttgagaaaataatagaaattttatattatagaatttatttactacaattattttgcaaccacaaaaaaaattataagatcgcgcaaagcgcagtttagtttcctagttcattaaaatagaaataaatatttaagcatcttgaataaaaatcaacttaattattaattctaatttaatattaaaataattaatttaaattggactaaaattaattaataaattaattttcaacttaaatacattttctatttaattaatttcttgaaatagaaataaataattaattatcttgaagaaaatcaacttaataattaattttaatttaagttctaagaaaaatatcctaatttaagttggtctaaaattaattaacaaattaactttcaacttaaagatatttttctacttaattaaatattaaaaaaatataatttagttactagaaattactgttatatctgaaattcggtcatcatttcaaaggaggacatgtgtcaaattaaggagaatatggatcaagaaacggtaattatatttgaaaatggaataactcattaaatgcgaaagtgacagagtatatttacaacttgttgactataaagttttatgcgagataaagatatacaaacggttgcctcatacattaacgagaaaccatatgttagtagatgcacaaggctaggcatcaatctcgttaagcatgagtagacgtaagcgagatataatgactgtaaaaatacttagcatataatatacaatatacaaactaagtataacagtcaggtaaacccaagcatctaattgcgaggcatccatcttgctataggcacactccttatactttcatcaatcaacttgagacatctttagttgaggtttatagtcttgacgagtcagttctctcaaatagaagttgacattc

SEQ ID NO: 41198 - DNA, 1392 bp, Cannabis sativa
atttgataaaataatttaaataaactgagatattttgaaattagtttaaatttttaattttgaaatgaaatttaaggttgtttcaacaaccaaaaattttcaaaattaattggttattctattaacgcagattttcgctaacgattatgagcctattttcgtaataaatttggcacagaaactatgagagatttttagaagaataatagaaacaataataacaccaggtttttacatggttttccagttaactctgcatagtccacgattctatcttattaagatatttctagatacagaattagggttttacaatcagtaaactccctcttttctctaagattttcggtccccctcttttgtgtaatctgcccatatttacagtaatataggtaggcgattaattacatttaaattcgaatcctataataatattcctcaaaattatgggctttaattacgctccatttaaatacgtgtagataatattagaaaatcacacaactttaatttaaaccgtctttaaggcggtcaatgctgacatggataggaacacattgtcaaatgtatgtcgctgaggtgtcttaccttgacttagtttactcgtattccagcaatggcatgagcatcagtgtacttaataaatttaagaactgctctttgaccataaggccttgttgactggacaatcatatcattcaggttattacacttagttgttgtaacatgggttatgtgctaagtgttctaataactaattctcctcgtcaatacctctttacatacagcgaggtagatgcctcgctatgcgttgtttatagctcccttgatattacgccttccgagacaagatgatttctcgttaatacatgaattgatagtttacatatccttgtctcgcttaagactatacagccagcgagttatgaacatactctatttattctatatttaatgagttattccattttgcatttgatgacatcattatcattaaatttgttgattcatattccctgagattgacacgtgtcaccttctgaagtacaactgaatttcgggtataacaattgcttcttataaattcattttcaatgaaaagtactttttaaatgattaccgcatgtatattcgtcataatccattttggaaaatgtagcttttgaatttggcagtttatgttttcgaagcacatcattagcattaatgagccctcttttccacttctctcccatttttatctgttggatcttctaccttaatcctacggtaattaagttcgaagtattaaacggcaaaggagccattttttccactatttttgccttttcaaaaagttccaacttttttgagaaatttccatccaagtttctgaaactttgcatgccctca

SEQ ID NO: 41199 - DNA, 1057 bp, Cannabis sativa
gagattgaggtctgatcgtgaatcaaatattgggttggtagcttaagtttcactatctccatttctggaaggatagtggtacttggatagtggttgctctcgacacatgactggcaacaagaaattcttagtcaattacaaagaagaaaaaggagggagctgtcacttttagtgatggaaataagggccagattgttgggaaaggagacttggtgatgagtagagctgcacctcttactgaagtactgtatgtgaaaaggctcaaggcaaacatgataagcttgagtcaactttgtgatgcaaattacactgtaagtttttctaaaactcattgtttagtttcatatgatgggtgcccagccttaacatggaagagatctagtggtggtagttgtttattccacaatgttgtcctatgtaatatgcatcattggataaataagatattggggattttactgctattccaaaagttttaaccaaaagcaataagagcattaaatcatcatctcgtctttcaagagctcattcactattattagttcgatggtctggtcttttaaagcttatattgttaaatcttgggtttaaataaagaaaggatgatgtttttgtcctagtgattgctggtttttatcatgttgtacatcgtactcccttgtttcaaaagaaatatgatatacacatgatatgttgtctagtgatcctcattgcttttttatgcgtcatcatttgtgataatgaaagttccacaaacattcctcaaaatgcatgttgactaaaaatatatagataatagatataattttttacagaatcggttgagtaagaatacattggataatcgcatattattcttgatgctctcttggatttttgtttactaaagccttgaattctcgtattaatgtgtgcaacttcggaagttttttttaatgttcgatctgattaatttgttgtggtatatgatcattatctttctcagtttgttcagctaagccttaaatgctataatttttttacaatgaggcacttcatgtcccatctacaagttctc

SEQ ID NO: 41200 - DNA, 1743 bp, Cannabis sativa
  modified_base (1464)..(1464): a, c, t, g, unknown or other
atagcagttatcgcgtagcaattggccagcccagtaagtgtattgtggcagaaatttcagttggcgttaatgaagaataaaggatgcttatgtggcaaaaatgtgtacaatgactcagccaatatgtggaaaaagaaaggcaagtggacaatgacttggatttccaattagagtaaactttagtaccctaaatggggggcagccaagaaaagagaggaacaatgaatggtggctgcacttgaaggaagggggcagtacgaaaatttcagaggaagtacataaaaaaaaaaaagaaaggaagagagtacaaagaatagaagacgaagactaagaagaaggagaagaaggcaacctcaaaagagaagatttgagctcaccaactcatttctcttgctcttctcttccattttgtatcattttctactctttgttgttctctttagctccatgaacatattattttctggttttaagtttttaattttagatatgaactaagatctttgagatttgggtggttataaaccctttgtatgaactagtgctttaatttacaatgattgaagtgatcctatctttgttcaattgaatgtgatgaaatgttgattgaatgttaatttttggccagatttaacatttagtaagctagatcttacttggaaaagtaagacctagttgaacccatctaattgatgcatgatttttacatttcttttatgtattaattagtagtgaaatagggatatttttctaccttgcataactaaagatttgatgctatattggactgtttgtgacccgatttagtgtaggaatacattgttgaggttatgaatagtatattgtaggttttggaaaaagcttgttggttttggaacataccagtgagaaattaaccacccaagtctattttctaaatctgaaattttcacaactttacttacttttggcttcttatttttagtttatctagcttaaaacattatttctaaactctagaattaaggttaagaatttttctcttgaattaattggttactttgctttatttttacttggaatttttgaattgcttttagttgattttgcattatttagtgtgaaagtccctatggatacgaactttgattacttatcattgtattacttgtttttgattgtgtacacttgcgcaattataaatcaatatacttttcacaacaagtttttggcgctgttgccggggactttaagttctaaattctgttttatcaactaattgacattctatgtttgtgttttttttgatcttgctggtttgttctttgaaatctcaggtatctatagtgtatgaaccaacaagaggactttgaacttgctcctattgatcccgagattgaatgcacatttcgaagaagaagatgggttcataaggctaagggccgacacatcatggctgagaatcttgatgatgatgggattgcncaataaattgttaatcccatcatattggcagatgatcgagtaagggctatacgggaatatgctgccccaggggcggaggtattctttgggttggggtgaccatggccccccctcaatttctcaacaaatatttatgtatcttgatgatattattaatttattaaaaaaactttaaagatactcttattgtgagtcttttttggagatatatgattaaaaattataatttagtaaatagaaaacaggtcactaaaattacatgtagtacttttgtattcc

SEQ ID NO: 41201 - DNA, 1651 bp, Cannabis sativa
tgatagttgtttttcagttgttttatcattattttttagtttagttactgtatttaagttttttaaatattttttaactttctatttcgtgtttctttattgtttgtttcagcatgtgaacactatattctattaccttaggaaaaaggtaaatattcttctgctgttacaatgaatttcgcaacaactgactgccttttcgatgattccattcaagcgttataccacaagttcaacaaagccaaggcaatgaaaacaaagatgtcgcacatacatgctgctcacccaatagcgcattacatacgaggtttgcgaattccgtgttctaagccttggtatgaagccaatcatgtcttattcatcataaatcttaggaaggaaagtcattcggtttttggtcgtcttgacttgaatgaggggattttgtttctttataattccttgaggactgccaaaatgaattctgcagctaggaatggaatgaaggcttattatgttttactgcctttgttttttgatctacttgaattttggaagaataggtcccatgttcctgatttaggttctgaccctaaagctcctctaagagttgtggagattgctggtcttccatctctgcagaaaaagtgagttgttgtttttaagtttattttatgttgtattttagttgtttaactgtgtttttccttttctggttattagtgattgcggagcatttgtggctgcatttgtcgagttcttcatccatgaaaaaagatgttcttgctgatttcaacattgaagtttatcgtactcgacttgctgcccttttcttctcatacgggcataggaaaattaatgaaattattgatagcgaggatgagaagcaaagcaagtcttccaaggcttctaaattgaaaaagtagtgtctttttttagtgacaatttgttgttattggttgattttattatcagacaattgttatttattttatgtttttaggtattatatttgttttatattctagacctagttttaaacttttaggatatttgacattaatcattataatatgttaatttttttatgttttgtatcaacatcagttttatgtttttcccatttattatgtttttttataaagtcgttcaactatatagaaactattatgtaactgtatacaaacaaattgcaatgttcagcatacttgtaattttaattgtgtaacaatgaattcttcactgttttgtaacttttttattatcctaattaatcatattttataaattaatatcagactttttaaaaattttaataataaaaatcttttcgtagttaaatattaacaagtgtcaaaactgtcatgaaactattttgcaactattagcaaactatttaaaatttgccaaataatatcaatgtaccaaatataacatataatcctgtgtgaattctcatagagaattaaacaattcaaaaaattcagatgtatctattttattgcttgattgttgcatgtctttcagttgtgtccgtgtttaccacgtttgctacaccttctattttttgtatcccaatcagctataaatcttcttttccttggtcttccagatcttattttctggtttggtggcagaacaatgataacttttatgttctgtggtacatccc

SEQ ID NO: 41202 - DNA, 2455 bp, Cannabis sativa
cagtatttttgtaaatttctcaataatcatctatacattttagttttcatggaccttgtaattgatttatgtatctcactacaagaatcatgccttttaatgaggacaaatttcgtcagttaaatgtgtgtatttcgtgagtaatgaatatcaatagcgacatgtcgtcagtaaaaagtcgttggtgatacttcatcgatgataggtattattactgacgacatttaaagtcgtcggtgataaaaataattaccaacgactttatcgttggcaaaaagaagcaatttttaaatttttttaatccgtaagtctatcaatgacaactttctcatctttgataatattatcgccattgatttatttattataaaaaaattatagataaaagaataatttttattaaatattaattttttcactaatcaatttatattaaataatttcttaattaaacaatattcaaaataattaaaataaaagtgaaagataacaccaaactaaatatttttatatcaaatatcaaaagttaaatataacaatatccttaaatcaaaataatacttactaaagtgaatatttataaaccataaataaacataaaagtaatagttcatataactaaaataaaaatactaaaagaaatttgttgttgcatcgtcatcatcatcattaacatctcccagaatctgcggttgaggaatatccggcatttgtgggtagtatggaggcatctgcgaacttgtcatcatctaagtagtctgttgcccatgtggtgttggcatatgtgatgtctgctgctcatattgttgcccttgtggtgtcggcatcatttgaaaagtctgcggcatctgcggcatatgtgacatttgttgtttcggtatcacttgtggcatccgagactgtgagacttgagacgtttgaggcgactgcatcatcatctgcatcattacttgtgggctatttggcacggggactgtgacatcatatgcatgaatgtcttaaacatctgaaattgtttaaattgatgagtcatttgttcaggaagttgatatggctgctgtaataattgttgaaatgaaagtggagcctgctgcgactgttgatacttagtgtttaaaaagataatattaaaccttttcttagttaagatgcttagtttttaaaattaaatgcattaaatttaatatgtttataataatacttatatattaaataaattttaaaaaaattattaaaatgaaaatctaattatttaataattaaaaaacacaaatttaaatttctttttaattaagatacttagttttaaaattaaatgcattgaattttactatgtttataacaatacttatatattaaattttaaaatattattaaattaaaaatctaattattatataattccttttttttaaaaaaaaaaatttaacttttttagttaaggtacttagtttaaaataaatacactaatttttaatttctttgtaataatacttagatattaaattttaaacaaatattaaattacaaatctaattatttaatatattctttttcaaaatataaaattacacttttttaattaaattacttagttttaaattatttaataattaaattgtttaaatttaaaatcaatttcatgcaatttttaaaataataaattatctaaataataatccattttaaaattttattttcaataattttactactttattataaattataaattaacataagttttagaattatctcaaaattctactaatatttcgacggcataacaactacatttcaacctatctaaaaacttttaaatttgtcctagacactccaacaatgttcaaatacattataaattcacactatctctacatatataaaacttacatataactaaaagaaattaaacaattagtaacacttaaaaaacattacataaaatttatttattttaaactatattaaatctgttttttcaaaaattacactaaaaaatttaattatatatacaaaaaattaataaattatacaaattacatttatttacacattaaaacaaattaacatataataaacaaatataacaataaaaaatactaattgtttgtggtggctttaatcaacaactctagcaaatttcccctaataatgcttcttccaaagttcctcaaaaacaaatatatttcattatatcagataaatatatacatataatataattttttttttccgtataaacaaaaatatagtatatatttaaaaacttaaataagtttaccataataaacatcccaaaattatttccctaaaaaatttaaataccaatttttttttttcaaaaacaaacaaaaaatcgtggtatatataaatattttgaatatatattacatcaatataaaattcatttggacagaaaagaatgtgtgttcactcaaaaaaaaaaaaaaaa

SEQ ID NO: 41203 - DNA, 1900 bp, Cannabis sativa
actaatcagattgtaaagagttttatttagggtagaaaacccaacacaaacacactagttacacaatcattgtagtgtagttagtggttttaggacacaaaatcactaatgaagttagatttagggtatcggtacctcttttcataatgatatcactaatcaatatcgaattagtcttctcgttagttgtgccaatgtacaaaaacactagtgacactaatattgtaggtagttagtgctcccgggacacaaagtcactaatcaagttagatttagggtctcagtaccccttttcataagaaaatattatactattagtctatatttttgggaatcactaatttaaaataaatatttaaatttaaattaatctctcagtgataataatataaaaaagaaaagagtaataatatcatagataaaaattgagtttcatttagtggtctacaaggccatcgtgggatgagtgttcttatatttgacgcgctgggtatggcttaataggttgcgccagacactcaagcaaaattggatcgtgagagagtggaacactcaacttttgtactttttaataattaaataatgagtttatcaaaaataaataagtaaataatattattatattaataaaattggataataataaagaagatatttttagtgtaatttttactattgaaattgctctgagtaaagtggaccttacaataccactctcatttgtacacatatactgtccaaaatatgtattttttattagaaattgatggtagttttgaagtatttttacttttttattgaatggtgtgtggcacaatatctaagaatgaatcttctctcaatttttttttttgaaataattgatgtttccacatgtattcccataagtgtccaaagtggttctagaaaaaagtagtcttcttcaattgcaatattagtttgattgcatcattacatatgaaagacatatttggatatttcttgatctttgagtgtttcaatatttaaaatatttatattttaatttttttttatcttctatttatcttatgtctacatctttttatttatctttttctaataccatttttaagcttttatttttcaattttatttgtaatgcattattaatatcatgatcactagcattgtaatgttactagacctttaattataacgtattcaacataaaacagataatgtattttttttcaaagaaggtactacttccaaattttaaaattcattatctaacatacattctagaataatttgtgttatttaaattgttaacagacagaatatatgaggagtctctaacacagaacatgaataagcaattaatggataaagaaacttatgaatgggaaagcatagcagtagagctaaacatcaaaaaaccagtgaatgatattgaaaatatctgacgtgttaggtaagagtcttgaggaactggaaaaaattggaagccttctatgcgatgtacgtgaaagggataggttttggcacaaaaaaatatgatatttggcatgctcatggggtcattgtaatgcataggtgggtttgttgttcctagggtttgaaaaaaaatcacatcaccagacatagaaagaaaaaatgacctcatgatcgaactagaactggatgtcaggcagcattgcaaatttcattcttaagatcatgtaacacttggaaatgcaaagagttcagcacaatgcacaacacgagttggctttaccaagagaggtacaattcttaagatcctatcgagttgtgtttgatggcttacttgctcaagttaggtctatgaactcggtaggaattaaaattgccaacataatgtctcatgttgctttgcaaagttgtggttacgagagaatgccatgtcaactttgagatg

SEQ ID NO: 41204 - DNA, 1837 bp, Cannabis sativa
  modified_base (1166)..(1189): a, c, t, g, unknown or other
aaaaaaaaaacagtaaatgccaacggtttataaaatgttgggaatacttagtattctatttttgttttagtatataaaaatagattttttttgcttaataatttttttttgtatgtaataaaaaaaaatactaaaaaaagagtttcagattttttttttttaaaaaaaagaaaaaaaatttgtacttttttacttaataaaataaatttatacttaataaaataaattaccaaaaaacgtttctgatttaaataataaaaaaataacttaataaatttataatttgagaaatttagattttatatattttcaattagaggataattttataaattagttgtatttaaaaaattattgtgaaagaaaaaaattatttgaggactaaaatactatcttgaggtcctaaaatattattggagaattattttgaatttagttaaaaaaaattgtattttaaaaaataaatttatatatatatatacatttttgcttaataaaagaattttttatttaattaaagaaaataacaaaaaaaaaaaaaattcatgaaaaaaagaagggtataaaatacatctaaaataattgattgggagtaaaattaaatagggtataactaataagtgatcaattttttttttctttaaaaaaataaataatcagttttttttgaatggataaataattagatttaatttaaatattttagtaaatatatttaagggtataaaaagaaaaatatgaaaacctaacccccaaaccctatttcctcttcttcttcctcccacctcttcttctatcctctctgtggcctatttttcgagcagctttgctcactggacggaagtcctccagtcaccccaggtctcaatcgccacgaagatccccaccccagaaacccccaaacccgaccccttttctcccactcgatcccacctttctccctctcgatcaccatccctctcgtctgatttgggcacctcacaagtctaaatgagccaaacggatagcagtaacaaccacgatgagatcccattatagttatatttggtgtaattattttaaaatttcagttcaaattccggtaacaaccacgatgactcgtttttagttttatatatataaatactttttctttttaattaattgtgatgatgatgatgatgatnnnnnnnnnnnnnnnnnnnnnnnngatgatgatgatgatgatcaagtacacaaaatttttaattaattgttatatgtgatttgttattatatatataatttttttcttgtttgagtgagtttcgtttttggttaagtaaaaactttattatgaaatcatatatatatatctcaggaaattattctttaataataaataataatatattaatatgtatgtgtgtggggttatcctccttaagggcttcaaggatctgtgactcgatccttcgtgcatccactttgactggaaaccatcgccaccagtggaggagctctggtgagcatttcagcccgtcgttgttcttagtgttctaggcttctcttcaagcttcaaaactcatttgagactcataattaatgtctgtgaatgtatgcttgaattaatttatttgggtataaattatttactattcagtgtaattgtaattgtttgattttgataatcgtgtgtaattgtttgaaaaatgttgtaaacataataatttaattttatgttttatgattgtaatttttttatttttgtttatattattattttttgaaaaatttatttatattattattgtaattatataataaattagcttaaatgtatttttttaatctacataatacttttaccaacagttat

SEQ ID NO: 41205 - DNA, 1814 bp, Cannabis sativa
gaatagatgcatgttttaaatatgaaaaataagccgtaattagtatgttattcttgattgcaatctgaccagactagctcttggttacgtaggctgttccagtaatatgccaggccaaacaccaagaattagagtaattcgatcggatccagtagcggtcagggagttcagattcccccaaatgtttgtggtcgaggagagaggccctagaggcagagcgcacgcggtcggggtgatgttaacccgccacaagctgcccaggaatggacaaataggtttgcagaaatgcaagctagaattaatgagtaagatgaagaaatcagaagcttgagacagcagggtgctcctgcgatccctactccaaaaatacaggtacctcctacccttattgtgcaggcaggaccagttgttgcagtgaatcatatggaaccactatatgaaaggttccgcaagcaggcacctccaatctttctgggaggtcccgatgtaatgaaagccgagtagtgactgacagtggttactagaatcctgaatttcatgggcatcaccggcaatgacatggtggcttgtgccacattttagttctaagaggatgctctggtcttgtgggacatggtttccctgacatttgactttaccactatgacctgggaaaaattccaagaattgtttaactcaaagtattataacgaagctgttagaagtgcaaaaagaaaagaatttacccaactgacccaataggaaaatatgagtgttacagaatacatgactcaatttgatcgattggcaagattggcctcaggaatggtgccaaccaatttcattaagaaagaaaaagacctggatggcttaaattcgaagataagatatgatattatgcttaccactgatgacaacaccacctatgttgatatggtgggaaaggcactgcgagctgagggcgtagtggagtgcactcaggagtctcgagggactcaagtcgtttgtggggctcctactcctcctacctctggttatagtaggggagaacactgatcaaaaaagaaaggcaccaagtgcacccggtggctcaggtcagaacaagaggttccgagggaaccagggtagaggcaaccgtcagggtggttctgaaacccaatacacttagccggagtgtcccagttgtagaagacatcatttgggttagtgtagagggaaaggttgcttccaatgtgggttgccaggatactacaaaagagattgcccgtatcttaagaaagaagaatagaaaactgctgcaaaacccgctccagtaagggtgtttgccttaactcaggctgatgcagaggctagcccctcaattgtaactggtcagctctcggtcaaccactcttatttctctatattgtttgacactggggccactcactattatgtggtggccaggatttttagtaagttggatggaccgcatgatagtaatgagaaagggtgtggaaccctactgcctggcggagaattagtcatctccaaaaggttgattaggtctatgccgatcagaattgagaataggtagttgagtgctgacttaatagaaatgggtttagtggattttgatattataattggaatggatttcttatccaagtactcagctagtattgactgtaaacagaagatggtgatcttccaacccgagggcgacgcaccatttgtttttgtgggataagttcggggatctcgcattctagtgattttagttttaacagctaaagaattgttacaagacggttgtctaagaattctagatttatcaaacatagggttttactgat

SEQ ID NO: 41206 - DNA, 1129 bp, Cannabis sativa
ttcctccatggatttcctcctggttatggggacaaaagaaagcaagacaaaggcaaagccaaggccaatgttgctactgcaaacacccagaaaaatgacattgacagtagctcgagtcacattgatctctcctctcaatgccaacaattaatctctctattaagccagcaactcagcagcacaacaaatgcagaaccagctgcaatagcccccgctgcatcaaatctggcaggtacaacattaaactcaacttcttggattgtggatagtggtgccactcaccacatgtgttgcaatttcagttgtttttcatccttttctaacacaccatttcctaaatatgtgtctttaccaaatggacacaatcttcctgtccacaacattggcattgtcaagataaactcaaaaattacattgcagaatgtactttatgttccacaatttcagcttaatcttttttctataatagattacatgctcaatactcttaactcagtgttgtttcatcaaaattgttgtgttattcaggatcctactctgaatgtggtgattgggacagctaaaaagtgtggcaaattgttcttgcttcaccaagaaaatccaactatagcagctactgctactactgtttcttttcctttcaataaaatcaatgtaaatcaatggcataatcgccttggacatccttcgatgtgtatttcgagttttttcaataaagaacataacatttcacatcctaattccactttacattgtcacatttgtcatttagcaaagcaaaaacgattgccatttatttctaatcaccatttttccaaaaacctattcgatttggttcatatggacatttggggcccctttcatataactactatagaaggttataaatattttctcaccatagtagatgacaagtcaaggttcacttggatctatatgcttaagaacaaatcggatgttcaaactataattcccaatttcttcaacatgatctgtactcaattctcaatgtctattaaagcaatccgctcagacaacgcaaaagaattgaacttacaatctttctttgcctcaaagggcattattaattaccactctgtgtggaaagaccacaacaaaattcagttgt

SEQ ID NO: 41207 - DNA, 1051 bp, Cannabis sativa
ttatgtatttttcgccattaatcaggcccactggcttagacgctgacctggagtgcacatgtcccttgccagaaacatgaataacaattagcttaaacaagcaatggatagtcctaattaggaactaagaatcaaagccaagagaactgtgggagaactgtggttaaaactgttcacatggagtcacatggagcaaccaaaagttttctattacaaggaagaagggaaattctgataataggtctatccaatggacttaagtaaacttcccgaccctagtataataggtttgagattatctgaacttatggcttgtggtatacctgataatttacttactctagtgtagataacttactttagtaaaattctagagcatttttctaatggctaactctaaaggaagtcttttgaatcctagacatagattttatttacctaacaaatattttcaaccattccagaaaagataaatgccaaggaaagaatttcttaagcatcaacaatgagaggtctcatgtacgctttggcatgcatcagactagacacctatttgttgagtggagttatgagtaggtaccagtttaatccaggataggaacattggaagacaatcaaataaatcttaatattaaaagatgacttatatgttagtctataagggtgattttttgaaaccccttacactacactgagttagatttctagattttgcattaatgctagaaagtctaaatctgggatggtgattactctaagggtggagcagtgatttttggagaagtgtaaaaacctatccgaagtctctaactctactagtgtgagattgaatattgaagtggccctaaaggctactagacaattattcagcctaaggaaagtctatacatcctttggcgttattccagtaatggattaactactagtgttacttccagttgataacacatatatagtttccaaatagtaaagaatccaacaccctaagaggagtaaacatatagataggaatttcacaacatcaacgatttgtcagattctattacaaaga

SEQ ID NO: 41208 - DNA, 1418 bp, Cannabis sativa
tctgattgttgttcttctttgatttttctttcttggattgtggacagtctctgataaaatggcccaccataccacactggaaacatgctttggctcgacactcaccctaatggtcctttttgcatttgggacactccaggtaagttctaaatgaagacccacgaccttgacgaccacctttgttcccacaaaagtttctattacttcctgatgttttagaagcttcacccttccacttatggtctgagttgctactgtcagtccccttactgacttgatgctgtgacgacatccttaacagcatgttctttgatcacatgttgttctgcctcttcagcaattaacgctaactcgaccactttcttgtataatgtatcgtgattggtggtagtttttaagtcctgattgatagtggcatttagtccccttacatatttatgtttcttagtgaagtccgttggcactagatcgccagcaaacttggataaacgatcaaattctagcgtatactcagccattgtcctcttcccttgagtcaattttacaaaatcttatatgtgtgaggttctgatggaaatattataaaatttttcctcaaactaactcttgaattaatcccaagacatgatactaacatcttgagtttgtcccacaatttcccaccagacgcgggcaagctcttgaagcatgaatgcaacacaattaactcgttcagtactcccatgctatccaggatgcaggtaacagtgttcatccattgctctgccttaaggatattagtacctcccaaatatgtcggaggttgcagcttgacaaaatgctcaaaaactgagtctcaatgtggcaatataaatctagggttacccaacactagaacaggagctggtggtaacacttattcaactagagctacctgggccggttgcctgaaccgatgcaactcatcttcctaacgaagtataacgctttgcatttcgaggaacatttactgctagtcagcatgtggattagcattattaacccccgtgttatcccccagattttgcggaggcacgggcggtgctagtggattggtttggtcattacaaggctttacaaactcaccttatggtctaggtgattgattagggtccattttctctaaatagccctaaaatcaacaaccccggtgagtcagacaccaaaaaccactcttacgcacttaatgccttaaccctaactcatacatactatttttttattaaataaacatttatcattttaattactaatcattcttttcatataaagtttcattttctagatgctcattattaaaataaatagattaaaataaatgattaactaaaaatactttttttaaaaataataagctttaatcaaaaagatattcgatatcccttgttggttctacacag

SEQ ID NO: 41209 - DNA, 1696 bp, Cannabis sativa
gcggttttccatttcataagtaccttctcccataggctaggcacctccatgattgggctcttcatccctcgtcctagggttctgggccctcccacgcttagttctcttcgtgcgtgctatccacgtactaggaccaacgtcgggttgggttctctgtgaacatgtggtctgaatgctggggccaccctcaggttgagtcctctagtagcgggtgatctatcgagaccgtgggttggtagaccttctggagcccatgggctctttcccagaacgatgattagtttcctcctgtgggtattaacattttttgggttttcagccatgaaggaggtggtttttcttcaaaagaaaagagggttttttctgaactttttcacagaggctctcaatgaaagcaccaaactgttaatgcagatttttgttactaaatttgagcctaaccgtaacaatgtcacacagataaaataaagctttaaaagtaaaagtaggaacacagggtttcttacgtggttttggagttaaaattatgcatagtccacgagtcaatcttattgagatctctaattgttttctcagggcgtcttttgtatgagtttttccgtcccgtttttgttcatgcttgccactacttataattacatagtgggcagttaattacaaaattgactataatctgtttacaacaatcatcccctaaaatcaaggggtttgattacatatcacgtattgtaaatttgtttattatttgaaaatcatacatatgtgatttttccgattttactaggttaaaatgatcgtgtatttaaacatgtatttaattgttgtatctgggatgtctcgagagaagcttagttccaatgatcacaacagcaagttggggccattttttccttccaaggtcgatgatacacgtcttgtgacgatcgtagttcttatttacaaagagttcttcgaggctcgtttgaatcttagcttttgacttgttaggaatgtaagcctcaccaagaaaatttctggagttaactgggtgaagttactggaagccttcccatagtgagataggcacctcgcttactaggtctcgaaataacccgactgttgcacttagtttattcattatacactaagtgctttcacagctgatatgggtcgcttttgtcttcctagatgtaaggtacttgatgcctagctattcacattcaacgacatatggtttctcgctaatatactaagcaatagcttgtatattgattcctcgattaagaccttacattcagtaggttacaaatatactttgacagttacgtaattaatgtgttatttcatacaaagcaattgcattgatccatattccttttatcctaacacgtgtcccccactaagatggtagctgaattttgagtttagcaatagttaattattaaataaattgacatttatcctattttttaattagatcatacaaagtctcttaattagtaaatagaccccaaaacctcttttattcacaattaagctcttccttagtgaaaattcataaataagacatagtataattttaacattataattgattaattaaaactaattaactgagtatggaagcattattatctcaactagtgaagggaccatcgacctatataacctagcttcccacaagtagacccataatttacaaagtaaattccataac

SEQ ID NO: 41210 - DNA, 1446 bp, Cannabis sativa
aatcataaaacagtgtaaatactacatttgagtatctttcgttatttttggttaattttatagtttatttataattaatttataattgttgtaaggttaatttttcgttagttttttagacatttttttttactttttttttagtatttttataaataaaaatttttaaacgttaaaattataaataaaatattaaaaattatattttttaagaaaatataaatatatatataaggaaatgagcactctataaaagcttatttcttactttgttgtttgtttgttcttcatttctttttttcttttttctttttttgtttttatttttttaattaaattctttatttttcattaaaaaaaataaatagaagtataaatacgaaaagagggtattagatgattagtatatacacacttagatttggttagtttttgtttagtctcacaccaaaatgctctctttctttagagaaaacctgaaaaatcatttcatacatatacaatatcaaaaatttaaggaaaggataaaatgaaagaaggaaaaaataataataactatttgtcttataaattagcaaaatgattcgtattttgatttggtaataattattttgaaagctaattaaaaataaaataattaataacatgtttcacaatttattttaattctattatctcttattttaaaccaatcaaaaccaaaatattttttttgagataaaattaatacttttttaattttaataattaattagtgaggtaaataagtaaattcttatatatatatataaagaggaattctacatgaactttataaaatgataaatacacccattattaaaaaaaatacatataaactaaaataattttttgaaaaatataaatatacttcaacaatataaattaaaagaaaaatgtttaaaaaaaaattaataaaattaaaaatttaaattttacataaaaaacaaattattaaaataaaatatctttagaaattttataatatttttgtataaatatatatatcttttattttttacactaaactgaaatccacatatcctatataaaaattactgaaacaactaccaaaaccattcaaaccgtaaatttgaagagaaaaaaaaaaccaaaaaaactattatataaaataattcccctatatagtttgctacacatttttggtaccccacccttattttctcttctactcagcgtccgtctaccaaacgcgatttttctcctctaagcttgaattttggtgaagaaaaaaattaaaaaattaaaaaaaaaaaactcaatttttcatgttgaataaattcttttcaatacaatttctctttagtaaccaaatatgagaacatatttattttcatttttaactttctttacttacaattttccttatcatagtcggctaaaatatgaggattaaaatcccttcaa

SEQ ID NO: 41211 - DNA, 1463 bp, Cannabis sativa
ttttgtaccaataggttttgatttatcatttaacaagtcccactagtattttttacaaaatacgaagtttacaatagtcttcgaagatatacaatttttcttttctttttataaaagtgaagattgtacaatttttatgcatagcttttatgtctttcaatatcataaaaaaatgttatcaaaccaataatatttaaaaattactatgaagtacctattgtgcttaatattacgatgaagtatagtcgtataactagttaataattttttataatattaattaaaataaaataagtaggattgatctgctaatagggtagcgcattgtctggcgcgatcctctcttagcgaggctgatcgtattttcagtaatcactctttacctactattgcttccctagttcgagatgatttaagttaataaagtttcgattttattccaaaaaaaaaaaaaaaaataggactgatattgagttaaaccattagtaatattacattttataaaaatgttaagcaacatgagtatccttttatatttctgatggtatcttattatatagtaatatacccaatctcaaagttcttataatatcatatcttaaaatcgtaattatttttgaaacatatataagttgtattcttgaaactcaaggctgtatttataaataaaaaattgtaagattttcaactaattaaaaaccattaaaaaatgtcggtaatggtgataattaactgcaagataacaaaacaaatgtatagttatttattaagatatgtatatgacccataaatttataagtgcacacaatattaaaaaataattaatttaaattaatttttaaaaattactttaatatttttttaattttttttttcattattttctttaaatatcaacagttattttgatttattttcatattttttaaaatcatgtaagatttttttttctaataaaatttcataaaaaattttatttttaatatttttcttaatatttaaaatatattttattttattttataataattttttttaagaaaatgacaagaaataaaaaagaggcagacaatgtgcttggtttgttacatatgtttgagatggcatccgaccaacaagtcaactacaccaaatcgtcaatattcaatagtgcaagcaccccaggaacttaggtggcgtttagttactaagtgataatggaatgggaatgggaatgagaataggaataagaatggaatggaatatctattcttttgtttggtaaagactatggaatcaacaacggaataacaattatcatgtttggtattgtatgaaatagaatagaacttctattattttgactaaactaccttttgctcttcaaaaataatatttattatattaaattaccattattttataaattgaacaaataaataatattcttagaaaaaaagtatatttatcatgtgatggaaatg

SEQ ID NO: 41212 - DNA, 1162 bp, Cannabis sativa
  modified_base (773)..(782): a, c, t, g, unknown or other
agaatagatatgaaaatatgtgaagataaaataaaaaatacaaatttgtatagacaaaattgtaatatgtgatgacaaaactaaaataaaaattaaatttattaggaaaaaatgtaaatatataaaaaaatacatacagaaaataaattttaaaaaattgagagggtcatgtgatgacaaaactaaaataaaaattaaatttatgggtaaaaaatataaatatataaaaaaatacatacagaaaataaaatttaaaaaattgagtggggtcatgtgcccccacatgaccccatgtccctccgccattgtttgaatcctccctcccccaatgacaaaaaatacaacaaaaaatcttacttttattcacaacaaaatttataactaaaagtaaaaaaaattgtgactaattataaatcatcattcctatgttgtgattaaaaagtctgtggttaaagggattagtcacaaaaatcacaatttgttgtgactaaatctgtttttagtcataatacttgttgtgactaaaactaaattagtaacaacttctatctgaatataatattttagtgataagtaactttttattgtaactaaaagtaacatttagtcacaaaaaaattatgttctgactaaaaggttattactaaaagtacttatttttttgtagcgaaaaaaaaaaaatacacaattaatcaaacattacttaaattacatatttttataaatctgatgttattaatttatagctattttttcataataataataataannnnnnnnnnaataataataataataatctataacatatataaacttactaatttggacatttcatttttaaaaataaaatataatactactccacctaattttagtccacctttttttttaatagaattaagatataacaatttttttttttaaaaaaaaatagaactttattcaaggttaagaaaggggccgaagccctacatgcccagcggacgaaccgcataacctcacaaggagatggcacaaatattggctaaccacaccaatgatggaaggagcaaaaagctcaaggctcacacaggaacatttagagggataaaccccaaaatagtctaagactaacgccaccgaaaacaaaaggtgaacaacatcaaaaagactaattaaa

SEQ ID NO: 41213 - DNA, 2246 bp, Cannabis sativa
  modified_base (44)..(51): a, c, t, g, unknown or other
  modified_base (553)..(561): a, c, t, g, unknown or other
  modified_base (1344)..(1346): a, c, t, g, unknown or other
agtcccatcttttcataagcagttttgaacaagatattggaagnnnnnnnnttatcaatcatggttctggccactattttattggctaacgaccagcgggtcattgtgtgaaaatttagttttgacagcatcttcatcgatgaaggttatggtaggccctcctggtcgttgaactttggccttcctttcttccacggccaggatagcttcctcttgctcgtgttgagctgttggggcatacctttcccgggctttgcctgaatctctagtaatatgcggacctccaacgataacttgcagatgtccatctaccggtggaggtagcaaatcctagttattgtcgttcctttgaccctgatcggtcgacataattttgcaggtgtgggttgtttttccttatgagggattcaatttcctgtttcaagttgttgcattcattagtgtcgtggccgtagtctccgtggaatcaataaaaatttgtcatgtccctcttgctgacatctttcttcatggccccgggcttcttatatggggccagcgactgagttgccannnnnnnnntttctatgtcttcagtcaagatagtgaatgcagtgtacttggcatgattctccttgggagtttgttcggatttgtcggtgaactttcccttcttctcgttcccctgcctgtggttgttgttggaacgtttaccacttgagcttgaattgtttgggtaatgggaaagttggacagacattccagtagaaggagccttcgacttgccaggcttttgctcacctttcgctcgttgaatggatttttcgagcatgatcaagccttcgacacggtcaagaaaatcactcattgagtctaccgacccattcttccttatatccttccagagtttgccgaggacttcaatgacccccagtatcgcggacaactttccatcttcagttactcgtgacactttggtcgcctccgtcatgaatctactgatgtatgctcagaggggttcgcctggccgttgcttgacttcaactaggtctcccatatgcaatggaagttagcgagagaaggagaattgggcatggaattctgaggagaaggctttccatgaactaaactttccaggggctaacttgaaataccattgctgggcggcctccaacagggtagcaggaaaaattctgcaacacacatctcttcgtatcccttgtaaatccatttgcatttcgaaatacttgagctgggaaagaggatcttctctcgctgtatacattttccatgttgacattttaaacttgtggggcaacgccaagagattgatctcgcgagagaaaggagttccacgtgctcggnnnagctcgagatcattgtttctctgtctagccatgccttggaaaatattttttagttcgtcgagctgtacctggacggctgggctaacctgctcggcattctggtcaatttgaatcacatcagtatccttttgagcgggaatttgaggacgggctccaggctgcacgatcttcttgacattctgatcgtctactcctctccttctgttcagatcattccttaggtcatgagtcgcccctaacctctcgaatacagaagtgtctgactgtcttagcattgattttcttggttgataggtggaatggcaccgttaacctgattggaaccatcaggtataacctctcctgatgaattactagataaggtctgcccgcctatcgctaggctcacgagtggaactcatgacctgggatttggcggctgacctgggaagtattcatcgctggatcttcgtctgtctcacccagggggatgagactcggaggttgctgacctatagtttagtaggcttttcgtatcagcacggtagcttgctgggtacgattttcaatctctgtatgatgagcccttaacgcctccatctctctgtctctccactcggtaaacatacgcctttgttcttcgaacgcgagatttaccgcaacgcggagttcttctttatcgtgatgtacggtattgttatgatcctgcatgagtccaagagcgtcacggagatttcgtaactcagtatcctctgcaatggtcctctgggtgttggttccaggcagaaagattgtgttatgattgccctggttgggtgctgaactattattcccagtctcttgcacactaggctcgatttcatctataggagtcgttacaccgtgacccacgtttttcggctatccaggattaacagctgg

SEQ ID NO: 41214 - DNA, 1862 bp, Cannabis sativa
ggagtcaggaggaattaataagtaagaaaatttactcggtaaattctagaactacttattggaagcttgattatataggtccataggccccctactatttgagataatactgcttgtagaatcaattaattagttttaattaatcaattacaattttaaaattagactatgtcttatttataaattttcactaagtaaggacttaattgtgaagaaaagaagttttagggtttatttgttaactaagagactttgtaaggtctaattaataaataagttaagtggtaattttatttgataattaattttaattattaaataaataaatttggcatttaaaaaggtttaaagttaaaatatgacatttgtgaaaggaaaagataaattttgaaataaattggcaaaattgtaactagtgggatccacaatagtggttggccacttaagtgttttttagccatttatttatctttttttttattccatgtaatttaaacctaagcctagatgaaagttgtaaatataacatgacagactcataacctaataactcatcataagcctattctgtcaaaaaatagaaaagagaggctcatctctctaatattcgagttctcttcttgttcatcatcaaaattttgtccctatagtgatagagtacatgcccactcatatcaagtcaagtattgaatcatagtatggaagattgtgaagaatccaacatctgaaagagatccaggctcaaatcttgttatttctccgcgatagaaataaacaagagttaaagatctgagtggaaggagccataaattctgctgccaccaatgtaaggttttctataaccttatatgtgtttaattcatttttttttaggaaattcatgtttataaggtgttaaattatagattataatcaacatacttgttagtaaatctagatcgttataaaattccttccaacagttgtaaggcgacttgcgataagtacatattttaaaaatacccgtataaagttagagtataattttcaaaggaaagaactgggcctaaataccataaatgagaatctcatcagaaatcctataagatctaagagttacatatttttattatccatctcacaacactagaattgtagaattaagaattgacttgatcagtgatcgatccaagaacataatatttgagaaagatcattcatattttatcttactttcaccctaaatattagattaattacgattcacaataacccttaagtttaatagctattgagaatccataactaatcattaatataatccacaagtcattgataaaattctaataagtcatgttatttagtaattgcttacaattgctaaacaacatacatgttgaagtattcgctctataagagagtttgttggttcatccttaaaatgacttattagaacaataagatcaatactttctagtgattaattacattttgtacaataagagttcaactacaatattaatttgagacataaattaaaactgtggaacacaaagatttgaaattgtgttacaatatgccatgaatgaagaaatgaatatcctaacgagcaatgaagtctatctttagtaaagttgcctaatgggtggagaatattaatcataggtttttcatcaataaatactcataaggcaacatggtgaaacatagagatgaaataagattaattgttaagaagtttattttgaactaagaatcaataataaaggagatttacattcttatttatctttataaaagattctattatagtaaccttgacatttgttgctcgtttcaattcattaatcaatttcaaacagtaaactagaggagaatgtata

SEQ ID NO: 41215 - DNA, 1321 bp, Cannabis sativa
  modified_base (50)..(53): a, c, t, g, unknown or other
acctgttagtaacctgctattacaagtaaaaaaaatgtaaccatgatggnnnnaataaaaatgtaaccattgaatactcacccatataaatatatataatttttttaattccaattatttaaaactaatcacattatttattattttcttaatattttctattttttcttaattttttattagacttttaaagaaaaaaatagaggaaattacactttatactatttttatattgtcatcttctatttttaccttcttttttaaaatttatcatttttacctctttttttaaatattgtaccaattttatatgtttcaattaaaaataaaattaaaggtaaatttgattaattggtattttctaacttaccaaaaaaaaaaaaaaataagtagactcacatatatattactagatgaaaataataaatttcccactgccatattactatattagagtaccgttctttcttctgcatcttctacgatattgaaatgactaccataatttgtatcgatgtctagtacacccgtgaacttagttttagcccatggtccacttctccactgtggcgttgatctgtaatccaaatgacagcttgtggtggtttcaattttccatcaagtcaagacaaaatcctttccagttttgacattaaaacctaactctgctcatggtaagaatatgtctctgattatgagcctgtgttttcaattttcagttttctaaattgtgtttttaaaagtgaaaatagaatacagttttttgtcattttaaaattttaatagtgtttggtacaagttttttaaaattatttttagattttttcttactaaaaaaaatcaatattttaatactataccatgacatgaactcattttgtttcgggtttaggatccgagtatctgagcaaaaatgtaaaatataatatgttaaacaaaaaaaattatttttaaaaattgaaaacaacattttgatgttttctgttttctagttttttaaaaacttaaaaaactgtttttaaaaaatgttgccaaacgacccctattattttttaaaaactgttttcaattttttagaaggcaaacagcctaagctccccataagtcataagttctgtgtaccatcttttcgattttagtttccataatctgaaagaattgctactgtggtattattagattggatacatatatcattattttttaatttctattgttaaaattaaaacctaatttttttttgtttttttttaacataattttttttttgaagtagcctatattggagaacattgtcctacatggattaaatgtaaaagta

SEQ ID NO: 41216 - DNA, 1219 bp, Cannabis sativa
ccttaggtctatacccttgaggtatagacatatacacatcttcatggagatcaccatgtagaaaggcattatttacatccaattgatgtaaatgccagccttgaatggcagcaagagaaaggactaactttacagtaacatgcttagtaaccggggcaaaagtatctgtgtagtcaatcccttcttgttgattgtatcccttagctaccaaccgagctttgaacctttctacactcccatctgcattgagtttaattttgtaaacccatttagaaccaatgacatggtgtccctcgggtaaagagacaataatccatgtatgattcttcttaagagcctctatctcggtgtccattgcattatcccaaacagagattccatgagcttggtgaaagaactcaggttcaaaatgactcgaaatggccagaacagcaactcaaagtgctaaagacatcttgttgtagccaatgacctgagacaaaggatgagtggtaacaaaagagactttagcaaacttagataaattggtagaagcaagatagcaatgatactaattcaaatatgatggtttgttgactgctcttcctgatctagtatgagaaaaaatattagatggcaaatctggtgtaacattcagatcagtaggaacagtcggctcaacaaaatcagtttgagacaactcacctgatgcaggaacaggagcagattgagacaaacactggtcagaaaattgattagaagagttgagaggagagatttcacctaatacaatacctggtgcagaagaattcgaaggttctgcaatatctggtgcaacacctggtgcaagaacagtcgaataatctgccatttctggtgcagtgtatggtgaatgagcaaaaaaattctcataggcagggggatacctctagtggaaacaaatggaaaaatatgctcataaaaataaacatctcgacaaataaaggtgagatatttgttcaaatcaagcaatttgtaacctttgacacctggaggaggatatcctaaaaaaatgcaaggagcagcagacctaggtgagaattttgaccttgattgactcaaagtagaggcataagctagacacccaaaggcttttaaatggtcataagatggctctttagaatgaagaatagcataaggtgtcttatttttgagattaggtgtaggtgttctattgattaaataggctgcagtagccaca

SEQ ID NO: 41217 - DNA, 1983 bp, Cannabis sativa
  modified_base (899)..(901): a, c, t, g, unknown or other
taacttgatactttatttccttataaaaacttaattaaaattaattttatttaaaattacattactaataattattaattagttttatacaatttgttaaaaagtaaagatcttttaacaattattttttttcacttaaataattaaaataattgcaacaaaactccttataatttaaagttattacacatataaccttaattaataaaaagtagtatcaatgacctctaattggaggtgattttatgctcaatcttatttttttaacacttttaagtgccaaattagtatgtcagtccaagattggtttaagttatttagttttttttttttcctttaaaaaataaaaaaaattaagtgaaaaaatataataacaactataaaattaatgatttagaactattttcgctccttgttgaaatcatcttcatcaatctaaagattgtaaaaaaaattatcaaagcatattactaattaattgaaattgttgcttatttttcacaaataagcataacaataggaaaatagcaagcaaattattaaaaaccaagaagaaatctaactttagctggttgaatagagaaatgggtttgtggcatagatgtaggagattgtatcgaagtggaaaattcacataatgttaggttgggacaaactgaaactttaatttttaacattttttttttataaaagaggaagatgagtcaagcggttattgcaaaataataattagttgtaatttttaaaaattaattaagtattcaaaaatttattttagaaggggtggaagtttaaattttgtaaaaaaaaaaaaatagaattttattgtaaatattatagttaaaagatttaaatgttaaaaatattataataggaacttaaatataaaaataaaattnnntataaatattaattgctaaaaagagtcttattaaatatttaaattaaacactgagcaacatcagcccaattatttgtccattgtgcagtggtggaagaagctatggcgattgataattcctcccaagattaagcactttgtctagaaggtggcacataattggctgccaacaaatgccaatctgtcgcagcgtgggattcagtcgggtgtcatttgtaaccgatgctccagccatgtcgatgaatccattgcacatgccttatgggaatgtaaggctagcaaaggttattgggtggtaagtggtttatatgacgatcttaagcggttggggggagttgacaatatatccatgcttatgagactagctactaaatgggagaaggaaaagttggaattttttctggtggtgtcgtggaatatttggaatgttcggaataatgtgacacatggcggctaccatcctaaaccggaggagatgattgaatggtgtggtaggtaccttgctgagtttaggggcgataatgggagcagcaaccggaaatgtcctagagatgatcacagatgggtgcctcctccagtgaatcaagtgacaattaatgtagatgctggggttaaacaaggaggaaagcattcgggactgggctatgttatacgggatccgactggtgcagttctttttgctgctgcatcagtgctggagcaagaacttctgcccttacaaccggagctaatggctattaaaatggggattcaagttggaattcagaggagattacagaggtttagcgtcgaaaccgatggtctacaagctatccaattaatccaaaataaggaggatggatgccgtgatgtcgatggactgctagatcagattaaagctttaatttcccatgatagttttgttggtatctcttttgtattttgcgaggccaaccgagttgttgatgctttagctaattatgctttggttcacaaagctagtgccatatgaacagggccagccctgaaaatttatgggcccaagacgaattaaattttggggtcaaaaaaagagtgtcatggaatttgaacccatgaccttg

SEQ ID NO: 41218 - DNA, 1425 bp, Cannabis sativa
aacggatgatagcccaatcaaagatcaatctcagaaaagaccatcttcccctcaaactgatcgaaaagatcatcgatcctaggtaaaggatacttgttcttgactgtcagtttatttaattctcggtaattaatgcacatacgcaaagatccatctttcttcttgacaaatagtacgaggctccctagggtgatagactaggtcgtgaaaaccataggtcaagcaacccctgaagctgaatttttaattccttaagttatgctagagccattctataaggggccttggaaaccgattctgctccaggtgccaaatcaacaacaaaatcaatttctctctgcagtggtaaacctagaagttcatcaggaaaaatatctaaaaattctcgaaccaccttgatgtcttctagctgaattgtctcaggctgtgtggtatctaataccacggccagaaaccctaaacatccatctcgtaacaaatctctaactattagtactgaaatcactgggatccgagatccttgaaccgatccgataataacaaacaattcctcaccctcttgttggaagattaccatcttctgtttgcagttaatactggctgagtacttggataaaaaatccatcccaagtataacatcaaaatccgctaaacccatttctattaagtcagcactcaactccctatcctcaattctgatcagcatagacctaatccaccttttagagatgactaatcctccgccaggtactagggttccaaatcctgtatcataactatcatgcggtctacccaattcactaaaaattttggctgccacataagaatgagtggccccggagtcaaatatcacagagaagtaagagttgttgaccgagagctgacctgttacaactgaggggctagcttctgcatcatcttgagttagagcgaacaccctagctggagcgggttttgctgtaatcttttgttcttctttcttaaattgtgggcagtctcttctataatgccctgacataccacactggaagcacccttgcccttataccctcccaggtgatgctttttacaactagggcattctgggtaagtgtatcgggtttcggagctaccctgatgattacctcatccttggttccctcggaacctcttgttttgacttaagccatcgaattcagtaggtgcctttcttttctggtcagtggtcgagccactacctcctctactaaaacctgaggtaggaggagtagtagccccaccaacaacctgagtccctcgagactcctgagtgcactccactgcgccctcaactcgtagtgcctttcccattatattagcacaggtggtgttatcatcagtagtgatcattaggtcatgtcttatcttcgaattcaacccgtccagatatttttctttcttactaaa

SEQ ID NO: 41219 - DNA, 1344 bp, Cannabis sativa
ctttaatttaatagacaagtaaatttttattaagcctgtttgtaatgtcactgacaagtaaatttttattaagcctgtttgtaatgtcactgtccaattgagtttatttattcaattacaccatgtaattaaaaataattaaagagtgtaatagttttaatttcacttttcaattctcctgtctcatgagaattagggtaatacaaaataatacaatgtaattagatgtaataattgaggaatctcaattacactctttctcatatctttgcatgaaaaactaggtgtaattagactgtataatcaaatattactacttagataattagtattattaaattgtgcaattatactaactcattttttaaacataaaaaaaagaattaatatgcaattactagtatttaaaaaaaagagtgaaattactctcatgcgtgttaaactatcctaataattacacatgtcagatgcttccaaacacacagttaaactatgtagttattactcatttgctaaacatgaaaataataattcatatgtaattactatttggcatctaaacacacattgtattttattaagatagagtacaattactctaatgtgtaattactagtaattacaaattataacttccaactgctcccatgataacttccaaacacccgtacaatagcgcgtttggaaagtgttactctgtaaatgatattgagtgtaattcggaataattataatgtttaacgtgtttattcgactaggtaattacacagtaattatgtaattgaaaataattgagaggtctcaatattactctctctaattcttatgatctcataaaaattgggtgtaattaaataatttactattttaagataattaatattattaaactaagtaattactaatttttttttttgaaaaaagaattactaactcatttgccaaatataaaaataagaatttatatacaattactacttgacatttaaacacacattatattttaaaggagtttttacgtactacatacttaaatttctaacttcttttcttttgtactgtgttttttcaaaaatattgtgtaagtttatacaatgtattgtgttaagtttttactattattctacagttgttttactgttgtttttaattattccgttttgttattttacggttgttttataaaaagacagtagttttgtaaaaaattctgtgtgacagtaaaattataaacttttgctcaaaatccaatagttttgtaaaaatccttttttattttttgattttatttaagtcaagtctagattcaggtttgaggctagagtcgtggtccgtgttcgggat

SEQ ID NO: 41220 - DNA, 2499 bp, Cannabis sativa
tccctttgaaagtcttaagagaaaatatacatgtatatgtaagacttgagattgatgaaatgagctgtgttaaatcacaaactctctgatgttttttatatataaagaacaagcttaatacaactaacagaatacagttaggaaaagtaagctagcaaataactaacatgcacagtaaaataactaactcctaactacctaactactttcactaacacccccctcaagttatacttggaatgctctaagtatggcttgttacacagaaactgaaatctaggggaagacaagggtttagtgaataaatctgcatctgatcttgagtaggtatatagtagacttgtagcttgttcaaagcaatctgatctcggatgtagtggacatcaagctctatatgctttgttcttgtgtgaaagacaggatttaatgcaagagattgggcactttgattatcacaccacataaaagggggtgttttctgaagagtgatgccaagctcatttagtaaagagttgatccacaccagttctgttacagcagaggtcagggctctacattcggattctattgatgatcgagctacaactatctatttttgagaactccaattgatcaagttacctctaagaaagatgtagaagccacttgttgattttctgtcatcaaggcttaaggcccaatctgcatcagagtatctttcaaggttgagaagagtggatggtctgaagtgaaaaccgagatgaggagtccctttgatgtatctgagtattcgtttacatgcattccaatgatttacagtaggagacttgagatattgacttaatttgttgactgaataagcaatatcaggtcttctcaatgtgagatattgtaaggctcctatagtgtttctatatatttttggtttgtcaaggctgggactgtcatcttgggagagtttattggccaagatcattggtgtgttgcattctttggcatcttcaaagtttgttttgttgagaagatctgcagcatacttggattgagtgagataaatctctgaagcatttctgtaagcttcaaacccgaggaagtaactgacagatccaagggatttcagagaaaacttgttgtgcagatctatgatcaacttggagatggtatttgaatcagcacatgtgattaagagatcatcaacatatacaagtacaagcaacaatgaaccctgctgattttcgtaaaataaggaagaatctgatactgatattttaaatccccaggttattaaagtgtcttatagggtgtcaaaccaagcccttggtgcttgtttgagaccatagagggatattgttaattgacatacaaaatcaggtttagtgtcgtcttcatacccttgaggctgctgcatgtataccttttctttcaactctccattttaaaatgcattgattacatctatttgttgtatatcccaatcatatgtcacagcaagagagaaaattatacttatggtggaggctttgattactggactaaaggtgctgtggaaatccagacctggagtttgttcaaagcctttcacaaccaaccttgctttgaacttgtctagtgacccatctttgctgtacttggttctgaaaatccatttgttggacaaaacatgcatatcagcagtacgaggaaccataacgtatgttttcttccttatcaatgccatgttttcatggcccattgctttcttccaatgaggcatactaagagcttgctttattgtttttggttcctcataaagctgctgttttgaagcagttgccagaaatacttttggtttgtagatactagattttgatctggtttgcatgggatggccttgaggtaatggtggtggaggataaggaatttctggtgtaggaatttctaatgtaggggttgcaggtgcttaattattaaatgaaggagctacagtaggagtggcaccaggatttttatttgctgccaaatgtgcatcaggtgggtcattagactgctgtaggggtgatgattcagatatggtgttggttggagaatcagaatggaaatcaagtgaaccaaactaaaattgagaagagtggtcagggggagtcacagtaggaataattaaggctggtgcaagaaaaaatttgtgatatgctgcagtatgtgttttgaggaacatattggagtatggaaattctttttcattgaagtttatacttcttgcaatatagattcttcctgaggagtgtaaacatctatagcctttatgaaaggggctataaccaaggaagacacatttagatgtcttgaattgaaacttgtgctggttataaggtctaagaaatggaaaacatgcacaaccaaatgtttttgagaaagaataatctggtttaatgccaaagagacattgaaaaggagatttaaactcattgactacagtaggtaatctgtttataagataaacaacaaaaacacatgcatcccaccaaaaatttaatggcattt

SEQ ID NO: 41221 - DNA, 1677 bp, Cannabis sativa
  modified_base (1625)..(1625): a, c, t, g, unknown or other
cattaggaacttaatgcaacatgacgccataggtgccacattaggaacttaatgcaacatgatcaggtagatgtggtatattttgtctatagagaagttaataaagttgttcatgttttagctaatgagattttgattaacaaaaagctagtgccatatagattgggattaataatccctcttgtgcgagtcatgccatacaacacgattcaccttatcgatcttgtgtaatttgtttttcatatgaatgaattctttttttttttttttttttaaatatcatcaacagttagttttattttgttttcatattttttaaaaatcatgtatgaatttttaatttttttttttactaaaatttcatataatttttgaatctttttgtcttaatatttgaaatatattttgttttattttataggtattctttaagaaaataagactggaaaaaaacaaaaaaaaaaggtgaaatcaaaaatatatattttaaataatttttttttaaaaaaaacgtgtacaaattaaactccccaaaaaattatatgacattgtatattatacagtagtagactttatgtttgtttttgagaaatatttgtgaataatttatattattaaaaatatgatacaaatagttagttgtatgaatgtcttttgtttattagtgtaaattgaatatttgaaatttattttcaacactgtaaattatctagaattatctaaaacaagtgagatatataatgtatacaactccacttctttacaaactattttgaattttatttttagtatattataaattattttgaaataaattttcgaaaacaagtaagatgcgactatactataatgtagaatgtcatataaaaaattaggttacaattgctctaaatacgaaaagttcgtaaatgcctctctatcggtaattaaggacaaaagtagtactcttactttgtatgtatataaggtgcttctatggtgtcacccctaaaataaaggatccccgaatgcagcatactatttgaatcttatttttgacacgataaattattatgaatttttttaaaatttgtaaaatatcttaaacaactacgatatacacactgtcagataaaaattaattaagaatattttaactatcctaatatcaaaaatacttaagggaaccaagcagaaaggcagaaaatgtttgttattaggggagcaaaagtgcaaaaaaaatttgagggggacaaatataaatttttaataaaataaaattacaaaattataaccacaaaattaaaaaaaaaaaaatgaggaatggggggaggctatccatgtatgcatagcttcgtctttgaaaagtatggaaaattttatggttcaccttctaaaatgagtacatctatgtattttttatttgttcgtcgtataagagaactttttatttaattttttttttcacgctgtagttattataaaattttgaaaaattcagaaaaaatttaatatgttaaaaataaggttcaaccaatttgttgaacgtgttttcttttatatgcatgtgaaatagatttactataaaaaaactgctactttgagtgacaactttttagtcacaacaaaatattacttgtgactanaacatagtatttagttacaagttatcagtaatttacttttagtcacaacaag

SEQ ID NO: 41222 - DNA, 1397 bp, Cannabis sativa
  modified_base (990)..(991): a, c, t, g, unknown or other
tctctagaatgatcattataacaaaaataatgagagtggggcttgaagttttcaagagaaacaccagagggcctctttcttttctgaagaagaatagggcttggagaaataatgggtccttttcctttgtccttctttggaattgcagcagggacggcaacaggttctgtactgacaggatcagcttcaggatcttcactttcagacccagaatcatcagcagagggttgatctttgggcacaaactcttcacttgaatcggacaagccctctgattcgtgatcctcctcagttccttcttcaggttcagaatctgaagatgaaaccgaaggggaattctctttgagatttttggcctttgaagatgaagacaccacctttttccctttggagacatttttgtgaagaaccacttcaggtttgtgaggagtgggtaccttggaccttgttcgagaactcaccgtgggcaaagtcaccatagctttctcgacatttggagcaccattcgaagaagaagacttcgacaatgtgtgatcgaatgaatgagattcatcatgatcaccaaacccaggtattggagtagcaattggagaaacaatgactggaggagaaggaaggttgtaggtcgatttttgagcttgggtcttcgactttctggtagatttcgtcagagcagacgacgaaccaggaacttcgatcactggagcaggcggcgcatgtggggtgataggagatgcagaagcagagccacgagagggcttcttggacggttgagcatttttggtttttgccatttctctttgaaaccctagaacacaaacacactctcacacttgaaaaagattagacttttgagaaaaaataaaaagagaggagagagtggtgatcgtgggtgagtgggtagttgagaatatataacatttcaattttaattacccaataatcagaaaaaaaaatgaaaaataaaagtaacttccttaccttagacannacgtggggagagaaaaaaggaaaccaattttttttaaaaaaaaaaaaattagtcaaggttaccttaaatggaaaaaggaaacaacatatccccacaaaatctaagacttaaacacccaaccaaatcagaaattgccaccaaaaaggaaaccacaaaataattaattaattaaacacaagtttcctaaagcactacaaaaaataagaccaaatctccaaaaataaaggaaacacaatagatagaatacaattaaaacatgtttccataaaagaaaaaataaaagaaaaatcgaatataaggtctaagaaaataatgaaatagaacaagaaaaacaagaattttttaacaaagctcaattgacagaatcgatcacaattttttttttatttaaaagacagaaaaataa

SEQ ID NO: 41223 - DNA, 1422 bp, Cannabis sativa
gacacacaccttaagtacgacatgctgagtcctcttcggtaaaggacattatccatcattacatatcgatgcgcctgatactgtagcctcctggatacggctctttcctgaggcaactctcctctccttatgtatttgacgatggattccatccaacttggttcttgcttatttgtagctaccgtttctgactctaatacttggctccacgaggtgttcaatgggtaccacccccaatctctctatttcactatccgacgctaacttggccaaacagtgcgcgcgagcattcttttctcttggaattctttccactttgtactctttgaactcatggagcagttctctgacgattgctacgtaagcggctattttttctccacgcgtttggtattcccccgacacttgattgaccactaactgtgaatcgctgaagacttctactcttgcagcccctacggcctttgataactttagtcctgcaattagggcttcatactcggcttcgttgtttgaggctaggaatgcgaagcgcagggctgcctagagccgaagtccatctggcgatatcattgctatcccagcactggatccgctttcatttgatgctccatcaatgaacaccttccatgccggcgtttgcggtactgacatgcttgaactggcttctgccccattgcatttcgttatgaagtctgccagggtttgtccttttatggaaatgcatggcaagtagtgtatgtcaaactggctcaattccatggcccatttaaggagtcttcctgaagcctccagcttctgcaagacttgccgaagtggatggtttgtaagtaccttaatgggatgggcctagaattagggtctcaacttcaatttgaatatcttttgaatttcaagattatgttgaggaattctaggaattggttattgaagattctagagatattttttagaataattagtaaatttactccctgcacttatgtcactaccgatttgtggcccctaaaatatacaggttgttaaaaaatctccctagtatattaccactatattaatgtaccccttctgttaggttttttaacagacacccgtttatttagtgatgtggcatgagagtgaagattaaaattgtaattgcgaatagcttagatggaaaaataatagactccttttcctttcctttttttttttttctaattatttgtttatttttgaaataacaaaaaagaaacaaattaaaataaattccctttattgaataaataccaaatataagaagaattttatcttaagtttttgaatttagtaagaatataacaaacaccccatagattttttaaaaaaaaaaaacacgcatagattaaagacaactgtttgagaaattttgggtgccaaaactgtgaataggggagaaaaggg

SEQ ID NO: 41224 - DNA, 1982 bp, Cannabis sativa
accaaccggctgcattctttcttcatcatcgatattcttataatttgaagtaactaggtgtaatttatggtgtagttcctccaaatgaaaaggtctccgcaatcgtcatttttgggaagctattcactcactagttttgatctcgaaaggagttgtgtggaataatagttgagtctcgaagggagttttcggatgagtatatatcatgtccactgcgggtccattcttcaggatagctagcccttccctgaaaaagagttccagttagctagttatccctccttgaatggtagtttcgaatagtcaactccgtagtcttatatcttaccgaaagcatcttcagcaaggatctgtggtcctcaagcctggaagctcatttatgttcctggaggccttggtgcttatgctgacgtagagactttgctaaatgaggagttggttaagttatttatttttaattaacttaacaacctcatttcttcaacctataaatacctccttgactcaacatttgaagacacgattgagatacgagtttgagaactctgttcagaggagattgagagtttgagagagaaaagattgagaggtagagagataggtgtagagaaaagagagagagagagattgggtttgagttttgtaaaaagaattttctatagatgaataagattcttgggtataaagtgtgagagttgaaacattttgtgagaactcaacagataatctcgtctcaattgtattgtacctattcttgctcaatcagtaaagaagaattacggtagtgatccagaactggagtagagtcatagatcacatcaatctatcggacttgaactagtatatattttggtggtgatttctttattttctttatttaccgtttctagtttaaatattctgcctgcccttgtttttatccaattattaatcttgttattgctaattgtttgattgtctaaggtttagatcatcttgattctgctccattagttttaattttcccacataatttatatatctaaaacctaagagtaatgagctatttgtgagagcttcaaattttatcagaaaaaaaggctcatatgatacttaactgatttgttaagaaataccatattggataacaagattccatgtcttggcgttaactgtcctttcttagaattctctattgagaatctttctagcaccttatccatataagttgcttgaaaaagttctaatgttctccgctttctatctctatagattttaataccgagaacatagattgcctctcccaaatccttcgtttggaattgttcagctaaccacttctttacgtctgatagcctttctacattgtttctaataagtagaatggcacccatataaagaactaggaataccactacattacatttaatttttttttatacacagggttcgtcttcattctattcgaagccatacactttaatagtcttattaaaggtgatattctaatatttctaggtttgcttcaatctataaattgatttaatcattttgcatatatacctttctgatcttctccttgttgcacatacccttctggctgttccatataaatagtttcgtcaagattgtcatttagtaatattttatttctatagttgataattatagtaggtatgtttaagcctatttgctagcaactaagaaggagtgtctggaacagtttaaaatttgaaaaactcaggtggaaaaccaaaccgatctaaaagttaagaatcttaggacggacaatgggttagaatttattaactctaaacttaacatgttgtgtcaagagtatgggatcactagatacagaaccgtagttaaaacccgaaacaaaatggtattgctgaaaggatgaactgaaccctgttgaataaagttagatgtttattgttcaatttcagattagagaagccattttgggaggaagcttcagctactgcaacctaccttataaa

SEQ ID NO: 41225 - DNA, 2032 bp, Cannabis sativa
  modified_base (1517)..(1520): a, c, t, g, unknown or other
  modified_base (1783)..(1787): a, c, t, g, unknown or other
  modified_base (1890)..(1893): a, c, t, g, unknown or other
cataaaatataatatgaatgggttataatttttgaaaccgatttaattgggttggcccattaaaataccctcaacccggccaacccaacccatgatcagcccttctataccatacacgaggagcctgtttcagaccatacaaaactttttctaatttgtatacatggtgtggaaaataaggatcttcaaatccctttggttgctcaacatatacttcctcacttaaaatcacattcaaaaaggtcgacttcacatctatttgatataacatgatatcaataacacaagtaatatacaatagcaaacgaatagattctattcttgctactggagtaaaattttcattaaagtcaataccttctacatgtgtatagccttgtgacaccaatcgagccttgttcctcacaattgtaccaaattcatcgcttttttttttttttaaagatccactttgttccaatcacatttataccttttggtcttcaaaccaaaatccaaattttattgcaaacaatctgattaagttcttctagcattgctttaagcgattcttcataagtcatggcacccttcacacttttcggttcaaattgtgagacaaaatagagaaaactaatcaaatttacatacctttttctctttaccatgttttcttcaagatttcttagaatgagatcttttagatgattcagttttactctggtgctaggttccttctgagtagaataagtaatgatgtttggatgaagtgcgacatcctgttctagttcacctgctttagttgcagcagcagattcgatattttcttcttcaaaattcaagtgtactacatcagaatctacgtttgctacttcaggtggagaataaagaaaactatctatctcggcttctgtagaaaattctaaaaaaaaaatctttaaaatcatcaacaaccacattagttgattctataacagtctgagttctcatgttctaaacatgataggctttactatttgtggaatatccaataaacacaccaacatcacttttagcatcaaattttccaataagctcacgatctctttaaacatagcgaacacacccaaagacatgaaaatgacttatatttggatacttacctttccagattttataagatattttggaaccaggacgactaaacactcggtttattgtatagcaagctgtatttatagcctgttcccacaaatatttagttagcttcttactatttaacatcattcttgccatctcttacaaagtttgattctttctttcaacaactccattttgttaacgagttttaggagctgaaaatttatgagttatacctgtagacttacaaaaatcatcatatatggagttctcaaactccttaccatgatcacttcgaattcgaacaattttactaatgttacatcctttttcaactctcaatctcaaacaatgtattttgaaagcgccaaatgtgtaagatttttctatgaaaaaatattgttgggattttatgcccnnnntaaaactcatttcaatataatcttatttgtcatcaatagaagattagaagttatttatttttacattattcatgtttatggtttaatatacaatttgtattaaatccagatcatatagttattcataattacagtgatgccaatacagtgaaatgtaattatgattatatgcttcaaaattttaggtcccataatttgtcagtgcacttgattttacactgatgtgatagttagggataaaatttacttacaccttggataannnnnatgttctttctaggacattggtaaagtgtgctagtatcgaatgaatagagtatacattagactgggacaaatattgaacttggtaaagatattataatcttannnntgtatctttctaagtcaatatccctggttgctcttagataagaaaatcttaatcttgatatggtttggtttgatcttaagagtgttatttatgttcttagagttgtttgttaaatcctaccaattagttcgggtaacac

SEQ ID NO: 41226 - DNA, 1984 bp, Cannabis sativa
  modified_base (143)..(144): a, c, t, g, unknown or other
ttcgtctgatgcaaccttcggccaaccacatagcaaccaccacgcaaccatcgtctaattaaaactttcgtctgatgcaaccaccgtgcaaccacgcagtaaccactctgcaaccatcgtctgattgtgtaagtgatgatagnntaagtagtattttggtaattaaaattacagaaaaagtataaatgttgactttaccttatagaagtatttttataaataaaatgtcaatatcgctcacccagtacttgtgtcataacaggcaagtatcgtgggtactagatgggatctatagcatcctcagcaggctgatcctcagtaggcgctagttgatttgcaatcaattcaaccatttgctcctaaaaaaataaaataaaataaatagtcagtttgaatacaaaaaaattgaaagaaatatcaaaattaatacatagcaatgtaaaagattgttgcgcgtattcattgcgctgagtattgtctctatggtggaacttctgaaaaatatccacagcagttgaaagttctcctgtctcgggattagcctatatttaagaaaaaacaagtgtgattattgtttatttaaaagaataaaataagatttatcaatcacaaataaatatataaagttaccccatcgacaacatgtgctacaataggatttgatccccattctccttgaagtttcatcttaccctgactttctctatttttggtcattcttgcctgaaattaacatatttatgttacaattaattatttattattgtatataatataaagtattattaaaattaataatttcattaagtaccttttgtttttctgtctttcagtaagcaatgtaatcactccacacctcttgagttactctgtccgccctctcctgtccaagctcctcaatgttttcgatctattttttcttagaattggcccgccagtcacgcacccttagacattttatactcaccatagtctacaaatgcatgattatctcgtgggcacacaaactttgtctacaaaaaaattacacattcaaattagtacatttattaggaatttaagaataatatacgaaattataaatttaaaaataatataatgaatacctcaagtctgtcccacactgcattaatttcagttttaaaaacatctcccacttgaacttattcatggggatggtgttatagatcatcactttacacatgttgaattttttttccatttagaccacatgggctactcgtgtcttcatgaatagaatgtgtagtttggaatcctttgctttagaaagcgcttccttaatatttttacctttgtatttactttttacccctttctttttcaaagagctgcaacctggtgtagacatactatacatagagaacatatttccagatttaaaataaacaactatattcacaacatattaaataagaacatatgtgattattattgctataatatattgttacaattacaattcatcattatcaattatatatacaacattatcatcactatcactttccaattccaagtaatcatcattttttcttggtcatttgaaccccatcatcgtcattgataatgaaatcatataaccgttgagaatccagattcacacgatggatgtttggaacttcagttaagtcaatatcatgacggacatagtcaacattatccaactatagaagttggacaactaactgagttttgatagtattattttcctgtataaaaagatgcatgcccatcatcgtctaggaaatctcacacattccgcgagatgtactcgttcacaatcagctagtctttaccattcttaagattagggatgtaatatatcaatttttattgagatgtaagtataaacaattcattttagtaccactctaggttgacgcaaatgctagtgaaaataccatcactatccacggcgacgaagacagaaatttggctgagtgagggcttgaataaatattaa

SEQ ID NO: 41227 - DNA, 1154 bp, Cannabis sativa
aaaaaaaaaaaaaaaactgaaacaaaactgaaaagataatgaaaaaaagaaggaaaaaaaagatagagaaagcatgaattgataggcgtcaatcagcggacatgtgtagacacttcagttgcatttaaagagtgatattatgtgtacagtgtgtgtaagtagtaaaattgcaactaaaaaaaacttaaattatacaaatgtaactactgccgcgtgggagtatatatgtaataaaaaaaccattttatatttttaatgtaaaaatttcttttaaaatcaattttattcagatgataaagtagagctctttctttatattccttcaacaaattattgaaccactcccaaattaattaaatttagtatttttaaatttcccctttttggctgcctactcattactgtatggttttatataagggtgttcattgaacacattaatattttagactattcagatccgatctaatcatatattagatgttagattttatcgcccgatctgatctaattgatttcagtcatccaatcgatccaacatccattaaatgttggattggatcggttttatccgttaaatgtatttcatatatatttattgatttaatttgggttattcaatattttacactaatattttttgaatcgggatccatccaatattataggtccagtatgtattagattggattgcataaaatctaatttaagaaaaataaaagtaaaattttaatgttaatttttatatatacatatataatttacacataataatataaaatataatactaattcaaactaaatgaaaatactaattaattcgaatgtcgatgtattggatttttggatacccataaaacatctaatcaattggatattcaaaaataacatcggattcgatcacaattggatatctaatttttggtggtcgattataattgaatcgatcgactatcgttagattagatcgatttatatacactcctatttatatatttgctgttctctcatccatcttatcttactaatggatcaatttccttattattttgatattggaagatgaaaaatttgaatttgaaacctcccaaaaggaaaagtacattacaccaccttatatttcttctttggaccaattttttttttttaaaaaa

SEQ ID NO: 41228 - DNA, 1766 bp, Cannabis sativa
  modified_base (29)..(30): a, c, t, g, unknown or other
tacttaattaaaaaaatatctctttttannctatatcaaaaatatgttcatacaaaaatatttaactcaaactcaattttttcgtttcttatttttcttactaaaaatcttttttttttaattttttttttatcgatggaacaatctcagcccatatgatataaaaataagagattttttttaattagatagaaaaattaagcataaaaattcaaaattttctaattttacctattcatgggtaatacccattaagagttataattttttttacattattgttataaaatttaagcataagtaataactaataacttataattctatttttatgtggtttataataaaaatatgatttttttaaatattacaatttaaatttaaattcattacacaaatcttttttatattttattttatattaaatatatttatataacaaattttttttttctttttatattacaattgaaatttaaaattattgcacatatttaaaaagtatctttatattatcattttttatattaacattgtgtatgatatttgaaaaataataaaaaagtattataaaattaaaaatattacaataattaaactacaacaaattttaaaattatatattttttttataaataacacttaaattaaatatttttaataagatataattttatttattgaataatatccaaaaaaataattaattatataactaataaaatatacataattaaaataaaaattaaaaaattacttaaaaaaattaaaaatataactaaatatatgtacacctaatattaatctagtatgtatataaaaagtagatctataattgtatataaatacatactattttttttaagagctcaaatttcatcgtaaaatatgtggtgaatattattgagataagttgaagaatacatttttttatatctattagtcaaaaatacctctttatatttcattaaaatatacccagttttatgaatgggttgtccaaatattctctcactctccacttaagtctagcacataatttttattaatttaatggatataatgtggacatcatctatagataaatctcaaaaaatataaaaataaaagtaaaaattaaaatatataaaataaaatagatgtacaatgtagcttccttcgtatatttcaaactttcaagatatcaattgagaattcttagttctttgtcttcttctttgaatgcaacagaagttaattgaatttgcctcatattcatgactattttgttctatctataaagtatgcaaaggtacaatgatcaatgatcatatatacaaataaaatggtagggattctcatggcaaaataatttaaaccatacatttggttatacttaattctataaatctaattttcgggggtataaaatcttgtgaattctccttttgttttactctcaactattttgttaatgaattgctcttaaacgccaaaagagaattgtctacgtgtacttaaatatacacatattatgtaatttgattgatcgacttaatttttaatatttaaataaaattaaaataacttaatttttttaaaaataataattaaaaaattaaaaaaaaaaacaaatttattttatttcatcttttttctttttcttttccatttcttttcttttgcttcttttttctttctcttttcttcttctgatttttaatatttaaataaaattaaaataacttaattttttaaaaaataattaaaaaatacaaaagatacaa

SEQ ID NO: 41229 - DNA, 2691 bp, Cannabis sativa
  modified_base (1308)..(1309): a, c, t, g, unknown or other
tatctctatttaagttgatctaaaattaacaaattttcaacataaaaatattaatatctgaataactaattttcgaaaaaattctacttaattattaatttcaagcacaacaccttcaaaccactgcccataagaagaaatcactagtcgagcccatcaatctcgaggtttctgacaacaaaatccaaggacaagttcctcctccagtcgtttccgatgccaatgctcctcatcacgagggaacccccgctaccgcttcttcgatgaaggccattgagatcttgtcggccgcagcaggagaggccgggtctaaatttccccaagcatatggagttgcctgttggcacaaaattcaaactcttcttccccctgattgggattttctcaatcttcagagtctaaaagagatgctttgaaggagcttggactataacttcatggtacgttggctttgttattataattatattattctttttatacctctttcatattcatctatttgcaattctacagccttcttttgcctttttccaatcgactactctctgagcggttcgaatacttggagggtgaggtccacaaattactatcccaatgcaaggttgtgagtaagcatcgggatgacacccaacaaaaaaatacccgccttaagcaagaagctgagaaagcgaaggacgaagccgagaaggaaaagaggaagttgagaaggcaaaagaggaagccaagaaggcaaaggaggaggctgagaagaccgtcaaagccaaagtcgatgagtttgagaagaagcttgctgaaatagaagtcgagaccgtaaaatggtgtgacaaggttggttttcacactatatatcgggcctggatggcgaaccctaatatggacaccagcttcttggaggagaaggaagaggaaactttagccctttgtgagaacaccaggagtgaggaggaagatggcaagttcggggaagaagaagaaaaagatctgtccaagtctcccagcatgtagacttggttatttatttatctccattttctctttaagaaaatggccccttggccaactttttgcttttttttttattttctttttaatgcatcatatttttaagtttaaactttaacgtgcagatgtttgcttgcgtttcattcacaatttaaacaatgtcatgcataaagtttactaggggtttccactacacgtattttcctttgatgatatgtagttaagttcctactttacacgcgagcaacttatctgcccgaccctcaatttgggagccatcattgattccacctcgcgatcatnnaaatgatcttattttaagcaaactcaaatatatttttaatgaacttgtcatcttgtatatattttcattgcttacatgagtagttagatcttctacccacgtgttaggtttaagtatttttttcaagaaactttgacgtctcgtctaatactttcccttaacacgagccgttagtattcagctttatgcgctaatcgtaacttttgatttttctttctcgtcaaatagaatttaaacttaaaattaagttgtttgatcccttttctcgtcggaatggtttgatcaaggcgttataacgattcgacccctcttccataaaaaaggttttgtcagggagttataacagttagaccgctcttttgtcaaaaaggtttggtcgaggacctttaaaaaaaattcaatttattttttattttttgaaatgatgggtttgcattgtactatgtatttctagtttaattctggttaatcttacatatatgccccttaggtaattttaaagggtttacgctttataattacttgtttgagagaaatgattattttattcacaactaaagttcaaaatatttcatcagcaatgtgatttacaatcattaatctcataagaacttccccagctcaatcgtttattttatcaatcttctaggagcatctagttttgataaaacgggttttgatgttcagggtcagtccctaacatactcccacaattgtttcaatattcagagtcaatccctgacatatctcgaggttctaggtgaagtaatcctagttttagttgtttgtctttgactgctactggttgacgtacagctttccacgcaacagtttgatatggcaaccatagtgggtcgatatctactcacgtcgcaatttttttttacaaaattgctttacaggagtaactgccccttgtactcttgtgactcgctccctctcgagataaccgaggtgtccctccctcctacaaaggagggttaaaatccttggtcactcgagttattggacagatcgagctgataatggacattgccttacccctttacgtatcgttgaaagtgtccttgcgatatgagacattctatctcatttttcagctaacgacactcttccgtggtatgacaaatatccccatgctattcacactgtttagttggatcccttttacgcctcgcatgcttcatagattttggctcgctaaaaacgacttcctgtatatgtgcgaaggtagatattttcctgagtttcattgagctcggtatattcagcataaagagggacatatttgctgtgtttcttatccttgggcagccttttgaaatcgtcttttctctttgatcctggggcttccgaatcaaattctccaacagtatcatgcc

SEQ ID NO: 41230 - DNA, 1661 bp, Cannabis sativa
gtgggtgtaagggcccaatagaggcttgaagcggggacgttacaaatgcaacgattactctttgttggtgtttggaagtttctcccaaactctatatcgaccaccatttctgaattgtgtaactttttcaggcaaatttgttcaaggactataaatgttaaagacatggaggttgctcaacaataccttattataatattgtgtaaaatggagtcgatatttcctccagtatttgttgacataatgattcatctagtccttaattttcctaaagaagcaattttgactggacctatttttatgaggtggatgtatccatttgaaaggtacatgaaaaaattaaagatcaaattgtacaaaaaatgaaggtaaaacacattaagtttaatgttgcaaatatttaatttcaatgaatacataattctttaacaaatattatttgtttgtagtatttgtacgatattgatggcaatccagagcctaaacaagtgatgcgaactatcatgagatgaagagaaggtattatgagagaaagaatatcaggcacactcactttcaggaacattattctggggatccaaatgatttggaaagtgttatcaatgttgtacctgatcactgctctacacagagctggaagtaaattattgaattattttttagcccaaagtttattgtgcgatcaaatcaaaacaagaaacatagaaaggaaatgaagtattgtcctcgcaaggcacaaagttggtggcagcgtctcataatgaatttgtaagtaaaattattaactttctattagcaatttttttttacaaataacacaaactaaccctatttttgaacaggacgtccctgaaaactatgcaattcatacttggaaaaaatgtcaccttaaaaaaggaacagaagacacttggattagcgagacatgtagagaattacatgtaagtttcaaatttttattttataatatttttaaaatgaatgcatgaagttattattgtgtttttaatattttatttgatcaggagaaaatgcttgaagaggttgctagcatgatgggaacagaaaatgattccaacaatggatcttctagcaaatacaagcaacttcaagctatgagtaaagttcttgggagtcagtcgaactatcaaagaggagtgggttataaattgaaagatagctcagaaacaagttcccgtacttaaagtcaagctcaatcacaaggcccttctccatccattagtctggaagatatgggagtctctgctgagtttatgttaaaaatgcgtgataagattgatcagtctgacacctctagtgacccttctgtacatgactaaggtttgaaatttttttataaaaaattttaccatcacaacagcaaggtagtgcgtccacttcgaccccttgtccaatgtcaatgccacaacaacaacaaccacaatcgcctcagatgccttagttctttcaacaacaacaacaaaattctcccaacatatctgctggctcctcacaattgcctcaattaccttacatgttcgggcatccctcacagtctcctcctatattttttctggatgccacaggaggatctcagacacaacaacctatggttggccattttggaggctcatcctaacaacaataccctatgtatggtc

SEQ ID NO: 41231 - DNA, 1105 bp, Cannabis sativa
aaagttttttatggcattcctcgtaactttttcctatatttgtaaatttttttttaaaaaaaaatgctatatttaggataattaagtttttatagcatatataacaaaacatatattcattttcccatatttgtaaattataacgaagataacacctgctgattattttgacattttctttgataacacttaaacaaaacataataaatctttttagaataataacacaacttttcttttgacttgaattttctttacaaatataatattcctataaattaacgagctacgttcttgccaatcacatacataattagcctaaaccaatttctctacaaaccaaacacttgttcattatggctgcgaatccattaacagttttgttccttcttctaatcactcaaatattattattcatcatctcaactgctcaacaaaataataccaccaaaatgatcagtcttgattcttcaatctctccttcaaccaagaactcatattggctatcaaattcaggccaatttgcatttggtttctacaaacaagggaatggctttgccattggaatctggtttgacaagataaaggagaagacagtcatatggacagcaaaccgggatcaacagcagccactcccacatgttgaactgtaaaaacaagaacaagtttgctggtgcagagcaccaaagagaaaaccagagagaaaggaaactcagagagtgaaatgaagaagagagtaacaatgcaactaactgcatcctctcataacagctcttatttatatactggaagtaatatacagggaaaagaaaagtaacagaaaagtttaactaactttgtaacagaaaaataacagaacaactaaactaactgttacatctaacatcccccctcaaacgaaaaggggtaagagccatttgaagtttggacttcagataaaggaatctatccgtggatagagacttggtaagaacatcagccacttgatctagtgcaggaacatatcgaacatgaagttgcttggccataatcagatcacgtacaaagtgcaaatcaagttcaatatgtttcgatcttgcgtgaaaaactgggttggcagcaaggg

SEQ ID NO: 41232 - DNA, 1543 bp, Cannabis sativa
  modified_base (141)..(150): a, c, t, g, unknown or other
  modified_base (801)..(810): a, c, t, g, unknown or other
tcttttttgccagcacttttcattttatgctggcaaaagttctaataccaacattgatttgccaacccccttttgctaacacatcataggtaaattatattttactatcgcaatactaacttttgccagcacaaaaatgtnnnnnnnnnngtgacatttcttgtagtgtcattaataattagaagacacatacttaaataataattaattttatgttcaaatttgtatagttaagaattatttatattattaaataaatactaggttgatgtgattaaatctatatatgtatataaattctatagttaatttctctgtttttttttttttttgccatcaatttttttgttttatttgaattttacaaataattaataataatatttaagaataacactaaataattttttttttctaaaaaaaccaagaagaatacatatactttttggtaaaaaaggaagatacatatactccacataagatatatatggaggatatgtgaaagtatcattatacatttagtcaaaaaaaatttatgttgtgactaaaaaattattactaaagatagtattttttttgtgattaattagtaagactcagaagatcataccccgcttttttttatgttatttttagtctaggaagcagcatccatatattttttaaaatggtaaaaataagaccctgaactcaatttacaatttttatttttttaatataaccaactttaagacaatttctaacacgaaaaaaatacaaaaaatgtaactagttttgtcataacatctctagatcaaattnnnnnnnnnntttattttgacaaaaaatcaatttaggattctatttgtataattttacaaaatacagagtctattttatcatttaacaaaataaagagtccaattaataatttttacagaacatatggtccaaaatagtatttactcgtagaatattgataatttaaacttattcacaatatatgtccatttacattatggataacaccaagacaaattaatgcactaatttgtaccatactatacattactatcatattatttcttgttattttgcagtgctagttgatagttcataagtgataggagtaacttgtagaacattttttctttgaagggttgcaccaaaagactcaatcatgtctaaatcttcatgtttcaatccattaggaagtatccaatcaaagtgatatagcaacaatgctagagaaagctcaacattgaggagcccaaaagacataccaacacacattctccttccagcaccaaatgggagatattcgaagttgttagaattattatcatctaagaacctttcgggtttaaaaatctcaggttgaggccaatacgtaggatctcttccaattacccatgcattaactagtgtgttggttttagcaggtatctcataaccattaatcacacacttctcttgattttgtcttggcaataataatggtagagtaggatgaagtctcatggattctttgataactgattttaagtatttcatctcatcgagt

SEQ ID NO: 41233 - DNA, 1308 bp, Cannabis sativa
gctaaagatttctgcgagagaagatgtggtgattggtggggtaaattttttgaataccaggatttgaagagcgggtctgagtaaattcgtaggaagaatgtcaaagataaggatggcatgcacaagttcagagagttcgagtggaagtttcagaaagcacaaatttttggagaagatgaaaatggtagaaaatttgattcttatagttttataccttgcacttttcaaccatcagatcataatatggaagatctaatggatgaaaatagaagggaaatggaaaagacagaccattaatgctattgatgtgcctcgaaaccgcaaaactgccaatatcagaggatgtgtgttttttcaaaagaaatcgtgacaaaaataccctccgtaatcattaagaagcacttttttttaaaaaaaaaaactttttaaggagcaattgttaaacccaaaatttggctatcacatcaaaggaggacacgtgttagactggggagaataggaatcaacacatgtaatagtaatcatatttgaaatggaataactcgttaaaggcgaaattgacagagtatatttataactcagttatttggatggtcctaggcgagataaaaatatgcaaacagttaatttgtgcattaacgagaaaccatacaacttcaagtgtacaaggtgaggcatcaacctcgctatgtattaggagatgagaattacattatcaacctcggaaagatgtagtaaaagctccagcttgctactagggttgttgttgccatgttcctagcgagacgtcccagatgatatgatttgcaacgtatttaatacacgtttaccttgacccagtaaaagcgagccaatcacagctatgtgattttcaaatattaaccgcattcattttatgtgggatgtaatagaatcccccattttcaggggataattgctgtaaagaaattaatcaactcttcaattaactgcctgattatgtaattataaatagaggcaggttagactgagaaaggggacgaaaaaatcataaggaagaaggcccaagaatagtattagaaatctaataagattgactcatgtactatgcagaattttaactggaaaaccatgtaaaaaccttcgtgttcatcattttctgattattcttttactgtttttatttttctgtgcaaatttatcactattcaagctcaaatttggttgacgaaaatctgcgttaacaagtggatatgcagttcaaagatcattaagttgaattttgaattgtattcaaacttacctccaagaaatttgatttgcatattg

SEQ ID NO: 41234 - DNA, 2066 bp, Cannabis sativa
cctatgaacctagggcttaacttttccctcttcccaaagtgctttacacccttcattggtgagactcttaggaaaacatgttctcccacctgaaactcaatgtctctacacttaggatcagaataacttttttgtctgcattgcgaagaaagcatttgagccttgatcttgtctatagcctcattggtcctctagattaacacaccgcccagatatttcctttctctggtctcctctgaatgaattgtgtaatgacattttctaccatacaacatctcatagggagacatccctattgtactctattgtgttgtaggagaattctatcaaaggcaattatttactctatgaaccctcaaagtccatgacacaggctcacaataaatcttctagtatctgtattgtcttctcggactatccatcagtctgaggatggaaagttgtactgaactttaactttgtaccaatagctctttgaactttattgtaaattttggatccctatttgaaacaatggattttagagttccatggagacaaactatctcttttacgtacacctctacatattgatcctctgtataggttgtcttcaccaacaagaagtgtgatgacttcgtgaaacggtccactatgacccacacctaatcaaacattcctatagttctaggcaacccaaccacgaagtccgttgtcacatcctcccatttccactcgggaagtgttaatggttgcagtagccctgctagtttctcatgttctgtcttcatttgctgaagtgttaagcccttggacacgtattcctttacatctctcttcattatgcaccaccaataacaaggtttcagatcttggtacattttggtggtacatgggtacaatgaataaggtgtagtatgagcctcatccattatttctttcctaagctcaccattgctcgaaatacaaactcaagccttataaagtaaaattctattgtttgagattgagaagtctttagcccgaccagctaatacttcatctcaaacctcaactaactcagagtcttccaattatgctcctctaattctttctgacaagtctggttgaagagttaggttatgtagttttccaaccacgaatgcaataccagccctaaccatatctaaagctaattatagagagatctttgtagtagtaaaaacctaaccaggaccttttatgctcaaagtgtctgccaccacattggctttcctgagatgatacaaaatctcacaatcattatctttgaccaattctaatcaccacatttgtcttaaatctttttgagtaaagaagtacttgagactcttgtggtctatgtagatctcacacttctcgccatacatgtaatgtcgccatatctttagggcaaacacaacagtggcaacttttaattcatgagtttggtaacgctgctcatattcattcaactatagagaagcatagacaatgaccctgtcagcttggatcaaaacgcaccccagaccttgtctggatgcatcacagtataccatgaacttatcttgatcggatggcaaagctatcactggtgctataatcatctgttataactcttgaaagcttgttttacacttgtccaaccacacaaactgttgattctttttggtcaattttattaacggcatagaaattttagaaaatccttacacgaaacatcgataatatcttgccaatccaagaaaattttgaaccttagtaactgtccttggcctcgaccgaacccaatagtctaatttcacttcttaaagtagaacatatattcataggctcgtttggaacatcgtattaggtcatattgtattgtattatattgaatttgattatacatcatatttttatataatactatgttaaattttaatctatagcaaaatattatatatttaggtgtccataaaagttaataccatatataattttacataaaatgcaatttaatataatactatacaatacaatacggtgtaatacggcttaccaaatgaacccataaagaatattgggtgaggatagtagtgtgttag

SEQ ID NO: 41235 - DNA, 1513 bp, Cannabis sativa
  modified_base (872)..(872): a, c, t, g, unknown or other
  modified_base (1364)..(1379): a, c, t, g, unknown or other
agtcacacatgattaaccacgatcagcggtggaacctcctcgaaccaggatagcttattgtctaaccgaagggcatgttttgccaaagcatgagctgtagaaatcttatcgcaagcaacatgggagaaaactgcccccagaaatttagacaataaagctataacgtcttcaaatagcaccccatctcattgaaaaacacctttcaattaataatagttgtcaccagagcttgcgaaactgaaaaaatatcacaacaccaaacaaaaaaacacagttatattagaatgacaatttataaaataacaattgatatacaaacttagaatttgacccacaacccataacactaactcaaaattactaaaaaactaaaaaactaacatgatttcgaaatataactagccaagccaaaggtattaccctttggctagtaacaacctactagaaccctatttgaaactcctgaaaataaaaacatttagattaaatttaaacttaaacttattgataaaattttatgtaattgtaggccctccacaaaacaacctaaaaaataataaaaaataaaactccattaccacaaaatataatgaaaaaatataaagtgaaaaatgatagtaaattaatcaatattaaagaaaaggagttaaaaagatttgaaatacttatctgttaaaagtgaaaaatcgttgaagtaaaaattatgagcacaaaatagtttaattctcttattcattgaccataccataaaattagccaaaacaaatagggacaagccatactaaatgacacaaaaaccataaaagtcacaaaaccgcaaaaggcatcaactataatgactccttcagctcagatctctaacccttgttccnttctgtcgcagagtattataaagatctgaccttggatctctttctctccttcgagtttgattaccaccttcttattcactatgattgagtacttgatttgctatgtgtgggaatgacactctattactatagggttcgaatatggtgaagaacaatgaaggaggtgaaatcactatagaaggaactctctcatctactagttgtctgagagagaaaactaggtttgaattggttgaaggcatcaagtggatgagtgagagcgtcatgttccttttatagtgtttcaactagggcttagggctaaattatatggattaaaaaagaataaaatatttggaaaaaataaacttaagcccggccactaaaagggaccattctctagttaaaattttgccagtttatttcaaccatttagtcttctttcaatataccatgttttccaattcaatcctataaatgccaaaactacttatttaataattataattaatnnnnnnnnnnnnnnnncatttatattttttattaattagaccatgcatactctcttaattgaccccaaaacctcttttcttcacattaagcccttgcttagtggaaattcataaataagacatagcctaattttagaattataatcgatt

SEQ ID NO: 41236 - DNA, 1028 bp, Cannabis sativa
cccttcaagtatttgatggattaatttttgtttcaatttaatattattattttgttttaactatgaaaggttaacttaaagttacccaatgtatggttggaccacgccagtattttgcaacacaagctggtgcgtttcttcatgatcaggtcggcttacaccagaaagaaaaaaaaccctactccctctacttatttcactattgacctgagtagggcaagagccaatggtagtaacctcttacaagtagtttgagcataatttaattgtctcttcaatgatgtatgattcaacaatacaaccccaggcctacttctatttctcacataacccttcaagattttaatgtatcgttcaaatgggcacatccatctcaagtacacaggtctacacaacttcacctctctcacgaaatgcattattaggtgaatcattatgtcaaaaaaggaaggcgggaaaaattattccaaatagcacaaaacttctacaatttctaacctgagattctctaatttagtcacatcaaccactttacaacaaagagatttgaagaacaaacacaacctcgtatttccatatctaactttcttaggcaacatagaacgaatagtcactagtagaatgtgtgaaatcaatatatgatgatcatgagatttcagaccactcaaaattaatttgttcatatctacccaatcagagactttgtaggagtaccctttaggtaccttcacctgggagatagaaccacacaaagattgtttctctgctttagttagagcatgacaagctggtggtatgaatgttcgccgaccaacaacttgtgggtgtaaattggcccgaatccttaactctgtcaaatctaggcaggatttcattccatctttgctctgcccaagaatattgaacaaggtattaagcaagctgtctgacacatttttctcaatgtgcatcacatccagtttatgacataacaacaaatacttccaatagtcgagctcaaaaaatattgacttcttcttccatggccc

SEQ ID NO: 41237 - DNA, 1082 bp, Cannabis sativa
  modified_base (566)..(566): a, c, t, g, unknown or other
  modified_base (770)..(772): a, c, t, g, unknown or other
acttgtgagtagatctacgatcctggtaaaataaatttccaacagagacatcctacaatagtggctcatgctggacacagtgcatgtggtgactctcttgtcttggttaagacaagaggtgtgtcttttatcctgaaaacttttgtcttttctcaatttaattaatttgaaaaataaataattactattttgacaatttaaaatattttttttttccgaactttcatatcaaattttatccctcctcttgacagtgtttcaaggtggcgatctaggaaccatggacctatagctttaagctccaataaactagattatttatcgaatctcatcaacttaataattatatttattaattctatgattactccactataaatatgtaatttaactattagtaaatgtataattatatttactgagtttcactacagtatctattatataattaattccagtgattagccttctttgtgttagtttgtaattttttttggtcaaattattgttttaccattctaattacttctttatcctttagtactattaattcactagtgaaagtntaatttagatccaatctaaatttacgcgtaaattttcaattccaaaagtaacacataaagggaaccaacattcgatccgttagaaatgtcaagattccataattatagatcatgtttctaaccatccacattattagattcccaatacagaagttgtaagaatcatcgtttctgaaaattttaacgagtgaatcaaagaaactnnnaacatgaacatgagttcatgactactcaggatttagaccaatctaccattgatcatcattatgatatgaattaggtccttatagtaaacgatatatttgataaagatagcttaattacatatcggtctttgactttgtcatatataatctctattatatacaacaccttcacttagatatcatgttacatcagtaatctgaattgggattacttgccccgaataacgggcatcaatgaaccgcactagcaaccattgattaaagattcctaaactttaatatgttgctgactgttttattcatggctaag

SEQ ID NO: 41238 - DNA, 1489 bp, Cannabis sativa
  modified_base (27)..(54): a, c, t, g, unknown or other
  modified_base (1429)..(1446): a, c, t, g, unknown or other
tttaaaattcatattaggatgttaatnnnnnnnnnnnnnnnnnnnnnnnnnnnnctggtaaaatatatccaacacatcctcccaagcaactgcttcaggaccatgaaataatgcttggcctttccaaagaaagcctctacatattgattctatacttttcagaattttccttggcatgatcatcatttggctccaatatgcttagatagcaactaacacaaaatttattagggtgattctccctgcaaatgacatattcctcgagctccaacttttgattctatcaatcatcttctctgccaaaagctcacactccatccctgatattttctttgaacaaattgggatcccgaaataagtaaaaggaagatcttgtcttgtaaaacctgatagatgcaaaatctagtttataacctcctggtgcatgttgctgcaatatattgcagttttattagtattagagtatagaccagatgttagggaaagcaatctcaaggcctgcaacatataacttatactcctcatccccactttgcaaaaaagaagaacaccatcagcaaaagctaaatgatttagcttcagatccgagcatctatcatgataatgaaaatattccttctcacctatcttcctcattaatctagaaagatattccatgcccagaacaaacagtaatggtaacatagcatccccctacctaagtcctctcttagatttaaagaaaccatgtaaggttccattgaacatgagagagaatttaggggttttaatacaattcataatgagctcaataaaaggggtagggaacttcaaacttgtcacatttcttcaatgaaagcccactcaatagtgtcatatgctttttgaagatctagcttgatcatgtagcttggtttgttagatttccttccataatgcctcaccaagtcctggcatatcattatgttgtgcccaatatatctccccttaataaaaccaccttgggagtgagatattatttcaggtaagattgtcatgattctagagctcaaaagcttagttgcaatgttatagataacattgcaacaagtaattggcctaaaatccttggctgtatttgggcatttaaccttgggaactaaggtaattattgttgagttgatcactttaagaattttacctgattccaagactgatttcacagctttacaaatttcatcaccaatagtttcccagttatcctggtggaaaaaactggaaaaaccatctggtctaggagatttgtttccaggaatactaaatacaacaagttttacttcttctttggtaattcctgaaccaacatactagcctgcttctgtgtcacaataggccctctaaccaaaatcccatcctccactgaccttctattctccattctaattcccactaaggaggcgtttggttgggnnnnnnnnnnnnnnnnnnataggaatgggaatgggaataagaatggaatggaataaaattt

SEQ ID NO: 41239 - DNA, 2157 bp, Cannabis sativa
  modified_base (1204)..(1205): a, c, t, g, unknown or other
atattaaatatgtagaaaaataatatattatatataatatatatgttcggtcggttctcggtttaatcggttggttagtcactgacactaaaaccgaccatgttaaggcggttaattcagttttcggttttttcggtgtcgattttttcggtgttccaacggtccggtgttattcggtttggtttttttagattttttgctcacccctattgatatactcctacctttttcgacattcaggagacttgtttagtttttttttttaatggtcgtgtacattatagttgtttaatacatcttgcaaaattttgaaaaattttaaaaaaatttaacatgccgaaaataaaattcaaactttctatcgcgtgactcttttatttagagggatacattataaaagtaccttataatatttatgttattgcaatatgatattttaatttatcgaattttgtcgattttacaatattattatctttaatctaattagtaagtttatttaaattattaattaaatataacaattgtggtaatttttgttaattaatatgatattatttttttatttcattgaaaaattaatataataataaggaatatttttttagtgtaatttgtagtgttgtggttggagtagaaatacattttgacgctaaatttggtgatagtgttacaccaaatttggtgtttccttagagatgttataatatgcaacattatcttattaaaaggctgcttgtatttatgattaattttgaaagcattctctctatctatcatttgtattattttaggcatcatacttataaattttcaattatactttttggttccactagatttcatttcgacaccactagatagggatgcatattttctcataggatgggacccgtcggggacccgcttttaatagggcaggaattctccgtctagatgggaaacaaggcgggggcgaggattacttttggtcatcgaatgttaagtggggcgaggatcacactcccagacccgatggcgacccgtttagtattttattttatatttttagtaatattttagattttataatttatgtctgcattttttagtatatttgtatcatttcttatgaattttaagttgtgttctggataataactaaattattgaataataattaatgtataatattttaatttttaagtaatttaatatttttatnnatttaaatttttattataaactttatatatttttattaaggaatttcttgccccgtccccgctcctattaggggatttcccgccccatccccgatgcggaataagtaagaatgggaattaaaatccttaacaggaatgggaatgggaggagcactctccgccaattttctgcccagtgtgcatccctaccaccagatagaggtgttcaacaaaatttacaaaccgctcaacctgaaaaaatcgcctaaaccaaaccgaataaatcgacaaaaaatacaatgaaaattcaaaccatccaatgaatatatgaatatatgtacccaaagttttaagtttgtaagtggcataaacccaatgtttatttttaactgtataaatacccaacgtttataaaactataatttttctctaatttcgtcaatatagactctgcgattatctttaacatggcacatataagaccctaattctatatcattaggttatatagtatcagttacttccaaatgttcttttaacaaattcaaatcagagtttgtactgacaaaactagaggaaattggtttacaaatatttggtacttataccactaaaaataaacgttgagtttataccacttacaaatttaaaattttgggtacaaatatttatccattttttttataataaatcataattaatgttatttaaatttatttattaatttaaaaataatattcaaattaatataataaaagggaatcattcaaacccacctattttaaggtgccaacatcacccccttaagtatagttgtattactaagggaataatatttcaagattaaaccctcaaaacaaacaagttaatattttacattactattctcttgcttacattaatccatgagcattgctatgaggcactcatagtgcctagcaccacgataaaatgttgctctataattggttag

SEQ ID NO: 41240 - DNA, 1603 bp, Cannabis sativa
ttagagataggggaaaataagcttgtgagtgagtatatatatatttcttcatataatatatatgtgttatataatattagataatctttttatctcttctaccttttttatatatataatatatataatatatatattgtatattatgtgttgtaatatttatttaatctctttgttagtcctttgtattatattacaatagagttgtaatatcttaatttatcttcaattgtaataaaatctctaacaagaaaaaccatgacaataggtgttgatccgccatagaacgtctccccctggtgcaccatcaacaatatccccctcgaccatggccaaaccatgcctaaagaaaggccagtgagtcatagtcagagaagaagcacaaaacaagcagcggcgacagactaaagaaaacctagaaagagacctaggcgatatttcaagaatattatattagttaatcaattattaaaatatgggcgttgttatatagggcaaatatctaattataaaattggcatatctccactatacaatttaatcgaatatgacataattatataaaaaaaactgagttacatatatgtatatataaataaatattaatactagataataacttcaacatataagaaaagaaaacaataaaaaagttttaagtaaatgtgtatgtcatttgctttgtccatatgacttgtcgtttgtttttgttattgtatctttttacaagcattgtcgtttcgtcctttgtcttcagttagccaatatatatctatataattatttatttatgtgtattgtatatactatatttatcaaatatctttatatattaaaagtgcctatctttatataattaaataatatttatctactgaactgttccacttagatatttctgttatattttttttgtttaaatatgaattttcttttaacatgtttaaatatgaatttgaattaggatttatttaaattattgttaatttgtttttttgaataagctgaatatttaaattactgttccacttctttctctacgaaaaggaatgttcaccattattacttacctcattcatatttttaatcattaaatcaaaattttgtgtttgtatgttaacattagcggactcaacgcctacgatcgccacaagaaatttatcaaagattacggtgagatcagacccttttgtttttgttggatttacatagtattaaaatgctcaagttttgatttttattgttaatttaatttggactcgaattatacacaaatactgagttttgtatctgtgggttccttgtacatatgacacaaatactgagttagcaatgactgcctacgttggtctgtacgagctttgtagtcctaagggagtatgtgtatgtgtcagctgcatctggtggagtgggtcagcttgttggccagtttgcaaaactcttgggttgttatgttgttgggagtgcaggaaccaaagaaaaggtctctctctcctagaattgggtcaaaagattttccaattacattggcacaaaaagattgagctaatttgtttccaaaagtttgaattattacgactaatcaccaacaatctgaaattag

SEQ ID NO: 41241 - DNA, 1352 bp, Cannabis sativa
tatatatattatagtgttttattagtatttgaagttatgagtgagtagaatattcatttaagcacaaaaacctgcattatctgtgccacaccacacggtatgttgtagttaattttatttgtggcgcaattatagttaaaaaaaatttcctattatcgtggtgttgcgattaagtaaaataaatattaaaaaattacaatattcgcactatattatatataatattaatattttatatatatatttttatttttgcgtacaaataattattatttattactacttttcctttataatgacgataacaatttttgccaattgattcttatttctcaacttaaaacttttatgagtattgtttattagaatttctttttcttttactttataaattaataatttatttatggttaatcgtataattttacactgcgcataagtgcgatatggtttacgattaaggcataaaaaatttactgtgataaagagtttttacttaatcacactttgcaggttggtttagtttttcatcaattcccctcccaatctacccattgacctctatttgtagtgtatatactctatagatgaaaaaaaaaaaaaaaaaaacttactatctatatgcttatgggatatatatatgctcaaaataagtatcaaacattaaagtgattcaattaggctaaaaagggataactaggaagacaaatttatcaagattggcttgagagctcaattatttcaacaaaaaatattaatcattttctttgcattgtctagagaatttcatattaaatagtaagcacataagttctacaataattttacatcttttctcaaacaaatcaacaagcataaataatttccaaacaaaaatgaatttaaaagtcatgattacattttgttattaaaaaacgaagaagaagaagaaatcatgattagattctcaatgatttaagtaactcaaacaaactaaatcaacattccaacaagcacatagattcatttagagaaaattacattgtatatctattttattttatttattttatttctatattctttaagatataccaacttttataaatgatgtcccaattatacattttaggttaatgtaaatcatgtactacacttaagtagaggaaaaaaaatatattaggcaacccactcacaaaaatcagtagattttaataaaatataatatgaggacatttttaattaatagatattaaaaaaaagaggtatctttatccctttaatttacacaagagaaatttgaaattctatgcttaaagtaccttataatttttcccctaaatgtatagtcattaaaattagtcatatatgac

SEQ ID NO: 41242 - DNA, 1114 bp, Cannabis sativa
aataaaatctaaatattattaataattttacctacaacacaacacatataacttctttataaatatatttttgtttaaatatgtcaaacatatttgtaacatattcaaaacgtctgttaaaatactaaaaataactttaaataagacattaataaattaatttttttattaactatgtcaattcgaacacaatttaaatttattaaagacaaattcaaaccaattaattgtcttgcaaatttcgagtcgtgttatcttatttgacccgttttgctagtctaaccaaaaattaaataaattggtgtttgtattatatattatacaatataagctatgatattatacaatatataacctatgttttaataatttaaaaatccttaataaccaaataccttgaaaatgtccctccatgatgtggtatgcctaaccaggtcccacgctacaagtataactaactaaccctccttcaaacctcacaatttaagtattaaaactagtcatcctagtcctacaactccactcccattactcacctataaatattaataaatttatcaaatatttttaaatctgccaaatcattaaaccgtttgcaaatttaatatcttatgaactgcatttatgtacactcttatacacgcgacacgtttatattaatacacctactataactatttaaaaattataaaaaaaaataaattagttataaaataaataaaataatttttttattcttaatttcttccttgactctctcatttctaagtgaaatctagttattacacacatatatgatcccaagaattttaaagaaaataaaacttttataataacttgaaaaattcaacttttattcagatcaataatagatcagtacaaaaattaatacaacatttacataataaactactggtaataaggtggtaaatgtttgctattctagggattctttattagcgagccattaagccaagttaatttataaaccccggttctaattacagcttcaatgatgtacgggccttcccagttcgggttgatcgaacactccaactgttagatcttacatgtttgtaaatacacgtctcaacaccaaatctcctactttaaa

SEQ ID NO: 41243 - DNA, 1490 bp, Cannabis sativa
tctttttcctctttgataaatctcccatctcccgggtgactttgagcttgtaatctagcttcaaggaacttgtctttagccttctggaagtccaactccacattaccccacctagcatgattaaaagactttaaaccatgcttcagccgagccaacttagaccaaatccccaataaaccagcagtgaaaaccggtttttgccagctatccataaccagcttcttgaaatcacactgctctgtccaatagttgaagaatctaaacggcttgacacctatttccaccataacagccgaagaaacaactatagcacaatgatccgaaacctcttcccaactaaacgaagctgacgaattaggaaataagtccatccaatcctcattcttgaaagcatgatcaattctcgaatatattctatccttactcccttgattatttgaccaagtaaagaaagaaccctgccttttcaaagtatccaccaagcccaagctaagccaaccattgaaatcctcaatctcagaccttgaaaccggtttacctccaactctatccccataattaattaaggaattaaagtcacctaaaaggatccaaggcttgaccgggtatctcaaagtagttagacccttccataacaacttcctctcatctaaaccattcatcccatacacaaaagtaacacaaaaagcctccgtatgactagccaatttcacatagcaatgaacaaactggcttgtttcagcaataactatcactctagcaaacgtcttcttccaaattattaacaatcttccttcaatagttgggctattatagctctcccaaccacagaaagttttagccatcatttcttgaaccttctcacttttcagcttagtctcaaccaaagctccaaccccaatttccttttttttgcaaactttaagcacagcctcttgtttcttctctttattgaggcctctaacattccaacacaacacattgcagcaattcataaaaaatgaaccaaagacccatctccctgtgtcccaccctccttattttgcaacatttcaaaggtgttcttagctttttgatttgctccatattccctaaccacttgcttgttcttgagaagatgagctcttttaggagtttcccaacttgcctcagcctctccctcattcattaccccagctatcaaagccccatgacataaatctttattttcctctcggtctctcaagtccccttccctctgttgagattcaactcctttcttctccccttcctttcccaatctgccccctattctattcttgccatcatctcccatctcactagcctccttaacattcatttgagcatctttaacaccattcttttcctcaccagccccaacactttttacatcttttttaacccattgcttaacctctcctttcctacactccgccatgatatgcccaaaacccccacaacttttacatttaaccggcaaccattcatag

SEQ ID NO: 41244 - DNA, 1176 bp, Cannabis sativa
  modified_base (997)..(1000): a, c, t, g, unknown or other
aataagattgactcgtggattatgcagaattttaactgcaaaaccacgcaaaaaatcctttctgcctatactttttcctttattgtttttattttgtagtgtgagattatcactgttaggctcatatttggttaacaaaaatctgcgttaacagtttggtactttcattgagagcctttgtgagaaagctcagaaaaaaccctcatttttaaagaaaaaccatctcctccatggctgaaaacccaaaaaacactaatacaccacacgaagaaacttgtcaccgttctgggaaagagcccatgggctctagaaggtcctccaacccacagtctaaacggaccacccgctctaggaggactcagcctaagggtggccccagcactcggaccactcgttctaggaggacccagcctgatgtttgccccagtacgtgaacgacatgctcgaggagaactcagcgtgggaatgaccaaaatcctggaataaaggatgagggacccaattgtggaggtactcagcctatgggagagagcacttatgaaacagaaaactgccaccttagacgccgcttggaggaggcacaacggcggaacactgaattagagtgtgatgcggccgcagctagggtggcacaggggactgacgctcaaaatcaacatgaacctggagtgagaagaccatgaggcagacctcgtggctcatgaaccaggagacaggaaaatgtccaggaagaacaacctggggaaaatgagtttccccctaaaaaatttgaatgatcggccataatcctctcatagaaatgggaatgggaggcaacccgaaatcgatgaacaagaaattcctcatggaaatgaggaagaccctaggactcaacctggggaacgtaggtcacctgcgaggaatcaccatcattcttcccgaacccatagagtgagggctcgtacagaccttaatgggggaaatacgacaaaccacactcagggggaaagaacagagnnnnaagaagcaagtgtgacctcagggcgttcaaggacccacagtcgatcaactcgaagaggagaaagtactagatgggctaatgatcgagaaagcatgggaaccagtaaatctgcaagtcactcgaggacgaggtccatgagcaagatgaggtccgtgagtaggacgcaatctgtgagt

SEQ ID NO: 41245 - DNA, 1203 bp, Cannabis sativa
actactacaatttaaccttttagtgacactatatagtgactctcacttttgtgagcgtcactaaatagttcagaataacttttagtgacgcgcataagtagactctaaattttcggtattagtctctcatattgcgtgtcactaaaaatatgaagtgtcaccaaaaagtattccctataattttctaatttttttatttattaaaaaaacttacttatagagtcacaccaagagtgactagaaaaatgtatccccacatgctttgcatgtcactataggtattttaataaaaaaaaaataaaaaattaaaaattggaaaggcacgttggaaattgtttccctatcttttctagatagatcttttttttttatattttattctttttatattttttaaatgaaaaattatttagggtaattatttcaaaaccctaatagtttatccctctctctcctttctcaaccgcctctctcagattattttttatttttcttttatctcatctctctctaaaaccagccatctccaaccctcctcctttcatttctctaacactacaaccttacacagctcaacaactctcaagattcgcccattaaaccatctcacctatctctcttcttcttcttccactcgctgcagattagcttctgtggtggaacaaggctcttcatctccttcctcagatgattccgccatggacgacgacaaccaccaaaggtctaggcgagctccaaccgccatggaacctctcgtctccctctactccattgacgacttctccgcctccaaatgcccatggtctcctctcgcctccctcgatatatattttcttggggttaaaatatctccccctactctgatttttttaggtgtattgtgtttgaaggtctttgtggatctagttgttgaaacttcatccgtggtctatggtggttgggtttgtttttttcatcgttcgaaggctctagttgctggtttacggtggcaagtttcatgggtctcgacgtttgaatgtcgacaagtctgggctcgtggtctatggtggccgcgtttgtaattttttttttgttcatatttttaattttttttctagatgtgttagatttatatttagctgatctgtaatttttgtgcatgtatatgttgaactttgttataaaatattgtattttagatgtttcagtattgaactttgttaa

SEQ ID NO: 41246 - DNA, 1698 bp, Cannabis sativa
ggactcttttgaagagtctcatcttcattaaagagcttcttcaacattgtggtaagatcatctgcaacttctaaatcatttttcacaaacaactttgtgtcctccacaaaactgtaacaagtttcaactgatcatcctaaatttcacaacaaagaaagaaaaatcataagaatcaaaactcacaattccacaatactaatttgaaaccaattaactcacttacaacaaacaatagatctgatttttgtagccaagttgaattccttggatttaagcttgtatctaatggtccaacctcttgaaaattcctaattccaacacctgaaactcccttttttctaaagaaacaaacaaagaaaaagattcatagtttaatacacacaaacatatatacaaacacaacacaatcatacctataaacttacaagtcctccttgaagccagagaacaataagccaaggcttagatagattctcaactctccaaggactcttgtaaagccaccaaaatatgtgggtttctgagaaaattttaacaaacgaaattcaattctaaacaaaataaaaatataaattcaatcttttttcttacccagaaaagaaaatgaagaaaagtttacaactttggaagaatagcttactgggtctgaccttaacgtaacctcaatcctcagacccatcttgggttctttttggaatttttcttcctccatgaatgagtggaacaaagcagagactaaacatcactataacgactaagaatttctccatttttcgaccaaaaaataaagatgagaaaaccagagaatgagagaacacttatgaacctctctaatgtccaatatatatacacacattcatacatatatgtatgtatgtgtgtatatgtagtcggcaggccaatagttagaacatagtttgatctcatggttcaagtgtaaatcaaaatagaaagaatttctatgagggataagttgaaaagtctagccataaatgtttcccattgttttgcaaaacgtttgagcttggagaagaagcgctcagcctaaacggctgtaacatcgcctcaccaccgtttgtctccaccattgcacctactcgttgttcagagatcacctctcgttcatagacctctgaccgttcagccacacccattgttgcagctgtaatcgattgcaagcaaaattttagattattctagagcatgtatatataggattatatatccagaaaattcaaaatatcatcttcaaaaaatttggaaaaattccatatataccaaggaaatgtagaaacctgaaaaacctttaagagttttcagtattggcacttatctttctttctactgatatgccacttttattgtatcttctctcaagtgagattcaattcatgagatgagattctcaacaaaaaaaggtaacttgatatgacactttttcttgaaatcaaaatctctactcttccaaagttagaaaaagatgttttgctgggttaaacatttgcagaacatataaattttatcttgtgtcaattcattgaggaaaacgtacgtcgtcaaaactcctttgatttgtggttgaactggataaaaagtttggatgcttcctccatgtcaactatagaaagaaaaaaagttaacaaaaaataaatcattaacaacacattacaaaaaaaaaaaaaaattgtaattaactat

SEQ ID NO: 41247 - DNA, 1021 bp, Cannabis sativa
aaaaattataaaaatactgttgtataaaatatttaatatttttatgatttttatgattttatttacagaaaatacaatcttttaatatattttatgttatactcctataaatttattgttaaattttttattatttgtatgttattttttgttattgtttgaatgttattttcaattactttgatgtagtttttgatgtagttttttttgttgtttttatagaacactataaaaatgtaaaaaaaaaaaaaaaattgaacataaatgtaaaaattttatataaaatagtgttttatgtaattattcctaaaatataagatgattattattatgataaagctagccctaaatattaagggtaatatgcaaaaaaaaaaaaaagtggtatttttataaaaaatttgtatacaaaataatatttttgaaatttaagatttttttgcttgaaattgaaaatgaaatttttataaaatttagggccctttaaagtggggaccctaaggattgaatgattgatacatgtgataaactatgcaacttgtgtggaagaaaaatgagaggaaagtctcaatcatatatgataaataattatatatatataattggcaaacaacaaacattttacactttcatctaattttaatatatttttacaaaaagacctctgtataaaattcgaataaacagttgaaccctatttaaaaaattattgtaataactttaaaaaaaaaatccaaataattatatcaaattattactatctttacctaactagaagttttcttttctttttttcttttcacaaaatatatatatttcttatattttctgtcactatcatgtcccccacctctttctaaataattaaaactaaaataatacaagtgagatagattagaaataataaataattttattcttgttttacactaacttgtgtttattttaagcttaattttgaacataacaccattaccaaaacaccctctatattacttcaatgttagttaaactttttttt

SEQ ID NO: 41248 - DNA, 1226 bp, Cannabis sativa
  modified_base (263)..(275): a, c, t, g, unknown or other
  modified_base (1095)..(1099): a, c, t, g, unknown or other
atatttaaattattacctttgggcaaataattaaaatatatacatttaatattaactcacttcatggaatgtgaactaatatatataactactacctttcagcaagtaattacacatagtcaaccaaaataaatactttctacaacatatgaaatttagtgataaaataatcattaaaagattaataattttcaaccaaatttctataagttatatattaattgcttgtaatgtattaacaataaaaaataaagtgtccaccnnnnnnnnnnnnntttacatcaaacaatcaagttttacaaattttagaagaacaaataatggaaagacgtgaaagaaaaaatattggtggagattacatagtcaagataaatcaaataagagagtgactatgtcaaatagaacgagaagaaactcaaatttttttctatgatttacgaatttcgaaaatcatcaaaaattatttataacaattttgtaactacataattatcattaaaataataataattattaaatggattcaaaaaattaattaaaaatcaccaaaaaaatcagaaattaaattctaataatgctggaaaaaagaatcgtcgaaaacggagtcacgaaactatctcactctccggcagccgcgagtgggcttcgtcccaacaagttgtcttcaacctccaacaacttccatggctgcaacacggatttcgggcgacccggtcgggtcgggatgaaattctggccaaaaaagtgacgaaacggacgataaaaagaggggttttgatcagtttaaaatttctaatagatctacggttttaatttcatgtaaaaacacataaatttaagtagatctagttgaaaactaattcgaaaactaaagaagcaaagtaacccgagtatttgatgcaattcgaaaattaaacatgtagaaacattttacatcaattattgatgagatattcacaattaattttagattataatcaatagaattgaaaaacacaaaattaatttcataaagaaaatatataaaacctaaaagtttaatcttaaaattctcctaaatcactcaataattttatgcaagtaatatatcaaaannnnnagaatttaatgaggaataaaacccataaccttttaagattgaaaaacaaaaaatgtaattaaagaaaattaacatatacatattagttattatacaaattataggttctaaatcatatacaataggc

SEQ ID NO: 41249 - DNA, 1867 bp, Cannabis sativa
  modified_base (27)..(29): a, c, t, g, unknown or other
aacataaataactgctaatttccaaannnactaagcgggctttacaggtgaaacccaaaacctttcactgtggaggcctgtaaaagaagcctattaaggtattccatcaccagaacaaaaagtaagggagaaatagggtctccttgtctaagacctttttcgcccataaatgagccatgaacgccaccattgagcatcaaggagtaagaaatacctctaaggcaaaccaagatccagttgataaatcgggagggaaagcaaagaccctttaaaagatcagccacaaagtccaagtcaacaatatcataagctttcctgagatctatcatcattagacaccgagtcgagatactcttcgtggtatagcctttgggtaagtcctggaatattaaaatattatgtgaaagcagtctattttggataaaggctccttgtttatggtgcactaattccggaaggacttcacttaatcttgagcaaagtaatatattataatctatttgaatgaagatatttttgaaaaaatcatgaaattaaaatatgtgtttctatattttctttttcctgtaaaatatgtgtttctatatcttaaaccattttattttcaatctacaaatatactctcttaatcgtactactaggtctttttacattaatatattagtgttataattttgtttgatctaccaatatatttataaatatatataaagaagagatataaagtagtaacatattattctaaaatctctctaaataatactatatatattctctcttacttaattctcttttttaaattttttttattagatttataaatattaattaattaaaagatatttagtatcctaaattttctttaattttctattttttttaataaaaattaagataaaaaataaaaaaatcattataatatatttttccccatttaaagtatatatgttttcctatttagtcgtataactcaactgaaaaaaaatcaatcaccctattcacattttttgtttcttattttttcttcaaattattatctttaccaaaaaaaaaaaaaaatcaaatttatatatctatataccaatatatcaatataaaggatcaatcaatcaatatatataaaggagaagtatgaggcgatgacatgacattctaaaatcactctaaaattacttttctcttctctccttaattctctcaattttaatatttaattctattttctctaattttctctctttttattctattttctaataataaaaatattaaatatctaagctatgaatattaacgaattaaaaaaacttccgtggcataaaaaatctaacacaacacagtgcattcatacattttttattattcttttaatataaaataaataataacctaaacacctaaacctaaagcatatctctatcatataatatttaaatctttaaatttcagtcaaaacttttatcaggttaaatctcaccatttcactcaaaaaaattatgaggtttatttatattataagtcgccatcaagatcaattttcatggagccattgtataatattggagtaggagtacacttagcccatccagaaaaattccaaggtttgatttgatggagtacaataacaaatatcaaagataggtaaagttagcattatttgtttattttttctttcaaatttaatattaggagatagtatataagcatatcaatcatatattaaatttatggtaaaaatttgtttcccatcatcttttaaattgcttttaaaaaatgtgagtaatattcgttattttttttttactaaatgaatactattcgttatcatttttaaattacatatcaatttttgtgtgttttttttttt

SEQ ID NO: 41250 - DNA, 1023 bp, Cannabis sativa
atggccgaaggtcttttacagtctgcaaatgaaaagagagtagaagaagttggagaagagtatttcgaagatctaatttctatgtcattttttcaaccatcaaataaggatcaagggtacccgacttttctcatgcatgatcttatacatgatttggcaatatttgtttctagtgaattttgtttaatgatggataatagaagtaaatgtgctcacaaggttcgtcatttttcatacatgcaaagatgtgcaaagaccgataacccgaaggaatttgaggatttatttaaagctaaatgcttgcgcaccatattgtgggaacaagatttaagccaacagttaaggatgttaaagattgaggagttggacaagtcattcccaggcttgagagtactatccttatatgattatagcatcccaagtttcctgattcagtcggcaatttgaagtatttaagatatttgaagttatattgtcttgagattaaagagatacctaatacaatatgtaagttgtataatttggagacactattgttggaggaatgttggagggttacaagactaccaaatgatataggaaatttaatcaagttgcgacatcttggtgctcccttctcattagaagggatgccattgcaattggggaagctacaaaatcttcaaacactgaatagatttgttgtgggaagaaatagtgattgtggtggtattgaattgttgaaagagtttcaagatctacacgggaaacttactattaaaggactacaaaatgttggtaggcttgaggaaatttcagatgctgcagcaccattattaaagagtaagaagtctcttagtcagctagatttgtcatggggtgagtatcatcgtgaagctgaagttgatgagttgcacaaagaaagagaggtactcagtgccctccagcctcatccaaacctaaaggaacttgtgattcgtaactacaaaagcaacagtttcccaaattggatgggagatgatcgttgcttgtctaatttagtaa

SEQ ID NO: 41251 - DNA, 1558 bp, Cannabis sativa
  modified_base (995)..(1000): a, c, t, g, unknown or other
gccagactggtatgtttgaataataccactgaacaagaagaatttgattctaatgattctgaaatctgtgaagagtctcttactaaatcatacacagtcatgtaggaaaaatggatacaagttacttctaaaaatagagtgttgattaaaatgaataaaaaattgtctcatcaaattgaaatttttgagttaaaaataaaagagtatgaggcaaatttttgttttaaagatgaaaaaatcactcttttaaattttaaggaaaatgtttaaatgcttaatcctaaatcttctatttttgaagaagctcagaatgcaggtcaaagaggctttgctggcattgtatcaaatggtattgaaagttctggaatcacgaaatttgtaaaatctagtgttccaacaaactttcttgatgcttcaaatttaaagctggctgcaacagattcaaagcctgtcgctgcagaatttgtttctgctgaagcaaagtctccaggattttcaaaaagagtaagatctcaggtaaaaaaatttgtgcctatttttgatttctgtgataggaagggacatattagacataaatgtttcaccatgcaaaatatgaataaaataaattattttggtaatttagaaaaatctcaaaagaaacaaaaatggattaggaaaaagtgtctagctggtttttctgataaaagtgttgcatcttaaatgtggtatttatagtggttgctctagacatatgacaggtgataaggactttttgattaacatccgtcctatgtagtgtgggaaagtcacttttggcaatggcttagttgaaaaagttgttggaatgggaactctcaattttgaagggttgcccagattgaaaatatgatgttagttgaaggactaagggctaatttacttagtattagtcaaatttctgaccaagggtatattttctcatttgacagtgatcattgttatgtacttaatgatgataatcaatgtattttgcnnnnnnttcgatccactgataattgttataccctaacccctgtgttcacttgtcattcagccatcaacaacaccacggatttgtggcatgctaaacttggacatattaattataaaaatctaaaaaaaattgtcgaatgcaagtattattcgaggtctacccaagctgggtaaagaaagcgttggtaaatgtgaactctgtcaacttggttaacaattaaaaatcactcacaatgtgtctgtgatatcaatacttcgaaagtattagaattgcttcacatggatcttatgggtccaattcaagttgtaagtttgaatggtaagcggtatatttttgtgtgtgttgatgatttttctcgttttacttagatagattttttaagagaaaagtctgacacatttgatgcttttaaaactctttgtttgagattaagagttgaaaacggatgtagcattgggaaaattgttcaaattcagagtgatcatggtaaggagtttgagaactctatttatgatgaattttgtaagtctacaggtataactctgttgggaattattttactag

SEQ ID NO: 41252 - DNA, 2508 bp, Cannabis sativa
  modified_base (1398)..(1402): a, c, t, g, unknown or other
gattctagttcccggattcaaacccagactcggacttagaccctggtcaggggtacgggtctgggctagggtcttgttccgactccgagtctgggtttgagtccggatatgggtcctagatccaaaaactgactacgggttaggtccaagccctgggtctagatctggatcacagtctcgagtcctagtgtagttccacatggggtcccaggtcccggtctgggtcctaggtcatggtccagatccaagttcgtatcgtgggtctcagtcccagttctgatgcccgtgtcccgggtctagttctgagtcttaggtcttggtctgagtccaggagccgactggggttcaagtcttggtccgagtctagattcaggttccgatatcggtctgggtcgagatcagtctgggttcggtccaggtctgagttcaggtccttggtgcgggtccacgtttgggttggggtctggatctaggtcctgatctagttcctaggtttcgatcttggtctgggtctgagtctgagtccaggttcgtaccttgatccctatctaggtccgagtctgtgtttgggattgggtcccagatttaggtctaatccgattctcggttgcgatctgggtacacgaccatgtctaagcctgagtttccatcttggtttgggtcttaggcttggtctgagttcggttctaggtgtgggtctgggtcctggtcagggtcctaatcttgttacacggtcctggtccggcagttcttgtttaggtgcaagtttcgggtcctgggtctaggtctgggttcgggtttgggtcttagtctgggtttcggtcctagtctgagtcccgaattcaaacacagactacgggtctgttccaagccccatttactaaattccgagtcaagatctgggtccttatcacgggtttaggtctggttctggtcctgggttccaggtccaagtttgggttcgggattgagatcgagtgcgattctaggtcccagccccgattgtgtgtcccgagtctggttccatgtttgggtctgagtttgggtctgggttcgggtcccgagtccaggtcaaggtggggatccgggtccgggccccggtttgggtctaggtctaagtttgagtctgggtcttggtccggttatagttttgggtctaggtccaagttcggttaaggttctaggtccaagtcctggttctggtcccatttctgggtcaaggtcaacttctgatttcggttccaatttcgggtcacaaggtacagtttcgggtctaggtttgggtctaggattgggttcaggtctgagttttggttcgggtgttggtctgggttcgggtccgggaatgtgtcccagatccatacaccgactatgggttcgatccaagccctggctctnnnnncagatctcgatctcgggtcctggtctggttccattttgggtgccatgtcatgagctgggtcctaggttcaagtccaagtctggggtcgtgtactaggtttcggtcctagttccgttgcccaggtcattatcttgattctgggtcaaggtcccaattctggtctgggattgggtcccagtctaggttcgagtttgagtcctagtctcgattcgagcttgggtctttgtcttgattttatctgggttgggttcgggtttaggtcctagtcctagtcctagttcggttccagttctagttgcaattctgagttagagtttggattcaagttcatttcggggtttgagtcttggtctgagtttgggttcgggttcagaatttggtctaggtctggatcaagctccgggtgtgggttcgcgtcccggtccgggtctgggtccgagtcccaagttccattctctatctaagtttgggttcagttctgggtctaagtccttggttccgatcctagtctgggttcgagttcaggtccgggtctaggtctaggtttgggtgtgattctaagtctgtgtctgagttcaggtcccgagtaaaggtccgattttgggtttgggtccgggttcgggtttgatcctgcttcgtgtctaggttcctatgctagtttgagtccggggtaggtttccggtctgggattgggtctgacttcagattctcgggtccaggtcaagtcctagttcaggttggagtccgggattccaatttgggtctgggttctggggcctaggtccctggtctaggtcccccatctatgtctggttcctaggtcttggtcttggtctaggttcaagtttgggtcccgaatcttggttcgagttcgggtccgaattcgggttcaggtccaagtttcattcccagtcttggtccgggttcgggttcgacttcgggtcccagtcccagtgtgggtctgatttttgggtcccatgtctaagtctggcagttcctgggtgtggtctcagttttttggtctatggtttggctccaggtcctggtattggtgtaggtcgcaactcacaggtcccgatccaggtcgaagtcccagtattggttct

SEQ ID NO: 41253 - DNA, 1321 bp, Cannabis sativa
ggctaggatgctagctttactgtcaaagtcttactattggtagaaaatggagcaagacatagaagtgtatgtgaggacatgccttgtatgtcaacaagacaagacggaaacgaggaaagaagcagggttgcttcaacctttgccaatccttgggaaaccatggtagtctataagcatagatttcattgtgggatttccagaagtgaagggcttttggtctatccttgtagtgttggatcgattctggaaatacgacatattcattcctgcgcctcatgcgtgtccagcagatgtggcaaaaaaacttaccatgaaaaatgtggtcaagtactttgggttacccgaagacattataagtgatcgggattcaagattcacggggaggttttggacgacattgttcaacatgcttggttcagaccttaagttttcaacagcaaaccatccccaaactgatggtcaaacggagagaatgaatcagttgttggaagagtatttgcggcattatgtgactgctagtcagaggaattgggttgatttgcatgatgtgtcccaattttgctacaagattcaacaatcttctacaacgggaatgagtccagcggagattgtcttgggaagacaacctctgacgccacacaaagtggcaaaatagaaatctcaaggggtctgtcctgcagcctatcggttcgctagggataggactgagttgctggaattggccagggacagcctgggaaaagcttcacggaggatgaagaaatatgctgacgagcataggagagacttggaattttctgttggagacgagtgttgctgaaactcactccacagatttggaaaaagataactgataaaaggtatcataagggcttggtccttaaatacgatggtcccttcgaagttgtccagaaagtgggggttgtagcatacaaattgaagatgccggaacgtttcaagatacacctgactttccatgttagtttcttgaagatatacaatgaggacaaagaggaaggaagacagcagggggtgagggccccgcctattgtgaggaaataatttgagaagaagttgtcgaagatccttgatcattgcactcttggagccagcaagaaaaaccagagaaccgaatatttggttcaatgggaaggtgaagaggtggcagatgctaaatgggaaaaggctgtgactttgtggcattttgaagacgaggtgcagtgctatatcagaagtatatcgacgaggacgtcgattccttctggtgggggtggtttgtgagaccctaacttgggttcgctcggcggaccttgacatcact

SEQ ID NO: 41254 - DNA, 2063 bp, Cannabis sativa
  modified_base (1931)..(1933): a, c, t, g, unknown or other
tttacaatcatttaagataccaaattaaaaaatatgcaagcaaatattaaccttttcaatcatagctaagtgagcttctctttctctaattaatctttgtaaattcgttcttttttctctttcttctttttccagtctttctttttgtctttgtaacttctctcctttttctctattttccctttcctctatttctttttcaattcttgccttttcaaatacttcgcgctttctctttttcgattcttccttaatttcaaactttgtagctgggaaactcgaattggcacaaacggactttacagccaaagtagttttcttgagatgactctaattaaaacaaaaaaaaaaattgattagctatattaattatctaattaggtctataaattaatataaacatattgaataatttaattagactaactaattaccttgttgggataatgaagatggagttagactctgagtttcaaattgatgatcgatgcttttattctattacaatattaaaaaaaaaattaacatcaatgaaaaaaagtcataaccctataataaaagtaaatattaacatatatatatatatgtttggagaatttaaaaagaaaaaacacaaaatttgaaccttttctatatatcgatgatgatgatccaatggagcatgagttggtgctcgagtttcagatttgtacgataatattgagaacggtcttctctcagtatcattttcaatttcaaattgcttctctacctatatacattataataattaaataattgtacaaaattgatagaaaaataaattatacattacaaaatgattaatatgaataaagctcataaattaaccttattgtgatgattgtgagccttttgcaaatattcataagacttagaattattgctcgaattcattctgatatactttctcatccactccaatattttacctatattaaaaaaaattatgtatatgaattaattaattacgattttaattatatatcatccatattgttaattaacattttaattatttatttatcaaaacaaggtatatgtattgaaatattatttaagtcttaattatagattgatgaacacaataaatggaatttaattttctcaccttgtcaatattttgcttaacaattattaatcttctcgagtagcaattaatacttgattagtaattaattaaatgatttagagagcaagaagatcattaactataattaattaattagggatttagggctagaaagtgcgtatgtgcataattttggttcttatgttgtctttttatagccaaaacataataatcctaattctaatatgattatgattatgattattatatattttaaattataattaaataatatttaattataatatcatgattgtttatcttaagtttgtttgaccacctcaattaatttaaatattatactcttttttaaaatatttcgggattttttagaatacgggaatctaaattcaaatttaaatatgtaatattagaaagagacaaatttagataagataacctcgtaataaatttaaattatttaaagaaaataaagaaatttaattatgtatataaattaaaattagaaaaaataattatatagttgtttgagatttcttttttatttaaatatataattctattttaaaaattaggtagttttatagtaataatgtaaaaataatttaatttctgaaaaattgaaaaatgtgtacattttagttggagcaaaattatgtaaatatttaaaattaaatgttttaatttctacactgcacctaaaaaaaagtgtattgatgtatcactgtctatttaagcaatcagaaaaaaaaaataacgtttttacgtagtgtatgttatagttatttaatataacttgtaaaattttgagaaatttgannnaatttacaatataaaaattagtattcaaacagtctatttcatacgcagggacggacccattcacaataatgtagggctatagcccccactaataaaaatattgccttttaaaaaattaaatgtaaatttt

SEQ ID NO: 41255 - DNA, 917 bp, Cannabis sativa
gatttacctagaacacactgctcacagaattcaatttcttggatttgatccttcctaaaaactcctttcttcttgagcacttgcattcctccattactaatatgagcaagtctcctctatgccagattaatgttggatctctctagatgatttaattgttgcattcacttctgagttatctgtgtgaccctgcaacaaataaattccattctctttgattcccttaatgactatcatagagcccttgacaattttcataaccccaccttctatcttgacagaacacccttcttgatgaagcataactactgagataagatttctcttaatctcaggaacatgtctgacttgtctcaactcagcaactctaccatcattcaattttaatctaacagttcctattcctgtgatgttgaaggatctgttgtcaccaagtctgactgaacctcttttgattgcattgcactcattgaattgggattgatcagggaaaatgtggaaggaacaccctgagttaattacccaatttgatgaagaacaactttggagacaactagaacccctggactgtcataaccttcttcatcagaggctaagtccacactaccagagttactgttattgaatttcttccacaatgggcagtctttcttgagatgtgaagttgagttgcagataaaacattttcttttattctttgaagaagaagaatacttacccttattttgattacttccatctttattctctttctttggaaatttccctcgaaccagcaatccttcccctgaactactctcttgaagcttagatttccttttcatttcctttgacatcaaggcattttgtacttcttctaatgtaagggaatctttcccataaatcattgtattcacaaaatgctcatagttttcact

SEQ ID NO: 41256 - DNA, 2842 bp, Cannabis sativa
  modified_base (427)..(436): a, c, t, g, unknown or other
  modified_base (717)..(722): a, c, t, g, unknown or other
  modified_base (815)..(820): a, c, t, g, unknown or other
  modified_base (1078)..(1079): a, c, t, g, unknown or other
  modified_base (1503)..(1507): a, c, t, g, unknown or other
  modified_base (2062)..(2075): a, c, t, g, unknown or other
  modified_base (2353)..(2370): a, c, t, g, unknown or other
  modified_base (2786)..(2810): a, c, t, g, unknown or other
aacatattaaacaagtaatgaaattaaatttgtttctttaatgataattgaatagaaaatattacattgtaaagctttttttgaacaggggatccctaaacttagtaatcttttgaataaaagttacgttttagtttattctacacttttcctaaactaatagattaactaagaattagtttgtaaaagctcacacgtggcgtccttgtggatcagggagttacatgcaaagtaaagtagtattgaaggaaatgctttcaaaaaataactccaactaatgttccatcgtcttctactcaaatagaggataatcccactccctcggttgctttaatgcaagttgatacaatcgagaaatctaccattgatgttcctgttcaaaaggtcacgactcctcgtcgtagtaggagggtttccacaaaaccannnnnnnnnngcttggatggtgaaatcaatattgtcattggtgataatattgatgacgatccactaacctgtaaacaggtaatggaaagtctagaacaaaaacaatgatcaactgacatggattcagaaatagatttcatgcataaaataaagtttgggaacatgaagatgcacctgatgattatcatgcaatcagatgtaaatgggtctacaataagaaaagaggtgctagtggagaagtcgaaacttttaaagctagacttgttgcaaagggttatacccaaagagaannnnnngactatgaggatacttttagtctgttcaccatgtttaattccatcagaatacttctctccatagttgtttctttcgattatgaaatctggcannnnnntgtcaagacagctttccttaacaacattcttgaagagaccatctatatggagtaactagaaggttataagcttccaagacaataagagaaagtttgtaagctcgataggtccatttatggacttaagctagcttctcgctcttggaacaaatggtttgatgaaataatcaaaacctacaactttcactgaaatgaagatgaaccttgtgtttaccaactaaaggataatcaagtggtagtattcctagtcctttatgnngatgacattttgattattggtaaaaatatcaagaaaatgactaacattaaggaatggcttaacacttaattcaaaatgaaagatttggatgaagcaggttatgttcttggtattcaaatcattagaaactagaaaaacatatcacttgctctctcgtaaggagcttacattcataaggtgctagagcaattcttcatgagtgacaccagaggggcagttatgccttctagacctgggatccgtctatctaaggaacagtgtcccactgatccccaagagatagaagacatgaaaaaggtttctcatgcttcagcagttggaagtctaatgtatgctatattatgcactagatcagacattttctatgcagtaggaattttgaaggtatcagaaaaacctgggagaggaacattggactgcagtnnnnnatattctgaaatatttgaaaagtacaaggcattatgtgttatctacaagggtggtactttaaatctcgtaggccatagtgactcagattctaggcttgtcttaatgaccagaagtctacatctgggatggtatttactcttgggggtagagtagttgtctggagaagtgctaagcaaaccgcaacatcagactctaccatggaggtcgaatacatagttgctgctgagcctgttaaggaactggtctggttaagaaagttcttcacagaatttggtgttgttcctggaatagaaaaaccacttgttttactttgtgacaacactggtgttataaccaacagtaaagagccttgatgccacaagagaagcaaacacattgagaggaaataccacatcatcagggaatatgtggcaagaggggacgtactggtggagaaagttgatcaacttagctgatccattcactaaaattttgactttaactacatttgaaaagcacatactgaatctaggattaattgaaaggtactaattattttatgttagtgcaagtgnnnnnnnnnnnnnntttatgccctaaataaaactatatttcaatgtaattttttatattcatttatcaataaataagcagatttatttcattacttatttaatgtgttagttggttcatgtgatcatttatttgatttataaattcatctaaatccttatcacattgatattcttgtttattgtgatgtcaacacagtggaaattaatcaagattgtgtgattaaatgtattcctatgatttattagtacacaaggtttaactgataggataatctacaatgtagtttactnnnnnnnnnnnnnnnnnntatgtcctttccagggcattagtttaggtaagcttgggattagatgtatggagtatgcatcgaaagggaccgatattaaacttggataagatataataaacttaaagtaatatctattcaattcaatatcacctagttgatcttagatcatatgatctcaatcctgagatggttaggttctagttcagttgtattatttatgttcttcaatatgttcgttaaagtcgacaatagatcttcttgtgacatatagattaaggatatggtagttcaattaagtgggagcactaatcatagatacagaatctatagcttctatctgaacatagaagtgaaatgatgattttattcgagcttggcttaatagaaataaatagttgggtactcatttaagtaattatattagtttactgaannnnnnnnnnnnnnnnnnnnnnnnntttaaggatataatacattgaagggtgtaacg

SEQ ID NO: 41257 - DNA, 1352 bp, Cannabis sativa
tacaagatgtctatttttgttttacttactatttgagcagtttgcacactttttccttcccaaagaactccatttcaggcttgccaaatattgtatgctaaagccaccacagcagcagcatacactcttgtcctgaagttgtttgctttgtgtcgttgcagccatctcactatctgttgaagtgaacttgagtggatctgccattgcagctattctttgagctgctgccaacaacctgctacaatattgcagcagaaaaaaaaaagatgttccaacttctctttgtcattcctgcatagcaaacaatcatcatctgttatgacattaatcttacatagtctttcccttgtttttaacttattttggacagctaaccacaagaaaaaactatgccgggggatgttcaatctattccatacaatcgctgcccactgctttctttctccttaagttttgatcaaattgtaggccttcgagatttggaagcttttccctatcattagttgctggaagtcagccgagatctttaacttttccttggctgccactatctttttccagcaccaactggtctgaagtggagcttgataactacaccaattctcttcttttaagtacacattgtgcatccatttaatccacatgttgtcttctttgtttgctatcgcccaaatatattttgtcattgctgccaaattccattcttccacctttctaaacccaatccctcctgctgtcttggattggcaaactgaatcccaagctaccaaaccagtcccttgtgatgtactttgacccttccataaaaaagccctacatatggcttctatctgctttattattttcttaggcaaaatcatgatttggctccaatatgagtgaatagctagtagaactgaattgattaaaataactctacctgcatatgagaggttccttgagctctaaactctaattctagctgtcatcttttccaccaatatttcacactccttgcttgagatcctcttagcacataaaaggatgccaagatatttgaatggagcttcttgcttgcaaaagcttgaaatgtccaccactcgctgaattttcctatcttccatgccacagcaatagacagctgattttgaagggctaggctccaatcgagaggaccaagagaacaatttcaaagcttgcaatagacagtatatgcttctaaaatctccatggaaaaataaaatcacatcatcatattgggctttaaattttaaaagtaagcctctatctcgcaactttaggctcagttttgacctagaaaactttcgaattataatataactatttcaataaaatttatagatatttgaatt

SEQ ID NO: 41258 - DNA, 1812 bp, Cannabis sativa
attaaattattatttaactaaccgttataccctaaattctgatatacttcagaagttgacatgtgtcctacaaaagttatatgaatccactctaataatataataaagttacgtcattaaatatagattaaaataactcgttattattaaatagaggtttactagataatattcaaaactcgttgactgtatagtcttaagcgagacaaggataacaactattgaaccaatattgactagatatacatctacttcggaatgcatagacaaaaaaagaagatattcatctactcgaacagaataactgtaatcatatacgacaagcctcgagttacacatagcgagaagaccacctcgcattgcaaaagccacaaaaggaatattacgagacagaaaccttcccgacacatagtatgttttccttattaagatggacaaggaggataactcatatcaagcgagatacaaccttcccagtaagcactaactatctaaagattaaaaaacaaagagcatttgggtggttattagatattatctgacatgtgactaaatgaaacgtgaggattgtccacgttttattaattgttagatttgaattaatcccaaataaaataactaccaacctatactcctataaataggggcaggttctatagaaaaagggacggctaaattaagagagaaaatactactactgaaattctaatattgtattttgtactcaagaaatatccctaataagaaagactcgtagagtatgtagattttaactataaaaccacgtaaaaaatatctggagtgatttaattatttattattcattaatttctgtgaagtatttattactaaaggctaattaattttggttaacgaaaaatctactttggtgctttcattgagagcgtttagttataaaacatagaaaaatcccttcttacaaacaataatctatccatatttcaatggatgataacaactaaaacgatgggaattgtcctgaggaaactacacacagctctgggaaagaaccaatgggatctcaaagaccccacactattggaacatcacgttctagaagacactatggttgtgatattcataatctagaaagaaggaatgaagacaccaattatcctacctagtatgtgcatagaaacgaggatgttaatgatccaacttggtatttatcgttagtagaactagaaaatagacaactccgataacgcttaaccaaatttatttgacgaaacactgagttgggaagaaaggctgcagcgaaaagggtgacacaaggaacaaatcctcataatcaacttgatcctagagtaagaagaccacgaggcagacctcgaggttctagaatcaggagacaggaagccaatcacggaaatccccaaaacacccaagaagaacaacctagggtacaagggatgttctaatggataatcagacaaataatcaagagcaatggcgagacgttactcaaggatcccaatgatttgcaaaccaagggaatgaacaaaatgacttaccagaagcttctcacaggaatgaggattcgagacaacctccacctagggattaggaaattcctcgtggcaacgagaaaaaccaagggactcaacctaggacaaatgcactacctccatgacaccttgagtgtccttctcgatcagagaggaaagatgtatacacgtatctaaatagagggcgtgtatctaaccccttttgaaggagacaaccgatacaagatgaagcaagttctagttcaggacactcaaggcctcgaggacacaatcgatcaggtag

SEQ ID NO: 41259 - DNA, 1542 bp, Cannabis sativa
ttagatctgggtctgggttccgggacctaggtccctggtctaggtcccccatccatgtccagttcctaggtcatggtctggttctaggttcggcttctggtcccgagtcttggttttagtctaggtgccagtcagggttcccggccaggtctcggtcccaatctttatccaatttcaggtttgggtccttgtcagggtcggtatccttgtctggttaacaggtctcaagtctcggtgagggttcaggaccaggtcaggtccaggtcccggtccaggtccgggtcccatgtctcaagtcccagtcctattcaaggactttgtccaggttctggtctgagtttgggttatggtttgggtttggttctagtctcaggtccgggtcctagtcacagttccagttctgatttcgggcacaagttttgtttcgggtgcgggtcgaggtttgggtccaacttggggtcggggtctgactcctagtccgagtccaggtagaggttttttggaacgtggtctgagtccgggtcctggttcgggtcctaggatcgggtatgggtctgcatctgggttcgggtctaggtcccatgtttcgatcccgatctaggtttgggtcggtattcgagttcatgtctgggtttagtccatgtcaaggttcgaaccccgttttaggtcaggggcttggtctgggtccaggatcgagtcccgagttcgagttcgggtttaggtttgagtctcaatcctagtcttggtccgggaccgggtctgggactaggttcgagcccgagttccggggctgggttcttgtctagttttggatcccggtccaagtctaggttctggtcacggtcctagtcctattctaagattttggtcgcgttctggttcatgtttcggtttcgggtcccaggtctaggtcttggtccaggtcctagtcctgcttttggtgcttctctaagtcccaaaccaagacaccgactatgggtgttgtccaagcctgtgttgccgaatcccaggacaagatctggatctcaatcacgggtcccagtcttgtttaggttcatttccgaagtctcggtctcggtctcggtctaggttcgggactgagacatgggtgcagttctgggtcttgatcctaattctgggtcccgagtcctgtccatgttcgggtctgtgtttaagtcttggttcgagtcctgagtcccagttcgggtttggattcatgtttgggaaccaatcccaaggtgggtccatgtccgagtccggttcctggtccggttacagttttgggtctgggtctaggtcatggtcgtggtcctgttcctgggtccaaatcagcttctagtttttgttccagtttcaagtcactgggtacgggtttgggtcgagtttgggttggggtcctgatttttttccggggcgaggtttaggtaagggtttcggtctcggttagggttcgaggttgggtccggttccgagtttgggtccgagtcaaggtcctggtcctgttctaagatctagtctggttccagttcaagtttgagtttt

SEQ ID NO: 41260 - DNA, 1651 bp, Cannabis sativa
  modified_base (1120)..(1122): a, c, t, g, unknown or other
ctatttatataattttaaaaaatacaggatctacttttatcatttaacaaaatagaaggtccaatttgcaactcttacaaaacacaaagtacaaaatattatttataaaataaataatttcattaataatagaaataaaaaaatcttataattttaaaatgaggtatataatataatatataattaatatgacaatatcggtcaattaaaaaaaaataaaaaaaattatcattgtattttaataaaatctgttaaacaaactaaatatatgaatctaaactacaaaacaacacacatacaaccaaaaaaaattatcaggaagaaactaaaatatacaccataaaaaaaaatatacacgaataaaaaaataactgttgaataaaaaaatattctgaaaaccacttaaaataactaaaaaataacaaaacaaatacacatatatataacaaaaaaattatgcggaataaactaaaaatatacactttttctatgcaaataataaactaaacaacaactatatgaaaaatataaaaataacagaaaataattataaatcacctaagcaacaacataaaaaacaactataaaactactataaaataacaaaagaacaactataaatcaatagaaaaacactactagaaaaataagctttagagacgatttttggggcttacagtgttggttacagtgaaatttgctaccaacgctattcaggtgaggccataggagggaaaaataaacgacgaaatagggaccttaatcccatggcatcagtcgttattaaatgacttgcgccatagcccttcctttggtttttttcgatttgaaattttgtgtaaatagaatatttattattaagatctaattttattttttcaattacatattattttattattaatatatttaaattaagtataaattatatataataagcataaataaaaattaaattaaaaaattaaataaatacacatttatattactctaagtgtgtgtatattaggtgaattttatacatttaaattttataatatgtgtttatatttttctagtatattattattttataatttttaaagttatattttgaataataattagtatattgaataannnataatgtgtaatattttaatttttcttaatatttttatacatttaattttataatatgtgtttgtatttttctagtatgttaatattatttttataatttttaagttatgttttgtataataattaggatattgaataataaataatgtgtaatattttaatgtttgtgtaattttataattttataacatgtgtttgtatttttttattataatagtatcatttttttttaatttttttaagttatcttttgtataataattagtatattgaataataaattatttattatatttttaatttttatgtaatttaatatttttaaaataaactttatttttacattaggggattcactgcttagatcccgtcccatttgagaattatatgccctgtcctcgatagtaaataagcatggatgaagtgggaatggagacgggagaacactccctactaatttttcacctcgtgtgcatccctatgtattacatcaatattattctaaaattactctaagtatttaagtgtt

SEQ ID NO: 41261 - DNA, 1120 bp, Cannabis sativa
ttcttcactattcttcagtcttcaccattctgcaattggagctcaatctctcttccttgaagactttgttagaagccaattaagctcaatatcaatatatgttttcttttttcctttttatttcttttacttgtatatatatacatgtatatatgtacgtatgggtttgtgtatatattgacatatattatgcttcaatattactatttcaataactatgatgttgaataatctcccacttagagttagatttgtccctaatgatgaagaaatagttggattttatgtatataacaaaaacttcaacgttcatttccttcaacccaatcacattcctcatgtgaatatttatgattttcatcctgaagagctcactcgtaagaattcaatacaagaatgtttattttcttttcttgtttagtttttctttaattttattactcacattatgtttatcttataaataattttacagatcgatacctggcgctgactgaaaatgagtggtatttttattataaaaaagatttttttcccacaacaaagattaataagagattgaatcgaaaaacaaaaaatagaacttggcatggcaatgcaacaaagaagccaatcttgaatcaacaaaagatccagataggttttaaaaggactctagattttatggagcgagataataaactaactctatggaagatgactgagtatcatttgcttcaatccagtgacacacatgtactatcaaatactcttaatcatcattagtatttactttgaatatttaatgcatgcatatgtacgtaataataaagtctaacttagttttaatttatcttttctacatcaatgtacatggatgttatgcaagatttataaaataaaatcaaaagaaaagaagacgtttacaaataatgagaataaagaaccaaacacacaaagacaaaaaatagtacacgaaaatattacggtagcagaataagagccaactgaagtatttattattaacgagacgaatatcgcagtagagcaagaaacaccacataatgcatcaacagaattaatgagcaatgagcttgagagcataactgccaatcttgataacttgttagaagatccaaat

SEQ ID NO: 41262 - DNA, 1404 bp, Cannabis sativa
aatgataggaatattgattgtagagaataaagaacgaagaaatgtcacttttacatgcacagttcgttattgtatgcgctggtaaaagttacttttaccagtgcatttcgcaaactgcgctggtaaagaggtcaaaattttaccagcgtacatttgtagtggctaaaatttaacttttatcactacatttacgcgctaggaaaagttatttttgtcagcgctttttattttatgctggcaaaagttctaatatcaacattgatttgccaacacatcataagtaaattctattttatcggcgcaatactaatttttgtagcacaaaaatatactgtaaaattaagtgacatttcttgaaatgattaatcaaatatcttgtccaataagttgagaaatgcaatttacaaccgtaacatatgatgagctatatcaaacttattacgtaaataattttttttttccaatgagtgagctactttgttccctcacaaagctaatgttaataggaactgaataaaagaaacagaagggttacttatttaataacaaaaaactgaaagcattacgtacgtgagcttttaagaaattagacatgtgtttcatttgctaattaaggtgatacagatgagatagagttttggagacacaagatttttattgggcaaatatatgggtttggtccatgtatttatcttcttattttatttgtggttgaataactaatgttactcttgaatgtgttgttgctattgaatggccaatactattttagcctcgtttattctaattggatttgtgtataattagaggtaattatataatttagcatatttatttgaccgtgtaattacactataactgtgtaattggaggtaattgatgtgttctaattacactttcaaattatcatggctcaatgagaattgagtgtaattacactgtataatattactaaaaactttttattttaaacattaactactaaaaaatattatttttctgtgtaattacaaattattttgccaaacaatataaaaattcgtatgtgattatcacctcatatttaaatacaatataatatataattactagactgtataattatttccaaacacaaataaattttgttttcaagcaaatcaatgtaatatagatgaagattatgtgctattggatatatatgccggtgctattgaatggtttatattgtttcaaaaatatttagtttttcgatttctccatcgaaaatttaaatgtaacgaagatgatgaaaaatatatatattttttattttaaatttggttttgattttttcttttaatatggtttgtgcattttgtttttgtaaatttaagtcattatgcggtgttcctaaattacgataagataaatgtttgaggattt

SEQ ID NO: 41263 - DNA, 1148 bp, Cannabis sativa
gacaatagctggagaggttatatataaagatatatagcgtctgttattacaaaataaccgacgccatgtgtattttttcatgaaaattaaaaaattaccgatggagtcgattacaaaataaccgattctgtaggatttttttattaaaattaaaaattaccacttacagagttgattattacaaaataaccgactctgtaggtgtttttgattaaaatttcattcaatggcgtcagttaatgattaatttgctgaaaaaaagcacctttaaaaacttgtcatgtcgtattagaactattaaattttgaatacttattaataaatactcaaattattattatacattatattataaggtttttaatttgttgttctttcagattagactatttgtgcttgtcctatcatgtcgtatttttttatgcgtggtcgagtgctcatgccttatgagttcaaaccgtgtaaaatattatatattagttcatttggttatttattcggttattactgttatcatatatgtcggttatgttataacaaactcagctatatatatagctgttctatttctgtacttaatcaatcaactcaattcaataaaggcaattatttcctctgctttctttgttttagcctttgcccactattatggtatcagatgttctaatccaagaaccctacaacaaacacagcttcctctgccttcaacaatggtgcgcacgagagcaaattcgtctgctacttccactaatcctcccgtggacgatgcacttctgaatcacgttcctccagcatcccagaattctgcagatcctccccctcgtgttccaattccagctgcatcatccaatcatgtcaatggagatgaaccggcttatgaggatgtatgcagcccttactacctcagcaccgcagatcatcccggaatcgctcttgtcaccccggtattgacagataggaacttccagccatggactcgagattttaaactctccatcggagctcgcaacaaaacccctttccttgatggtacacttcccaaaccctctcctactgattctttatatggttcttggattcgttgtaatcaaatggtccaatcttggatcttacactcggtttcacccgagatcaaaagcagtatcatg

SEQ ID NO: 41264 - DNA, 1537 bp, Cannabis sativa
aaactattaaattcaacttaaaataaaaaaatttcttccaaaatttacaaagaaaagggagaacaaggttactttgatccttccttccacttcaacactaactctagcaaaattccttagttagtttgatgtgaaatggttttgaaaatttctgatttagggtgagggatttcttgtggtggttctagccgagagaaagagaggagaatggaggagggttttttttttgtgaagataatttaattaatccttatctattcagctctaacaattagtctagaataaatccacttacaaacaaacattaaggataaacttaagtgacaaaagactaaactacccattcacttttaagtaatctttcatactatgagtaaaattgtcataactcgaaatatcacgataattctaatgtataacttaattcttattaggactagaataaatgtctcaaattaggaccagaatttattaagctttaaagattattaatttaaaaagtgttcgcttactgagtaatagtatatacttgaattattttgttgcagcttttcaacagtaaagtaatattgctttctcatgcgttcatggcaatttgggtagtatatcaggtttgttaaagcatgaatgattttaaattttaattaagatgttaatataaattattaattattaaaagtcttttatgttttataggcttggatattggaaaaatcaaattacgccgcggtgagtcaatcctttgtattcattaattattatttttttttttataaatcagaaattttattgcacaattatctatgttttttacaatctataagcaccctaacaagttagttatggccttcatatctatacaacgtttacaatgtaatattgaaccattcctcatttttttggcttacttttctaggccatactagtacaatcctttgctgcacactctcatgaattcttttcaccacctaagtcatataggatcctttccttgccatattacttcattccaggtattccagaggttatagacaagactagcaagactagctgccatctctttcctcttgaatttgcttacgttgatcctttgtattcacctggttagcctagatagtgttatatctgagtgtctccattgcatccatactgctatttcattaaaacattgcatagtcctgttccagccaaaaaataaatggtcttttgtttcctcttgattgttgcacagcacacaataagaatctccaacaatgccaaatctgcaaagtctatccttggctctcaacctcccatgcatagcaatccatagagtgaagctatgcttaagagtgttgaatcttccccaaacctgctcattccacctctgtttatctttggacagagcatagtagattaaagcctgtagaaatttggtatctctctgtccctagagttgctgagtatcaaaaagagagctaaactgattttttgagggctactaattttctccaataccagcttccatggcttgggatagggtagctccaccagtttt

SEQ ID NO: 41265 - DNA, 1839 bp, Cannabis sativa
tattttgatcatagtgataactacaaataagatacaataacgataacgactttgaatacagtgacaacaacaagtgagatacggtgatgacatcggctttgaatgacaacaagtttaaaatcatatgatgaattttctatagatttatcaattgattttttagatctctattttgtgtgagaatttttcaacgtctattatttttattttattctaacgtttaaaaatatcttttcgttgctttcttttttagataaaaaaattgtatgatgaatttttttaccatattaatttttttttttttttttttttgtataaaaactatgaatttttttagtagaatagcataaggaacttttggatgagcatattcattattccctctaaggtaatggctgccattgataagagttgtcgagattttctgtggggttctaatggcaacaggagcaagcttcaccgtgcctcttgggaaaaagtttgcctccctaagggtcttggtggagttggcttccgtgatggtaaaaattggaacaaggctcttatggcaaaatttctttggcctatttccaacaaacaagattgcctatgggttaaattgatcaactccatttatttgaagggtagagacatatggagcttcccaaagactcaagataccacctggtattttaagaaattgttgaagcttcgggattttacagatgaggccatgttgaggcttgcggtgacaggtaccaaactcaaagcgaaggttttctacaaccttcttgtagagaagccgaaaatccagtactcaagaggcatttgggacaacttgctgctgcttaaacatagatttgtttattggcaaatcatcaacacccaattggttactcgagattttcttagtaagattttgccgttgcaaaacatcttgtgtccggtgtgcgaaagtgaggctgaaactcacgagcatattttctacaactgcgtcttcatcactaagcaggtgcaaagagaagggaggagctcttggcttggagttcacagttggcctagttcgaacactgaccttagctacaggtgtaatttcaagaagcaagacctccaaaaccgtctcttaaacatggtgacagcagctgtcttttatcagttgtgggctaatagaaatcagtgtagttttgacttgacttgtgctgctcccaaaaacattagcttggaagtgagaagtattgttcagcttagagttttgagtaaatacccctttaaaaggagtcaaagaaatttgtatttactaaatgtagttaaaagttggtagtcctttacttttcttggtggctactggtttagtggctgccgtttggttgttgttggcttgtgctttgtttaattgtatcttactaatttttttaaataaaattttttctttttttttaaaaaaaaagaatttagtagaataattaatcatactattaaaaaactatcatttttaatatatttttataacttaattatcaataaataaaataaaatggcacacagtttatttcctaattcaatataatacaataaaaactaaaagtactaaacacatcagaattaacccactattttctctcgcccaccattgactcttactttacattcctcccctaccaaacacctcattttctcacacaaacactttttctctcaaaaaactcagagatctttctctctcttcgccggaacaaagccgacgatcgagatgactctatcacacatagctacctcaccatctcgatctaatatcctaaggccgctcacagccgccttctcatgcactcttcctctccgccgtccgatctcatcggcggc

SEQ ID NO: 41266 - DNA, 912 bp, Cannabis sativa
  modified_base (579)..(591): a, c, t, g, unknown or other
ccttttggaacaaactattcaagacgaaatagagtattttttctttttcctttaagagcaagtttaaataattttttttttttttaaaataagcgtattcatttatttgattaaacaaaattagacctcgcggtcattacataaaaggtccttcggaatggacgaggccggaatagaaccatacaacttgtgagtaaaaggccagttagccacattatggacagcaaaattataatttctactaacatacaagaaattacagcaaataaaagtgggagatgacttaaaacaaaaggagacatagttctcaagcgcccaatgtgattccgtcccattaaaagcattgataactatcctcgagtcactctccaccaaaacatacttattacctaactcttgagccaacgaaacagctaaacaacaggccactgcttctccacataacacatccgagaagtccaaccgagccgtatgaatccgaaccactctacccagatggttccttgctacaaccactgtgcacatgctttctaatggggtaagttgaaaaatactacttttattaatcaattaatcaannnnnnnnnnnnntttatatttatttgaaacatacttctttttatatgtattgtacccaaaataccctgacataagagagtcacatagaaagtatcttgaagtgacaggggcaaaattagtacaatatttaaaaaaagagataaaaatgatagactttaaaaaaaaagataaaaataaaagagttcaatataaaaatggtatagagtgtaatttcctcctttctaatcctaccctgacatcacaatgataatctaaaatattgaggaatgagaagtgtaaataattgaatctctttaaattcgtatatctttttttatcaaggaatctacctct

SEQ ID NO: 41267 - DNA, 1988 bp, Cannabis sativa
  modified_base (1057)..(1085): a, c, t, g, unknown or other
ataacggctataattgaacattctgaaaaaatttaatgctattaatcactacaaaatacaatccaaaataatatcagacaatcacaacaataattggcaatacaaaaatttgtcaccccttcgactgtagtacatgtattcacggaatctatttcactatggatgaatatttaagatatttaaactcatcaacatgcatactattccactcatccgaccgcagtacaatatatcgcagaacttacttcactatagataaatatttaagatattcaaactcttctaagtattcatcattaattaataataaaagttaataaatatatacctcgaactgatcaacgtcaagtaggccagatccttgcaaattgacctcacaacataaataaatactataaaattgaaattttaattatttaactacttacaagttatataatttttgagtacttgttactaactagttaagttagcaatttattactaactaataacagatgagtaactagttagtaataacatatgaataggaatagtaactaactagtaaaaaaataaaaacacataaataggaataaataaaataaaagagctaataattaacatatacaaaataatataccataattaaaccaaaacacccaacaactaacatttacctttctgactcaaaactaccacaccaaactctatccgtttatatcgatttatatattcttatatgtactcacacatatatatatatatatacataccaaaattactctattatatatatgagtgcacttttaatgggtattacccataaataggtaatattagaaaattttaagttttcatgattaatttttttatttaattagaaaaattcttatttttacattatatgggctgagattggtccatcagctgaaaaaaaaataataataataaaaatttttgacaaaaaagtgataaaaaaaagttgaattcgacttaaatattttacatgtaaacatattttttatatagtgtaaaaaagaggtattttttgatatatttttttttaattaagtannnnnnnnnnnnnnnnnnnnnnnnnnnnntcttttattattcgctatcggacaaagatctgatggtttaatatttttaaaactgatatttatagttaatttgtttattacccattaataggtaatacccattaagaagtattccttatatatatatatatattatgtagttgagtattattaccatttcaatcaaatttaaaaaaaattataacaaaactattaaagtttagctttttattttattatcaaaatcaagcaaccaatatcgatcaaaattcaaccaccatgcacaaccacaagaacacaatcttaataatttaggaaaattctaaaataatttacaaaataaaaaataaagtaatgtacattaataaaattattagagattagacttatattttaatggacattgagattcaacaatttctccaccaaaagtgcggtcggagctacagccaccacaaccaccacctctaagtttagtttactctaaaaacccaaacaaagatgatcaaacttcggggatatatttttgggtatgaaaattgcaataattaaaaataatgggtaaaaacaaataaaaaatgaagaaaatggaaagtagtggttgggcaagagtttcgtgaaggggctactggttattttgtttggggagaagacgaagtgaggaagacaaatggctaattagggttacataaaacctatgtcatcgattattttgtaataactgacaatataggggacacacgtcaaccaatgcgttttcctatagcgttattacaaaataacatgagctttatttaaaaaaaattatttattttaatttttttaattttaatatgagcttttttataatatttaaatagttaaataattttgatttatataaatgtgtcatgtacattttgtacaattgaacattttagtttg

SEQ ID NO: 41268 - DNA, 2180 bp, Cannabis sativa
atgttgaaattttacgagcatatcgtcaacatatacttccattttctcgccaattaaatctacgaacatcatgttcaccaacctctgatatgtcgcttctgcgtttattaaaccaaaaggcattaccttataacaatacaaacctcgatctgtaataaaagaggtatgctcgtggtctggttcatacatcggaatttggttataccacgagtatgcatccataaagctgagaagcttatgacctacggtagcatcaacaagttggtcaatgctattcaagggaaaactatcctttggacatgctttatttgaatcagtgaaatcaatgcatgtgcgccatgagccactgggcttgggcactagtacgagatttgctaaccagtttgggtaaaatgactcccttatgaagcacatgcgaaaaggcaatctacttcctctttaagcgcttggtacctcacggggtccatttttgcggcgcttttgtcggacacttcgcacttcagggtcaatgttcagttgatgacacgtgacttgcgatgatatcccgaccatatctgaatgtttccatgaaaaacatccaaattttgtttgagaaaagtgacaagtttttctcgctgtcgaaaagttagtttagaaccaattttcaaaactttactatgatcagattggtacctcaattgtatcctctacaatggtgcggtgttggtataatcaaggatccttagatccagaacttgtttttcttcatgtggtatctcctcgattctgaacacttcttatcgaggaggtggtgcttccaacaggtatatcatatttactgacttcttcttttctgcgagtttcagtgctgcgttgtagcactctcttgaatccgactggactcctcgcacaattcctaccccagctggggtagggaacttcatggtgagatgatagatagaggtcacaatcttcatctctttcaaaatagggtggccaattactgcattgtatgtcgagtactgatcaataactatgaaatcagccatcgatttggcagtgacaggtgcggttcctagggtgattggcagtttaatcattccttttaatgtaattgtatctccagtgaacccataaatactcgagactacaggtcgcaaatacttttcctgtattcccattttcttgaaagcttagaaattgagaagatttactcagcttccattatccactaatatgtggtggacatatctcctccaatgttagcgacgataacaagtgcgtctgcgtgcgggtggtgaacccacctagcgtcactttccataaaagttatgtcatctcattccttcttaaagagcttttctggtcgctcactcaagttgttcacattagtgagtggtttctccttcgcttccttagcatatcgttcttgcgatcttggagtcttctgcaatgtggggtcctccaatgattgtcagaatattgcgaggagttctcgaaccactcgcattatttgtttcttcattttcatccgcttggggacgaccttcctcatgctttttatacttgccaaattggcctcgtctaattaattcctcgatctcgtcttgcaggagccatcactctaaggtggtatggccaatgtccttgtgatacttacagaacttctttgagtttcttttatcgcgattacctccaattaattgggggagattttctaaaaaaaaactccgttcttttcttcaatcgcataaatatgatcatgcgggactgctaattctgtatagttaacaaagcgcgaacctcctttcctttttggggacgactctttctttggagggaacttagccaactttggacttcgctgtctttggggactacgtcttctagttcttcttcctctgggactacgagatcgtgaccgtggcacatgtgactcgcgtttatcttttcccctctctagcttagctagagaatttttgatcctcttatgcggctcagccatagcgaagaattcgaccagcgactcaggtcttcgagcctgtaactccttccaaaagtcgattctcggcaagacacctgtaattaacatacaaactaacgaagacttgggggccttctcaactttagttacttcagcattgaaacgtttaaaataatcctgcaacgactcactgacctcttattttataatagccaga

SEQ ID NO: 41269 - DNA, 908 bp, Cannabis sativa
tgtaacttaattttcgtttaaggccttattaaaactttgcctaaaataatttgaaaataccaaatgcataaaaatttatattttggaagaaaaaattaataataaataacataaaaaaagaaaaattatatataacatacgtttttatatatttaaaattataataaattaaactacaatataattatcattataaatacaaccttaataatattcatagcatttaaaatttataatttactaatttttttttaacagcacaactataattgtttttctctatggtaaagctatcccaaacttgatattatacgatgaaacacacgttaattacaattaaagggctgtgaagttgaagattttaatatactgtattatattcatatttgttttcagattttaatgcattaatatgtagaatccactatataacagagaaaggtggcgtttggttgaaaggaatgaaaacttaagaatgagaatgggaataagaataggaatggaataaaatttaaaatgcataaaaattaataaaaaaaattattaaattttttctcatcatacattagaatagtctttcttttcatttcaaaatggaatagtcattccaccaaaacccattctattggaatgacattccaaaattttaatatgcaaccaaacaaaagaatgaaatgaagattgtttcctttcttttttattccatttcattactgtaagtgtcacgttttgtgtggcaaattagatattacttttgttcagtatatctgcatcagtatttgtttgtctaaacatcttttttgtagttagtttgcatctgatttcactaagtgcattttagtgccatgtcagctttctgcgtgtttgttagtttgtgccagctgtactttgctggttggttagttagt

SEQ ID NO: 41270 - DNA, 1134 bp, Cannabis sativa
tttcttgatggaactcgtgaatggaatgcagctttgatcaaggagtgttttgaagaagatattacaagtgatatcctgaagataagaccgctgcaagaaagtcctgatattcttttttggaatccagcaaagtcgggtaaattttcagtaaagaatgcgtactggatcatccaaagacgaagattcaaagaaccaaagctgatttgggaaaaaatgtggaagactaaactccaccccagactaaaactgttcctttggaaaatgttctctgatatcctcccctaaagtttcagaactggagttctccatggtgtcactctcacttgtggtttctacaatgtggaagtagagtccacattccatctgttttgtcaatgctctttcactagaggcttatagtttagaaaaggaattcagttagacagctttgtttggaataatctactggattttggtttgtggtggtgtaccattcagaaccctgagatccaacttttcacaacatgcatttgcgaaatgatttggaaattgcacaatactgctctgtttacagataaacaatgctctatggatgcagtatacttcgactgtcttcacagaatggacgagttcttaaagcacgagccttggttcaatcagaggatccccctgctgcatgtcctctgctgcaatctacaacggagggtgttgattactagtgtgtcaaagtggatgcctcagttgtggggactgaagtaggcttcgctgcaatccatcagcaggatttgttagctgattcttggatctcagttggtttttctcatgttaaggatatccttgaaggggaattgtgcagaatagcctgttctctacatctagccttgacaaagaagataacaaaggttcggattgagactgattcgaagactgtgtcttagcttttgcgtctcaggaacttccttttggttggaatacttaccctcttttttttgttctgcttatctctttgtaagtccttctcggatgtctaggttgtgtttattcctaggacagaaaatgtaattgcggactctttagctcgttgggctagagttactaagactaagaacatcggtttgttaagggaagtggccccttctgtggctactagttttt

SEQ ID NO: 41271 - DNA, 1156 bp, Cannabis sativa
tttcgagctcgccttgaagatcgatctcagatctgcactatattcgaagaaacatacatcaggtgagaaatccaagtcacaagatcgactggtatttctgatttattctctctttttcttttctgtgtttatctctctattatttttctttctcactcactaactctttttcttttctttgcatgaacactggagcaacaacttctggagcttggtttccagatctgggatctggcttctggtatctcaaaactgagagattggtgagtctctgagccatctatttatagtaatagattaggttaaaggtgtgtaacagaatttctgtcgcaaaacagaaattcggttacacaacttgttaagttgttgtgtctggtgagtgggtaaagccacgagcctttatttgtatttttcttctcttctttgtaaagctgtttgaataagtagtccaaatgaggtctaatttaacctatatttctttttgtgggtgcggtaattttaccaaactgatgaattaaaaaaaattgctattcgttactttattatttcgttacagttgaaatttattatttttctcaaccagtggtaaatgttcaagagcgttgagatagtagtttacatttgtgatgtgtgggagaaaccctcaatgtgatgatcttgcgattgaatatctatataatttcttgtatcaaaagtctacttgatattatggtagtcaaacaacgtgtcccgttgatgattattgctatataagatagagatcggtgtttagggcttgtgtcaaaagtcatcctgacaaaattgatagtcgggcaatatatgagttctgttattgataccaatgtggttttgctgaaggagaggccacaaatatgtgttccttggtttgaggggatgtttgttgggtatcaactcaagtttcacatcaaaaaaataggcaagagttgccttgaatataagcattttgtagtaaatttagctctgatacataagaattaacttctgtaattccaacttcaagatcacacttaaacaaacaaaagttaaatcaaaataaacaaattaagagcaaaaaaccaacaaacacataaactagaaaaatataacacagatgaatctaaatggctatcaaacacaataacacagagatttatac

SEQ ID NO: 41272 - DNA, 1113 bp, Cannabis sativa
  modified_base (276)..(284): a, c, t, g, unknown or other
  modified_base (1063)..(1064): a, c, t, g, unknown or other
ttgtctaatggatgacaatcctttaggatgtgtcccattgataacaacaagttaagttagaccaacaatgaagatttgaaattatactacaaaaataataacagaacacatcattgttcaatataaattcatatacatttagaaattatcatacaattagcaagtaagaaagacatgtcaaaatacaaaacaaaaacatcttgaatactttccaaggtttccaacaaactgatacattgcttcgctttgagtcaagagtcaaagatatcattcatnnnnnnnnntagtcaactcatctaaaatggaaaactattctaacaaccttctattcgatcgaaaagagaatttgacattgtttcattttagtcgagagtcaaggtcattcctatttcatgagctaccaccattgtttcataccttgtaagtcctactcttagtagccactattcggatggacgttactaaaaatatgaaaacttacaataatacttatctctcgagattctacgacattaaattgctaatgaaggtccatctattagtgatgaatctcactaaaacaagaactgtgtagaaccaacaatagagttcgaatatcgttataactaaagctcattattttaaagaactgtgtagaaccaacaatgaatctcactaaaataagaattgtgtagaaccaacaatggagatcgaatatcgttataactaaagctcattatttcaaagagctgtattttcatttgacacttattttaatctatttatttaattaaaaatactaatttagataactctaaatataaatttcaatttaatatttataaatttatacccttgaatgatttgaaaaatgaaatttattttccatcttttgtataaattttccaataaataatatgaaaaattacttaatttaagtttgtccaaaattaattaaaattaattttctataaatatattactgaatttgaaatccaatgtattataaagtaatacatttttttgacattacacttaaaataaaatgaaataaaagtggaaaaaattattctaatttatgttnntctaaaattaaataaattaatttttaatataaatataattttcctattt

SEQ ID NO: 41273 - DNA, 2462 bp, Cannabis sativa
acttaaattaaataatagatagataacaataacatatttctataaaactactcatttttctccttcagaataaatactgccaattattttgtgataggtttaaaattaagttgcacatatataattgaatatattattattagtattttagctatttcttgagattattttttatcgaatatgatagcacttttgattcatatttataaaacagtatttatgtttatttgctatagacttttcctatgggctctattttctctatttaaaaatttttgcaccaaatttgatttaattaaggggatgatttactcaaattttgggtctatctaattcatttctaataactgcatttcatttattttttaccaattgaaagtttaccctatttcacttgttccaaattatattattgcattacacaaatatacactgattaattattattatgtcaaaatattgaactataacacctcatatcagtaatatatatatatatatcagtgatatatattatttatgaagatatgtaaaacactcacacatatagttatttttgaagttagaacactttgttatgagaaaaatgattgggaaagataaatagcgtgacaaagtagagcaaacaataaattccacatttttggtgagattattgaaaataataagttgtatttactaaaaaatagggtcgtctttaaggtaggggccaaaatcgttgcccaaagcccctcaacctaagtggcttcctattagagttagtgggctactcctctcattgccaattagttttgagatagaattacatttaccttattctaaattctaacataatattagaaccgcttgtgatccgttgtgggccttttcccttttaacctccatttgacgtgagtaatgtgtattagagttagtctcacattgctaatatgtggaaataaattactatatataagaaaagtaggctacttcctattgttatttaattttgagataaaatctcattcattttatctcaaatttttacacatgtcataatagtaatttttttttactttttttaacattaacccataaggcctcaaccaaatatttttctagaaaaatattttttttaaaagttatttgaatttcattctattttattttttaataaaaaggcaatttttaaaattttacccaatactccataaaagctaaagacaacccttggcagtagttacaagaattattatataatacagtcttaaatttatattccttatttcatacgttccaaatttaaattaaaaatctatattatcactcaatcaactccttccaatattaaattttaacaaccgacttttctccattgactacttatgactcattatttctccttctcaattaattaatactaccaactattttgtgacacatgtcttaggaaattgccaagaaaagttgcacatataaaattaagctttataagtgtttttgtcatttctgtttacatgttttttttttaaaaaaaaattgatttaattaaggggataatgaacggttctcttaattttttttttttggccaaattcgcactctttactcctaaatcttacatgataaatgagttttctacaataatttagagagatgtcactaaattcagtactaaagtcacaagaataaaaaatttataactctgaactatgaaattaattattattatttctatatctaattatgcagtgattatactccatttcaacgagtcaattctaattatgcataacatgcatatcatataaaactgtttagatttatatatatttatattcaatttaaatctttactcttgacagtacttaaaaatatatatacaacaatagtgtttaacattcccccatatcatatgttccaaaccataaatatagtattgtcttgaataatgtaccatttcataagttacaaacttaacaacaaaaatctacactagtgtaggcacacaagatgacttacttaatagatgatatcatgactattcatctatttgattaaaattgcaaataaaatgtatatataaaaataaattccctaattatttttccatttaaatatgagcatggctataaaatactattaatacttatcactatttagaggtgacatttttacgattagttaataatattctacaacaattattttattaaattatatgagaccctatatttaagtgtatcaattgtactataacacgttaaaaggtattaggcccaatcaagactgagaaaaataatgagccgagactagtttaatacaaaatgggtcctttaataaattacactcactattgaatttttaaacttcttttaaaaaaatataggagaattatgttgagaaaattacactctatactatttttatattgtcctcttttatttttatcctcttttttaaagtctatcatttttacctct

SEQ ID NO: 41274 - DNA, 903 bp, Cannabis sativa
tattaataatatttaactttaattacattacattataacatattttttttttctttgctaattaatacacaaaaactatattttatagcctcatcaaatgacgtcaagtatagtatttcctttaattttttattttacttcattcatatataataactaggaaaggtttgtacgtacggctaataatagcttttcatttttttttatctatatttatatatatatattatattcatttaaagaggatagctatgagacaatttagagaattattgttatgttagtatttttattggttcaagttcaactaagtattgaatactttataatttaatacaataatttttaaaaagtattgttagctaactatattaattataagacgatataactagaatatacaatattgatatgacatattatacttggttagaagataattaaaaaaaaaagtgttaaatcatgttccaccatatagatgatgtattttagaaaagtattatatacttctccacatgtaaatgtagagaattattatttattttttataaatattttaataatatttatatgatattttattctaaacttgttgatatgttatatatatatataaatatatattatttatataaaaaaaatatagagcaaagatatataatgaatggtgtaatataatttttttagaatggatagaaaaggaaagatattgagtgtttgtagcgatttttcacattatttatttaattaaaatggatacactttaaattgaaaggagttctacagttaattttttcttacaactttttagtcaacttctacgctcgaaaatatatatgtcggaatatttttttttcaattttttttttttcacgggggtattcgttatgcttacaacattat

SEQ ID NO: 41275 - DNA, 1269 bp, Cannabis sativa
agaatttcaaattaaaatgtgtaatatctttttacactcttaatgttggtgataatagtactcatagtaacaagtaatttcccaaaaattataagaagatgataactaatatacattatcatatttacatattattagtttattacacatatttaatctatatattatatgattataaactagagaacgaaatcgtgcttcgcgcggtctttaaacttatatatatgatgatttatattattatagaaactgctaattaaaatgatatttatatttattcaataaatatttattataaattgataaatatgtagcagtgcataaagccatcaataaattatatcatcaaaattatgattaattacgtagtgtaatataatttgttaaaaaaagtagtgtaatataacattcataatataaatttattttctattttcctcataatatatgtatcaatttcacattttatattttattatattagtgattactaataattagaggatacatacttaaataataataaattgtatattcaaatttatataatcaataattattttttacaattattttctataatttatatagttaaaaattatatatattattagataaatactacgttaatgtgattaaatatatatatatatatataatttttataattaatttctctttttgtttgccatcaaatttatggtttcgtttgaattttacaaataattaataataaaattaaagaataacactaaacaatttttttttctaaaaaaaaagaatacatatactttttttttaaaaaaaggaaaatacatttagtttatataaaatatatatggagaaagtttcattacagaagtgtataagtaaaaattttaattaaataaatttttataaatacttatagtgaattgaattatatatcatatttttatattatgttaaattttaatttatactaaaatattatatatttagttgtccataaaaattaatgctatatatagttttacataaaaatattacataaaatataatttaatataatactatacaatacaatattatctaagaccgttttgtactaaaaacctcaaactcaagtgaggctttatatttatctcaaaaaaaaaaaaagtgaggctttatataaagggaattttttaaatatatacgtagttaacgaaatatttataaaaataacaatgagtaatttattcattaaaatagggtcatgaataccgaaccgcaatattcatatgtttt

SEQ ID NO: 41276 - DNA, 1155 bp, Cannabis sativa
cattctttctatctagttcatatatacaataatacataatattatattattgcacctggttatgagaggcttcagacaaccatccttctgcaacattgagtttatatagaacatgtttattaatgtcgggtaattggattgaggagaaaaggaaatagcaacgaagagaagaaaaacgcaccgttttggagagcggagagcaaggaggactggtgatggggagagagaaagtctctgcaaatccataaccctctaatttcttcgaatcgttcccagaaacaaatatttgactcagattgttcctctgcttcttcttcttcttccgatgattcgccgaagagttgaacgagaagttgtttgtcagtattcattttgtctcaaaaatcaaattgcgagagtttggatgggcaatcactccctattcgtgttttgtccttagtaatatttcccaaaatacacagctaaatattatgatttttttgcaacacaattttttcaatatttttattttttaaaaggtaaatactattttagactttgtgttttgtaaaagttatcaattgaatcatttattttgttaaatgataaaatagactctatatttttcaaaattgtacaaacaggactctgaactattttttgtttatcaaaataaagcttaataataatctgatttagagatgttaagacaaaaataattatattttatgtatctattcatattagaaattgtcaaaagttggttatattaaaaaaatattttttttgaaaattgagctcaaggtcctatttttaccattttggaaaagatagggtccaatttatttaacaaaacaaatggtttaattggtatttttcgcaaaacacaagatccaaaatagtatttactattttttaaatggactttttgaagcaaaatttagacaatgcttagtaattatttttttcaaaatataaaaattattaagcattgtcttctttacaaaataaaaatttgtttccacatccaacaaaaatactgtctattttttatttttattttttcactgtttatcgagatttttagaaactaagaccatctccaatgagaaatgtaaaaattgtgttatatttcacacaaaaaatagttttatggtaaatttacatcaaatttta

SEQ ID NO: 41277 - DNA, 1244 bp, Cannabis sativa
acgctgaactgtatgtgaaggagagagtttgtctccatggagctcctaaatctattatttcagacagggatcaaaagtttacatcaaaattttgggtgtgtcttcagagggctataggcacaaagctgaaatttagcacaggttttcacactcagactgatgggaaatcagaaagaacaatttagatactagaagatttgttacgagcatgtgtcatggactttgagggttcatggagtaagtacttgcctttgattgagttttcctacaacaatagctaccaaagtacaatagggatggctccttatgagatgatgtatggtacgaaatttcgttccccaattcattgggacgaaactggagaaaggaagtatctgggtccggaattagttcaaaagaccaatgaagctatagacaagattaatgctcggatgcttgcttcgcaaagtaggcagaaaagttatgctgatccgaagcgcagagatattacatttcaggcaacggaacatgttttcctgggaatttctcctgtgaagggtataagacgctttgggaagagaggaaagttaagccctaggttcattgggccatttcagatactcgagaaggttgggcaggtagcgtatcgcctagggatgtacataaatttttgcaaaccgcccaacctgaacgacccgcccaaacaaaactgagataacccgatgaaaaatacaaactgaaaaacccaataaaaatataacccgcccaatctttatagattgggcgggttgaaaataatatcaatccgtccaatcaacccgaactaacccgaccaacccgattaagagagcttttatatatatatttttattatatataatctatatattatataatttatatacatatttataaaaaatagaaagttcaaactacaatatattttttatgacgaataatttaaattttaaagtcaatatttatatttatttcattatcacaataactaaaatataacaattgaatttaagaaaaaaataaacattagtgctcggtttggacgggttaacccgagtaaaccgacgaattcattgggcgagttgaaacttttttttcttaattgggcgggtagcacttagatttttgtaacatgatctgtacattgggttaaataaaatgtaacataaactgatcaaaccgaccaacgtacacccctagtatcggctagccttaccaccagcgttatcggctgtccataatgtatt

SEQ ID NO: 41278 - DNA, 1963 bp, Cannabis sativa
tgcaagacaaaaattatgatttctctatataaacaagacaacgaaggtcttttacaggtatttttatttgttcttatttcttaatttgtacgttcattttttctcactattaatgattaatatcatgatattttaaatcttttttattttatttttttattttatgttggtagtattacatatgatatttctaaactttcttatcaatatattgctaagattttaatttttatatttttatatttttatatttttatgtgattaatggaatcggtccaagtttttttttctttcgttatcatacttgaaaaaatatttatctttcctcattgaagtgttatatcttttattttattttatttatagtaaattctcattctttttattgttgttaaaatttatgggtttaatttattatatttttttttatatgtagtgtgacatacttgataacaaattgatgcatcttacgaaaggaaccaattaaaataacaaagttttcgtagataaaagaactccccaatgtttgttacctcacaaacctttcttctttctcatatacatataggaatatagtcaattttttatttctacttgattgctatattttcattatataggaataattgtaataataattatatttataaatatttatcatagaacattttttaattttagtattggagacacgaaaaggttatgacgttttaactttaattttttaaatattaattaaattaataatacaactaataaatagaaacaattttatagaattgattaatttcttattaatattaaacctattttatgtgttaattttattaatttttttttttcttctttttttttcttctgtttatttttattgaaataccttaataaacaagtactctgtgcaactaaataaaaaaattattgtattattttatcaattatattaaaacttcttattagtttattacataaatttgtatttttatatttatagaaaaaatttaataatgatttaattcattttattacatggatttatatatatacctgtgtatttatgtactaatttaatttatatatgttttttaacagttacaaagctataaataaataaaaagtataataaaaaaataataatataaatcaatacagtaattttattgaatattgtttccttgattattatgttattattttatttattcttgcttttatatttattaaatgttcaaaaatttcatttttttattattgatttttatttgtgttatttttattatgccttattattttatattgctaaaaaatattatcttattctatttattttattgactttaatactttatgttgacccatttttttaaaccaatcttatttattttgtcaataaaaaacaaacaaaatttattaacgattatattaatgcataatgaatagtgtatactcgtatatgattattatataattatagttttatttttaattgtattgctgaaaaaataattttaatttattatttattatttattatttgtatatgtttatataaaatctattaataattatgtttaaagtaagacctaatacaattataacgtttatttcacattaaaaaaattgttaaataggtaacacatcaaatatcaagactaagaaaaagaaactaacatttttagttgtagtaaaataattgtgaataatattactgtaataattcatgtttatatatataattttttattattttttacatatgtgtatttgtagatttcactatcttatggaagtacttgcaacactcataatgtttttagtatttctctagatgattaaacatattatgacttaaacaattactctcttctctagaaagagcatgagtcatgtatgaatttttcttatttttttagtcgagagcctcaatgtatggatgcactcatagatgcttgcgagcatgact

SEQ ID NO: 41279 - DNA, 1177 bp, Cannabis sativa
ttaaacactctccctgctaatagatatactgctgttgcattaagtgcattcctgcgagtaagtcatcgaaaaccaaaatgcattttcttttactctgaaacaaaacaaaataggaacaccctctaaaatttggtagcttgaacagatggcaggatatgctctcttcagaagatacaaatcccagttcagaaagattttgagcatcatctctgacaacttattgaatgctctaagatctcgggaaaatctggcatgggacacagtcattgcagaaattcagtcctacatagaagacaacaagtttcttgaagagtgagaaggaagaagcctggagacgtcgttgctatcgagtgtcgcggtgcctgaccaaaactcatatcaacacactgatccccaaaactcgtatcaacacagtgatccccgaaactcatactcttatcaacgcaatgatccccgaaacttgtactcaaatcaacgcaatgatcattattaatgaatgattattcgtgtgtatatatacgtttgcaaattgcatagtatttagttttttgttttttttgaacaaaaggaaactttttattcaaaaaagacaaaacaaatacaaagaccaaggcaggaggaacaaaccaccaacctgagctgttaccagctgtgtacaatgctcaaagcatattgatcttttttcttttttcttttaaaatgagctccaacaactctagcgttaacaatacatttgatttccttactaagggaagaaacattgttacaaacatcattaagaaggcaatcattcctgttctttcacagcatgtagagcacaactgagataacagcatttaggatcgttgctgcaagatcagcttttgttgatttaacttggtgaaagtcacaaaagaggctcggccaatttagcaaaccagaccagcattcaacacttgtaatcagcttttttgcaaagctacaatcaatgaatctgtgcttatgggatttagtagcagcatcacacaccacacataaaccagtagcaataggaaggaaccttagtatgtcacgagttagcaactgttcatttaaaatttgccaataaatgaacctatgtttaggaatgacaagtttgtgccagacattagttgcataggggaccttagcagccccttgttggaattattttaccagg

SEQ ID NO: 41280 - DNA, 1446 bp, Cannabis sativa
  modified_base (47)..(48): a, c, t, g, unknown or other
tacttttacatttaatccatgtgatggtggctatttttgctcaccanncttgaatcaccttatcacaggccatgccatttgctcgcttatttttgttcggattttaggcgtctttgcaccatctagatctcgtgcggctggctaaccatctagacaggtgtgcatcgaaagcccgctaggaatatggctctgatagcatgttgagaatcatggggttccatctcaaaaccaattggcaatgagtggagtagcccatgttcgtatatatggctcaatacttttacatttaatccatgtgagacaatgttctccaatatgaaccataaaagttcaacaatttcttcattacaatcaaaaaaaaaaaaaaaacagttattttgagcttgatttcccataatttttagtctaccttggatatagagtattttaatattttaaatactatttttgaaaatacattcttaatactataagtacatttgaaccataatttttgtaatattttaaatagtttaagaggtaattttctactaaagaaaaagtatatgagatgtaattttctgataaatatgttacaaattctaagagaaaattacaggttacatcataattataataaaaaaaataaaaatccaagaaattaaaaaaatagagaacgtgatttagtcattaatcatttagtcactaatgtttcatgcattataatcatttttaatgtcttcaatatgtcttttgaaatacattcttaataccaataattatttttattaatactatagtatgaaaaagtaaactttttcatactatcaactatttaaggattgctatattgtcttctatttgataccaactaaatattttgcaaaaaaaaaaaaaataataaaaaaataaatcttatttgaattacgtatagtgtgcttcatggagtactgttttcttagatttaaacaataaatcagagaattgaatgataaggattagggtatgtcgaatgtggaaatctcttaatactaaaataaatggagaattgattcacttcaacttgatttttattgatgagccggtaattttaatattaatttacaaacttttttttcttcagccaattatattacacttattgaacaatgttgttgttataggaaaatctaatgcatgccaccatcacaaaaaccttagtttctaagtttaagaacctaccgagtgaagggtttcaaggttgtggaaagcacaggagaatatagaccactttccaatgagtataggattatttttatggttggaacttctctcatgaagttagaagaagaaatgattgagattccaattaatggattctaatttataactctaaatttgattgatttgcgtgttaataataatgaaatactctcagatattttttcttttaatatttgttagtgaagtatttgaatttaatatctt

SEQ ID NO: 41281 - DNA, 1389 bp, Cannabis sativa
cgtcgccctgatcagcgtcggtagcgaatttcgcaaaaaccgacgctgaaagggcttaaaaactgcctctaaaaggggtttttgtagtagtgcaaacggttctgtactcactgataattaataaatatatcatataattaattagctaatcaacgtaatttaatttacaactcatatataataaataatatttgttaccataaaaaatatatttttatttcaccaataactcacatcatactcacatattctaaataaatctatttaattaataaattacgcttatttatctacttatgataaattttttaatttatgctaaattaggttagtaggatgataatcctactcattaccacctaattaatctataaatatttagtcaaccttaattaatcttgtacgagcttgactattggtgttcaaacattctaaaacaacaatattgatgtcatgcatgttgagaagaatgtttgtgatagtttattaggcacaatcctggacaatgataaatccaaggacactgccagtgcaagacattatttgaagaatgtaggagtcagagaatgggtgtggatttatgaagatgagaaggggaagctgttgaaactgcatgcaccttacgttcttaaaccagatgataggctccaattttgtaaattttttagagatgtgaaatttcccgatggcttttgttcgaatttgaaaaagaaagtaaatgaaaatttaacaaatggtatcgggttaaagtcagacgactgtcatgtactaatgcaacgattactttcttttggtgttcgcaagtttctcccgaactctatatcgaccaccatttctgaactgtgtaactttttaaggcaaatttgttcaaggactataaatgttaaagacccataggttgctcaacaagactttattttaatattgtgtaaaatgtagtcgatatttcctccaactttctttgacataatgattcatctagtccttcatttgcctgtagaagaaattttgggtggacttgtttttatgaggtagatgtatccattagaaaggtacatgaaaaaattaaagaactacgtaggaaataaagcacatcatgaagggtcgatagcggaaagctacgttgtagatgaggctttgacattttgttcaatgtattttaagagggttgaaacaagatttaatcgtctttatcgcaatgaagatgaggttgtcccacgaaagctttctgtgtttcaatctcaatgtcggcctcttgatcgcgcaactcgtgaacaagtagagtggtatatatttaacaattcacctaaaattcaagcttacttagagtaagtttctctttatttgaattttttctttttttttcacttgaaatttaaatcaattaat

SEQ ID NO: 41282 - DNA, 2408 bp, Cannabis sativa
ataatatgattaatgccaaaataatcaattctaatatttctcccccttttgatttcatcaaaaagggtggcttaggaagtaaggtcaaactaaatatatttctctcccttaatcatacaagttatgacttgtatcaatgaagcacaataggtaaagagaaatttcaaaatgcataagaaaatgaaagtttatgtagtcaaaataagctaaacattcaataccaaaaatcattttaaaattcaaagcatgagagataagtaaagaatgacatagttatgattttaaacttttccccacaccttaagtaagatataaaaaatgtgttcatgcactcaaatcaattagatgacaagaattgagacttttttgggaagttttcaaaaatttaggctatgtttggtgggagcgagggagagagatggagagattagagagggtggggagtaagagagatggagagaattgttaatctcctttgtcttgcttggtattaggtgtgaggtgggaaggatggagaaaaaattgattagtaaaattacaaaattgtcattttaaaaataagattttattatttttataaggatagttattgtatttttcaaaatgtattttgtcttatctacaatctttccaaatttggagggattaaattttgaaggtttttagggagaatgtgtccctctatctctcctctccctccttttctctctcttgtcaaacgagtgatttagtctctcataccatcactctccctccacccctctccatccacccatctctccctcctaccaaacatagtgctaagcaaaaacaacatatgtaccaaaaattagttttatgcatcctttttgaaaaattctttttgcatcagcttaaacaatatgaagtgtacaagctggaaaaatagaaaaagcttcaaaaatgagagattttgacaagttttactcgttttggtcatagaaggtcattttaagcaacttgcttatcaaaaattgattttatgcaaatttttcatgcaaaatcttttagccacactaaatcaatgggttagttgttatagttaatgaaacgaggaggttgtgctgtaaattattaattgttcaaacttcaaattcaaaaaagctaagaatttttaattcataccatgtgttatgtggtgtagtggtagggaagtctttatgggcatttctttgcataggtaaagggttggaatcctatcacagcctcttgatcaaatttatgtaattaaataaatgtcattttgcactgtctaagagcactcccaactgctttttctactctatcatttaaagtacatcaccaaaactctaatttatctattttacaacacacttttacattacactatatattagtctctttatagtttgatagtttaagaataaatttgtattagtttagatttgaatatgtggatatgaggaatacttgtttaatggttgttatgttaattgaagtagtgatgttgatgaatagtcgttgatttagtatatgagaatggtttagctcagaagagagagttgtctgagaaagtagtaaactttattgatagtttggatgttagtttttttgtgttggttgttacaatttgaaacccataatgggtatttatagttgctcaccccttacactttatggttagaattatttcttctagatctttcttttactagaaggaattatatccaaacaaatctaaatgtttctagagtttaacataactagtatattctagacttaatctaatctaaaaatctcttaagttcttaaataattttttctacaagtatatataaaaatttctagaccaaattatgtagaaatgtgtagcaaattataatatattttttctagctacatcattaaattattattatttttattttctgccctattaaaataataaattttgaacctatatacaatatacacaaataaaatattatttatttattattaaataagtttagagaatgcactatccattctttacatgtagattaaattgtaagtaaattgacacgtgacaatttctgattggttcaggtcatgaatttttatttttataaaaaaaattaatttaaatataccgtgataatgacttgaaatttaaccgcaagagtttcagaaatataagttagttattattataccgccaaaaattaaactaggtatttatttgtaacgagtagttaaacttaattatttatatcgcaaattattttatttttttttatcaaatttagctaaaaaaatttagaaaatctctattatattgtgagtaattttgctgtgtccttcacaacagacagtaccaatgaggtgcaagctgtaaaattctattgcagcctaaaagcctgtaacaaacgtaaaagagataaaggtaa

SEQ ID NO: 41283 - DNA, 1111 bp, Cannabis sativa
ttctgaaaatcgatttggaattggatgtataatccgaaatggagaagccaaaatggttgaagctttttcgaaaagcaacataggaagggtctctcctgagattgctgaggtgattggtgtgaaggaggctttgagctagataaagcagaaggacttatctgacgtggacattgaaactgattctttagtagttgttcaggctattaatggctcagttcaaatgccatctcagtttggcctacttatacaagattgtcaaagctttctctcagaattaaataatatttttgtttcttttgtcaaacgatctgcaaatagggcggctcattgtatagcgaggcggtcttgttttatgtcagattgtatttatgatgagctttctgctccttctgatttactttcaattgtaagggatgatagtttttcaagctgattaataaaaatttcccttttcaaaaaaaaaaaaaaaacatcatgttttacatttaagcatgctaagttaaattttcccaaaaaattatataagactacaattccattactagccatttttgcaaattatgtcttttcaggaatgtaaagccatgttggctaacttaagtaatgtttatttttgttttattaagcggtcagctaataaattcactcatgagtttgcaagagcgtctttattttatcttgattgtactttcagtatgaaaaatattccaactgagttgttgcctattttagtgactgaatttgaaggttaataaagtttgattttcctttaaaataaataaataaacaaacaaaagaaattggactttacaaaaataggggccccttgtgtaatgatgctgttcaatgcttgggtcggcgacactattggtgccttatagcaatgctataaactaaaatagggaatgaattttaaaaaaataagttccgaccatacaaatttttttttatatagtagaacctccatctaaaaatactttattaaaaaataacatctaatttattataaaaaaaattaaattataatttgggccaataactcttaaattataattagttatacatttttaagtctggtattgttgttacattaaaactttttggtatttta

SEQ ID NO: 41284 - DNA, 1316 bp, Cannabis sativa
gtcctgtaaatctagggcataacttgcctcttttcctgaaatgcttgatccctttcatcaaagagacacgtaggaatacatgatctcctacttgaaattctacatttttgcatttcagatttgcataactcttttgtctgctctgagaggcaagcattctggctttaatcttctcaatcgcttcattaatttgttgtactgactccggacctaggtatttcttctcctctgtttcatcccaatgaatgggagatctacactttctgccatataatagttcataaggagcactccctatcgtactttgaaaactgttattgtatgagaaatcaatcaatggtaggtacttactctaggagccctcgaaatccataacataggcttgcaacatatcctccagtatctgaatcgtcctttcggactatccatcagtctgatgatggaaagttgtactgaatttcagtttggtacccatagcccgttgcatactttgcaagaatttagaggtaaacctcgaatccctatccgaaactatggactttggtacaccatgtaatcttactatctctttaacataaaagtccgcatattgatccactgcaaaggttatcttaactggtagaaaatgagctgacttcgtgaatcgatctaccacaacccaaattgaatcaaataaacccgtggttctagttaatcgaaccacaaagtccattgtgatatcttcccacttccattacggtagggttcaaggcagcaacaaccctgccggtctctgatgttcagcctttatctgttgacaggttaggcatcttgataccaattctaccacattcttcttcattccgctacaccaaaagtagggtttaagatcctgatacatcttggtggtgccaggatgcaaggaatatggagtggtatgcgcctcctcaagaatttcatttctaagttccgcactacaaggaacacaaacccttgtcttaaacaacaacatcccattatctgacactgaaaagtccttggcttgaccagctgaaacctcttccttgatctttactaactctggatcaattaactgagcagctttaatacgttctaatagatcagattgtagcatcaagttatgaagtttacctacaacaaactcgatacttgatctgaccatgtcttctgctaagtgaggtgaaatctaaaccatactagttacctgcctgagaccctttctactcagggcatcaaccactaccttggctttcccaggatggtaaaggatctcacaatcgtaatccttaaccaactctaaccaacgcctctatctc

SEQ ID NO: 41285 - DNA, 1640 bp, Cannabis sativa
atcttaatgggaaaggttaggctccctgttaccttgtgtcctgacattcctcaaagcacgttcaaatactacacttttgttgtggtggactgccccaccgcctataatgccattctcgacaggccggccttggtcaactttggagcaattacctccattcgacacatgtgccttaaattccccactcgggaggccagagtagggacagtgaggggaaatcaaggagaagtaagacaacgttacaacgccgcagtacatttattggtcttgatgatacggggggtcaggactagttttggtagaagaacaggacgagttggaccctcgtattgggtttgaggcggtgttagaggccatggaagatatcaaggaagtaagggtgtgtgaccccgactaatctaaagttattcgtctagggaaaagcctagaaccggaggagcaaagtaaaatcatagacactataaaggcgtctacgaacgtctttgcttggtgccatggggatatgactagaataagtccccatgtgatcaccatgtcctaaatgtcaacccaaatgtgcctcctgtacaacaaaaaagacgcacaccagacccaataaaggctaacgccctggaaaaggaggtggataagttattatccaatatttttatccgggacgtgtactaccacgagtggttggccaacccagttctggtgcctaaactaaatggaacatggcgagtttacatagagttcaccaatctcaacaaagcttgcccaaaagattgtttcctgttgcctagaatcgatcaaatggtagacactacctcagggttcaagttattatcctttatggatgcctattcagggtgcaatcaaataaaaatgcatgtcgctaaccaagagtgtactagcttccggactgacaagggggtatactgctacctggtcatgcccttcagaatgaaaaatgccggagcaacttaccaccgcatggtcaactggatgttcaaaggcctcctgggacgaaacatggaggtatatgtagacgacatgctggtcaaatccaaaacgtgcatgggccatgcagacgacctcacagaatgctttgaggtagtctggaggtatgggatgaaacttaatcccaaaaaatgcacttttggcgtcaaatgagaaaaatttctgggattcatagtgagtcaacgcgggatagatgcaaaccccgaaatgatacaagccttattgagcatgccctccccaaaaagacataaggatgtgtagagtctaactgggaaagttgccaccctgagtcgcttcatctcccgctcaaccgacaagtgcatcacgttcttgaacatcttgaagaagtgccaaaagtttgaatggactgaagaatgcaaagaggcattcagaaagttgaaagaacacatggctaagtcaccagtaatgtcaaaactagttcacaaagaagacttatatttatatttagccgttttcgagaacgcagtcagtgcagctctggtccggggaggagtaaaaaagtttcaacacccggtatattatgtcagcaagagcatgatatgagctaaaattcggtatcttttgatcgaaaaattagctttctatctcttaatttcctcaagaaagctaagaccctactt

SEQ ID NO: 41286 - DNA, 1200 bp, Cannabis sativa
cctggtaaaataatttccaatattatggacatcggttttccagcagtgatagctgtgggacatggcttcaaattgctcagattaattttcttcagtatatcttcaatgtatctagtttgtgtgaggtataagcctgtcaagtctctgaacacttctattcccagaaagtattgtagaggtccaaggtctttcaatgcaaataacttgttgagtttgcagatgaattcagtaactaaggcagagttgcttcctgtcacaactatgtcatcgacatagatgagaacaagtataacaactgtctcggatttgtagaagaacaaggaggtgtctgcctttgagttttggaatttccaatctgtaagtgtgcttttgagcttatcaaaccaggatctaggggcttgtttaagtccatagagtgatttgttcaatttgcaaacccaatcttctttccctttttcctcaaatccttgaggttggaccatataaacctcttcttccaaagtgccatttaaaaagggattgttaatgtctaattgtcttatatcccaatcttttgaaacagctatggttagaacaattcttactgtggaagctttaataactgggctgaatgtgtcaccataatctatgcctggtctttgatgaaacccctttgcaacgagtcttgctttcaacctttcaatggttccatctgctctcagctttattctgaatatccacttgttaccaattaagttttgataaactgctggtggtacaagaacccaggttcgattcttcttgagagctattacctcagtgtccattgcacccttccaaacctgggtgtttaagggcctgcttaaccgattctggttcagcgaaggttgataaggctttggatgaactaagataggttttaggtcgaaaaattccagcttttcctcgagtgaccatgggatgagtaggctacaaagcagtggcaagtgttggttgtggttctgtatcaggttcagtacctgaagtggcaccagatgcagcaatctctggttcaggatcaggcacacgagcagggtcaataatgacattttcagttgaaccaaaaccaaattgatcatcaaaatgaccatatgcctcccctgcctgacctgaaataggactgtgattagtggaatacgaatcagtaaaatgtgactaaacctgtggtgatcgaggtgatgc

SEQ ID NO: 41287 - DNA, 1380 bp, Cannabis sativa
  modified_base (315)..(317): a, c, t, g, unknown or other
  modified_base (1088)..(1093): a, c, t, g, unknown or other
acaatacttgttgtgactaaaactaaattagtgacaacttgtagctaaatactatgttttagtcacaagtaactttttgtggtgactaaaaatcacatgtagtcacaaaaaatttatattgtgactaaaaagttatcacttaaagtagttgttttttgtagtgaaggttggtgactaaatatttttttagtcacaatacttattgtgaataaaactaaattagtgccaacttatatctaaatattatgttttagtcacaagtaatttttgttgtcactaaaattcacatatagtcacaaaaaaattatgttgtgnnnaaaaaattatcactaaaagtagttgttttttgtaatgggcgttaacgaatcattagtgttgagctcacaacttatttaataatgaagtttacaattttcccgagtattgggtttggttttcgaaagcttagaaactgacccttgcttagggatgtaatagatagttctatttataggcaccttaggccaaactagtacaagcttaataaaggagttaaaaattttactctctaatggagtgttttacaagagaatacattgataaaaacaaaggttaagtttgggtctaaaggattggaccattgccttgttgacatggacagatgtgtcctatatacacaaacagttatagtccattatttggcgcgttaggaaagattgtgcgtagtagttgtagtattgatccccaagatatgattgaatcttttgtccaatgcctacttatggactggtggagtagacctgtgacaatcagtagtctcgtgattcgtaagagaaaataccgagtaagttgtgcaatcccacacatcgcctgggaaaggtcaagcatgatgattctgagactgtgtaggtatggaactacatagttaaagagggcttaaatagattaattggtactacttatatcaacaaggtgtatcttgttttctggtgacccatcacgaaagaactccacagttaagtgtgtttgacttaggtaatttcaggatgggggacctcgtgaaaacttttcttagaaagggtgcaagtgaggacaaagcacgctggaannnnnngtgttggtctgtagggccagtcgtcagtttaagaagcagccagagtgacgcactcgtgtataagaaccataaatctgtaggaaaaggcccaatgaaggcttgaagcagggacgttataaaatggtatacattagagccttgacccagccagaagagtgatcgacaaggatgtcgaaccctgtaagggggatgattgtgacagttagtattcccgtgatccgtaagatgaaatactaggtaagatgtgcaatcctgcatcgcccaagaaaggtcaagtgtgatgattc

SEQ ID NO: 41288 - DNA, 1047 bp, Cannabis sativa
aagataaatttgtctattcgaatgacttaggcataatacctaatccttctaaaattttttatggtatctctgatgattacttaatcttaagcaaatattttatattaattttaatactataatgctatgttgatgacttagtctagatgaaacttattgtttcagactaagagaaaatgtcacaacaagaggtccttaagaaccaatggtaagaggttaaatgtactcctacgtattaatttaaccagactcctactattgagtgggagccatctaagatgtaattaaacaaggaacattagggagataatcaagaaagaatgatgaaagtgacctatatgttagatgataggggtgtatattagaatccttttatctacaccaacttagtacttcagattagagaaggtggttattctggggtggaggaattattctagaaggacgtaaaaacccatctataataatttagtttcacaagtgaagctaaataacttagttgtttcgaaaagctcttaaaagttattcaaagtgaagaaagttcttaagtatttttatctctattccattttggatagaattagagatatgacttctgtatactcagatgcacttaataagcagtgaagaattcagtatccctagaggactaatacatataaaaaatgatgttgcataatgttttatgaacataaaggaagtaatggtggagaaagcagttgcttaccataggcttacagttcctgtaatttgggtttcgtcaaatatactacacttgatttggatatcaagataatggattgattgaaatgcacttcttgttttatgttagtgaaagggatagtttgttgggattttatgccctaaataaaatccatttcaatgcaatcttatttattatcaatagaagattagaagtcaattatgtttacatgtagttttcttgtttatagttttatatacaatttatgttaaatccagaacatatagttattcacaattgcagtgatgtcaacacagtggaaggtaattgtgattatatgcttc

SEQ ID NO: 41289 - DNA, 1153 bp, Cannabis sativa
agaaaatagagtgagcaataaatattttactgtatgaagtgaaaaaaactttaaattccataggattgaagtatgaaaaaatttatgcatgtccgaacgattgtattttatatcgtaaggaatatgcagacatggattattgcccgacttgtggtttatccattcataaagtaaacaagagtaaggagaataagaatcttatgcctcaaaaagtgatgtggtacatgcctttgattccgcgactgaaatgattatatcgtagtgcagaacattctaaaaatttaatttgacatgagactaagagagttaaagagggaaaactcagatatcctacagattcccaagcttggaaaaaagtaaactacataaatcctgaattcaaatctgaaacaagacacattcatctcggtcagtctacgaatggagtaaatccacatagatctctaagtagtcgccatagttcatggcatgtcttccttattatgtacaatcttcctccctggttagtgatgaagaggaaatttaatgtactttcttttatgatatcaggcctccaataaccctaatataatatcgatgtatatttggaaccattgattgacgatttaataaaattgtatgagaatggtgttcaggcctatgatggttttaaaaagaattatttaatttgaaagcagtgttattgtggactgtcagtgattttccttcttacagtaatttatcaaacttaagcacaaaaggttacgaaggttgtctgatttgttgcactaacacatcggctcgtcgcttggcaaatggatacaagatgtgttatatgggtcacagacggtacttgcctacaaatcatcctgatagacggaagaagaaagtatttgatggtactgaagaggaagatatggctcatttttcactgtcaggggaacaaattctccaacaagtaggacttgtagattttaagtatggaaagacgcaaaaaaattaaaaaaattaaaaaaaaacaaaagatttttttcaaagaaagtcaatcttgtttcgtcttccatattgaaaaattttacttgttcgacattgtttggatgtcatgcatattgaaaaaaattgtgtgtgagagtattatcggtaccttacttgatattcctagcaaaactaagga

SEQ ID NO: 41290 - DNA, 1383 bp, Cannabis sativa
  modified_base (37)..(40): a, c, t, g, unknown or other
  modified_base (599)..(604): a, c, t, g, unknown or other
  modified_base (1237)..(1252): a, c, t, g, unknown or other
aaaaatcactattaaagagccaagcttgagttctaannnncaaagcttgctcaaacaacaaaccagccatcaaaacatgcttaattcaacatatctaaacataactaaacatcagaagcatactacaaacaacaacagcaacaacaaaacaacaacaacaacaactaatttcataaatcatgcaaaattcaaaacccaaaacataaggaaactaaagagaaggttactaaagctattaccttcaagggattcaccaagaacaccacaagctgctggtttctccaagggtttcgaaaaagagagaatggagagatagaatgtgattttgcttctattttttatatttagtgaaaatgaaataataaaaagggtttttatttaattaatgccatttctaaaatcagattaaataactaaattaaaaccacaaaaggacaaaacactaatgggcaaaaagataattttgctcttcccacactaaaagtcataaaaggtcacttagggatattttggtaaattataaaatctcaactattctggacatttccaatgtctaactatactgtcccgttacactaaaaatactaagatgtgattcnnnnnnccaaacaccgcgttccaatgttgatgaattctatatatgacatataaaatgcattctgaattcaaataaatcatcgtaaattaataattcaaagttaataaacaattttcataatcaaatcctaattacctgctaatttcttaattaaagctaagcggtctttacatggctgctcagaagcatcttcagttaacacaaacaaggcatttttatctatgagagcaatattaatattctctttccatttgacaaagttagctccagagagcttgttgtcaatcaacagtgacacaattgggttgttcatggtcatattgaaaactacaaatataaataaataaaaatcaataaggttcaatacaaaagcatacacattcagaaattattaagcacttagcaagtaggaatgacaagtgaaaatacaaaacaaaccatcctaaataatttccaaggctttcaacaaactgatacagtgtcgtgtttaggcgagagttagagatatcattcattgaatagagtagtgagctcctctaaaatggataccattctagcaaccttttattcgatcaagatgagaattcggcgttgtctcgtttaggcgagagttaatgccattctatcttatgagcttcnnnnnnnnnnnnnnnntttgtaagccctactcttagcagccactattggggtggacgttactaagaataaaaatacttatctctcgagactctacgacgttaaattgctaatgaacgaacatctattagggatgaatctcactaaaa

SEQ ID NO: 41291 - DNA, 3089 bp, Cannabis sativa
  modified_base (174)..(177): a, c, t, g, unknown or other
tgtttcaaaaagtattatggtaaggcttttatatataatacttttttggtaatatggaaattaaaaaaaaataatttgaaagagttagagtgagaatagtaaaaaaataaaaaagatagaaaaagaaatatatagaataagtctttatattttatcttttttttttaaaaaaannnntaataaaataaaatttgtgagagagtgcaaaagttttaaaaaatgagatataaaaataaacagaaaaaaaagaaagaaagagaattagaaaaaaaaataaaaaatgagaaataaagagagaagaaaaataataataataataataaaatcagcaactaatttttaaaaaaaaagtcagccaatgaaaaaatatctttttttttttgaaactttaataaataaaaaaaaaagtgaaaaaattaagcaggagaaatagtaatataaaaaatcttttatcaaagtataaatataaaattttaaaaaattaatatttaatataaatatccttttaaattaacaaatttaaactactcccaaaaaaaatgttaaaaaaaagaaaagaaaagaaaaactactcggaaaaaatgaagttcggattttggagacagtccaaaaattattacaaagataagtgactcaaaacttcatataaattaacttgccatcggctttcaatatttactttgaaacgttcaacactcattcaattataactctactcacaataataattctaattataacgctactcatttaattcaactaaattgattgagataaaatgattcttatattattgtccccatgaatgggtaaattaataacacaaaagatactaataatgtttagcattatcactccgtatattatatcattttgatgttacatatttaatattactaattatacattcgaaagagaattttattatggtgttaaatatgctactataatttgataccaaacaacaacgttgaattattaatcaaaattttgatctttcaagcctaaatattattttggactctgtattttataaaaattactaattaaattatctattttgttaaataataaaataaattctgtattttttaaaattgtacaagtaaaatcctaaactaatattttgtcaaaataaaacttaataataatctgatttagagatgttgtaacaaagctagttacattttctgtatctgttcgtgtaaaaaattgttttaaagttaattgtattaaaaaataaaattattaaaaattgtgctcagaatcttatttttcctattttagaaacataggatcctatttttcctattttgaaaaatataaaatctattttgtcatttaacaaaataaaggatccaattaataatttttttgtaaaacaagatctaaaataatatttaccttatttatattcctctctataatgtttcttcatgagaattttagttaatttaccgaattataattatatactactttttcagcttacaatatatctaaatttataatttatcatacactcaacattttttcctacaacttttctttcttaacttcaccaaactggttcaaagtagtgaggaagggagaagagattttacattttcaattcttttgtattaccatgcatggcattttcaatatctattagttacagagtctattttgacctgaaccaatataaatctatggccttatttcttcatatctctgctgttaatttaattgttgattgttttactgcatcttgttgtagttttctagtttgtatatattatctcgttattaaaatatatatatgcaaatatatctaatgattactgtgattttgtgtgtaatatatacaatactttaattttcctgatttttaattgagagaccaaaggttaaatattttgtgccttattagcattgatgtgttgtgtcatgcgtacggacataaaataatattacatttatatataaatatatcatgtatttggaaatattttagataaatagcttatatgtatatatatatttatatatatttaattatatttatgggtactactcttgaagaggatcaacttgtatttcatgggcaagttgtttggtaagcatatcagctcgatcatcttgtcctcctgcaaagctatacacacgaaatgcaaattgaaaagccttccaaagcatttttgtatgtgcttttccttgttcttgctcactcttactactacaccttccattctcaatactttctttggcttttccctttcttttttcctgtatcaaattcacaatcattctcaacactttcttattgcttttcctaattagttacattattagccaggaatatatatagtaaatgaatatgacatttaataccataagtaatgattacctcaagtgctaattccatgcagcttgaagaaacgtctaccatgcattctttaattcgtatcaaaatattgaaatcaaaagtgatattatgactttggaacttcttagcttcttcatctttactcctttccaatgcatctatttcccctttgatctggttttagaaattcattgatgaaaagtgctcaaggggatattttcatgttcacgatttttcatttatatgtatcgattttaccttagtgaagaatgactcaaccttatcaagtagctggcctaaaggaggagccactttccatttttccagcttattgacaatatcttctagtttcaaatacagggctgctgcacttcttaatgactccagcttcttcgatggaaaaccttcaaaccttgccagcacctgcatgcatgtaatatacacatcaatattctaaaccaaattgagataatatatagtaacaaactatatagctataagcaaaaattgaacactaattgtaataatatacatatgttctgacctgagtctcatcagtcagtttctccagatgttgttcaacttgcttatggaacttgataagttcagacatgtcctttgattggaaggagttgatagcagctttaacctccatgattgatttcgaatgcttttgaacatcttcttcaatctgttggaaataagctgatctatacatata

SEQ ID NO: 41292 - DNA, 4499 bp, Cannabis sativa
atctgataattgtaaaataccgactgctagtgaataatatattaatatgtttttataagtgtctcagttgtaaaataaataggcacgaggctatatatgttcaattatataattcaaatttaaataagaattgaattataaaataaatattttagatagtatcttaaattttaattgagcaacttaaatttaaatttaaaatagtatctgataaaagataaattattattttctaaattttagaataaataattaaaatatttgtcaaataatttaaataatagtaaagagatttcaaaactcaatttatcactagaagtggtaaaattctaaagtcatacaaaatagtacaagattctaaatgaactcattaaaattaatcttgaaatattaaagaagtcattcacctcctgaaatttcaaagagatcattgacctcatcaaatcccaaatgaaatcattcacctcatcaaattctaaatgaagtcattctcctccttaaaaattctaaatgaggtcattcacctcaataatcccaagtaaagtcttttctttcaaatccccaagtgaggtcatttacctcaaaatatcaaagtgagttaattctccacaatgtttctcgaagatataaaatctttgaacatactgaaattacatatgacttgattcttagaaaaaagataagtaggcaatttagttgctaagactaagtgtagttgtcaatattgcaaaatggtataaaacacaaattacaaaattctataaaaaagtcatacacctaggaattttttaaaattttcaaagagcaaagaattctcaaaagtggtcatatactgaaattcttatattcaaattttaaaatacctcattcagaactacaagcggcttgattctttacaaagaaagtgtgtaggcagctcaatttgccaaaattactgaattcacccgaaattccaaattcactaaaactttccccaaattatttcaattatttaggatcatcgtaagtagaatcaaagggtatttcctttaaacaaaaggattgtaattaaaaaattatttttataatcttaaatagatcgaacttaaataaataaactcttatgttataaatttggcataaataaaattgtgttttatatttacttttaacatcttgaatgtaaaattttttgcttaacaatattagcagatttaatacttgttggtacttcttaattgatgatcaatatatacttaaaaactaagagcatgtttgatactgttttctgttttttgttttcaaaaaattgttttttaaaatgagaacaataaatagtttttgaagtttttaaaacacaagtcatgtttggttagtgttttttaaaaacaatattgaccaaaagtgaattagtttttaaaatagaaaatagcattttgttgttttcaaaattcttgttttttgtaactttgttttctgaaaaactgtttttaaaaaacaagggcaaacaagccaaattgttttttaaaaacaattttctgttttttaaaaaaaaaaaaacaattttttagttatgatgcgaaacatacactaatatatttatatgttttttagttacatattttgttaattatgaacaaacaatagttttggtatgcaatttttttctttatgcatatgcacatgctctcatgatactaaaagatagcttctatagaatgatattttttattgcttcttatggttaatagtttaaagtatcaaaaagcttaaatttattaatcatttagcatcactttgacttgagcaaaaactcacagttaacaaaacaggttcaaacgacaaccctttgcctcaccacccaactagcaagagtttaaggagagccattctgatatagaggccattctttgcttgtcgaaaataagcagcccttggatccgaatcaacatcaacagtaatctgaaattgttaatgattggaaaagaaagaccaaattgtaatgtcagtaaaacagtaacataaaatgctaagctaaagtccccttacacagctaaaaaacacatgttcagttggttgccaattatttgaccatgttaacattcaaatatagacagctcaactggtgttacgttggcattttaacactagcaggatttttttcagcagctatacatttcactcaaaagtatcatagattcatgtacttacttcatcaagcctcggtagagggtgcatgactacagcatgtttcggcattgcctccaacacacgacgatccacaatgtacttgcctcgagcttcctcatagagatcagttctctccccaaatcgttcccgttgaatgcgagtttgataaacaacatcacatttggaagctacttccattaaatcagcactttcttcccatttgatattcatagatgtcaaataatcttttatatcatcctgaaatatataaggttaatgaaaatgttaaaggatcataaattgttcactctcaaatcagcttcaaactaacaaaaacatagtcaataattctagtagcaccttcatcttcaccacatcaggagagacaaagtagatctttacgtcttcatactttgcaagtaagtaagcaagtgacctcactgtccttccattagcaagatccccaacaagcccaactttaatgccatcgagttttcctatctctctttcaatggtatagacatctaaaagagcctgttcatacaaaaaatcagaggacattaacaaaagatgaaaaacaatcaggatatgatctaaaagtgaccaattactaaattgtaatgttatgattatgttatggtggcttaagtgttaagtcttctagttcactagtccaatgaaaggataattttttgcatacttgagtcggatgttgtccaggaccatctcctgcattgataatagggatgccagcaatggcagcagctcttttagcagcaccactttcaaagtgcctcattacaattatatctgagtaactttcaacagttcttatagaatctgaaaatcaagatcaatatcacaagcaattcagggaaaatcacatcaagggactcaatatagcaaatatgagagattaccttcaagtgtttctccttttgctgcagaggaaaactcccgagcattttcagtcgttaaaacttccccacctaaccgtttcatggcagactcaaaggaaagcctagtcctagtagagggttcataaaagagggtagccattagatagcctttgaggatttggcttcctggtgatttcttttcaatcttttccatatctcgagcaacttcaaatatagcattaagaatatctctatcaaattgttgagcttcaatcacatcatcaagttgaaacttatttcccaatgtaaaagaagacgaattttcaatttctagtgcacggcagagaattctattctgttttgataatctttcagtttcttccaatatcaaggacttctcactgtgcaatgatcttgcatgtttgagatacattgacatggagcaacccagttgattgcgcgtaagatttaggtaattgtgcatgaatttcttagagcatgtctttgttttctgagagcagatgccctcttgaaatgaaaatgtaaacagagaagatgcagcagccatggccatatatttttagattagcaagacaagatcaacttgtttctctcaagcacttccaaggtcctacaaatacctatggagaaaacaagattagttcataaaatgaaattttggaaccataacttatatttatacaatgcaatacatacattcattccccactagttaaactatcagaatattcattccccattagttaaactatcagaatgaaatcccaccttttttcacaagcagagaagttgaataagacaggaaaactgttattatggttgcagaatcactagatgatgtactaataacaacacaataaattatcataaatttcaatgcatcacagaaaaaaagacagaagagtacttaacatttctgttgacaacattctcccggaataataaaactacttaaaaccaattagttcgtatgtgaagcattttttactcttaatatccaaaatgtaacatgcttctaatgggtgaaaagcataaaagaatgtgatcaaaatcaacaactaataatatctacaatgattaatccacaaacattagttataagcaaaatacaaagcacaaaacacaattctctaatgacctataatgcattccatgaatgcttataaggtatcttgatgactatttaactatacaaacaaatttttcaacaaaaaaaaggaactatattcacacaatcatttaatcaaacaatatatacaccaaatgcggaacccgaaaccaactttctcatatcagaaaacatcaacggcctatccaattcccataattgcacatttggtaaaatgatatacatgatataatttctatgttcaaagttaagatgatcatatatcattttaccaccaatgg

SEQ ID NO: 41293 - DNA, 3144 bp, Cannabis sativa
  modified_base (2744)..(2749): a, c, t, g, unknown or other
tcgagaactttgaccaccttatatcgtccttcccaattaggtccgagtacacctgccgtgttgtctttggtgtttaaaaatactcctcttaggaccatatcaaccacaaagaatttctgagctttcacttttttattgaaatatcaagctaatttttgttgatgagctatcaactttaagtttgttgtggttcgcttctcttcaatttcatcaagtgatttggccaagagtatgtgatttgcttcttggttgtacgtcaatcttctgtgggatggtggttcgagctctacaggcagcatagcttcatatccatatgccatggcaaatggagtctatccggttgctgttttctcagtggttcggtacgaccatagaacttcaggaagttctttcggccagtttcctttagcatcctcgagtcttttctttagtgtatccttcagggtcttgttgactgcttcaacttgaccattcgcctgaggatgtgccactgcagagaaacttttgatgataccatggtttccacaaaaatcagtgaaggactggctgtcaaactgtttgccattgtctgaaactattttgtacggcaatccaaaccggcagattatgttctacacaaaaaattcttgaactttcttagatgtaattgttgtgagtggttcagcttccgtccacttagtgaagtaatcaaccgctaccactgcgtactgcactcctcccttgcctttgggtaattgtccgatcaggtcaattccccagatggcaaaaggccacggactttgcatctgagttaactcgttgggtggagcttgaggtatctttagaaatctctggcatttgtcacatttcttaacataggactttgaatcttcaatcattgtcggccaaaaataaccttgccttagaattttgttagataaactctgcccggcggcatgatttccacaaaatccattgtgcacctcagatagaagtcgtccagcttcttcttgagtaacacatctcagcaatggcatggataaccctcttctgtaaataattccctctactatgatatagcatgttgccttccttctcatctttcgagcttcattttgattatttgggagttccccagtgttgaggtatgttgttcttggtgtcatccactttggagaaatatcaatcattttgatctcttccatgccagtgatgctaggctcttcgaggaaatggataggaacgaagtttgctttatcacttacattactgcttgccaatcgagctaacgcgtccgcaatcgtgttttcttcccttggaatttgtctgagaccgtagcttttgaattgtgggagcaggtcatgtatttaactcagataagctatcatcttttctccccgagcctcgtattctccagatgcgtgatttaccaccagttttgaatccctgtagatttcaatgtgttcggctttcatctcccaggctaattttatgccaacgattaaagattcatactcgactttgttattagatgccttgaatccaaacttaactgtagcgtgcaggtgttgccccccaggtgtgaaaagggcgattcctgtaccagatagctgatctgtagccgacatgtccacatgtattttccaagtgggcttgtcttcactgttacttggctgaggtgtttgtaccggctcagggttgccttatgatatgctttcttcttgacctgtgcattctaccacaaagtctcctagggcctggcctttgattgttgttcagggttgcaagtaaattttgtaatgacctagttccactacccacttgagtaaccgtccagaggcgtccagcttttgcaatatttagcgtaatggttgatcagtgtacacccaaacaagataagcttgaaaatagggccttaactttcttgttgctagaattaggcagtaagcgagtttccctatcaacgggatatacccctttcggcctcaatgagtctcttactaacgtaatagatcgggtgttgtatgttgttttcttctctgatcagctcggcactcacagcgtgcttcgtgacagctaagtatatccccaagttcttctctgtccagaggtttcgagagtacgggaggctttgcaagttgcgtttttagctcctgaaaagctttttcacattccaccgtccattcaaattgcttatttccttgcaggatgttgaagaatggaacacacttgtctgttgattttgaaacacatctgctgagtgcggcgatctgaccagtcaaactttgcacttcattggttcttgttggcgacttcatatctagaaggttgaatcttctttggattggctttgattcctcgggcattgacaataaagcccaaaaaatttcccgagctgactccaaaggagcactttaagggatttagtttcatgttatattttcggaggactttgaagcatttgtccaggtcatctatgtgccccccagccttcctgtatttgacgagcatgtcatccacatatacctccatgtttcgtccaatctggtctttaaacatcttgtttaccaatcttttgtgtgtggctccagtagtttttagaccaaatggcatgactttgtagcaatatagacccatatctgttcggaaacttgtatgttcttggtctggtagatgcattttgattttattgtaccctaaataagcatccatgaagcttaatatttcatgctcggctgttgcgtccacgagctgatcgattcttnnnnnnggaaaacagtctttggggcatgcttttgttgaggtgcgtgtaatcaatacacactcgccatttcttgttcggcttgggtaccagtacgggatttgtaacccaagctgggtagaaagcttcgattatgaaattattattgtgtagcttctctacctcttccttcagggctagagctcgctccttgtcaaacaaccttcgcttttgttgaactagtcagaattgggatcaatatttaggacgtgcaaaattatcgaaggatcaattgcgaccatatactcatgtgaccaggaaaacatgtctagttttgctctcagaaattttatcaatgataattttacttcgagcaacaaaccttttccaatttttagcatcctggccgggatatctggatcgat

SEQ ID NO: 41294 - DNA, 1485 bp, Cannabis sativa
ttgctttgccaataaagcttggttaaaatgaacaaaactcttaaaacccatacctccttgaaccttagattgtgttagagccttccatgttttccagttaatacccgatgaggaggagttggaaccccaccaaaatttgttgcacatggtttcaatctgagcaataagagatttggagagtttaaaacagctcatagcataagttgggatggattgagccaccgctttgagtaaaacttctttgccaccaatggagaagagcttctcttgtcaagctgataataagttctagagtttgtccttaatttcaccaaaaagtatctttttgtctctgactgaataagaaggtaagcctaggtaacgttcatgacatggtttaatttccatttgtagaacctgctgtacatgctgctggattgcaggaagagtattcggagaaaaggagagaacagacttttcaacattaagactttgtcctgatgctctgcaataataagcaagggagtgcttgatagccatggcagatttttgattagcacggcagagaacaaggctgtcatcggcaaaaaataaatgagaaacactcggagcacctcttgcaatactaaggccatgtaaattgctttgttgctcttcaaattgaaaaagtcttgagagtccttccgcgcatatgatgaataagaaaggggacaaaggatcgccttgtcttatacctcgggttggaattaggtgaccacgagtagaaccattgactgaaaaggagtaagagaccgtgctaatacatcggtaaataagatctactactgctggagcaaaccccattgtaatcatcatgctgtgaaaaaaatgtcattctactctatcaaaagccttgctcatgtcaagcttaatggctgcataaccttccttgcctctctttaaatgttttaaggagtggaggagttcaaaagcaaccaaaacgttatccgtaatgagccttgattggaggaaagcactttgagattcagatataaccattgacatataaggtttttattcgaatcacaattgctttagaaactaatttgtacaatacattacagaggctgatggggcgtagctgggacattgaattcggcttcttgactttaggaatcaaagtaattagagtttgattgaagcaagaaggatccgcaccattattcagcacttcaaggacagtttgagacaccaaatcacccactatatgccaataattagtgtagaacatgaccaacataccgtctagcccagggctgctatcatcacccatagaagataaagcattaaaaacatcctcacgagtgtatggcgctagtaacgatctgttaatatcagcaaatatggtgcacgtcactgtgtttaaaacatgttgtactgcttcagcatcaaaaccagcagtagagaatatattttgaaaataattctcaacaatcgaaccaattccctgctgtgtggtatgtaaaa

SEQ ID NO: 41295 - DNA, 970 bp, Cannabis sativa
ttattggacattaatagtgcctaagtctgatcctgaatattgtgtttagggcctacttattccaagaacacacaaaaaaaaaaaaaaaattctaaatttaaaaatacacatttttttactaattttgaaaaatgctatattttttttttctaaataaacgtccaaaaattatttttttcttatggtcaactaaatttcagaccggccctcgtggtgcccaataccttctagaactattagttagtgatatttcataaaagttattatattaaattatatggtacgtaatacttaattggatcaataataatttaacacttagaagattgctagatagtaatagcctttttagcatttctcataactcttacacgagagatgctaaaatgcactattttttatatacactgtaaaaaagtaccatccaacacataaaagttagcttattacacacaatgtttttgttgtatatgcacttatttcattaattttatgttattatttttttgttttaaagcggttttcaaaatattttttgtcgaacaattattttttatttgtatttttttatagtgtatatttttttatttcttcctgataattgtttttggttgtatatatattgatttgtagtttagatacatatattgagtatttttttaacacattttattgaaatacaatgataagattttttttttaaattgacacaatttatttttttaaggacttttgtttaattttagtaaaaaagtctaacatgaatcaaaattcagggttataatttggtacatgtcaaaatttgaaagatataatttagtaaatatcaaagtctagagagtaatttagtatataaataatcactgaattaataaaattgaatgaaattggaaaaaaaaatattttaattcaatcatgtcaatatttttaataagaaaaaaaattcaaaagatatgaattggtaaatatt

SEQ ID NO: 41296 - DNA, 1451 bp, Cannabis sativa
tttgaaagaacactgataccacgtacaaatctcttgtgtcaagtgatttatttttctgcaattatttttatattctgccagttttggtttgtttttgcaaaactaatttctgcaataatagaattacattctgctgctgtagacgtatatagttatatatatattataatttcgtatatattattgatatttgcaaacactcagtttttcagaagtgaatattccactccctctatatgtcacacgacctgaaaagtgggttgaagtgggaacaataagctctggagctatctgtaaaagataaacaatataataataaaaaaacataagagcaaacatgataaaaaaaatactaaatcctatcgagaacttgatgagaacccatcgataatcagtaatcaccaaacatgacaactaaaaaactaattaatactatcgagaatatgtcgataatcaagcaacattaatcaacatgacaacaaaaattattagtgttgttatctcctaccgaaattttggcagcatagcgcgactataatttaactagttcctcaaaaatttaaacttactataaacaacaaaaaaataatacataacaaaataataaaaaaaaaaaaaaaaccacccatctgaccacagtgtaaataattacagaacctacttcgctacttatgaatatttaagataatcaaactcatttaataagcatattattctatttatccgcaattaaaataactgcagaacttactttattacgatgaatatctaagatatttaaactcttctaatattgataatatattaaataaataaattaaaattgtagaataatgcctatctaatccaataaacttgatttgggttcttgaatcaccaaatattaagcatacttacaaaaataataagatcaaaaataaaattgtattagttgatgagcatttattcatatcgacaaccctgtcgataatctatcaataataactaatatcctaatttttttttttacaaaattagttaaaaactataacctgtcaagaacatatcgaaatgttgtcgataatccagtgatgataaccaacttagcaaaaaaaattctcaattatatcaatagcttatggacaacccgtcgataatcaatcgataatcaagtgagaatcaattaaaaaaatgaaattacaatttctctgcaataattcaactatcgaggatctttcgataatagctaaacttaatgattatcacatttatcgacaactcgttgataatcaatcgatattcacgcgagaatcaattaaaaaacaaaattataacttttttcaatcttttgtcgatagagaacctgtcgacaatatatcgataacatgtcgacaactgttaactttaatgaccatcaccaaaagttaaatcttatcaataacctatcaagaatctttcgataaataatcgag

SEQ ID NO: 41297 - DNA, 1189 bp, Cannabis sativa
aatattatattatactatattatacaatacatcacggtataccaaaggagcctttagaaaatttatagtacacgccttaaagggatgtgtttgtaatttcttatctattttggcattaagaaagcttttagttcattttttatcattatatacgttgtagttatttaaaatcacttgaaaatttgaatgtgccaaaatattcttttaaaaggtgtactataaatttttaccctatttttctatattaataaatatatggtatttataaagagtgtactataaattttttagaaagagattcatctagcacgtgctggatgtgaacagcacgtgctggtgtgccacgtcgagcaatgcttgatagcctagtcaaataaaaaatgcccaacactcgattgtcttctccacttatcttctatactcttcattttgaactagcagcaacgaacgaggtaatttttcttcaatttgtttataaggttttgtttagaactatcaatgtaagctatttgtgttttattttgataaatagtctaagttttggtagaaatttgactagggatattattttttagggtttgaaattagattttgaaggagacctcatgagattttttttatatattttttaaggtaagttgttaatctatttttttttttcatgttaataagttttttgttttatatttatatttattattaatatttttttttttataatgcctcgaataatactaaggaaattactattaaaatgaatatcgatttaattttttctcaaaggcgcacaattcgaagaaaaataatttgatgaaaatttaaatacctcatctataaagaattttttagaattaattattttttctactttataaactgacaagttacaatcgcgttaaacaatgtaaaaatttaaaaagtcttgttgtagtcattttgaaaagacattaaaatataataaacaatctcatattgatgggaatgaattacgtgtagagttgaagttattaaaacaaatcttacctagagaaaaaatgagaattatttacatattaattttttaaaggcatagattgttttctaaaaaaaattattgcatatataatttttttgattatttatacgtcagttgctcatgtagaaataaattttttaaagttaaagttgttaaagtcttacttgcagtcta

SEQ ID NO: 41298 - DNA, 1622 bp, Cannabis sativa
aaaaaaaaattaagaaaaaatattctggcatatgatttcaggcatggaggttgctaagaggttgtaataggaaattgtaattagtactccccaataaaaaatggtggtgactaatttttcttttcaatcattgttgtatatatttatgaataattagtatttttgctctctaaattttcgacactatttgattttgtattttaaaatatacggtttattaaaaattctcttaaaatacaataattacataattatgtcatttctattaggttttgtttcttttattgttaaaaattagtatttttacccattgaacttttacaaatataacaattttgtcccctaatattaaaagaaaaaaaatacttattttaaaaattataatattcttttaattttgaagaaaaaaataataattattattaaaaaactaataagaatattaaattaattaaaaaatattaagtttacttaaaaattttaaattattcttaaaaaatatttttaaattttatttatttgtaaacacttatcttaaaaaatcaaacaaatattttttgaagaagaaaaaatcaaacttatttatttttataaactcatatcttaaaaaataaagaaaaataattaaaaattaaataaaaatataaattgttttaaaagttagaattaaactaagaagtgtaaataccattttggaccctgtattttacaaaagttatcaattggaccatctgttttgtaaaatgaaaaaatagacccagtatttttcaaaattgtaccaataggaccttaaactgattttttatcaaaataaattttaataataatctgatgtggagatgttatgacgaatctgattacattttctgtatttgttagtgttagaaattttcttaaagtttattatattaaaaaataaaattgttgaaaattgaacttagggtcttatttttaccattttagaaaatataaggtctattttgtcatttaacaagacagaaagtctaattagtaacttttgcaaaacacagggaccaaaatagaatttacccaattaagaaagtggtatgtttgctcaaacaaatttagatttttagagaaaaaaaataaactcaaacttgttaagaaaatatttaaatatttaaatgtttacaaatatttaaattttcatatattttttatatttaaatggatttttttaataaaaaataattttttaattcacacataggacattgcctcgaatttataggcactcttttgttaagaaatgattgttactagcttgtaagagaattttgttgtaaatcttactaatttaaaatttcccaccttttcctagttaaacaaaaaatttcccaccttttccagcttctaagatatcattacattacaggtaaatttgagttttaaatgaacaaactttctcctatatcaactcacatccaacttcaattcataagcccaaaaatcttaatcttttaagtaaatggaactaatccattttagccaaagcaactcttgtttggtggagtgcccaaacatagtgtgctaaggaacccttattccatttccatcagtgccctctctaaaaccaactcctccataaatttttggtttac

SEQ ID NO: 41299 - DNA, 1673 bp, Cannabis sativa
  modified_base (1647)..(1648): a, c, t, g, unknown or other
tatttttgaaaagatttctgtgtgacagtatttttataaaaattaatccaaatttcagtatttttgtaagtttcccaattaaaatggggttttaactaaaatttttaacttttttttattgtgatgcaaaaatattatgtaaattttatactgtattgtgttaaatttttattattatttcactgttgttttttttagatgttttactattatttttaattgttttgttttgttattttaaagttgttttatacaaaaaaaaaaataatatttttgtaaaaaattccgtgtgacagtaaaattataaatctttgccctaaatttaatatttttgtaaaaatcccattaaaattgggataatttaaaaaaaaaaaaaaaaaacataaaacaacaaaaaaaattataaaattacagactatacaattttttttttaatattttacggttttttagattttattcacataaaatacgagttttttatatttttatgttgtactcttattatcttgttattgattatttgttatttgtatattgttttgatgttattttgttattgttttgatgttattttcttgttagttttcttgttgtttttttgtgtttttataaaataccgtaaaaaatatataaatagatgcaaaaaaaatatataacagtctattcataactcttctaagttaagttattattaagtttgtgaaccaaaggtggtccattaaaaaatgtcaccttaggtgaattactagtttgtgaatcttgcctagaaagcaaaatgataaaacgttctttctttacaaaaggagagtgtgccaaagaaccactaggattagtgcattcagatctttgtggaccactaaatgtcaaaaccagatgtggttaggtgtattttgtcactttcattgacgattactctagatgtggtcatatttactttatgcatacgaaataaaaaaaaaatatttgagaataagggtgaaaatcagtcggttatggtcggtttttacaattttataactgatcggtcggttacagtttttattttacgaaaaccgtaaccgatcgcttaaaaattataaccgtataaatccggtcgtacggtttttggcagtttttagtggtttttcggtttggtagttttggacggtttttggcagtttttggcgattttttggtttaaatatttttttatttcaaaaaccaagaccgactgccatgtcaaaaaaaactgaaatcgaaaccaaccgtcaaattcggtgatgacatggaaccgaaaattcggttacggtctggtcagtttgatggtcagtttcgggttatcagttttaatgaacacccctatttgagaagtttcgagaatttttagcattggctcaaaactaattgggtaaaacattaaagatcttgcgaactgatagaggtagagaatatatggatatgcacttcaaagatcatttaattgaacttggaattgaatcccaacagactgccccaagcactccacaacaaaatacagttgcagaaagaaggaatcacactcttttaaatatggttaggtccatgcttagctactcaactctgcctacatttttctggggatatacaattcagatggcaacttacattttaaatgttgttccatcnnaatcagtccctaagacacctttaga

SEQ ID NO: 41300 - DNA, 1114 bp, Cannabis sativa
ctggttttgtgctaggcgacggggctgagcagcggcagccaccacttgaaaatagcattaaggttaatgtcgacggcgctatatttgctgacacgaatcagtttggggtcggctttgtggttcataatacacaagggttgcttattgaaggagttaccaagctttttcaagtgccggctacaccagaatttgtggaggctttgggtgttaaggaagctttaagttggatcaagcgaaatcgatcttaccaagttgtcattgaaactgattgcttagtgtttattcaagccttgcgtagttcaattgaaatgatttccatgtttggtcaagttgttaatgattgtaaggttttattgaaagaacttcaacatgtttctgtattttttgttaggcgatcagctaataaggtgactcataactttgctagagcttccttatcttatcctgattgcagtttcaattttgggtctgtcccaattaatttgttaccttctttggtggctgaatttaatggttaataaagtatgattttccattcaaaaaaaaaatagtatgttagaacttacaattacaaattaagaaatttgaccattcatggttaaatattgtgcgtcgccttttcgtattctacctataaaaatataagcatttaatacttcgaaaatccttaactcaaaaatatcctcttcatttggaagccatatacttttactaaataaccttcttataaaattattttatttttttttttatttttattaactaataaagtaaataactaatatatccacctaaacactcagttagggctggcccaagcattgggcagcttgggccattgcacaagacccccattttttaaggcccaattttttttttaaaaaaagaaaaggcttaaaaagggagatttttaattatatacataaatttgtaaataatcacaaaaatgacgctaacagaaataattcccaaaacgcgggcagcttatgccgaatggtaagctatttaatttcatcttttttgattctctttcttacttaagccattttcaattattttcttttctaaaaaaaaaacaaaaagaaatatttcattttgtctctacttttagtat

SEQ ID NO: 41301 - DNA, 1202 bp, Cannabis sativa
tgttgtgaaacaacaactcagcaagaacaaatgtagaacaagaatgatcaatgaaaccagcaatgacaataatcagagctatggagtaatgtttaaaccagaaaacatatgcaataaaacataaagaacacaaaggatttacgaggttcgagcaatataacttgcctacatcctcggccagaagcagccacaattatggctttgagcattttatttgattgagcttcaatgtgagagattacagcagatacaaaattacacactcagagaagcaaagtttcagtaatttttctctctaatggcagtgatcatagaataatgtcactccaatttctcagcactcaagacaactctcaatcactctaaaattctctctttctaactgtacaatacttctccaagatcaatccctgcagtgtgaaagaatgaccccttaaatactgatgttgcatcagtgtttcataatgcccgagcaccaactgtcataactaacagttggttaagttagttaagttcggtgagggcagtgatgtcatttgatatttggacaattacttcaacaattatccaccttggacacatatcaaatgagtagaggcacagagatgagttgcagctgttctggacttatgcaatctcaagcagtgagaatgctgagcaagttcagacaaagtctgaactttgcttgaggaacatacttggttaacatgtcagcagggttttcttttgtttcaatcttcttgatctatatttccttccttgcaatcacttctctaataaaatgaagcttgatatctatgtgcttggacctttcatggtacattgggttttccattaagtgaataacactttgattatcacaatggacagtgatgtcttctcctttgaaaccaagttcttctgtgaaacctcttaaccaaattgcctctttaatggcttcagtagcagccatatattctgcttctgtggtggatagagccaccactttttgtaaattcgatttccaactgatgcatccaccaaaaactgtaaatgcataaccagtgatagaccttctggtgtcgatactccctgcatagtctgagtcaacataccctgcaatcccagtttcaaattttccattgtctctgtacagcaaaccaacattagatgttccctttaggtaccttagaatccaattcacagcctcccaatgtgtcttg

SEQ ID NO: 41302 - DNA, 1363 bp, Cannabis sativa
actgaaatgcatactatgtaatttgccatattgacatgcttgacaaaatggaagagagttacatttagtggatgaatgtagactgttgagaacatttttaactatccttgaggaggcatgacccaaccgatgatgccacacttgagcttctgtaaaagttgcagaggtattttcttgagtgcaactgtatgcagcaggaagaggaagaagtcctttgctgaattttgtagatgtagcactcgactgagaaagatcaaggtgataaaggccatgtttaagatggccccgcagaagtgcttggcccgaaatcttgtccttgataatacatgcattagaatcaaagagaaagattatattattatctgtggtgagtttggaaatacttaataaattctttgtgatattgggggcaagcaacacatcattgagtagtaattttttggtatgagaaagagtggaaaattcagtttttcctatttgattgagagtttagagccattaccaacagtgattttggctttgcctttgtaatcctgtgtggtattgagagtttgagcatcgggagtcatgtggtgggtggctccactatccacataccagccattgtcttcagctggacaatttgagtctgaaataagggcttgtgggttgtgaccttgagattgagatgaaagagtactggtctgcggttcattgtcataacgatgatagcatttgtaggcaagatgaccaatcttgccacaaatttgacaaacagggcgtgaaccacggccacggccattcgaagcaccacgattgttggagtttgagcctctactgggcatagtacttcgtccctgtgattgacccctgccaggattgttgctgcgattgaatccagaggtatttttgttagattgggcataatttgcttgcatagtatcaagattcgtcgaatggagttgttcaatgcgcatttcttggttctgcagcatgtattgaacttcttgtaaggtaagagcatcggcactagcagtcattaacaccaccacagtttcgtactcgggaccaactcctccaagaatatacatagccaattcttgatccgagagtttgtgaccagctgcagcaagagaatcagcaagattcttcattttcaaaatgtactcatcgatgctcatggatcctttctttgtggtctgtatagagagacgaagttgcagttgtcttgctttggattgagtggcaaaaagactctcgaaaacattccaaatctcagcagcggattcacaatgaagaacatgccccaacatcgcctcagaaagggaattcattagccaactcattagaagggcatcacaacgaatccaatgatcaagaacag

SEQ ID NO: 41303 - DNA, 3365 bp, Cannabis sativa
  modified_base (438)..(443): a, c, t, g, unknown or other
aaaatacacgatttgctcgcacagttcaaaagctacgctctcagacaaattttaagggaagaaaacacgactgctgacgcattaacttggcttgcgaatagtaatgtgtgatagagcgaatttggttcctatccagttcctcgaagaacctagcatcactggcacagaagagattaaaatgattgatacttccccaaactggatgacgcaaatagaaccctacctcaacactggggaactcccagataatcgaaatgaatctcgaaagatgagaaggaaggttgcacggtacatcatagtagagggaattatgtacagacgaggattctccatgccattgtttagatgtgttacccaagaagaagctgcacgaatttcgtctgaagtgcacgatcgattttgtggaaaccacaccgccgggcagagtttatctaagannnnnntaaggtaaggttatttctggccaaaaatgatcgaagattcaaaggcctacgttaaaaattgtgataaataacagagatttttaaagatacctcgagctccgcccaacgagttaactcagattcaaagtccttgtccttttgccatttgggagattgacttgatcgtagacccgtacccaaaacttgggtccgagttcaagtctggatttgagtccaggaattgtaatcagacttaggacacgaacctgaaccccgacacagacttggacccaaactcggaccaaggacccagaccgggataggagacacagacctagaattaggaaccaaacctagattggggacccaaactcaaaattagagccagaatcgggaccaaggactgggactgggacccaagacctgaccccgatctcgatcctagacccaaacccagacacggacacggaacgggatgcaagattcgaatcgaaacgagactgggacaaaagattgtgatcaggatcttgacccacgactcggggcttggacccaacccatagtcagtgtgtagatcttggaatcgtaccaagacccgaacttggatccatttccagactaggacccaaacaaaaactcgggcccgagacagaaattggaacaagaatcgaaatcaagaccttggaataggaattggacctggaaccaaaactggatttagacgtgaaaccaaacacggatccaaacccagaccgtgatcgaaactcgaacccagaccaaaacccggacccatacttgtgccagtacctgcgacccaggacccatgacccgaaaccttgaccagaacccaaactcgtaccagaacccgaacctaaaccttgaaccagacacagaccaagacctgaacctagaaacggactgaaacccaaacccagacccaaacccacaccgagacccagacccagactcatactcgaactcagactcggacctagatcaggactgggacccagacccagactaggaccgaggcttgaacatggactaggactagaactaggactgggactgggaccgggaccagatactgagacataggacctgagaacctaaccgtgacccagacccagactaggccaagacgcgtgacaaggaccagtaacgaacacgcactgagacatgcacacggacttggaccctaacccggacacggtcgtgtacccaaactgggactgagacccggacccagacctagacttaggtcccgatcccagacccagactcagacctagatagggatctggatacgaacctggactcgaacccagacccagacccagaccgagatcgaaactcgggaccaagatccagaccgagaccgtgacccagacccagacttggacccgcacctgggacccgaacccagactcaaacaggaatctggacctaaatctatactcggactaagactcggaccaggactcagaccccgacctagatttagacccaaactcgaacccagacactaaatcgaaattgaaactaggactaggacccaaacccaaacattgacccagactgagacctaggactcggaccttgacctgggccttgaaaccccgacctagatcaaaactcaggactcggacccatacctggagctagactcaaatcgagatctggacccaaccaaagattggaactctgacccagactcggaccaggacttgaacccgatcaggtcctgggctcaaaccgggacctaggactcgaacctggattggggacttggacctaggacacgggcatcagaattgggactaagacccagaatctgaccctagagccggacaaggacctgggacccgaagtgaaactagactgggacccgagaccgtgatccacatctacactcgaggcttgtacctgacccgtagtcagtgtttggatctaggacccatacgcagactcaaacccaaacccagactcggacccagacccataccccaatctttagttcgactccgagtctgggtttgagttcgagaactgaaatctaactacgacctagacctaaactcggattgggacgcagacttaaatcaaaactcggatcgggactcgagacacgaacgcgaacggagacacagacttggaccttgacccatagcgggattggagactcaaacctagacccaggaccctgacctagattggggaccaaaactcaaaattagaacaataattaggacccaggactgcgattgggacccaagacctaaccccggtctcaatcccaaaccctgacctagacacggacacagactgggacctaagatccgaatcgaaaagatactgggacccaagattgggatctgaatcttgaccaacgacccggggctcggaaccaacctgtagtcggtgtctagatcttggaatcataccaagacccgaacttggaaccatttccagaccaggacctaaaccctaactcggacccgagacccgaattcgcaacaagaaccagaatcatgaccctggaataagaattggacctggacccaaaactggatctagacgcagaaccgaacacagacccaaacccagaccaggatcgatactaggacccaggcccaaacccggacccagacttgcaccaagacttgtgacttagaacccgtgactcgagacctggaccagaacctagacctgtacaagaactcaggcccagacccagaccttgaccatgacctggaccaagacacagactgaaacccggactcagacccaaacccagacctagacccggacccaaacctggactagtactataactcgtacttgaacacaggactaggacccggacggagatcaagactgggacccaaacccgaactaggaccgagacctaaacctggactaggactagaactcagactggga

SEQ ID NO: 41304 - DNA, 1904 bp, Cannabis sativa
  modified_base (1070)..(1071): a, c, t, g, unknown or other
  modified_base (1366)..(1367): a, c, t, g, unknown or other
cacaaaaatgggaaaaactacggttccaaaaatttccccaacaggtagaccggttccaaactagaattccagttttgcggggtttcctggagaccaacaggaatttcagctcctacaggtccccctgaaccggaatttcggttcagtgcaggaaacttccaaaattccataactcatccaaaagcaatcccaaatcaattgaaaccttccagaccagttttgtagaccacgtagaacatatctaaagcaataaaacgcctcaacatgcacagaataaaaatccaccatgtgagagcaaagtttgagctcttaagctcaaaccttgagcaaacctcatacaccaccaaactagctctaaacatcaattctaaccataatttaacttcagaaaacacaacaaacaaccatagcaagaacaacaagtataacctcaatttcatgcaaaatcaatcttttaaaactcaagtaaactagtgaaggaaaagctaggagcttacattggcttggaaatcattaaacttgctgagaattacttgaattgagaggaaaacacaaccaaccctagctggtctaggggtttcgaaagagagaagcaagagaggggagagaaagctttttccttgattttttcttaatttgaaataaaagaataaaagattttggttttattaaattaactacaaccaacataacactaaaaatcaaattaatatatcgcacaaaaagacaaaactcttaagagcaaaattacctttttgccctaccatattaataaccactaaaggtcactaaggggtattttggtaaattttaaaatttagacaaattccgacattcccaatgtctaactatattgccccactatactaaaaacactataatattattttaatagccaaacaccgcgttccaatgttgacgggcactgaatatgcaaaattatgaaatttctatatatgacatataaaatgcattttgaattcaaataaataatcgtaaattaataatttagaattaataaataattttcataattaaaccataattatcttctaatttccaaattaaanntaagcggtctttacaattatctcctttaaaaggatttcgtcctcgaaatctaacctgaataactctagatattgggctctcatgtctgattctaactccaaggttgcttcctccaccttgctatttctccatagactttgactaaagctatggtgttattccaaaggactttatcctttctgtcaagtatctgaactggttgttcttcatatgacatatctggttgcagcttaagattttcatagctaagtacatgagtagggtctgaaatgtattttctcaacatagagacatnnaatacgttgtgaactgctgtaagagctggaggcaaagctaatcgatatgccactggtccaaccttctcaagaatctcgaaaggtcctgtaaatttagggcataacttgcctcttttcccgaaacgcttgatccccttcattggagacacttgtaagaacacgtgatcccctacttgaaactcaacatttgtccatttcagctctgcataactcttttgcctactctgagaggcaagcattctagctttaatcttctcaattgcttcactggtccgctgtactgattctggacctaggtatttcctctccactgtctcatcccagaggaggggagatgtacactttcgggcatataacaattcatagggagccatccctatcgtactttgataactgttattgtacgaaaaatctttcaacggttggtacttactccaggagccctcgaaatccataacacaggcccgcaacatatcttcaagtatctgaattgtccttttggactgtctgtaataccctaactagcataggcgtatt

SEQ ID NO: 41305 - DNA, 1221 bp, Cannabis sativa
aaagctttgttgttagacttcgatgaacatggcccttctcggatctttcgattgccgtgtggctttgagttgagacctgtcatggcaatataatatttgtcctgttttggctctagtctctatctagtgtctacattttttttgtcttctctctatcgattgaaaacacaacttcatgtctcaaatatgagacccccacatctcatgcattaaataatacatgatattatttattcggtgaaagacgatcacttggtagtgtatcattacctttttaatagatgttgaagattcaatgttgtctgaacgattattatattttatgattcaaccgaactaactgcagagtttaaaataacgccaaacatatgcacaatcagtcacctcaaccaaacgtgttttggcttttggaaacatgctcctcattttccaatcaatttataaggaaaccagcttcactattttttcccttttccagctttaaccagcagagcatgaattcgtgtttaataaattaccgagtatttgttttataaccataaataatttatcaatcgatgatgaaattgttttattaccttcaattatccattgaaattacactagcaaacgaaattactgttttattttgctctagtaaaatcatatcaataatttaattcctccagttgataactcatcacttgtaattttccatctccaaatcctcagagaagcattttagcactattgagacttgatgatatctcaacaatttatggggagcaaaattttcaggatgaaatagttacctatatttataatttcgttataaaaatataaataaataataataagatttgatggacagaaaggccaaggtaaatatatagaactcttgtattagtcatatatatatatatgtatcactattaaatgattatatttcttttaccaataataataaattattaataggtaaatgttctttttataaaattaaaataagtataattaattaattaatatatttaatagatttttttagtaattaatatttataaatatattttttttatatatctaaatcggaatatttacacagggtgctattttttataatttttttttttattgttatacgcatatattttcttttttacggtataatctacatattatactgaattagcataaagttttttctcttttatgctttttgtcacttcaagatatgttttt

SEQ ID NO: 41306 - DNA, 1669 bp, Cannabis sativa
  modified_base (1629)..(1643): a, c, t, g, unknown or other
ttctctttcaaaattttctctattttatagatcactgttttccgaaatttgtccaatttatacatcccaagtgtagaaacatgaaatcaaagaaaaaataagcataattctattccaaagataataataaaaaagaaaaacaactataaaatgtgacccgaaacttagactaaaaatagcctaacaagcatttttaggattttggtgaaatggaggagcattgttcttaatgtttttgattttcgtttataataatggataaaatctaaatagtgtatatggactaagtaatttacaattgttgtaatacttgagaactagtagtgaaatgagttcatagtgtgtattggtgggtatatatataggggtgagctttatttttgtatttagaaaaatagttttttttataaacatgataggaaaaagaaaataaaattaaataaataaataaattttatgtgtttgtgggcttggactaggaattttggattgggcatttgataaaatattaaagaatagggaaatgtattttttgagtgtttgtatccgtccttgaattgttgagtaacaaagaatgtgcttattgtgttcctcatccattttaggattattgaaatagaaaaaagtgtagaccccaagctatgtattcatctcgaaattacggaattccaaagggagtttatctctatgtaggtggatggtgggaatacgatattttctaatagtattgttacttacattgagtagtggaaagggggtatcccttattctttgtccctagtatatggttgttagatcagcacattccgatattgatagtggtcgctgacaggttgtggtccttacggacatggatggtgattttgatcgagaggtttcggatgcctcgtctctcgttcctgtcaccgtcgcagaagagtactatggtcaggatgtagacgaccatgatgcaattgggtaagcggtggatggggaggaattcctagtaataggttatgccttagcccaattagtgaataaggatgatggaccgagtttcctaggtaaatcacagagtattttacgcattaatcttggctctaaattgatggttccactcctagctcaaatgagattggcttatggaatttctcgtaatataaaaatgaggctacctaggagggaggaacgaatagactgggatgttcctaattggtgtggcatgtattcgtatacctttttttgaggcttcaggtttccttttccaccttttgtttcgtcaatcttgaattagtatcagattgctcctagccaactgatgcctatttcttggatattgtattgagaggttctctgaggtatttgagatgagtgttgacttagtagaattttatgctctctacaccgtaaaagaatatgataaagaaaatgggaggtatagtaagtcgaaatgaggaccaatttttaatttggaaaccgaaatccgcggaccgggattggaaagaattttattgtttcttccatggagaagaaatgttcacacctggagctgataggttctctactagttggagggtgttagtgttggaattaattttaccaggatctagatttactaacaaatatattggattaacaacctaatatgannnnnnnnnnnnnnnaaataaacacatataaaattagaaaa

SEQ ID NO: 41307 - DNA, 1208 bp, Cannabis sativa
taaactaaatatgcattaatttaaaccaaaagatgataacaagttttaagtttagcaaggtgactctataatatacctcaactttcatcaaatacctgttcctgtagacgagcatagttagacacttacattccaagcaatacttacattccaatatgatatgaaaaaaattattgcagaatataaattcaagtacccaaatcgttggaggttatttacattcaaatattggaagaggttggagatcagaggttgcgattgtgattgcagaggtgtagtgtcgattttgccggtggaggaggcggaaggacgcaggtgatggcagaggaggcggagcttgtgtgcattgggtcatgtccctattttgccctcaactaaaattaaattatgacaacttgtatttaaatactatgttttattcacaagtaaatttttgttacactagaccaaaatatacaattagcgacaccagaataagtaacatttgttaaaaattatgagaatagcactattttagttacattccctcaaaagtgtaactttaaagaaaataagtaacatttgttttagtaacatttatgtgtaaatgtcataatagatataatttagtgtcacttaataaaaaatgtcactaattgaccatcatcaagtttcactaacactaataaaaatgtgactaaaatattaattgttttaaatatcactaaaaaataaatttattattattagtattataaattaatttttaaaaaataacataatatatacatttgtaacagaagtgataggtgatatttcaataatattttactagttgtacacttgtgtatacagtaataggtctatttggcacttaacattcaaaaactaacggaagaagtgttgaccaaaacgattgtggaggttgaggagtttagtcataatttttccagtctaggggtttaaccgtacaaaacttcaaagtttaaagagtttgaccgcaaattactcgtgaaatatttacttatttcttgctaaaaacttcaatcctaatctttaggcataaaatttgccagcattctatacatcgaattatgtatgaatatctcattaaatttgcaaatattcgttaaattagtctaatttcacaaattttttaattttttttttttcaaataaactctttgttaacaataatttacgtttaaacttagggtaaataccattta

SEQ ID NO: 41308 - DNA, 1983 bp, Cannabis sativa
tttttttttttttttgtaacagtttaaaatgcaaattcatatattattttgccttgacaaatcacactcacacataccgaatcactttttttttttttttttcatttattctagattggagaatgctaaaagggaattaatgcatttattaatattatcagaaagaattatatggttaagaattaattaaatatatttttttgataaatttaatcatacatcattaacaatatatataaaaaaagaaagtactgaaaccttttggctgtagcattatatcatttggaaaattttatggtgtatgaatcaactttatctatttcaggagccactaaattttttaaatcaaattattttttataatcatttacattttacttatttaaggtatttaatcaaattttaaaaaatttcaaaaaaatttaagatgtcaaacaaaagattcaaatgatttatttacacatgtgacacttttaattatttatacacagcttgactgtttgaatactattttctatattataaattattctaaatttttaaaaaaatttacacaaatttttattaataactgtaacgtatactaccataaaaaattaaactatttttttttttaaatactgaaatagtagaaaatgaattggtgtacttttttagaggtgcattataaaaacactttatacctattgcttttattatttaaatttataaaataatttgtttggtaaacacgccaagccctacatttttctactaaaaaagtaaaggtaaaggactttcaatagttatagtcgggtttatattttttttttcaggtttttatttaaaatatggatcgtattatgtcgggccatagaaatatatggataattccgtactatgccataaaaaaatgtggctagtatcctaccgtgcaacaattttataaagtaggctcggtacaacttgtaagctcggtaattttgtaccgtactcgaaaaattcgtattgtatactttatttgggccaactcattttttttaagtagaccaacacattctcttatacgagcttaaatttattctatatttttgcatttttatgataattgatgagctaatcagctaatcactaaaatttatgtgtattttatagttttaattacttttatattttttttttaaaaatagttacacataattatgtaaaaacaattataattattagaatttgaatattagtagtatcattttagatgataaataaatattaattatcattcttattattatcaaattatctgatcttttaatatgtcgtgttaattcgtaatatcgtgttgtgtcatgcttaatcttatatttttttgtatcgcgttatatctaagcatatttttttttcatatgaaattgtgctcatacttcttagactcgtactgatttcatgtctcatggtaaaaaattcgactcatatttataatactactttcctgtcactttattattttgggcaactccaatgaggaaacccaaatttagtgttaaatcaacactaaaatgatactattttaacactaattttttttccaataactacaacactaaaaatatataatttattattatattattttattaaattatttcacaccataatatgtatataaatataaaaatttaatcattaatatattattttaatgttaaaaaagataagtataatttggtgtagtctatagtgttacattaaaaatagtgggacactataaactcccacatatatggaatagcatttagtgtttcattagagcaattttgtgtctaaatttttcaatttttaaaattttagtgttctattggaaaagtcctcaaaacaaaaagaaacagatttagttttatcgagaagacacgtctatatcaatttgtttttttaataaacacgtccaatgtgtaaataaaaaataataagatttattgttacgaggaagacacgtcagtgtataac

SEQ ID NO: 41309 - DNA, 2955 bp, Cannabis sativa
aatgccaaatattataatgagacaatctgcagtgtaaagcgtaaagaattcactgatctggttcaatgtgatggcatgtcagtaatggagtacacaatgaagtttgattgtctagccaagcttgctctgggtatagtgcccacggactttagtaagaaagaaaagtatctggcgtgtttaaatgcaaagattagacacgatttggtaattactacaagtgaagcaaggacttatgctgaaatgtttgataaggctctgtgagctgaaggtttggtgacatttcttcaagagccccaagagactccaagtgttggtggaacccccgctcttcctactcctagatatggtaggaatagtggtaattccaccactgacctgcaaaggaaaactaccccgagatctggtggtttgggacagagcaagaggttccaagggaaccaaggtagaggtggatgccagggttattcttatcctaagtgcccacgttgtgagaaacatcatcccagagagtgcaatcggaatacatgcttccagtgtggcatggttgggtattttaagaaagattgccctcaggcgaagaaagaagagcagaagcaagaagcaaaacccgtacctacttgggtatttgctattactaatgatgctgcagccagtccatctatggtgacatgtcagcttcttgtcaacaactcctattttactgtattgtttgactctggggttacacactcatatgtggcatcacgagtaattaatcaattgggtaggccttgtaattttattgagagagggtttggaaccctacttcctagcagggaattgattatctccaaaaggcgaattaggtctatgtaagttagagtggaaaatagggagttgagtgttgacctaatggaattggaactaacagagtttgatatcatacttgggatggattttctatccaattattcaaccagtattgactgcaagcaaaaaagggtaacttttcaaccggagggtgaagatccatttgtttatgttggatctgttcaggggtctcaaatcttgattttttcaatttttagggctaagaatttactacacattggacatgtaggatttttagcaattgtaattgattccagtagacctgaaacatttgggctaaaggtggttagagttgtaaaggaagttcttgatgtatttcttgaggagttaccgattaccaccacaacaagagataaattttataattgatttggcacctggggcagatcctgtttcgaaagtgacatgcaggatggctttagtagaactcaaggagctaaaatataacttcaaaggaagactgtattttcaaagatcgacttacaatatagttatcatcggctgagaatacaggaagaagatattctgaaaactacatttcagaccagttatggtcattacgagtttttgttgatgtcattcggatagacaaatgcttcacctttatggatctcatgaatagagtattcaaggatttcctcaaaaactatgtcataatatttatcgatgatatccttgtgtactctcacagaagaggagcatgagcaacatctccgaatggtattacagcgactcagggatcataagctaattataaaatttaaaaagtgtgaaatctggttgttggaagtgtcctttctagggcatattttcagaaaagatggaattatggttgatccgggaaagatcgaataagttaaaaatttgccgaggccaagaacagtgaccaaagtgcaaacttttctcaggttagtagggtattagcagcgttttgtcgaaggattatctaagatctcaatgccactaacagagttaactaagaagaactaacagtttgtatggtctggcaagtgttaagtgaattttcaagagttgaagcaacagttaataacgacaccggtgttagctttgccttcagaccaagaaaagttcgtcatttattgtgatgcatccagacagggtctgggatgtgttctaatgcaagttgatagggttatagcttatgcctctcgttagcttaaggaagatgaacactattacccaacacattatatagagcttgcagctgtagtttttgctctaaaagtagggcgacactacctttacagtgaaaatatgagatttatacagatcataagagcctcaagtttttcttcacttagaaagatttaaatatgaggcagagacggtggctggaattagtttaggattatgattgtgagattctgtatcatcctgggaaagccaatgtagtggtagatgctttgagcaaaaaatgtcccgggcaggttttcaatactgtgatgatagctcctcaattagccatagaaatgattaaggctaaaattaaatttgtggttaggaaattacataacctgacactttattcagatttgttagaaaggatcagaaagacacagttgacacagttagaagaacctgaactagtaaaaattcaagatgaggtattggccggtcagcctaaggatttttcaatctcgataacagaatgttactttacaaaactcaagtttgtgttccagataatggtgagcttaaaaaggaaatccttgatgaagcttatactataccttatccgttgcacccgagaaccttcaagatgtatcaggatttgaaaccctattattggtggtgtggaatgaagaaagatgtagtggattacgggactaaatgtttaacatgtcaacaaatcaaagcttaacattagaggccgacagggttactgcaaccattagcacttcctgagtggaagtaggaggatattgcaatggactttgtagttggtttacccagaatcacgggaatatatgactcactatgggtcattgtggaccgtttcacaaagttagcacatttttaatcggtaatgacaacctacacagtggatcagtatgtagagctata

SEQ ID NO: 41310 - DNA, 1163 bp, Cannabis sativa
ctactataaataggagtctgatttaagaaatcagaagacctattttcacactaaaatttcaaaatctattgagagaaaaaggaaactattttttctcttagttgttcttgctcatgtgttgagaactcaacaagaacaaggttaaacaatttattctaataacccacactattccttgtatgtggtggatcgatttggaagacactagtgtgagtccaaattgcatattcctcatcaactgaattaagggatacaacatacagaagttttaaggataccctaataggcttcaagaggtatactttaaacttattgtttttattattttgatttaatgtacacacatatggaaatcctaggggctacggtacaatgataattagataatacaaaactcttccgccgcgtccttgatttagtaccataaaaccaacatcgagctctgccacaggactttgtatcaccctcaaatagatgggaaaactaaggttgtcaaccattgccttaagacccatctatattgtttttcttcaaactatcccataggatgggccaactggctggcttgtacggaatattggtaaaacaccactttccattcctccttaggttgaacacccttcaaagttttgtatgggcatgacccaccttccttggtttgttatttaatgggttctacctcgatattggttgttgatcagaggctgaagtgctggacttcttccttgatgatttgaagatgcatctcttgcgtactcagtaaaagatgaaggagatggttgacggttctcgcgggcaggtggagtttgctatcaaggataaggtctttgtcaaattaggaccttactaccgaaaatcttaagccacttgaaagaacgagaagctggcaacaagttactatgattctttttcgattctgaggcgtattggtaatgtggcttatcgttttgaccttcttttttcggctgccatacatcttgtgtttcatgtgtcacaactctgcactaccatttgtaatgctcactcttccatcaccctacccctactttgactgccgatttagagctcattgttgagttgaatgagcttttaaatgtttgccaaatttccacgtctccagatcaagctgtggaggtctttgttaaggattaaggataatgcag

SEQ ID NO: 41311 - DNA, 1195 bp, Cannabis sativa
ctcttgatgatttgtcctataattgtagcagcaatccagtctgctaccaagtaaaatgcccagacaaaccttgctatgaggttgcttcttgaccattttctaacaggtgccaaaactaacaagaaagcttgcagtgagaggcttaccaacatggtcaccttcagtaacttctccacagtagaattgatgactgaagacattgatcaaaccttgtgttgctgttgtcaaaacagaattagcacataattatatagcaaattaaaatggtcaattaactaattaaaccagtactagtgttcaacttaccagacagattttagcttcgatccaatttctaatgtagtatattaatagatatgttgaatatgtctatggcaagttttatataaattaagagcgtgtttgttttatttgttagctataggattaggtggagaaatcattagtataataatacataatatattattgctgctgtacactttgagttgtgtatttatattttatattctccaacagtatgtaggggacaataattatcaatatttttagggtaggtttggtatgctatgttaaaaggtcgtattctatagtacaatgtttggactttgatagaattttgtattacattaatacaatatgaattatttaatacataacaaataatcaggatcagactaatgttcggaatttggggctaggaccaaagccaaggtctagacggatgctagggtcgattcgcactatttgttatagtgcattcaatttacattaagtgcggatttcatattttagatccaaactagttcgcacaataatttaaatttaatcgaatctaatttataaaagtgcagattgaattaattatataaatttttttgaattaagtttttatttattacaatatataatttagaattcgaatttaagactttcaatacacacagttttctatagccatttaaactagcctcaagtcattttcaattaattatattagattagtcactttttgttgttgtattattttttgagcattgctaattgttatagtggtgcctaataccttctcgacatgctgcgttgtaattaactaatgatactctctaaaagctattatattaaattatataaaactctaggtgaatgctaagcagtactagtgtcattcttttattagtattccacatagcta

SEQ ID NO: 41312 - DNA, 1026 bp, Cannabis sativa
cgatcaggattaaaattagaaaaacgaaccaaataatcagtcgcctaattctcatcgtttgacaaaaaaaattaaaataaaatcatatgaaaataattgtatcacagttaaccttaagaacaactatattctattccatccaccgctcagaagacacaataatagaaattattgcagttgattcaacctcgtagttgagcactcaactattgtgtaaggtgtgtaactacactactaacagctccttcagttgcaaaaaacttattattctcaaccactaacaacgatttaataatggcgagccattgaaaaataaaaaagaactaacaatgaaacaaaataaaacaatagaaaactttgtcgcatagataagactaaaacactcaaaattataccacacacacaagagtaaaacactcaaaagcatatcacaaagacaagaataaaacactcaaaaatatgtcacaaagacaagactaatcgtagtagcaaaactcgaatgacagtagcaaaacacaacctcgatcaagccacacctaagcccagggaaggtcggcgggcctggccaaagaaaaaaaaatacaaacttcgatagctattgatttagaaaagagaaacctaaaattttctattgatttagcacaaaatacaattttaggtatacatataatatttttttgagtaatagtctatatatagcacacccctaaaagaaagtttaggtacatcttctatttatttcgataaagagtagaactttttaatttaattattttttatgattgtttactttgaagttatttaaaaccacttataaatttagtagtttatattgctaaacataaagtataatagacgttacttactacgtatataagaaaacatatatatatcaggcgtacaataaaaatatttaaattctatttttgacagtataaattattagaatttcttaaaaatttatatattattttgaataactataagataggcgttttttttggtactactacaaatattttctat

SEQ ID NO: 41313 - DNA, 1377 bp, Cannabis sativa
gcaaatgaagggacttaatattatcttgcaagtttctagtttattcaaataatttttaaggaattctgattagtcggttttagataaattggattattgttttgaatgttttttggaagttttagttattagttttgttgaaaatagaaataagtatcttcttatgtttaagaaaagtgtatctagttttcatgttaagaagtttatttgctcaagtaatgtcttaaataaaagtttatttttgcaggataattattattcagtggtgccatatttatataaaatatatctttaatttattatagttgaatattacatttaaaaatcattgagactattcatgaaaattggttacaaaataatggtataattgaattttcgtgtggtatgactagagtaagaattagttgattaatagtctataaatagcatataaaataaataaatactaagtaaatgaaatattaggaaaacgtgacgacggaagaaaaatgatttatatatttataggccataaatataattgaaacttatttctacacatatatttaatggttgacgtggttggtggaacaagcattgaaattgtttttcaaaatccttacataaaatattaatttgattgctttacacttatatgttttaagcgtcattactattagtcagtcaaaataacttagaatgagagaagtatataattattattattaaaagatcttatataattcaaatgaggttaatattcttaatattcaaaagagttctttaagttaaaagattggttgtcaagtgtgaagccgaattaaaataattgaggatatgaaaatttaggaaatttgatattataaaattattcatttaatataaatattaagttttaaatggtaaggaatgatgcaagtatgaaaggataatagtaatttgctttttattgtcggataggtatcattaagtataatttaatgatattttggattttagttatacatttatatagatgggtaataaagttatggaatgttattattataaagataatcataatatatatagtatttaaggaagataaaggagtatcataacaagataattaagtttgatggatttagaaggaaagtccaatgtgaagagactttattctatataatattatattgcgagtgctagtaagtttataaaggagtatcaccaagatatcataaaagctatatagtctattgcgagtgctagtaagtctatatgaggaatgactatcgttatttggaatgttagatgtttgaatggaaaggatgcaatacgacatgttaagctacttcttcgagagttcaagccagatgttctttttttgatggaaacaagattagtcaaaggtaagag

SEQ ID NO: 41314 - DNA, 1592 bp, Cannabis sativa
ggagatactctaacttgtccacctcagcaagtattcttcaaattttttactattagaaatgtttgatgacatagatacatttttagcattttttaatatagcatcttttacatctcctctttcttattttttttttattattttatcataaagtaagaaaatttatttatttaatatatattatataataatataatagtattttaataatttttagagatgtttacaattggctcattttagaataaaaagtgtaaaaaaataatgtgaaagaaagataaaataaaataatatatttttaaataatgtgtaaatttttgagactcttaaagaaatattaccattggacatgttagctatatttacatctctattttttactaagtaattgttaatttaataatataaaaatatctttaattctatttttttttatttttttatttttatttttttagaaaaatcaaactttcatggaaggaaataaggccaaaaaacaaaagatccaacaaacatattaatacaaacaaaatgcatagtgctgtagctgtttactattacttgtatttatttttagaaattaatacaaataaaacacatacaaatggcagtttacttattactaaagctcaaaaaaataaagcccaaaaaagtacaactcaaaaaaataaagctcaaagaaatggtgtgtgtgaaaacgagatgagagcttgagagtggggggctcccttcaatcaatatagaaaaaacataatataattacttttaaataatctgatacatcttttatattaaatctatatgtatttattccttttgaaggctctgattggttaaaaaaagtacctcatagcaattccttatatatatataaacacacactaaccctatctcaaacctgaccactattcttcttctcttcacctatttcttcttcatcctcattcatctcttctttttcttttaatatgaacatttttatattaatataataaatacatataactgagtttctatatagttaaaaataaaaatatatatgtatttatatatatacacaaatagtaaaataagaatcttaaacccagatataaacccagacatatgttacagagtataaaaattaaattattaagcttcgtacagacttaccaaatcaaaaatcaaattagaaaaaggaaaaaaaaataactacataaaaagttcatttcactaaaacaactgcaaactcaaatttcatcttctccacataaaaatcataaaagctcatttagacattcaatccttctctctccttgagctcgtcattcatggtagcctaacccgatgactgtttcccaatcacctatggtcaaaacgaacctcagtagcgcaatcctaaagcctcaaaagcccaaattcgaagtccttttcccaaatctggttaattctcttcttgaccttagatttggtcaactaatagtggagctttatttatgattgacaattaccacgtgtaaataatataagaaaataaaagaattggcacatcaatttatagaggttcaacccccttgtttagcgggtagtgacctattccccttgtagttgta

SEQ ID NO: 41315 - DNA, 1402 bp, Cannabis sativa
  modified_base (1328)..(1348): a, c, t, g, unknown or other
tgaattgcgtctcttcctactaatgttgttaagtcttcactacgctccaatcttacatgcgtagagctagcagctaaaagaccgcttggaggagttggcaagcatagttcatgagtacttacatcagtgtctatggcatgcgtctgtgattcatgagactcatgtgatgacaaaagaattgaatctcttcctactaatgttgttaagtcttcactacgctccaaacttacatgcatagagctggcagctaaaagatcgcttgggggagctggcaagcacagttcatgagtgctttgatcagtatatgtgtcatgcatctaagataaagaaaacagattgagagctctagagaaacttgcaaacccggttgcctgcacaagatatatacatatgtaagtatttatattatactacacatatacatgaaatatatatgccgaaaagacttccatacctttaaaggtgcagttgtgggagctaattcatgtgtgatagtactttgaattgtgctgctactagaagaagggacaagtgggtatcatgtagtgaccttgaaattagaaaaaaaagggatctgtaatgaaaaataataataaatgtaaaaatatatatatggtgaaaactacgaatagattaccataagcaaaatatatatatatatatatacatactactaatcaagttcgtggtagcatcgctgtcaccattagttcctgaacaatggaagggtcgtggttcagagtttggtcgaactgctacatcattcccgtgagagttaccacccaaagcgttagaaggtttacctactaaagctactattacatcatctcctatggacccgatattaagattggcaggagtatgacgctcatcaactaaatagacttcggagggtgctaaaggacgcgacttttgcgaaggaacatacacccctgtttccaaaaacaaagtcatattatcttgtataaactatcaaagatttagcattattaagagaagatgagcgagtgaggagatacctgacgatggacccacgtctttctctcggtcacaagtctcaccttgactgattaatccagtacaatgatgccgcatccatatgttaaaaaatttaacagaaaccccaccttctctttctttatcgggtagtcgaaatgtgtcgtgagattgctttgagagttggaaggaacccaacaaagatgattgttttgctttttctagatcccctatcttccgatcatgaggaacatgttgatcaaaccagaattgtctagccacaagatcagggcgatatgaaacaaatgctggaatttattttaccaggatcnnnnnnnnnnnnnnnnnnnnnttgtttaacatcctaaatatgaacattctgaaatgataataaacacatataaag

SEQ ID NO: 41316 - DNA, 1210 bp, Cannabis sativa
aaaataattccaacaataacttctgtacgatttcttttacggtaaggacttacatttcctggacatgatgaatctaaaaactcaataaatcaaggtaacttcctagaacttttacggttcgctacttatttgagtgatgatgttagaatggctacatcgaataatgcccctgacaatttcaaattaacatcacctgacattcaaaaagacatcattaatgttgttgcagttgaaactatgaatattattataaaagatattggagattcttttttctctattttggttgatgaatctcgtgataactcgaccaaggagcaaatggctattatgttgcattatgtggataagaatggacatcttattgaatgatttattggcattgaacatgtttctagcatcatagcttcgactcttaaggctgcgattgataaactattttcaagatatgagttgagtatttcaagggtaagagcacaaggttatgatggagaaagtaatatgcaaggtgagttcaatggtctaaaagcactaattttgaaggaaaatccttgtgccttttacattcattgctttgctcatcaacttcaattagctcttgtagctgtggctaaaaaacatattcagattgatcttctctttttcttaacttatagtgtgatgaatgttgttagtgggtcatctaagcgttgtgatattcttcaagataatcaagctaaaataatttttgaagcacttcaaaatggtgaaatttcagaaggacgtggtttaaatcaaatacttctctcaaatgctctggagacacacgttggggttcccagaatcgtagattaattagcttcattactatgttttcatctactattaaagttcttgaaatagttgttaatgatggatcaagtgaaaaaagatctgaagcaattaatttgatggaattgatgtaatcctttgattttatatatactctacattgaatgaaaaacatcttgggtgttacaaatgagttgtcaagagcacttcaaaggaaggatcaagatattttaaatgccatgtgtttcgttaaaatatgcaagcaacaattacaaaatatgagggagaatgggtgggattctcttctttgatcaagtctgttcattttgcaaaaagaaagatattttctttccaaagatggaagatgtttggataactcgaggtagatcactacgcaaaa

SEQ ID NO: 41317 - DNA, 1899 bp, Cannabis sativa
atctatgtgcatcttaatctggttgtattcggagtaggcatccatgaaagatagtagcctgaacccagaggtgacgtctaccatctggtcaatccaaggtataaggaagcagtctttcgggcaggccttattgagattggtaaaatctatacatacccgccatgtcctatttggtttttgcacttgtacctgattagccagccattctgggtagtacacatcccggatcaggccgttggtcagcagcttgtctacctcttttccagggtgtctgcttttaccagatcaaggggacgtcgcttctgctgtactggtggcatgtctgggcttacgttcaggacatgggtaatcacatgcgggcttatgccggtcatgtctccttggcaccacgcgaaaatgtctatggctgcccttaatgcttcaataatcttatttctttcctccggctctaggttttttcccaagcagaggatcttggtagggtcgaggtcgcacactcgtacttcctcaatgtcctccataggttttacaatttttttggatcccatgtggggatctagctcatcttcttccatcgactctggttcaatgccctcacggaccaccaacaccagcaaatgtgttgcaacattatagcactgcctggcctctccctgatttcccctcacggtccctactccggcctcctgactggggaatttcaagcacaagtgacggacggatgtgattgcgttgaagacaactaaggccggtcggccaaggatggcgttgtatgcggtttggcagtctaccaccacaaaggtgcagtacttaaaagtactctgaggggtatccgggcacagggtgactagcagtctcacttttcccattgggataagtgtggtcccattgaatcctgtgagctgggagtcgctgggtgacaaatccctgtctgtgaggcctatggctgtgaaggcctctttgaacaacaagttcacggaactcccattatcgaccaatatccttgccactattttgttggcgatagggatctctatgaccagagggtcatggtgaggaaaacgcaccaatttggcatcctcttccatgaaagtaatgggctgatccatgagtcggggcctttgtgctggaagctggatgacttcccacacttcatcgtgtttaatggctccaccgtagcatttcaactctattctagtggttcccccaatatggggcccacctgagatcattgatactctcccgttgggtcttggtgggagcccaaggacttgctgagggatttctcctccagggggcacaacgggtgctggtgctccttgaggtaacggaccccctactggaaccaggttaagatggggtagccggttattaatccattcatacaaatgacccaatcggattaagttttcgatcttgtccttcaagttcttgcgctcattggtactatggcgaatgtcgttgtggtattcacatctcttgtaaggatcccttcgcgaactgtccctgtataggggaggaggctttcggtagtgtgtattttggcaaaatacactcgctcttgcatgtctgtgagctccgtgtattgagtatattgatgggtgtatccccttcggtcgcttatcctccgtccagttgcgaccctttgaggacctcttacttcgggagctttgaggaggtcctgtcaggcttgcggtaggagcagactgagacggagcttgatcactcatccccgaggggttgcttatgggattcccaaaatgtgatgatgcgggagccaaggctaggctctgattatatcctagtgtagcggagaattgtatgccgctcatttgaggggtggctgggggcatggttctcgaaagtttggcttcgggtacatatcctgacactccggtt

SEQ ID NO: 41318 - DNA, 2040 bp, Cannabis sativa
gtgtttgatattgatgttctgggtttgatgagctaggtgttcgactagttttgggtttgactggctttgggttcgacgggattggtgttcaaatttttctggcctcgtggttgacaaagggtggggcgtgaagttcgtggttcgacgggcgtaatgttcgtggtgtatggtgtagccgatgatctgatttattcctaatacaagaatctaattttttttttgtttaggttttttttttcaaaatgttttctatttactttttaggttttgtaatacattctatgtgttccaaattgttctgagtattatgtttgtataatatacttttcagtttaattttttttattgtgtttgttgattcatttgaacatgtaattcagattatcatactttgtattattaattttaattgaaaaataataatttatatattattgtgattttttttccaaataaaattatttttattttttttaaaaaataaaataaaataaaaaatctgataatattcttatttcttgaaaataaaaaaaaatataaaaaataaatatagtgacactctataaacgtagctattatttttacagtcttacaatgtgggactctaaatgtttatagtgacctgcaatgaatgactgtaaaagggtttagtaacacgctgtgaagtgtcactaaaaactagtacattttccagtcaccctcattagtgacgcgcagtgaagtgtccctaaagagttttagcgtcactcaacatgggtcactgaaacccatttttctagtagtgtttatttgttcaagattgtcaatttattttatcttctttaagtaatatttctattggtcatgttaaacggtctgctaacaaaaccgcgcactgtatagcacgtggtgcttgttattggtcaggtcgtctttttactgagagcgatgttccctctgctcttcagtccattgttttagcggatgtttctatttaataaagtttattttcattaaaaaaaaatactattaataaatattaaataagttaatattaaaagtaatcaatttatactaattgattagatttgagttattatgtagatgagtttggatctaaaatataaaatctataatttagtgcgaaatagatcgaatgaacacccctattcaatattattgcaaactttggagggtatattggtaacatatatgatttgagtgagaatgaaacatttatttttagcaaaatatatgaaaaataaaagatgagtaggaaagttgttggatgtgggatgacgtggccgagttgttgatttagaaaaaataaaatgaaagattaagacggtgtacgttaattgcatgtgatgatctagaaatcatgaacatcaatcttcttcaactttttttttttggctgaaaacattaaaattttatttcatattttcacactccaatcaaacatgtgcccctccccctcttaggatcggtcaacacattatattttaatgaaggagattatttatattaattagttttaaattttaattagcgatcaatttgaaatataaaatacacaatattaaatactagagctgtctgtatatgtaagtatatattttaaagtatatggctattataaaatacatatattgtagtgaataggtaaaacatttttttcttacttcaaatgtgatcaatggctaaaaaaacacaccttctctccctctgcttaaactttaaacatagttgattaattaagatcaaaataataactaattgtctttcaaaagtggaaaaaaatattattatttttataattaatttcttgtttttcgtatatcgaatttttttgttcactttattatatacatgaaaattatcatttctttatttctttacttttactccaagtgtataaaatgatcataattataattccagctaaagaaaaaagtgtaaaatgattgactcattaattgaattggtccgcaatctagtgtatttcgttgtttagaatccactttaattaagacttaatataaaaaagataaaagtact

SEQ ID NO: 41319 - DNA, 1525 bp, Cannabis sativa
ccccatttaatgccctgccaagttagcgaaggtgagtgacccattcttgcttctagaaaggtgttatgagggaagtacctgcttttgagtaattgtttaagcagtgagtgtggattttcaacaaggcgccaagcttgcttagctaatagagcttgattgaaatagataaaagaccaaaatcccatttcgtcctcgtcctttgtcttacatagcagattccaagagcgacagtgaattttggatccattctcattcataccccaccaaaaattagccatcatactctcaagttttttgcaccggtagccgaaagcagctcatagcataggttgggatagattgaacaacagccttgagaaggacttctctaccaccagctgaaaaaatcttttcacttcaagaatgcataagtttccatatccgttccttgatattgctgaagagttcttttttgtctcttcctgaataggatggtaagccaagatatctttcatgacactcactgattggcagggagagatgtcgatgaaagacacttgagctgtcaaagtggtatttggagaaaaaaaacaacacagatttatccagattaagaacttgacctgaagcacgatgatatgtgtctaaaactctcttgattacaagggatgagctttcattagcttgacaaaatagaagactatcatcggcaaagagtaagtgggaaatggatggggcatgccttgtgagtttgaaaccatgaagattaccaatactctattcatgttgtagcagcctagacaagccctcagcacaaatcaaaaagagatacggagataaggggcagccttggcataatcctcttgtaggaattaaattaccagtgacttcaccattaactagaaaggagaagctgtttgtagcgaggcaacccattataagcgtaatccaaccatcagcaaagcccattctacgcataacttcttcaatgaatctccattctactctgtcaaaagccttgctcatgtccaactttatggaagcaatgccattacgtcttgatgttttgttcttaattgcatggaccaattcaaaggcaactaaaatgttattcgtgatcaatcgattagccaaaaaggctctttgtgtttcggatatgaccaaagtgagaacttccttaaactgagcaacaagtatcttggtgaccattttggaaatgacgttgcaaaggcttattggtctgaagtccttcatgcattgaggtttcttgatttttggaatgagagtgatgattgtacggttgaaaattgtaagatcagccccattgttcaatatactaagcacggcttggattacaagtttaccaccaattgatcaattttgttgatagaacattgccgacatcccgtcaatacccggactcttatccgagcccatgttcttgagggttgtttcaacttcggtagcagtgaaaggagcaagaattaaagcattatgtgcatctgaaaccaggttgttgggaatgtattccaaggtagttgcaaga

SEQ ID NO: 41320 - DNA, 1791 bp, Cannabis sativa
ctcatgatgaaaccattttacatgatcttgtcacgtgctctgtgtgccaccactttcgattctacctccaatgatatccaatgcttggttgttgttctttgttgggccatttggaaggcttggaacgataaggtgtggaataacaagctgcctaatgcttcttcgattgttgcttttactgttacttatcttggccaatgaaggatggctcaaactcctttgtagtcatctcagctggctgctggggatggagccgagtggtggaggccccctgtttcaaatggtgtcaaggttaatgtcgatgctgcagtctttgaagggtcacaaggctatggctttggtgccgttgctaggaatgaaatcgggtacctaatcgagggttttacaggctcttatttgggagtggttagacctgagttagcagaggcaattggggttcgtgaggccttaagttggatcaaagccaagagatgccaacaggtgacactagaatccgactgcttgttggccattcaagcaatctagagccctatgagaattatttctagcttcggttcagttattcaggagtgtaaggctttactcttggaattgggtaatattttaatttattttgtaaaacgttcagcaaactcagtagctcattcatttgcaagagcttctagtttttatcctgatcgtgttttcagtttgggggatgtcctaactgagttgttgccttgtttggtagtagagattgaagtttaataaagtttctgattattttcttcaaaaaaaaaatgaccacattaaagagtagtttctttttctatttaactagccaaaaagtaaccaaatttaatatgcaaaccaaattcatgagctactaaaatagactttgttattttgtttttaacgtggtgaacagagtcacacataattaacaatgcagcaaactaccatcggcggtggaacctcctcaaaccaggataactcattgtcaaactgaagggtatgttttgccaaaccatgagctgcaaaaatctaatcgcgagccacatgggacaaaactgtccccaaaaatttagacaataaagccataacatctttaaacaaagcctcatcacattgaaagaacaccttcccattaataatagttgtcgccaaatctgaaaaaatattgcaacaccaaaccaaaaaacaaagttatattagaatgacaatctttaaaataataaaaaaaagtaaacttagaaattaacgcataacttatatcactagctcaacattactaaaaaactaaaagaccaacaaatttctaagtataactagctaaagctttacctttggctagtaacaacatactagcaccctaatttaaaactgctgaaatcaatatcaaacagattatatttaaaattaaacttatcagtgattcttcgtaattgaagactttctacaaaataacatacaaaataacaaaaatataattttctattaccacacaatatgaatgatggtaaatcaatccataacaaaatataagaacttaaaagactagaaaaacttatctattaaaagtgaaaaagtcgttgaagtataaatcatgtgataacaaggatcacttctcatggccattgaccataccacaaaactaccctaaacaaatagggacaagccataaaaatggcacaaaagccataaaagacacagaagccataaaaggcatcaaaaccatcaaaaatggtgcaaaaactagtaagaaactctttgagtagctagtagaaagaaacaaaacaacattcataaaaa

SEQ ID NO: 41321 - DNA, 1663 bp, Cannabis sativa
attcatcaacatatatcaacgattagcaacacagttatagcaacaatcatcatcgattgtcttctccagctccggtgaatttatcatttggaactgatcttcttctctgctgcatgaacctgaaaaattaatgcatatataattgcatagcaaaaaatgaagaatcaaacaaaattatacacagaaacgcaattttgacaacgattgtgagcataatcaaaataggtatatacactcaataatcaaaattatatataatgataattatatatgaacatattatatgagaatatatatcatcaaataaatgaaactctgcaatttaaaatacaaatgtaaataacaaaaatttcaatataaaataacaaaaagaaacgagttaaatcaagagaaaaaaataagtaaggataaccttatataaaatttaaaacaaatatgacttcatattaaacagtattagaaaaccgattataaatattaaataatattaatgaaatagaatataaagaataacaaatataataaacaacaataaaaaaaaaaaatcaaagtcataacagataaaaaatatatataacagaaaaaaaaacagttaaaaatttaaataaaacaatcaaacataaaatttaaacgaaaccggttccaaatacaatgttataatcagattttaataatacatttcctttaaaaatgcaaaaagtaatcaaagtcataagagacagaaaaaaaatataacaaaaaaaaaatcagttaaaacttaaataaaacatttatacgtatagattcggtttcaaataaaaattataataagattctaatagtatttttcctttaaaagtacaaaaagtaatgaaagtcataactgacaaaacataacagaaaaaaaaaacagttaaaattttaaataaaaaaaatcaatcatacataaaatttaaataaaacaatcatacataaaattaaaaaattatatatataaaaaaaaaaaaaaaaaaaagctccaaataaaaaattatatttagattctaataatattgttcctttacaatgcaaaaagtaattaaagttgtacatgacaaaaaaaaacataaaagaaaaaaaaataagttaaaaacttaaaataaaacaatcatacatgtaatttaaataaaactggttctaattaaaaaattaaaataagattctaatattacttttcctttaaaattgcagttatagaacaaatcatgtgggtgattaaatattagggtaaatggacagaaaatacaaattatgatgactacacaatgactggaattctaattccaactaattcttcattagaaaacttgatggagctgataaaaatagaagtaaaatgcaacagaagcagcatagacatatcgtaccatatatcaccgggaacaacaccaatgaagctactgagtgacaattccctcaagttctacattgagctaagaaaaacacaggctggagtaattgattctccactatgcatcacaactactgattagatagctatacaaacagtgaaaaatcaatcttttgaacaaccaatacaagagcaaagcaagatagtgaatgaattggttctacaaatacacaatgaaccattcaaccagcaatttgataatgaaggacaagattcaaatcatgataatagtca

SEQ ID NO: 41322 - DNA, 1366 bp, Cannabis sativa
aaaaagttgtgaatgaaatagaatccatctgtggtagttttttatggaatggaagtcatactctcttaggtacaatagatgttgcttggggttctgtttgtctctccaaatcggcaggaggattgggttttaagagaatctcagattggaatttagcggctatgtttaagtatgtttgggtcattacaaaaaaagaagacaattttatgggtgaagtgggtgcataatgtgtacattaaggaggacaattggtggtcctacagggccaatccaatagccattaaagacaatacagtaggaaagtttgatgtctcctaagtgctgaatgacaggtacaaagtggctaatggtttcaatgctattcggcatattgcttgcaaagttgaatggaattcaattgtttggagctgattaaacatacccaagtatagcttcattctttggctctctatgctcaatagaatcaaaacaaaagataggttgatgcagtataaagcacttgagaattctaaatgttttctctgcaatattgaagatgaagtcgtgacacatctattctttgattgtctattctcattggactgcttggaaaagatcaaatcatggctgaattagagaatgactgccacttccctagatagaattgtaaggtggataaggaagacaaaaataagcaaggtgaagaagtcaatttttgatgctgtcattgcagcccttgtctatgaaatatggcgcacaagaaattcaattatgtggccgaattcctatacagaatgtagttgttaaagtcaaaaacatagtgaaaaaaaaaagaattacatgttcatagccaaaaaaaaagcaacaaaaagtgagaaagaatagtttgataccttgtaaagttttataaatatttaaattctcttcatttggagaatgctattagtttgtacaaaaagattttgagtaataaaacatacttgttcataaaaaaaaaaaaaagtacctagcatttctaaattagaaaagttggacataattgataaattttattgaagcaatcaattccttcttatattatatttgcctatttatattttttatatttgtttaatcctatataaattttctatttgatttgatcaaatatagagtgaagaaaatcaaaataaaggtttcattttctataaaaggaaagttgtacttattgcttatgattctgtgggtacagacacaggcgcacctacatcgagcccagggagggcttaagctcaccctcaaattttagaacagattatataaaattagagatagaaataatacataattataagacaacataatttgtacaggcgtttgtttgttacttggaaggtctgattttgaa

SEQ ID NO: 41323 - DNA, 1321 bp, Cannabis sativa
accaaacggcacctatatttttcatcaaattttctttagaatttttttatttttatttttcagccacataataaattacatagatggacaagtcagcccaatttatgaaaaatttaacggggcatttttaataatgctaatattagaaggggaacaatagtataattgacaaagtttaggggataaaatagtttaatttttgttttaactaaaatctaaatttttacagctgattaagttaaggggcattttttacacgtaaatattacataggtacaatcctataagactataagtgacaaagttccgcggggagaatagttttctattctattttttattatttagttaattttatatgttttcaaataataaagtgttaagtattattagcttattaaaataatttttataatattataagtatataaatgagtgtaaaaaaattgactacaaataaattaaggtggtatttagttggaggtaataaaatagaagagaatggaaaataaacaatttttattctatttttttgtttagttgcaatttttggaaattgaaatatcattccaatggaatactattttcatcattttggtagaatgactattctattttgaaatagaaagaaataccattttaatgtaacatgagaaaaaatttaatgatttttttatcaatttcttttatgcattttaaattttattttattttattctattcacatttctatttttatttctattttttttatttctatttctatttctatacttatattttcattcctcccaactaaatgtcacttaagaaagaacatctccaatggagatgcaaatgcaaaatatagttcactttgtcaaaattctagtctaatagtgtgccaaattgtaatacaaatatctcacgtaacaaaagtgatttttaaatttggatcacaatatagcatgatgtaaaatttgcatcacaataaatattatgcttttatatttactgactttcttaattattattattttattattaaattttatactattattattttatacttttaataaagtattaaataacatattaaattttacatcaagatttataattataccacaaaattatattttatgccaaatatagatcaatttttacattgggagatggtctaccatattagtaagtaagtaatacaaaatagatggttaattatagggctgttcatccgatccaatccgcactttttttgtcaaacaacattcaatccgcactaagtgcggatttcattttttggatccaatccaattcgcacaataactcaaatcca

SEQ ID NO: 41324 - DNA, 2042 bp, Cannabis sativa
  modified_base (246)..(246): a, c, t, g, unknown or other
tgaattcttgcttctacaaagtcgtcgccaactaaaccaactgacaccttttgttctattattagaggacccccaccaatactttgacattaagctctcaaggtgtgaaaccgtcttaatcggtagaagaaacaccaacatcacataggttggcaaagcttgagcaaccgttttgagcaaaacctcacggccagcctttgataacaaacgaccctcccaactctgtattcgcttgagcatcttatntttgagaaaacccaatattgcatctttatttctccccatagtacaagggaggcccaagtaagtactttgttcatctgccatgggcattctcatcatcgagcacattctttcatggataacaagaggagtattagagttgaagaagattgaagacttggtaaaattcacctgctgcccagtatccgtttaaacaattgaaggagacgcagaacattagaagcttccctctcattagcacgacaatagacatagctatcatcagcaaatagcatgtgtgatattacaagtgctccattcgcaaccttacatcccttcaagagaccatcaacttcaaacttcttgatgagagaagtaaaaccctcagcacagatgagaaaaagataaggagataaaggatccccttgacgaataccccttcctggcacaaaagaatctgacacatgaccaccatgaacaattttgtacttcactgagttaaccgtagccaaaacaaggtccacaaaacgagtggcgaaggccattttttccatcattgctctaagaaaaccccattcaactctgtcataagctttgcttagatccagtttcaaagccatatatccctccttacccttatgtttcctcttcagataatgcatgacttcaaaagctatcataatgttatccgagattaaacgtccatggataaatgcagattgagttggagaaattacatttggcaaaactactttaaggcgattcgcaatcaccttagaaataattttgtaaaggacattacacaaagatataggctgcagatcactcatggaaacaggctattttttcttcggtataaggataatatttgtatcattaagagcatcagttaaaatagcagtatcaaagacagctctaacctgcataaccacatcgttcttcacaacattccaatatttctgaaagaatccaagcgtcatcccatcaggacccggtgattattccgggtgcatatgaaatagagcacgcctcacttcctcctcggtgaccagatcaaggagttactgattatgagtcaaagtaaccgtactgggaataacatcaatgaccggggaaaactgtgaagctgatgacgtgaacaaattcttgaaataacccaacataacatcaggaagcctatcatcccacgttacctaactacccgaatcatcttgaaggcgagaaatcgtattatgctttttcctagatgtagccttaacatggaagaacttgctattgctatcaccttcacaaagccataattgtttggacctttggcgccagaaaatctcttgctggtttagggtctcacttagctttagttcagcctcacaaaatcgctgaatagaaatagagtctctcccttgcttccatcgccgaatctctcttttgcactgtgagattttttgcttgaaattacccgtatactcattgccccaaacagcaagcatctctccacaatacttcaacttctcaataatcggctcaccactataatgctcccaacaatcagacacagcttgtaagtagatgggttcacgcaaccacgcattatcaaaacagaattaccgaaaaggaactacaaaggtgctcatgataggctcaagtaataacgggcaatgatctgaagctgtgattttaagattagtgagcttggcaacattaaaccgttgatattattgagaacttatcaaagcacgatccaggcggacttctatccaagcatcagtacctctcccacgctcccaagtaaatggataccccaacaagtcaagatcaat

SEQ ID NO: 41325 - DNA, 1889 bp, Cannabis sativa
cccatgcggcattaaatgcgaggtgactgttcaagtggggtctggtgcctcgcagatgtgctttaccatagctctatcctccgagagtacgtggacccctcatatcttctccgggaggtattttcttgttgatactcttgatctaaaaaagacttagtcaaattttttcagaaccatatttctcaactccacgtgtcccagtcgcactggtccacgtattttgggcaaaattaagggcaacaatgtgtatgtcactttgactgtttcatggactgacgacaggccctacggaccaatgcgagtgcttctagcgtatactttgtccctacttgcacactttttgagaaaattttccaaaaaattacttatagtgaatttttgttggtgatgtccatacatacatggtaacatgaacgagttatatatacactacgagagatataagtgctcttttttaaaaatatacattattagttacagtgtttaattaacaattaacataatcaattcataattttttttatatgttgtgattataatatccatctgtcgtatcttttaaaaaagttacaatatgtgtactacgtgttatcaaaaatacttttattcaaaacataatttattttatttgatttgttgatttttgttttataaataacattttagccaagaactgtaaattaaattataaacttaacagtacacaaaaaaaaaaaagaagcatatatcaacactaataatgctagacacatatttaattaaattatatatattttgagatatatataattagtttttcaaaaaaaaaaatggaattctatataattattaatattgattaataattttataaacgttattgtacaaaacaaatgaaattaaaatatatataatatatatacaacgactcaacctttttaatttttttttcagtaaataaaattctcatcagaataacatattaatttcaattattttaatgtcaactttttattctttccaaacaaaaaatttctgagagatatataattaacattatttcagtatcaatgtcagctttggaccagtactgttaacagaaagaaacgatcaattattctttaataataaattggttacaaatagacaagtcaactgaatttttttacataacaactataaaaataatgaaagaataattatttcttcacaagatgtatttgaagaaaaaaaaaaaagtaaaaacactacaacgatcagcctttcttattgggttaatttatgatgaattaatttcttcatagtggaaaatgttgacccatctatatatatactcagattctttggtcaaaattagcttcataattcccatcaaatgaaaaataattagttattgaaaagccgagctcttaggttggatcggtggaggtggcggtggtggtggagaatgtgcgagtagtttactactcgtacttccagcaaagtttctttcatcaaaagatgccggcctggttggattaggcgaaggtggtttattaccacctctttgtaaagacgaaatcaataaattatttaaatctctcttctgattcaaaactcgaccgccttcaattagatcaacacataataagttaataatggccaaagtgaccaaaaccaccatcacttttctcatcaccatcatcaataactatatatatatatataaatattgtattaggttgctatagaaatgtgtatagctttttgtacttgaagaatattgtgtttatatgtatagagaataattaatattgttgatgatatgatgagtttataaggatggagatgggtatttatagttttttagtgtgtgtttgtgtgtgcgcgtaatatcttttctgtgtaagacttggttttgggtttcaata

SEQ ID NO: 41326 - DNA, 1169 bp, Cannabis sativa
ataacctacatgaatcacatttaatatagtttttaaatcatgttagccttttatatttaatttatttgtagaaaaaataatattcatagctttatatgtgtagtttatttttcagcttatttatttttcttttaaacaaattaaaaaaaatttacaaaatttttaaaatagaatggaaaaatgtaggattccacctaaactctttgtgttaaaaaaatattagttaaaatattaataaatcacctacatattaaaaaatattgagaaatagtataaaaaatattatttatactttatacgtacaacatataaagtgtatttaaacaatgtgatacttttttttggtaaataagaatttttttaattacaaactttaatatatagaaatttaaaaagttgtgtaaataatatattaaaaattgtaatattttcatatgtataaaaagtattgaattagttatagttcatattgtattataaaaaatgtgttatttataaatatgtgtgttaattttaaagaaaaattatatataatttgtaaaaaaattacttattaaagacatataattatttataaaccataaattatttattttcatatattaaataaaaacatacaaatttattgaataagaaataaatcaatcacctttttaaaaaaaaaaaaaaattgtttcttagacaaaggaaaatagctaaataaaagttttatttctaactatgagaatgtttggtttgttgtaatgggaattgtaatggaatcaaattatctattacaatgtttgttttgcttttaaaaatgatgtaacgagattacattgtaatcataattacattatacaagggaatcctcattacattagaaaaactatgtaatgagaattacattacaaaaaactaaataaagtaaagctaaaatgactctaatactctttttatataaatagaaaaattaaagtaagggataattttgtcaattgatcatttattccaatgttcattttaataacaaaccaaacatcttaatcagttcctattaatattcttattccattacattactattaccattaccattactattacattccaccaaaccaaatatcaccttaacagtttacgtgtaatagtttctttctatacaaaaatataaaaatgtcaaaaaaaaa

SEQ ID NO: 41327 - DNA, 1134 bp, Cannabis sativa
ttaaccaaatagtcaagcaaaataataatacaaaaaactttataaccaaatcaaaaataaatactttgccatttttctattattttctttcaataaaacattatttgtccaccattcactcattgaccattttactttttttttttttaatttctcttttttgtgaactttttcaataaagacaagagtagtagttgggttccatggctgcgaaaaaatgtcacaccaaaattattacaaatatatataatttattttggtattaaaaataatatttttttatatataatttatgactatttgtaaaaaattttaaaaaattataataatttataatacagaaaataacgttcaaacaattacttactacatgtataaaaaaaaaattgcgtgcaataaaatatttaaactttattttcagcattataaactatttaaaaaaatttaaaaatttacaggtaaccttaaatattaacaatatacatgataataaaaaattagactaaaaaactattatgtatataatataccaaaacagataaaaaaatccattgaaacatccttttatattgtgacatagggcttgcgttcagcaagtgaatttccattcacattgactgacacacttgaatatagaaacgaggtaatattagtataaaatgtgtatatgtatacatatatatatgctatatgcatgctatattatgtaatttgtatactaccaactctagtacggttgcggtacggagcattagtacaatatatgatgttaaaagggtatgacactgtaacactagtataggatgagtacaaagtgcatgtggtacaacactcagtggtactcgatgtacgattcagcctaaccaacactagtacaagacgagtacttaatgcatgtagtagaggttgtacttctgttaagaacattcttgattcatttgaagtcttgtaaataggtgtatgtgcacctagatacaagtcgataatatattatatgctttatgtttttcttactaagtctgttgactcacaaacattatttgcatgtataggtaaatgaaaggagaaagctgagcaccagtgaacccaaagcttgaggatgattctacagatcaagatggttaaacttgaagt

SEQ ID NO: 41328 - DNA, 1470 bp, Cannabis sativa
agatcctcaaagaaatcaatactactattttaacacttattcctaagtgtaagtgccctaatacagttagtgatttccgtcctatagcatgctgtaatgtcatttacaaaactgccactaaactcatttgttcaaggttgaaagcaattcttcctgatctgattgcgcaaaaccaaggtggattcatttctgggaggtttatcgcccataatatcatgatttgtcaggatttgatcagacactatgggaggaaaaatgctaaggccagctgtatgattaaacttgatctttagaaggcgtatgacactcttgattgggattttttggaagaaatgctttacgcatttaagttccctgagaagtttatcaagctaatcatgatatgtgttcgtacacccagattttcactcatgatcaatggttctttacatggatattttgaagggaaaaggggtttgagacaaggagacccaatgtcacctctactttttgttcttggtatggaatatctatcaagaataatgttgaagattggagctaagcaaaagttcaagttccatgatagatgtgctgaactcaaactgaatcacttgatgtttgcagatgatgtcatactatttagccatggtgattttaagagtatttactatatgttacaggggcttaaattgttttcatgttcatctggcctgcagccgaaccctaataagtctgccatatattgttgtggtatggaagactctgaaatgcaacgcattcttgattgctcgggtttcaacaaaaaagaggttcctttcaaatacttaggtatccctatttgtgcgaaacgaatctcaggaaagcaatgtatggttctagcagataagatgacagccagaatcaaaatttggagcactagaaacttgtctttggcagggagagcagttctggttaactcagttctcatgtcaatccatgcatattggagccaagttatggtgcttccaaagcgaactataagggatattgaagccatctgtcgagcatacttatggaaaggaaatcagatttctcaagggtcgggtccaattgcctgggatcatgtatgccaaccaaaagcagctggggggatcgatttgaaaagaatagcagaatggaacattgctgcaatgacaaaatatgcgtgggcaattgcttacaaagaagataacttgtggattaaatggatacactgtgtatacattaagggagaggattggtggacttatcgagctccacctcaggctagttggtattgggaggaaattaaattcggtttaaaacacaaatcaaaggtgttatggacatgcagcaatttgtaagcaccaaatacagcatatcaaatggctacaaatctgtttgcccctctcaaagcaaagtgaattggagtcatgaggtatggaatagacttaacatccctaggcatagcttttgcttgtggattacaatcca

SEQ ID NO: 41329 - DNA, 1471 bp, Cannabis sativa
cacatttggcccgtaaatgatcaaaaagtacaaatatgtcaccataaaaattgtcttcaaatgaaaaatagaattgaaatttgttgcaacaaaatatgggatttggtaagccaaagccaaatatagtaaaagtggatagaatatgaaatattcatacataacacatgatgaaatgctttccatctagagaagcaagcttctttacacgtcttcttcctaccttcgcgtaatatacagttaaatatttgttcaaatatttcaacttgttaatgcaacgcgtcaaaatttgaaaaagaaaataaaataaagaaattcattttttttttgaaaaggataaagaaattaaatttggtgagtataaagtagctgctttgtaatttgaaagatgcatagtgttatacagtgaaacttactatattccataataacttctaatttgttataaaaaatttaagtttgaatttgagtcaattataaataagaataacttttaaattgtaattaattatacattttctaagtctatattaacaaaatttacatctatataagaataattacatcttaataaaaaatatatatacctctattataatatagtattaatgattgtttattgttattattgttacattgatattatttagtattttttttttctagtgtaactctatttagttataatctctcaattagaatataatttgcttggtccaagtgtattcttaaatagaggttctactgtactatgaaagagtgtatgggcttattagtaatttgtaattagtgtgaaatcatataaatttataattgtgtaagtattatggatatggaataagaaaatagaattttagttcaattagagatcgacactgtcttgaaaaatacatttagagtttggcatcaactcgaatagtgtgtcttgatacaattgatattgtatcacatggctgtgtgtgactcactaacatccacacattggcccacaatctccaaattataagtgtctttttttgactttgattcaattttttggatcgttttttagatttaagacacatggagtttcatctcaaaactaattggatatgagagaagtagttaattggctactagatatcctctaaaagaatctctcttcccaactgaaccaaggtgagttcagcaagccctcaaagatcccaaatggtttcagtctatgcagagagagaatacaaccttgatcaagtccaaaacttggactcttgttccatatcatccagatatgcatgttattgacaacaagcgggtctacagaattaagcttaatgcagatggctctctaaataattacaagtcaagattagtggctaaagggtatctacaaactcttgggattgattatgaagagacctttagtcttgtggtaaaacctgtcactgttagaacaattctttctcttgctgttacctcagattggccagtcaaacaa

SEQ ID NO: 41330 - DNA, 1154 bp, Cannabis sativa
tataaaattagagataaatttgatcaattgattaataaaagtggtatttttcaacttaccccttctttttaggttggacttcatttgatcaaatgaacttaatgtgcttcttacaaaaatatttattattttttattgttatacttttatttttatatttttactgtattaaatatttaaaaatattattatgaagttttaaaattataaaaatagtatattttagtaaaataaaaaaacaattaagatagtcaaaaaataattattaaataccttaacaataacataaaaataactataaaataacagaaagaaagctacaaaataacagaaaaataacaagacaataacctcgttgcaatatgtaaaacaatatcaactcatctggatgtttttgtatatcattttttttacttaatttatctttttgaaccgctacagtattttcttcatgaaatttgttattacaatttcgtacttttaactcttttttctcttttttttgatttagtgacagttaaaaaggtaatttattttttagaaattaaataaatagttatattaatcatagaaataataaaattttataattttcaaatgaggtataggagtgtacaaaaaattatccaatccaactaccgaccgatctagtagaattagatatccaaccataattgaatcatatcagatgtaaattataaaaatttaatcgtatcggatcgattgttggatgggacatccgatccaatggataactgaatcgaaccgaattgatccaattatcatccaatattggtcatccacttatatttatatacttttgatatacatttataattttatatatttaatatattttattttaaaaaatatattaattgattttattcttattgtacacctacacatatgagattaataaaaaaaaaattaaatctaaaaaacacattaaaataatagaaaaataagtataaaacagctatagaacacctaaacaataatattgttgactcaaaaatctggctagacttctaagtcacaccatcttgctagatttgcgagaatgaataagtagttaaatatttataagagagacacaacaaatttatactagttcacccctatatcgtgatagtaatggagctatgtctact

SEQ ID NO: 41331 - DNA, 2135 bp, Cannabis sativa
  modified_base (1729)..(1729): a, c, t, g, unknown or other
ctggaattcacaaatggtaagagattggtttaatccggcggacgctgctgcaatccttaacatagatttacctgatgagagagtggaggattcatggatttggattggggagcaaaatggtaacttctcaataaggtcagcttgtagattcatcaatggtgatcattccgccaatactgaatgtgatctgtggaaacttatttggaactccccattacatatgaggctgaaattcttatggtggcaattgtttcgtgggattcttcccaccaaagataaactggccccattttcggatggagttttaggaccttgtcctatgtgtaaggaggagtgtgaaacatctttccacctcttctggaactgcaacattcctaaggccatttggtttagccttggatggggcatccgaactgaactagttaccgcaacttgttagaaggattggcttgattggttctacaaaggttcgaatctccctccgaacgtgaaatttttcgatttcatggctacatccttatgtattgtggaagctatttggcgagaaagaaaccaaagagtgcatgataaaaaggacactgagttagtgttgatcatagactcggtccgccagaaaatccatgaccatgtcatggttgcctcgaatagagttgaggaggtccttgaatggactccgcctccatcctcttgggcctgctgtaactctgatgtagcaatttctgctacaggctgcttgttatctgcagtcattcgagatgattcgggtacaattctttcgatcacagttaagacaggtatggtaacttcaccaaagcttgctgaagctcatgcagtgtgcctggcagcagaaaaggcgattgaattgggtctaaaaaacatcattttccaatgtgacaatcgttgtgtcgtgaaagcattcgaagctcctatgtccatctgtgtggacttcagtctgcaggaagccaaatcaaggtttcttcactgttgtgacaagctgaatgactggggcattgtccacatctcgcgcaagtgcaactatatggctcataatattgtccacatcaaggttttttctgttgtttgttttgctgtttttatgttctttcgttggctgtttttctgcttgtttgttctgttgttgtccgtgtttgtgttgtacgcacatttcataatcaaaaaaaaaaaaaaaagaaaaagttgagttcttagaatgggagaaaatagggggctagcttatataactcggtaagaaaacaactaatatcaaaagacccttggtttaattaaattcttgcctggttagcttttaaaataaaatatctcattaccattataaaaatgtatagacaaagaacagagaccacaaataatcaaaaaatgaagtgtcaaatacatatcatatcatccactagatccctagctagctctcaataccaatcagagaaaatgacatttaaaatcgggtagacgcacctgataacaccataatattggagctcaaattcaatttactccttgtacagattctaacaggtgagtgcacacctaatctacttatgatgatatagagactgggtcgtgaaacgataaaatacacaaatcatgatcaacatggctctcatcagtataatcgaagcaagcaaataataagaataaaaaaagaacatattccttttttttttctaaaaaatccagcagcataacagttgtattttgaataaacccaaanatcataacctgcataaatatttgtacaaaaaatatatttggtacactacaacaaatatagttatcaggggcggaacagttcgctggtaaaaataaaaaactccgctggtaaaagttattgccggtggagcctgttggtaataccccgccgttaataaagggtcccgattaacaattattagcggcgaaaaatgccttcgctgttaataatattattagcagcggattaatagctgcatagtctgccactaataaatttgtcaaattttcttttttataagtattaccaacggataaaaataatatagtccgccactaatactttattatttaatataatttaatgttaaaaatactaataaatattaatagttttttggctaattagtaattttttcccccgaact

SEQ ID NO: 41332 - DNA, 1020 bp, Cannabis sativa
aaatattgcataaaatacaatttaatataatacaatacaatacgatataatacggcgttccaaacgagcccttaaagtataaaatagagcattgatattaagtattatatgatgctcaacaccataccaatatagtgcattgtgattggttaacggttttttatatttttattaaattaaatgatatagaacctaatattaatttgcaccaataacaatataccacatcaagcactatgggtgttccagcatttttaatggggattgtccattaaagtgatttggtacatatgcaatgtggtcaaatttttaagatgaattttacatgaagtgttgttatataaacaatgaccacgtgactttttttttttaatttttttattagaaaaaaaatattttatactttaaaatttattaatttaatgtgacgtgagactaacaatttttagagttgtcaactattggagtattttttgtaaaaaaatgtgacaaatattatgtggatgaaagaatatataataaaaaaataatattatattttagcaactataaatatgagcatctaccatgggagttgcctattagaatggtcttgtcacttatacaatatggtttaactttcaagacaagtttttaaaatataaaggttgagtgttgccaaaagagatggtcatgtcattttcttttttctttttttttttaaggaaaaaaatttacttttaccaagaaattttattaatttaatatttaaaatgtgatatatgagaccataatgagcaacttttagagttgtcaaccattagagtactttttgtacaaaaaaaaatgtaccaaatcttatgtagatgagagagaaaataaaaaaaaaaaaattaaaatgtgttatttttggcaatatgcctcctattggagatgctcgtatttctctataaagtaatttagaataattagcaattttatctcttgaattttcgacaatacttattttgtctgctgaaatatactgcttgttaaaaattt

SEQ ID NO: 41333 - DNA, 1465 bp, Cannabis sativa
  modified_base (492)..(496): a, c, t, g, unknown or other
caaaaggatcttgacaaagatatcgaaacgatgaaaatcagtttgatcgattaggtgttgttcagtaatcattaaaaaattaattttttgattaattaatcaaaaaccatgaagaaactacaagattttgtgaaataaaattaaaaaaaaaataaaaaacaaaatgattcccgaaaaggcccttagtttatcaactattgggaatttattaaatacatttataaatatatataaatataaagtttacagtatctctttagaccatttttttattttgacatactgaacaattttataattaatttttttttatgatcatatattttatagttatataagattatttgtaaattttttgaaaatttcaagtaatttacaatatcgaaaatgagatttacatattttattacatgtacgacaatttttttcttatactcgtagttagtaattgtttagacctaaatttcagcactgtaaattatttagaatttnnnnnaaatttataaataatcttaaatagctacaatgtatacaatcataaaaaaaaaattaaacttatttttttctttttaaaatgtcgaaataaataaaaaatctaccgaaaggatcatttaactttaaaggatttaccataaaaatttccaataatatttattgtcaaaagaaaaattaggcctcacaagcctaaaatttggaaaagttgcttagttatatataattgtgggccattttttttttcataattatgtgttaaaacaaagagcatgcacctctcaagactttctctgagatattgcttggatatacattatgggcatgttatgtccacagaccgtagctattttacacggataattttaacgacaatatcatattgacttcaaaataattttaattcaatatttcatactaatcaattaaaaatatttaaaaattagtaaagaaaaaataataaataaatataatttctgttaattttatttttaacatatttaatataataaaaatattttttgaattaaataattaacttcgactctatatatagtatgtatttacatcgatttatatatatatatttttatgaaatattaacttcattgaaatattagtattcagaatataaaagagctttataatcaccctaagcattatgctcaaagatgctataactagagaaaaattaagaatgcctaacaatagcatgagccactcgatttattaatcgtctaacaaaacgtaagtgcacagtatatgtaaataaaataacaaaaattggcaatcctgaataagtaaaccaaaagtggagaacaagacttagttactttggatggcctgagccgaaagcaaactatcagtttcaatctctacattaagctagtttgactcttaatctaattgagggcttctttgattcccaaaccttccacaaccttagttcgataattgcctcgttgaaaacata

SEQ ID NO: 41334 - DNA, 1305 bp, Cannabis sativa
aatattatcacggtttttaataactaattaatctattagtattaaactagtttataaaatcacacaagtggcatccctatagattagggcgttacagcacgtagtgtaaatgcgtttatgatttgaaaatcatatagctgtgattttcccacttttaccgggtcaaaatgattgtgtatttaaacacgtctttaatcgttctatccagggatgtctcgaaaaaagctttgttctagtgatcacacactactacaaaaagaggtatttttgtcggtttctaagtgacatatatagtttttgcgtcggtctataaaaccgacgtatatgccgtagtcgtaaatagattttatttgcgtcgtttcttaagtgacgcaaataacaattctcttcatattgaaaccgacacaaaatatacaatgttctttttaatattctgcgtcagtttagaaatgacgcaaaatcatttgtgccatttaaaaaccgtcactaaaaccttataccttcagtttttaaatgacgtataagttgctcaaatatctttttttacctattgcgtcggttataaaatgaagtataaatataaggtaaagaaaattacagatttccatacaatttttcctacctgcatttttaaattttaaaataattttatataacaataaatatataataaaaaataaattaaatacataataattttatataacagtattccatgcggctgttgtcaacaaatgtttacataacataatatcattttgtataacaacatttttatgcgctaacacaaaccaacaagaatcacaacaaaacagaacacccaaaaaaattagtatcaaattaaaagctttctaagacctctcatatcataatcataattttacgaaactagaaaatagagaaaaataaataaatatgaattataaataattgtatataagaaggaaacaaatttaaagaaaataaaacaaggaagaagaaacattaggtaaggcagaccgcaccacagctcctttcggatcatggattcgaccctctcgtcaatctcgactttttgattctccaactcttcaagctcctttcggatcatggaccactttacaatacgaaattaaaatgaaattgtagttaaatggaaactaattatttcttcataacatcttcatcgacaaccaccttaacattatcaaaacagggctaataactcataacacttctcaaactagtctggttgaaatgtttggatggtgggttcatggatgtgtcttgaaagttcaaactagtaggattttacttgaaaacata

SEQ ID NO: 41335 - DNA, 1039 bp, Cannabis sativa
tttatgcatatccaaagcctatagaatttgaattttaggtaagggaaaagggtgaagcacttcgagaagaagggaaagttaagccctaggtttacaagttcttttgagattcttaagaaggttgaacaagtagcttattatcaagccttgccctcaacattgtcaacagtgcaaaaaaaatttcacgtgtcaatgctaaggaaatatttgtcagatgaaaatcaaatatagttgccaattttaaaggacgacggtattttgttttctttaatttgagttgattagccaactagaacttgaccaacaaagaataaaggatatatataataagatttgagaaataattaaatgccttcctttattaccataaatctcgaagcctaaaaaaggcagatcgaggaggaagactttacaacatatgacaaatctccataaatagatagaagctagtccaatatggtacaattacatgtatggacacactctatacaatatgatgaaataatttattattccctataaataaacaaaaaaattgttgaaaaaccatacacaaaacaaactatgtccttatcctatcttaatctccaatctccacattcttcttcttactttgttttgcccataaccactccaacttaaaatcagcaaatacatttgcaacactaccacaaaagaagttgaaatgtgttgctcatcgctaattgacaaacccttattgaataatgaacattcattcgaggcttggtgcgcattgatggagacttcttttattccacttttcaaactagaacctgcaattataataccgataataatacaaattaattatttataatttagtaatactaacaccagataagtaaaataaattagtcaagtaaatacttattacttacatgatctatgtgtgtatggtgctaaaattcttgagcttagtatggagttgggggtggtggggaagcgtaaatgtaagcaggaggtgatggcaattttactggtggaagaggtgagatgtagtggtatgggggaggtggag

SEQ ID NO: 41336 - DNA, 1052 bp, Cannabis sativa
taggttgcaacaagttattatttaaataaatttctatatatataaatattaaaagacaaatttctatagttagaattgtagtaattgtaagaaattatgcaatttaaataaatttattttttaatcaaaattattaaataaaatctttttatattatagattttttttatatttataaatttaagtccctaacttaatattttatcacacaatttttaactataatatttaaattttactataaattttgtacttttagtcacagtgtgactaaaagtaaaaaaaattgagacaaattataaattatcattcttatgttgtgactaaaaggttcgtaactaaaagtattagtcacaaaatttaatgacaacttgtatccaaatactatgttttagtcacaagtaactctctgttgtgattaaatgtcacatttagtcacaaaaaatttatgttgtgaaaaaattgtcactaaaagtagtatatttttgtagtgtttgtggcaaaaatctttatttttttataaaaattaaacttatatcagtcataaatatatatatatatatattttaatttagtattaattatgtttaaaattaaattttcatatattttaaaatattacaatagtataataattttttttaaaataataaaaggttaaattcttaatcttttttaatcaaaccacaacaaaaattatttactcatttaatttaaaactaaataaaaacctaaaacgaaaagacaaaaaataaatcatcaatcaacacaagaaaaaaaaaatattgaacaaattaaaatattatttagtcaaaaataaatttgcatagttacactatgtattataaaaaatactaaataaataccgaaacacgcgtcaatcaatatgaacattaaaaaaattctactcttaaacaaaataataatatagaagaaaataaatgtaagtttaaaatctgcagttttaagagcacaacgacatcaatagatttatgccaaaataaaataattttataaatttaaaaatgaaatagtaaattaatttgtctcgt

SEQ ID NO: 41337 - DNA, 1628 bp, Cannabis sativa
cttaggtatttatttacaactgggtgttaaacttaggtatttatgccgcaaattaccctttaaaaaatgatatattttatggctttttatagtttttttttctatcacttactagagtctagactttatatatatcctaaactatttctcttaaattcataatttagtttactacttaccttctctcttcttctctcatgatggagcataaagattagagtttatagaatgtgggagtctcttaatactaagaagactagagaattgataagtctgagttttattgatgggaaggtgattattattttattcatatttttcctctattactttttttttattattatttatcaattattaaatactcaatgtgtttaccatttatcctataggaaaatctaatgcatgcagccataagaaaaaatttagtttctaagtttaagaagctattaagtttattcttagatttttattaatcttttagacttttactaagtttatttagagatgtttcttatattagtgctttgttaatttattttttttaaaaaaatgtgatagctaggtgatatgtgatagattttgagttattatttttttgaaaaaaattaatcttctagacttctattaggtttatttagaggtatctatatttattctatataaaatgtggttatataacagaattcttggtttatgagaaattattgggtgactatttttttttaagttttctattaaaaaataacattttttcttttgttgaggttaacggggttaaatccctaatttatttttaaatgctttatcgcgaaacttcctttcactttccctctctccctcgcatctcactttctcaaggtttattttgctttgtaagttttttgttttttcctttctttctgtcatgtcctgttgaatttaatatgtatatgttaggtattttctattttatttaaaagtgatacaattaattcaatttttcccaaacgttgctgtcggatattgcgaaagagtttgggtatcttgatttgatcgatgcttgggataatgatggttggggggtcggagtaattactgtgagaaaagataacggcgattactttgtttgcttcgaaatctccgataatgagattgcttatcctgtttcgagattgagggattcatcttgattgggtttggcggcgtcgaatctcgcaagaccacatgtagccttctctgaccgtccaacgaaggaccaaatcaaaatttcaattcgacaatgaggttcacataaacaatgagagttcatagaggcgacaacaacgattaagatcgatcagtgttcactggccggagtcgatcgatatttttttgggtttgagttgttaatattagttgtgatttatggttttcaatatcattgattttttatgatatatttttatttatatattttttttatattgtcttaaatttgtattttctatgttttaagtttagaagatcttcttcttcagcatctctgccaacatagtgaactggtgaagtcgtttcggtcgcggacgatgtagttttgctagcaatgaatagtaattagagtgatgatccacatttcatgccaatttttcatggttttccattaattt

SEQ ID NO: 41338 - DNA, 2234 bp, Cannabis sativa
cctcaaatatgtctgtagtatgtcaagtcgatgtctcaatgcaagttttggccacttttcactaagacggtcccgaaaactgaaactttagttgaggatgtcaacttaggaactgggtggaaaccctaggtgcccaggttgggttctgagttgcaggttcgtgtaattttagctcccagaccttgtagtacattgctctatgtcttcatggtacaatatacttaaatatagaaggttggatttgagttattaaagcgaacttccatctcagagatcctagagtactctacctgggcgtacggctaaggtcccctcccatgttgactactatgactcgggctactcaactttgtgacgtcatccttcatgccacgtgtcaaacattgtgtccacgtcaccagaaaaagttttcaagttaacagatgtaaatatctataaccaaatttagttatattatttgttcaaataattaaatatgatttaataaatagatttgaattaaaataaaatttttattgggcttatttaaatataacaaagttttgaacacaaatttttagaataaaattttcacgtaacttttttgaaagcctaaaaagaattttattagtaaacctttttctctacatcacataaaaaataattcttgctcaagttttatacaagaacttcatatacaccttgtcgtagtagcccacactactccttgtgtgtggtggatcaatttagaagagtacggtgtaagatttattggatccaacttacaagaagtttcgagaatactctgatagtcatcaagagatgtttatttttttcatgcaatttatattttagatttaatttatacaccatgtggagatccttgggactatagtacaatgataatccgttaatttttttttctgttccaaatctgatttagtaccataaaactaacaatacattcttatgtaataaatatatagtaatacatggaagataatactcaccatataatgaggacatatcgccatgattcgtatgtttgttatgtaataaggataatcgtcgggttttaagtagtaaattaatttaaatgttgatcaagtgggaaactgttagaataatttttatatggtaacaaattaaatatttgatttgatttgatttataaaatataattaattatttaatagttaattaaaattttctaattatggtcagatttaattaccaaatatttcagttacctgattgatttctagaattaattatcaaaatattatgacaattattgtggcacaaactttaatggaatgtttcacctatatataaatgtagggtttcagtccccgagctcactacttattttgtggaacatagtgaatccatttaaagagaatagagagagtttggaagcctgataacccacactaatcagtttccttttcttttatagattcaaagttcgtgttggattaaggctcaaggaattaataactggaggtattttgattatttaattatatcgtatatatatgtttgattaattctgttagacaatagtcctcttcgagacaggacaaatctccgaaatgcactcttcgagtcagtgccaaactccaattgaaccaaagttctattttctcattccatatcccacaatagctacacaattacatatttatagtatttcaccctctttgtaaattactaataagcccctgcactatttcatagtataacactttcccacccttcaaaatcaccttgtcctcaaggtggtaaaattaaaaaaaaaaaaaactaaaaacatgcacaaaaaactaattacaagcccaaagtacctagggcaatcaaccttcttcctcttctcgatccaagccacctgcttcttcaattttttttagcaattacccaaccatcgtgatctctctcatcctttcttactgttcattgtcatattattttgtaacattatatatgtacatatatatattttccttgaacaacaaatgaagctgtatagatacatatattttttagcaaaccagtaaggataagacgatggtcgtcgtttttgctccgatgttctgcaatccggcgcgaccaagcttccaaacgtcctcaagtgaccacttcgtgccgtccctcgctgttaaagatccacagtcgtcgctgatcacatatccactgtcgtccacgatcgaaaatcctccgatctatccccagtgtgtgaatggattcccttagtg

SEQ ID NO: 41339 - DNA, 1532 bp, Cannabis sativa
tgttggagtgaggtatcatcagcactgggaggttcattaataacaggtccagctcgggctctcttgaggatgttcctgaaggagtcacccaccatgacggattgtggaacgaaagcagaacgtttggcgcctgcaatagcttttccttttgctttttcagtggttctagccatggcctggggaacatcagagccaggatcgactgtggaatgcacagcagtggtgaaagtagtaaaagcagcttgggtgattggaaattcaggagtggcacagttgaaaccaggaggaaaggttggggcaatattagctctctcagaagctaggaattcaggagagggaatggggttggttccagccaggccttgagaagtagccacttctcctgcaggggcagcagcagaggatgaagagccagcattcacatcctgagtggtgaggaattggttgacagccgcagcaagtgtttgatcaacttgcccctgagataaaggtagctcatcaagaggatgagagttagagagatcgaatggattccgtttaaagttagttttagcaggggccttgagaggaattttatagggcaggggaggtgggaggttaaactcatcacacttctttaggtatgagacacatttggtgagggtatgatcaaacatgccacaatggaaacagatattgggtaggctttcgtacttgaaattaagccatttctccttgtggatgttcctaaaatcaacaaggatacccctagggataggcttggagacatctaacaggactcgaatgcggaggaataagccagagactttaagaagtgtcatcttatcagcttccagaaagtctccaacttcatccccaatcattttggccaatttgtaggatttcattccaaaaggaatagaatgaacctgaatccaaaagggggaatagcgtatctggttgggaagaaggatgtcaagaccagcaggattggcactagtgaccaagcaatggtcaaaatgccacggttgtccctcaatgactctcctcatatccccctcacacccaaattccaccataaacatcccattaccatattcagagaaggaaataggggcacgagtaatccatgcatttcgcatggcttcttcgaaccagtcaagtttgacattcctagttgtaaacactctaaaaacaagacagaaagatttccccagttcaaccccctcacccacatcatcaagatgctcatgaacaacagcctcttgctcagtaagggacaacacactagccatattctcagtaattccctccatagcccaatacaaataaggtaagaagataacccaggaatattcagagtaagacagtaaagataggcagaaaagtagagaacgccaagtgacccaaacctttaaataggtgagatgagaggtatacctgtaagtagcagtcttagagacgaagaaaacgcttgtaacgatcttcctaccctgcagtaatcctagcccaaatccaaaatccttaggtgtaatcatcaatccttccttgag

SEQ ID NO: 41340 - DNA, 1399 bp, Cannabis sativa
ttaaaactatcagaacagattggggtggtgagtaccaatcttttactgatattactcttgaacatggcatcaatttcactcatccttgtcctcacacttcagctcaaaatggtagagctgagaggaaacataggcacatagttgaaatgggattagcactcttggcttaagctcatatgccactcaagtattgggttaatgatttccaaacagctgtgtacctaattaataggttgcctacacctattttgaatcaaaaataaccacttaaagtcctacttaacaccaaaccagaatattccttcctaaaagcgtttggggcagcttgttttccttgtataagaccctatcaatcacaaaagtttcaatttcactcactaaaatgcgtgaatcttggctatagtgagtctcacaaaggctacaaatgcctaagttcaacagggaggatttacatctctagaaatgtaattttcaatgaaaaagaattcccttttaggaatggcttcctaaacacttatgctgctgaacagcaaactgttgttcactatccttaatggtctgagctacctaatttgcacttttttggtgctgaaaacacttcacccctgctgatttgactcctgctggtgcaacctcttactctcaaagttccctggaagcagcatcaaccagcaacacaactaaaggtaatgaacacattgatattggtaacacacacacacacacacacacacacactaattattctgaaagtttatctgcaccagctgttgaacaagaaatgcaggaacaagaaccttctgaaccaatagtgcaacaaccagtttcatcccaccccatggtgacccgtgccaaggctgggatctataaacctaaagtctaccttggtcagaccaaatggaacccgagccttggtgtacctagctgcattgagaaggcactcaaatctaaagaatggaatgatgctatgaacaaagaaattgttgctctcaaaagaaacaagacatgggtgttggtgcctcgactgtcagggtacaatttggttggaaacaaatgggtatacagggaaaaatagaatgcagatggaaccctcgaaagacttaaggccaggctggttgcaaaggggttccatcagaggcctggaattgactttagtgagaccttcagtctggtagttaagtcagatacaattcgagttgtattaactcttgctgtgtccagaaattgggaagttaaacaactcgatgtcaacaatgctttccttaatggaacattggaagaagatgtctacatgctgcagccaccaggccttgaagacaaagataaacccgagtatgtatgcaagctgaactaatccttgtatggattaaaacaggcacctcgtgcctggttcgacaga

SEQ ID NO: 41341 - DNA, 1423 bp, Cannabis sativa
gtatgtaggagatggtacaggtttgtcaataaagcatattggtcaatcttattttgttcctcaacatgcttctcattctcttgtcttaaataacctccttcatgtgcctgaaattacaaagaatttgattagtgttgctaagttttcaaaggataataatgtctattttgaatttcatgttgatgtttgttatgttaaggaggaagtgagtcataccactttgctaatggggaaacacaggaatggcctatatacttttgatccttcccaaattggacctatctactcaatctctgaccaagccaagatcaccaattgctctcagctaaaccattctcaaaccagcagcacctttagtgattttcctaagtctaagtgtacttttgttgctactctgaataacacttctgtcactatgtctaactgttttaaatgtaataccaatgttcaaaacaattttactttgtggcataatagactaggacacccctcagagaaggttgttcaaaccattctcaagacttgtaatcttcctactgttaataaagaatcacagttttccatttgttcagcttgttgccttgggaaaattcataaatttccctttcctaaagcttccactactgtgatttctgagccattgcagctggttgtctcggatttgtggggaccatcccacacaacatccttcaatggatataagtattatattcattttgtggatgtctattcaagatttacttggttgtatctcttgaagaacaaatccgatgccttgaaaacctttcaacatttcaaagctgaagctgagttacaacttggcaagtctattaaaaccttgcaaacagattgggggggtgaatatagatcatttacaactttccttgctgatagtgggatctatcatagacatccttgtcccactactcatcaacaaaatggtttagctgaacgtaaacacagacacatagttgaaaacggcttagctcttcttgctcaagcctcattacctcttaagttctgggatgaggcatttagggctgctgtttacattcataataggcttcccactcccttgttacacaacaaatctccattagagaccttgtttcacactaagcccgattacacaacttttagaacctttgggtgcaaatgctatcctaatatcagaccatataacaagcacaagcttgaattcagatcagctccttgtacttttatgggttatagtctcaaccataaaggttacaagtgtcttgattctaagggtaggttatacatttcgagagatgttatttttgatgagttttccttcccttttgagcaagatgtcagccaacatactgcttgcaaaaccactgaacttccttcctgtgtttcagcattaattcctgtttgtcctcactctaaacagatttat

SEQ ID NO: 41342 - DNA, 1434 bp, Cannabis sativa
cccaaacacaatttcataacctagattgcaatctagaatagactaaaaaccagagatagattgctttggatgggattttcaggggatgatcaatgtgtgttgtgttgttaatacaaagaattatgctcccatctattctttgaatgtccagttgttgcaggttgcttaaaagttgtaaaagaatggctgcaatggcatgctgcatgctgcagctgcttctctgccccagttaataaggtggataggaagagctaaaatgagtaaattcaagaagcaagtccttgctgcctcaaccgtttgtttggtgtacgtcctgtggagagcccgcaacttcaaaatttgggaagattctcacgaggatatagatcatttaattcagcaaattaaactcactgtcgagcaacgaatcacactttgctggcctaggaaagttaaagagagggacaaagagtggttccaaagtttgtaaataaaagtatagaatacaacaggaatttacttaacatgtgatacttgtatagtttgtttttggcccttgatgggtggtaatagcttgtaaattctggttctgagtaatacatcttctccgattcatcaaaaaaaaatatgacatttgtgaaataatagataaatgattgaaaaatgacaaaaatataattagtggggcccactatcatggccgaccactataggtttattttagctattattttatcattttttattgcatatatttcaacgcttaccctagtgaatcagtataaaaagaataggatagtgtcataatccaactaatgactctaaacctactttacaacttgttagacaactagagagttcttgagacttcttctttttcttctttctaatttcaaaatccttgagtgttcttcatcaaatttttgagccttagtgattgagtgcatgctcacccatagcaagtctagtactcaatcatagtgtgtaagaatatgaagaatccaaacaactgaaggagaatcacgctcagatcttgataatactctgcgaaagaaaggaacaagggttagagatttgagtgggaggagtcactatattccgctgcaactaatgaaagatttctcaaattttatatgtgtttaagtttcattgtttaagaaattcatatttaggatgttaaaaacatactagttagtaaatctaggtcctagtaaaatacattcaaccaactggcctgaaaactattgtaatgatttactttcaagaaatatggatttaaaacgatatatgtgcgatttggatgtgattcatgttgatttatgtgtttattgatgattgattgatgtttacaaaatttttacttaaaataattggattctcattctggaattattttatttggatagtatggaaaaaattaagcaatttgtttatttatagaacttaatttcgatt

SEQ ID NO: 41343 - DNA, 2284 bp, Cannabis sativa
gatgatgaagaatcccttttttcacacaacaatggtcaatatcaaccacaacaacaattgcagttcatacaacaagatgatcagagtactaacgaagatgaatcccttttatattatggttatgatcccattagtttgttttctactggacaatacctcacttaagtataaattaaaaagaaaaaaaaaattgtagctcgatcgagtgtaattccaatttgagcgtgtatgtaattctaatcagtcaatctttcagtagttatttttattttgttccataaattaattttattgttaaattaatgtataaatatatatatatatataaatattcttatttcctgtttaatattactcatagtattgctcaagtccaaaatcaaaagtaatttatacgtaatattttttttgctgttaagggaatgaattacagagctaagtatttatacttaagcttttacaacttaacagtaacaagttgttactgaaaacagttacaaaatagtaacagctatatataaacactaactacttaactaactaatttcttttcttggtttaatacaactactactacttctacatttaattgtatgaaacttcgatctgtaagactgccttaaaattgaattgtttcacctgattcaagatttcctttcaaaaaaaaataacatggattaaagattatcctcaaagctttgctcaactctcttttaaaccttcttgtagtaattgataaataaataaataaacagaggaataaaaactgacccttctagtatgttgccatgtcaaatgctgaaccaaaaacagttacagcaatcaagaacaataacaacttgaacaaacaatcaaaaaacaaaaagagaaatcaaaaaaacgagaaattccgagctatatacactgctcattgagtctaagatgctgaccatcattgtaattaaatctcacattggtgttcccttgggcaatcacacaagggacaattaacaaccctccacacacacacaagaagagttgaacagaaaagagaagagagaggaagagagttcggaattgtgaggctcaaattgattgcttacaccaaatattgtgtacccttttcaacatattttcattaacactagtgttgataactttcttcattacttgattgaaaactttcaaaagacagaagagcaaataatgccgcctaggaatattcaaattgtttggacataaaataaaaaagacaaaaaaacaaaggaatatttagtccaatgtgcttaggcccttggtaaccaaccaactaactttaactaactactacctgtattacctgtcacaactaaaattttctaaaaaaggtgaatagtttttttattactattattttatatctatctgttaataatccaacatgaaaaatatcatagatgcatcaagctgttttcagctgtgtcgtcggtaatttagaaagtagagcataattcagttggccataaggccgagttgtagttttttgcctagttaattagcaaggagagaggagaaacaaagaaataacaatgtgacaaaagttgttgagctaagcattttgacattttgattttgatgtttttttttttttacatttttagttaagaaaaacaaagacaaaatcctctgtttaccttcttgaaagcacaatctgctgcaactgtagcaccgatgcagcggattagtgcgagtaatcctttcagtaagtgccttgagaacaatgtcgaattgcagtagcaatggaattgagttaaccaacagagacatttgtatttcacatgatccatacaactcttttatccttgtaccatagagcattgtactatacatagagactattattaattatactaatgtttacaagccccacaccacccaacaataatgatacaattcaacattatttcaatatttaaaattcacattaatatattaagatattgtaatgatgactgctcatcttccgtacattcaactaaaagactcaagatttatggctttcaagactgtctaaatatgaaacttccaggaatttgaggcttaaactttgtaactggagttgatcatttatctaaccacaatttctcaagagaaggggaacccaacaaaaacttaaataccccatcatcctttgcagtagatgaatgttgaacatatcacaatgacaatagtaggcgaatggatctaataatggattattataattgaagaaagctccaaaaatatctcacctttactgtcatgattagcatattctaggatcgaa

SEQ ID NO: 41344 - DNA, 1085 bp, Cannabis sativa
aaaaaaaaaaaaaaaacatgctaggttgaattttatattgtttaaatagtcatataaaatatataatatataaatatatataatgaaaatatataaatattaaaaaaaaaaaaaaaaacatcttaatcaggttggtcgggttagttcgggttgattagacgggttagtattattttcaactcgtccaatataaagattaagcgggttatatttttgtcgggttttttcatttacatttttcgtcgagttatctcggtttggtttagacaagttatttgggtttggcggtttacaaaagtttatgtacagccctagtcaaaaataacacatcatctattttattttttattttttctctcatctacataagatttgatactattttttactaaaagtacttcaatagtttacaactccaaaaattgcctactatagtcccacctatcacatttaaaatattaaattaatgaggttgctttgtaaaagtagctttttttcaaaaaaaaactaaattaaaaaaaaaaaaaaaaagataacatgattattgtcttttttgggcaatattcaatatctatattcttaaaatttgtcttaaaagttaaaccacgttgtatatgttgcaaaaccactctaataaccaacatgtagtcctattggagatgctcttagcaattgactttatacacatatactattttataagaccaatacaattatcacacatacatttgcttatataataataataataataataataataatatgacatgcattttgtagtccattttatgtatataatacaatgacaatatatttatgataatttgaaaaaaatgattatatatataggacatgtttatggtaagcacattagtgttgtccttatagtgagtatatttttagagtcatagatatttaatttaatgttgataaattgataagtgtataaaaatagttagtattaataatgtattagattattcataaatttatttttaataatatttttaaattaaataataattcttaggtccgtttggtacgcaagattggactgtaaatgattggactagactggacaa

SEQ ID NO: 41345 - DNA, 1392 bp, Cannabis sativa
ggtatggcccctacactattatttgaatagtccattagtgtagtggggatcacttaagctaagcttttatgaaaaataaaagtctacaactactgcttctttttacttcaacttagcccgcaatgatgtaattgaatttattatctaatgaataaaaacattgagtaaaacttgttggtacttcattgttattaatcaattacagctcacaaacctgatgatgctctcaagcactgaacaaagcttgtagagttgctcttgaggtaactattgatatttttttagttaggtaaacactgtcaacccacaaatatctggataagtggacgagtactcacacatgtaacaactctctgagactcttgatcaagaaagaccaacagaatttatatggcaagtgactaatgaaggcatttcttcgatgacttagaggcaaataagatatagtatatactggatctatgcacggtacatgaccattcacaaaaattatggtgcacgaaagccatgtaagtcacatacacctttgtctatgagagtcaggagttacagtggcatttttcacacatgagttagtaattctatggtttaatgaaatattgaagttatccctagtaactgagtttcttaattccaaagtgctagtgcgagtgctggtaagtttattaagatgaacaaccacatgtacagaatatttgcacaccagagttaagcactgttatgatttaaatacttgaggtctcacaagaatataacaatctagtttataaacctaaagtgctagtgcaagtgttcctcttcagataacaaaatcagaaagaaaagaaaagcatcatcaattacagaaagctctctggaagaaggacgctgcatctagaagagattttataattgattgaagaaagccccctctaggagtgggatgctaccctagttgtggtattcttttagtggctaagctcctcctaagtacgggatgctgtactcagcacggcttcggtccaatatttcttttttctttttcttcccttgggagttttttctttaacaaagttttatgatttgaaatcatcaaactaggctcttcaaaaacctgtgattttgcccctatacaaagattcagtgagtttttctatactactcatcgacagagattcatctcacttatgatcataaaatgagcacatgcttaagcaccaagcacacaataaataacccactacacctcaacagtggtctatctcactcacaataaatagcttcaacatacaaacttcaaagttctttaccccagtcactaagagatcaacgcttgggggcaagagcagtcaagctcagacagtgtcaaagaaattttaaacatcatggcttttgggttttgtgccctaaata

SEQ ID NO: 41346 - DNA, 1670 bp, Cannabis sativa
  modified_base (231)..(237): a, c, t, g, unknown or other
  modified_base (1108)..(1109): a, c, t, g, unknown or other
  modified_base (1617)..(1627): a, c, t, g, unknown or other
atcctagcaaactttgccaatgccatggaaaagacataacacttttccaaggtgtaagtataccttatcgattatcatgtcagtttaaatccagtgtacctacaaatcatgggacttaaatcatgttttggactcaatagaatttatacactaagcacataatcatgaaataaatcacgtgaaccatgcaacataaaatgatttctcatcttttattaattagtaaatctnnnnnnnttgaaatggattttatttagggcagaaaattcaacaaactcctacttgcactaatataaaactaaaagtgcatttcaattaattcaacaccttgatatccagatcaagtgtagtatgtagtattctattctctttgtaacagggcctgaatacaacctttctccaccattacatctctttaatcacaaaatccttgatattgtgaaattcctctttatatgtctactcctctaggggtacttgattctttactttttggcaactacatatgtgttattcaggaagtaacactagtagttaaatcattattggtacataggctgaataagtatctttctagcattaacataagtttagaaacctgattcggtgtagtctaagagtattaaaataccacccgtatcaactaacatatagttcatcttctcttttttttttttttgagagagtgatttgaatcactttatgataatcgtctacgcggaagaacttccagtcaacaagctaattgtctagccaaagatatacaaagtcagaatatgagtcgctacaagcaaagcaacttatataagaccaagttatctcagaaatttagacaaaacaacttgagaccaccttcaagaggcctccgatataaatacttaattggaccaaaactacctacaaaataaatagatatagaaaggtggattagcacactatacaacgataacattgtaaacacttaattggactaaaactaccttcaaaataaatagatatagaaaggtggattaacttaacacattattatacaacaataatattgtaaatttttaaattaaggacaaaacacaaatattattttgacgagagaacttatctttgaagnnttttttcactcagcatgtcaccattatatagagactaatttattatttctaactattagagcaaagtcttccaatggtagaaatatactaatcaattaaacttgcaccatacataaaatttgagagattaaacaaatttaataaatcaaatctcaactaagattaactatttgatcaaaaaaataactaactcaattagctaacaaaattctaaaaataatgatataaaataaaagaaagaaaattcttcaaaattattaaatataattaaaagcaagatttaaaacttatctgtaaaaatttgtagtatcactctttgaggttgtattcactatcaaacgagccaacaacatactgtaaaatatccaaataatatgacacaatagccaaataaaatagtacaaactagccaaaaaatatggcacagactataaaaatataacacaagctaacaataataataattatgaatgtattcaatattaataagagtaaataccattttggnnnnnnnnnnntgcaaaagttatagattggaccctgtgttttgttaaatgacaa

SEQ ID NO: 41347 - DNA, 1123 bp, Cannabis sativa
ttaatgtcctttttgataaagaaaaagtgtctgtaatcgtcaaaggcagtaaaccctcgggtctaggggatgatagatgggtttggactttggagaaaaaaagaaaatttacttgcaagtcggcttatctgtctcaagctttggatagagcccatcaaagtgcggttgctccgacactttggaacaagttgtggaatagaaaatttttggagaggcataagatcctttggtggtgcatcctctctaatgcactccctactagatctgtgattggaagaagattccacattgagaatacagattgccctttctgtggtttaggggaggaatcaatggaacaccttttcttgtcatgtgatgtggcaatgcatttatggcgttcttcaccatggggcatttatcctatctgcaattctaggattcgagtttgggactgggtcaaattcatatggaatattaatactagggggattcgagtggatgaagtatttttgtatgcttcgattgttgtggaaactatctggagaatgcgtaatgattacatacataacaactctcgtccgaatgttttgaactgtattgacaaaatttgtacttcttatgcagagcttcatgatgttttcttgccatgccctaccccttctttggtggggacctggaggcctcctcctcaggattggataaaattaaattgtgatgtcagggtgggcttggaaagtatgtgcatagcggtggtagctagaaaccattggggtgcagtggttcagattcacacggctcggttagactttgcggatgcattatgtggagaagcagcagcttgttcttcagctgtttcagtggctcttgagcaaggcttcaagtttgttttggtagagagtgactcgagaatagttatcaatgctttcaatgggacggagtctcattgggcgatcgagaactatgtctccttttgttctaggtcttctccctcttttattagttgtaattttgtgtatgctagtagaacttgtaattttgctgcccataatgtaactaattgagcttttattcacaagttgtataaaactattccgatcgaatcggttccagtgaacctattatgtaatgaccgacaggtcta

SEQ ID NO: 41348 - DNA, 1960 bp, Cannabis sativa
tttcaaaagtaaccttttagtaacatatgatgctgataaaaacttaattagttacttttacataaaaaaaacttcttttttaaattatataatttaagatacaatttggttacctctaaaatcttatttgttaacatcttaataatcaataactatttttaagttattgtgctatcttattatttaaaatacatttggataactttaaattttattttcaaaactaatgagtttgtcatataatataataaactactatttttatttatcaattattttatatacctttttgttactttgaaacttatgtgtttatttttagattatattaaattaatttgttattttaaatacttttacgttacttttatattttacttttgtaataatatttatgttacttagtctatttagtaaactaataagttacaataaaatttaaaaatataaaacttacataacttattagtaaaattggtaaacatttatattgctaattatttattttaaagttatatttttagttaccttttaagtttacagtagaaactaattagttttcatattttaaaagaaataagcataaatatgaaataattttatttagtatattttatagtaatatttaaattaattattattttgataatatactaattggttactttttacaaaataatcaactttaaataaaaatatctcctgtagataatctttaatttttagattatttatttaaaaaatatatattcatttttaacttaagtgagcaacgatatggtcagaaaatagttttagaaatctgattactttttagttaactaaatggaaaaaagaaactacttttaatgtgttcattttgacatgtaagaaaaatatgtattttctcatcgtcaccgtaattaaaagtaactatttagttgcttatgataccgaaagtgaaacttagaagtaactatgaaattacttttctacacaacataaaaaatgattcattcttttattaatacatatttttttattgataaaaataatattttcaattgtttacgatgttaataaaaaatattgtgatgtcggggtttttgatggtgactgatgatattttaattgataaattaatataatactaattggttacttatttataaaaaatttaattttataattataaattagtgaaatgtaaataataagtatataattaaaatggtaagcatttaaatagtgactttgattttaataaaggtgaaaaatatatactttttacattttaaaatgatcacattaaaaaataggtggcaatgataatatttttgaaattaatgatgtaatcgaaaattaattttaaagttagaaaagaaagagaaattgataaaaatggagagagagagagagaagtgaaaagataaatgaaaaagaaataaaattaataggattgcaataggtatacgtatgttacagtaaagtcaaaccaatagcaaaaaaaaaaaagaaaaacaagctcatgattaaattaacaagcaaatcacggtaatctataacgagcaacgttctataaaactatttttactttttaatttttagttagtgttttgtttttaactagaaaaataaaaatatttttaacatatttttaatcagttttttatttttaaatagaaaaataaaaatattttccaaaaatatgttctataaaattatttctacttttcgattttttaattgagaatcaaaattttaaaaaaaataaaaaaaatcactttcacaatttttttaaataatttttttcttaatcaatattttggagtccaaccccaacctggacccttggtagccgaattctggcaccggtcctaatctcaaactcggatcatggctccggcctgagactcggacttggacctaatttaaataaaatcaaatatgaaaaataagaataaaagttatagaacatgta

SEQ ID NO: 41349 - DNA, 1402 bp, Cannabis sativa
  modified_base (99)..(103): a, c, t, g, unknown or other
  modified_base (965)..(965): a, c, t, g, unknown or other
tgggggccaagtagaatcccaacataatcaggtaaacactacttcctatctattgttaatgattttagtagatgtgtttggacctatttacttaaaacnnnnnatgagtgtctagaacaatttaagatatggaaaaatctaatagaaaacaaaataaatttaaaggttaagacacttagaactgataatggtctagaattcatcaacaataagtttgataggttgtataatgagcatgagataactaggcatagacagttgtgaaaactccacaaatgaatggagttgttgagcgtatgaatagaacccttttgaacaaagtgagatgtttacttcttaggttggggttgggaaagccttattggggagaggctttagctactgcttgttaccttgttaataagagtcttaatagagtcatagacttgaagacaccttatgagatgtggtatgggaagataccaaacctgaaacacttgagagtgtttggatgttcagcatatgcacatcaatccgatgataagcttgatgctagatctgtcaaaggaacgtttctagatatcctataggcacaaaatgttatagaatttggataaaccagaatggaaaacctaaggtgattatttctagaaatgttgtgtttaatgaaaatgatttttctcacttgaaagctgagaaaggcagtgtgttacctgacgcagattcatctagaaagagggaagagtttgaaattgagctcaaatatttgaaccaacaagtgagaataattacaacaaagacacatatccagatgagactgtggaacgaccagatctgtctgactaccagcttactagagataaatacagaagagaaatccatataccggcaaggtttgcgaaagctgatctgattgcacacgctttgttaatagatcattcatgtgacatatcagaaccattgagtatagaagaggctttaaatgnaaagtacaagaaggagtggtctcaggctgtggatgatgaattaagcttgcttagaaagaagaagacatgggtattggttccaagacttgaggacaagaaggtgatctcatgcaaatggattctaaaaattaaagaaggggtgacaaaagatgagccagtaaggtttaaggcaagattagttgccaaaggtttcactcaggtggaagggatagattacatcgaggtgttctcacctgtggtgaagtataagaccattagacttatgttgtcaatggcaactcagcaaggtttagaagtgaagtagcttgatgttaaaatcatgtttctaaatggttatctaaaagaagagataaacatggagcaaccacctagattttaggtggaacaagatggaaaagagatggtttgtaagttgatatgtaacaccctaactagca

SEQ ID NO: 41350 - DNA, 1375 bp, Cannabis sativa
gcatactttgcgcctcctcgccctgtgggtaatgccccaattagatcaatcccccatatagcaaatgggtaaggcgaggtcatcatccttagtttcgttggcggtatgcagggtatatgtgaaaacctctgacacttatcacactttttgaaaaactcatgggtgtccttattgattgttggccagtaatatccttgtctaatgatctttttagataagctctgccaagctgcatgatccccacaaaagccttcatgaatttctctgctgatctcgtttacttttgtaggaagaaaacaccgaagtagaggcattgaataacatcttctgtatagttttccttcaattattttgtatcgaggcactgaatacaagagttttcgtgcctcttttttgtcagttaaaagttgcccgtcgagtagatagttaattataggggtcatccatgtaggtgaactgtctatcatctctatgtcttccttttcacatatacttggctcgcttagcatctccattggaaccaagtttaattcatccaattcgttctgcgaggccagttttgccatggcatcggcgttagagttttgttctattggaatttgctcgattttaaagtaattgaatctttccaagttcttctgaaccttctctaaatacttagccatcttcaagcccttggcctggcgttctccgagaacctgatttacaatcagttgtgagtcactatggcagatgagattcttaactttcaatgcctcgactatcctcaagccggtgatcaaggcttcatattcagcctcgttgtttgacgcgtcaaattgaaatctcaaagcataataaaacttaaagccttctggtgaaattaatattacccctacgcccgagccttgctcgttggatgcaccatccacgtataactttcaagtgtccgcgtctcagtgataaggtagattttcttccgtagttattccttctattaagaagtctgccaaggcttggcccttgatggatgtttaagggtggtatgttatgtcaaactactccaattcgattaaccattttatcaatcttccagaagcatctagttttgataaaacttgtcttaagggttgatcagttaacactgttattgggtgcgcctggaagtaaggtcgtaacttacgagaagcttggataaggcataaaacaagtttttcaagaggggggtatctcgactctgcccccagtaaccttttactgacatagtaaataggttgttggtgcttaccctcttctcgcactgttgccacactaatcgcatcttccgagatagccagatagaggagtaacgtttctccatttattggtttttccaaaactggaggcgtcactaaat

SEQ ID NO: 41351 - DNA, 1014 bp, Cannabis sativa
taatgtgtgactttttgattgataagatttgattttggccttcactatgatttgactctttgagtcataaagaatacgaggcacatgttcgagttttgaaagaaaaatacacaatgagattccaagctaacctttaccggcataggaggtcttgcttgagacgtagctgaccctaaggcatcatgggggagttggccaacctttagggttttaacctataaagctttcctgttcatgcctgggttttgtgaccctggctaattcttggttgagtcatgggaccttggccaaccctttcaaggcttgagatcttggcctgcatgggccttggttccaactgagtagccaattttttgtcctcttgtgacttcaacaagagtttgtctctataggcatatataaccttagcctcatatctggtttcctcagaaactctatttgaagcttaatggtgagtctattatagtcaaatgttcaacttaagactcaacatggcttggttcttgtaaggaactctgccttagtggcagcatggtatgtggcccctatgggagctctgtctagttcttttctggctatgtggttctagcaagccttggcctcatgcatgcgaactgatcttatatccggccttaaggctttcatgttcttgctttggcctatatttcctctatttttgaacgctactattatttagccttaaagccatctatgaaggactatgaccatcctggctatcttcttgtggccttgataggtaagggtccaaatttactttgtcaacctgaagtatgcctgcacgacttagaggcaggtttagtagcttcttttaatccttaaaatttctttacataagttctttgtgccaattcgatgcgttatacaatatgggcacccctcatgcgaccatgcaggcaagtctcttgatcacttactattcaccaagttttgcaaactttgcctgggttcttccttgaggtggtgtcaatagtacgcatgtggaactgaaagagt

SEQ ID NO: 41352 - DNA, 1405 bp, Cannabis sativa
  modified_base (290)..(290): a, c, t, g, unknown or other
aacaagggccttgtttggcaatcggacaaaaaagggtgttggaaaggagatttttatgcatttgccaaacgcaaccttagcactttcagtgagatttttttttatagctacacatatataaggcacatttaggtttagggttttattttatatgttctcttgtgcctctctctctttctccagtttgtaagcctctctctctcactccatgttctctctttgtcgctctctctctctctctctctctctctccatgctctttcttcctttgttctctctctctctctctntctctctctctctctctccatgttctctcttccgccgcatgaaggactagcctgaccagtcgcctttctccgtccacagacgacccaacggagggcaaatatgagccccataccctccaaaacctccaggtattatttcatcttgttcttatttttttttgttgaaactctaattctctgtcatcattctagatctctctcctttcttttctcaggttgacaaagctgatctgtggccatttgtcggtcatggtgcttctaggttcttggcgtttcgtggtgcacgaagcttcgttattggtggtccttgacggggttttatttttatgctgtgaacccttgatgatgtattaattcgtgtattttgatataaatttttggaatttgattgtaaaagttatttcaaggaactaatataattttttttgggtttatttttttattatatttttgacttttaatcccggttatttcataaaaatcgagacaagaagtctctttgatagccattttctaacaaattcaaagcagagaaccgttaatcttgatcttcgaaccaaattttttttcaccaacatcggagggcgtagtctctgcctttggggttgaaacagagtctgcaaattctgatgtcgaggaagatcggtcaattgagtgaagctagctctcaggcaaggacgtgcattgtggaatgttgtaggagaagaagcaacaaagacggtgtaatcagagaacaattgagagaaagatgagactgagatgagaaatatgggttaggaatttgaaattttactttaaaacatttagtcataaagtaacagttgtgactaaaaagatattggaaaaatagtagttgtgactaaaagatgattattagtgacaatacaacaaattagaaactaaatgataattacactactacaaaaaggggtttttgcgtcggtcaacacgtgtggtcaaacttgttgaccgacacaaaagtcaacccacactttttgcttcagttatcctccgacgcaaataattattaattagcatcggttatatatccgacactaaaacaaaaatcgaagaaaaatatgaaatataaaaaatttgtatacactattagcgtc

SEQ ID NO: 41353 - DNA, 1393 bp, Cannabis sativa
  modified_base (702)..(703): a, c, t, g, unknown or other
tatgttaaaaaaaaaaaaaaaagacgtataggtatagggatcgatcatataatataaaaaagattaaaaaaaaaagaataacaaacaatttaaagaaaaaactatgtactcattgaacaattaaatttttccaaaaatgataatataatatatatatatattatagctccaaaaagaataaattaattataaatagataataagcagatgaaaatgatattaatttataactcaagtaataattaataatataagccatgcaatgcatgcatacgtagttataatatatataatatgtacgtaccagttggtttggtgaagaggtatatgcaagaaatgtatttggagcctttaggagtattcagagtgatatatagaatatctattaatttgttgaattttactttgataaattgatgcaaatgaagatagatcgagtagtatatatatacaatattactatatatatatattaagatttattaaaacctaattcatcaaatggatttattagaattggttacaaaatgctgttatgttatgtataaacacgtaattacttgagtatatatatacactcatttacgcatgttaattaatttttagataatttaagtgatcatagtccaatattataaacatgcatgcttaattaatatttatccaaaaatgtgttcattcttatatttgacgccatcaatnnctttgtttttattatcacattaattaatttattaccatttttaaaataatggagaactcaacacaacccattaaaaccttcacatttagaatattatttgattacaaaattatacattaatttatctaaatatacttaatctcatagctatatatatttatgtatagtagggcattaatgttcattctcatcactatattaattatagctttataaatattttatagacataaaaagaaagaataacattcccacaagcttagacctagctatatatatattcattaattatagatagtcacgactaacaaattttatttaattagtgggtgataatatatattatttgtatttggcaaacataaatttgtattgtctattcttaagagaaaatttatatcttgttaatatttagtaaaaaaggtaacttcattaatttgttgctaattctcaaattaaccaacaaaaaacaaaagtaaaagcaaaataatttgtggatgataagaagagtatttccttttattataaagctatatatagatattctacataaatatatatatagctatgagattgagtatttttagataaattaatatataattttgtaatcaattctaaatgtgaagtttttataatgggttgtgttgagttctccactaattaaaaaatggtaattaatgtattaat

SEQ ID NO: 41354 - DNA, 2868 bp, Cannabis sativa
  modified_base (43)..(61): a, c, t, g, unknown or other
ttttagaaagatcatatttagggtgttaatcaatatacttgtnnnnnnnnnnnnnnnnnnngtaaaataatttccaacagcttcatcacagacccaagcctttactactacgaaggcatgccctttgggctaaaaaatggagaggccacatgtcaaagactggtgaacatgatgttcacagatatcatcgaccgcaacatggaggtgtatgtggacgaaatgcttgtcaagtcataaaaggcttaggggcacttggaggacttatgcgagtgcttcaaaatcctttgcaactacaacattaagttcaaccccctcaaatgctcttttggtgtaagctcaagaaaattccttgacttcatagtcaatgccaggggaatagaagcaaacccagacaagttcaagcgcttttggacatgaagtaacccacaactgtgaaggaagtacaaagccaaataggacgcatttttgcaataagtagatatgtgtccaagtctacataaaaatgtgtacccttcttcaacattctaaaaggcaagaaaaaatttgagtggacataggaatgcaaaaacgcattccaagggctgaagaaacaacttgtctaaccacttgtgttgtttaaacccctagacaatgaagagtcaggggtgtacctaccagtcacagaacatgctatgaatgttgtcctcacaagagaaaaagacagtgtacaacaccctgtatactacataagtgaaaggttaatcgacgctgaaagtcgatacccactcatggagaagctgacctaaagcttgctcttggcttccagaaagctaaggccctacttccaggcataccccataaaggtgtacatcgatcaactgctgcaacatgttttgtaaaaacttgaagcatcaggccgactactgaaatgggccattgagcttggcaagtttgagatcacataccaaccaagaacatccataaagggtcaagcccttgtagaatttgtggctgagtgcagcaacttaactcttgagatcactcgagacataggagaaaagcaagatccagagaagaagcaagagtaagagtagcaacaaatcccaaagaactaacatggaaattccatgttgatggaagctacaatgcccaattgttcgatgcatacattgccgttacaacacttggggacagcaactgcacagaacaattaaatttggcttcaaagcctcaaacaatgaggctgaatacgaagccttaataattggcacctgaaggacgcgctaaccaccttgaaatattcagccattctcaactgcttgtgagtcaagtcctaggtgaatagacaacttgaggtgaaaaaatggtagcctaatttataaaaatcaaagacttgctatgtcaactctaagtctacacaatcaggcagaccctagagagcagaacgctacaacagatgcacttgcccatatggcaagaagtaccattggtggcaaagcaaaattggtgctcatgcggttccaagatgaacccattattattatcccagatgaagtcaacatggttgatgaaactccaacatgaatgacacctatcacaacttaccttcaaactgaagcctttccagaagaaaaaaatgaagcaaacaaactgagaagaaaaattgctaggtacccgatcctagacacgataatgtatagacagagcttttctatgcctctcctgaggtatgtcaccaaagccaaagttgaacggctaatgatagaagtggatgaagacttctgcggcaactatgccaggggtaaagcctatcccagaagatactctaacaagggtacttttggcgaaaaatgatagaagactcgacggacgatgtcaaaaaatataacgtgtcagagattttcatcaaaaatcctaagagctccacccatagagctcatgatgatgcagtctccttggcccttcgcagtgtgggggatagacctaattggtcaactcccaaagggaaaacgaggcctatagcttgttgttgtcgcagtagactacttcaccaaatggagataagctaaacccctggaaataattagctccaagaaggtccttgactttgttgtaaggaacatcatttgctaaggacttcctcagaagattgtgtcagaaatggcaatcagattaacagtgacatgttcattgatttttgcaacagacatggaaacatcaagaacttctctgtcgtggcccatcctcaagaaaatgagcaagtagaagcttttaacaaaaccctcaaggacactctgaagaaatgccttaaggaagcaaaaggcagccaacctaagttgctcccataggtcctatggtcacacgggagtacagagaagataaccactgggcaaactccattcgctctagcttatggctacgaggtgatgttgcctatagagctagtgccactgtctcacaagagaataacatatggctaacaaatgaaaaacaccctactggaagagagtcccttaacgaagtagaagaaagatgagaataagccaacctaaagctataagcctactagccaaaggtagcaaggcacttcagcaggaggagtgttcggacctaacaaggaaggctcctatcaagttacagagataacttataagggagcctacaagctgggaaggtacaacgagaacataaagctcgttctcctactaagatgctggaatggagtgcatcttcacaaatactacaagtaactaggttacagaactattcaaaagtagcattatacttactcaacattcgagtacaaaagcgctagtacccataaccattttggcgtggtcaaaaatcaatttaatgatctttgaacagcatatctactaactatttctc

SEQ ID NO: 41355 - DNA, 1471 bp, Cannabis sativa
aagtatttatatacaaaactagaaagactaaatagaaaatcaagtaattacaataattcctaatttctatcactaatatatattctaacactccccttaaggtggaacataaattttaataatgcctagcttattacaaattaggccttgttaatcaacccgcacttcatttaagacctttgtgaaaatattctctaaatgatctccagtcatcacatatcttgtgcagattaagccttgttgaatttctcaagaaaaaaataacaatcaatctcaacgtgcttagctcgctcatggaacatgggatttgaggcaatttgaaagacaacttgattttttgctggaactaatgtcttaaaaacgacttcactcaaaagctgataaatccacactatcccaacgaaagattgtgccataactctatattttgattttgtattggatctagacacaacattttgtttcttactcttccaagagatcaaattgcccccaacaaagatacaacaacgtgaagtggatcttctatttaccttggaacctgcccaatcttcatcagaaaaaaaactttatctaggtgtgtccattgtaaacaatacctcgtcctactgatcttttcaagtaacacaaaatttactctaatatttcccaatgatgaattgttagagatgacataaactgacaaacaatactaactaagaatgcaatgtctggacgagccacagttagataattcaactttccaaccaatatgtgatatttcttaagatcttcaaatagtttcccatcatttgtaagatgcatagctagattcattggagtactacaagattttgttccaaattttcctgtctcaattaacaaaacaagtacatactcctctgagatgagatagaaaaatatcttgtttactccaagtgacttgaactcccaagaaatacttgagcacccctaaatccttcatgtgaaactaggtatgaatgaaagatttaaggaatgagatgcctttagtactattttcagtaataacgatgtcatccacacacactagtaacaaatgataccaacagtagatcttttatagaacacggaatggtcaacaaactaatttctcaacagcttgactaaatttatcaagccaagcacgagaactttgtttcaaaccatataaagatttgcgaagatgagaaacttaccctaactacccctaagcagcaaaactaggaggttgctccatatacacctcttcttgaaaatctccatgaaaaaaaatatttctaatatcaagctgatgcaaaagccaacgatgagtaattgccatggaaataaaaagtcgaacatatgtcaatttagaactaggagaaaaagtatcacaatagtcgactttaaaggtttgagcataacttttagcaacacgacaagcctttaatcgagcaattgttccatctggattgactttaaccgtgaatac

SEQ ID NO: 41356 - DNA, 1744 bp, Cannabis sativa
  modified_base (886)..(899): a, c, t, g, unknown or other
tttgtaaatgactatgtaaattataaagttgaatatttattataaaagttttaatctgacacattttttgagaaaattctttgattagcaaagatagcagtgtagggtgccttagctttagggcgttacacatctattagggatgaatctcactaaaacaagaactatgtagaaccaacaatgaagatcgaatatctctatgattaaacctcattatttaaaataatgtatttttaattaatcacatattttaatgatgaaaattacttagtttaagttggtctaaaattaatttttaactttaatttaattttcaaaattaaatttcaaaaatctaaatatatataatatatataatttcaaaattatataaaaatataataaaataaattcttgaaaatatctaatttaagttgttctaaaataattaaattttcaacttaaataatttttaaaatttaattaaataaaaaattaagtatcttgaactaaccatcttaatttgaaaaaatatctctatttaagttgatctaaaattaacaaattttcaacttaaaaatatttttttaaagaaaatctgaataactaatttcctagaaaaatctacttaattattaattttttaaaaatattctaatttaagttgatccaaaatcaatttgaaaattaattttcaacttaaatatattttttttaagaaaaattcaaataattaagtatctagaaaaatctaattgattataactttttttatttaattaaatacaaaaaaatacatatagttatcttgaattaatttcattaaactaagtgtgtttttcttagattaatttcaaaataatctgatgaaaaataagttttatatattttaaaaattaattatgtnnnnnnnnnnnnnnattaggttaaactagtgtaattgacctatacaattattcaactaaggcaaatgagccttcacatttggggttattcatgtgagggagggttgtgttcagtatatcgtacccactactatggtctcctaactctcacacaaggtccaaaaagagaggaatttgacccttattaaacaactgatattcattgaataagcccaatactaattggacctaaataaaatctctcaaatgtgacgattttattttagtaacctaatatattttaattatcaaaataaaataggctccctatatgcacttaggcccaaagcaaacatataggcacaggcacacactgatttggatggatcctatcatgttactaggtttatacatagatgaatgaagattataaactttacctgttacaaattatttatttgacctattgacaagtggactatggttaaaataagatcattgaatctgtcaacaagttaactatagcaatttagatcatacaataataggttttataaaataagatttaataataaataatatataaaacacacatgcaacaaatttgatagttagatatatgatttatttaatttaaattaatttttaaaaaataataaaatattattttcgaaaataattaaattaagttgaataattaatttaaaaattaaacctataaattataaaaattagattttaacaaacctaaatatctattaaatatcaactaacttcttaaaatttatgttatttttaaaagataataaaattaaatgtctaataaaattaaatgataaataaatatcatttatctaattttataatttactttaaataaa

SEQ ID NO: 41357 - DNA, 1376 bp, Cannabis sativa
tggtaatatcagatggcatgatattagtgctgctatgtgtgatatcaggagacatatcagcatgtgaaaagtcagaaagaaaattatggtgtgaatcgggtataccagcagattgaacaaaaggaaataattgttcatgaaaaattgcatccctgctacaaaaaatacgattagtgttaagatccaaaaacttgtatgccttcataccatgaggataaccaagaaaaacacaaggaacagcccttggagaaaatttagttctagaggaactaagagtggacacatatgctaaacaaccaaaagctttcaagtgttcatagttggggggctgaccatttaaaatctcataaggggttttatggtgaaggttgggtgagggtgtcctattaatgagataggcagctgcaccaacacaatgattccaatagcataaaggaatatatgactgaaaaagtaaagctctagccacattaagcaagtgttgatgctttctttccacaacagaattttgttgtggtctttggacacaagaatgataatgtataattccaagttctttgaataaaagagggaactgaagttcttttgcattatcagatcgaattccctttatattcatattgaactgagttttaatcattgtgaaaaaatgaggaataaccgattgggcatcagacttttgtttaataaacttcacccaagtaaaccttgagcaatcatctacaatggtgatgaaatacctatacccttctgtggtcatagatttataaggcccccaaatatcaatatgtaacaaatcaaaacaattggcagcaatattatgattagaaatgaaaggtagctttctttgtttagcatagtgacaaattgaacaatgaaaattgggactaggataatgtcgaaattgcaattttttattgagaggatgttgtttgatacatgaaggatgacctaaacgatagtgccaaacattgtcatcaacgacagtagaatcactaataacagaaaaaatggcagcaggaatagaattatgtgacaagttcaagtagtagagatccccatttcgatcacccatcccaatcgttcgagtcttcatactgtcctgaatgatacaatggttaagagaaaaattgaaatgacatccaatagatttgattagtgaaggagcagataataaattgtatctaaaatcaggaacatgaagcacattcacaagaataatgtcaggtgaaagttggatattgccaacacaattaactttcacacaagcattatttggaagattaacagtagaaagggaagaacttttcttaacatttgtaaacaatgataaatcaggacacacatgatgtgtggctcctgtgtctataatccac

SEQ ID NO: 41358 - DNA, 1609 bp, Cannabis sativa
aaaggtagaactctgcctaatgatatcccccacattgaggttaaagcccttcatgatagcatagacgtattttagcttatctacttgagcatcagaaaagtgcttgttaggtatcaaccttgcactcacaaaatacaaccatgctttggccaccgggttcaactcacatcggtataactgatagggttcccaatcatattcatgaaaccttaattcggggtaacccaaagttttggccatgtcaacataatccaacttcttttcttcaataagcttttttagttgttgctcctcacgggagaaagttggcaagtcatagatgggatggatagctctagtagaaaccggcacatcaacacccctaactctcactatgtcatcctttctctctggccaattagctaagaattcgagggctaaggtttggttattcctctcagtaacatccacaaatttcgtccatcccctgttgattacttgttctcttattggctcaaatacaagagggatgccaattctagggtttttaagatcaccaattttcatacccctatcttcaacgaatggcctatttttcatttgtaaatagcgctcttgtgctttggcacttacaaatctcgccctatcaacattagatcggctcgatgacctaggtgggttggatgaagacgcacctttctcactcactcttgctcttttgggtcccattctcactcaatactcttgacactcaagaaaattcaagaaaattttcgacagcacctccctttaaaattcctctattctgggtgaatacacaatcccaaattattcaatcttcactcacaagcaattttcacagtattgaatcaaacaatagccaaaaatcacaccaagtttcacaagattctcaagaattcaaaattatctaataacaatttaaaagataatcataagaatttacttacattaatgagaatctccttcactctacctccattgatgaagaccttgaagttcttgaggtagatggtaatgaatagtgaatttttgttgaatgaaaattagggatttgagtgtggttttgaaaggggaagatggattgatgagagaaatagggttttaaagtgattggagatgaatgattatgaaaacaatggaagaaaaatggtttttgtgagatgagattttagatttttaatgggggaaaggatttcggagtgggtggttatgtgacaatttagattattgcttaatgcagatttcatgtgattctaattaagagattaatcaaagagcatgtgatttagaaccaagaagatctgaaaagagctaggttaatttgaataatctgtcattcacaacaagaattggaatagtatttaggcattaacaattgggtaaacctatcaacaagtttctcttccttatcttctcattttgattactttttattgactatttaagcgtcttgaatttttattcggttattaaacttgaaaaatattgatttgccaaataaaaacataaatttagtctagtggtattcaatccaattccctgtggttcgacctcacctatgtaagcttactacttgattacgtgtacttgcatactatttacaattttc

SEQ ID NO: 41359 - DNA, 891 bp, Cannabis sativa
ctaggactaggacaaggagcaggaaccagacccgtacccgtacccaaaccaaaataaaaatctagaccgagacccaaacccgaaccgtgactaagacccgaacccgaaccgggactaagacccaaaaccgaacctagagcgggacccaaacccaggccaaaaccgggacctggacccagaatcaggataaggacctgggcaacagaactaggactgggacccaagacccgaccccagacacggtcttgaacctaagacccagctcgtgacccggcacgcgaaatgaaatcagaccgggacccaagatcaagatctagatctggacttggggcttggaccgaacccatagtcggtgtctagatctcggacccagccccaaaccctaacccagacaagagcccgaacccaaacccgttccgaacccagccccagaccctaacccagacgagagccccaacccagacccagacccgaacccagccctatacccaaacttggactaccttgtgacccaaaattggaaccgaaacgagaagtagaccgggacccaggaataggaccggaaccaggacttggacctagacctggagccataacttgacctggacctagacttggaaccgtaactggaccaggacctggactccaacccagacctagacccaaaccgcgaccaagacccagatcccaacctacacctcgactcggttctaaatctggactcgaactcagacctaaacatggaaccagactagggacacagaactagggttgggacctagaactgcacccaagtctcggtcccgaacccaaacttggacctaggaccccggacctgaaccagaaccagaccaggacaggtgagagggatccaaatctgggactcagacc

SEQ ID NO: 41360 - DNA, 1340 bp, Cannabis sativa
gacatattatattttgtttaagttgtttgttacttcttttttcattaacaaattataaaataaactataaagttatttttaatttcaaacattttacgttaaaattggtatatattaaattttttgatgtgaaagtttgattacttatttttttttttaaaaaaactatataaaagaaattaaaatgttatatatgattgccctgaagtactttttcagctatttagaatactatatgattttttttaaatatgaataacaaaatatattttagtaacctattaaaattaattggaatatttactcttgttagttttaaaatttgattaattaaataggaaaagaaaaagaaactaacaaagttatttttatttcggtcatcttcattggtgaaggcgaaaaaatatattttttgcatatcaaaataattatctttaaaagtagattacaattagtataatttttgaactcaaacaattactaatgaagtcagaaaaactttataaggttttgaaaaaataaaattaaattaaaattaagaaaatgagagggacgtgtaaatgttatttcactatgcaaaaaataaaaagcaaataaaaaagcaagtcaaatagtgtggcaaccttggattccctggctttagatcaatttcgtgaattgatggagtccgtacgacataaagctccaagtcttagaagtgtggctgacttgttataccgcagaaacagaagttggaattctggctatctgtgcatcttgtttggtgacaacatgggtaaagagatcgctgagattcagattgacaagaactcagcttatgattctctcatctagaaggattccactgctggaaaatttagtgtcaaaggggcctattggttggatcaaaaggctagatttcgtgctcaagaacctttgtgtaagtggatatgggactcgaaagtccatcctagactaagtatgatgttatggagagcttgtatgaatgttcttcccactggagataagcagggatcctgtagggagtgccccatctgtcactcggctattgaaacaccagtccacttgtttgcccgatgtaattttgcttcggctctttggtttactagccctttggctgtgagaattgagttggtagctggagacaatattgctgctcttgtcagcaacctgtattcctcttcggatccatcttcgagaatcaagttgttaatcctcttcggtgttctgatggactgtatttggaagaccaggaacactatcgtccacaatgaggctgtccaacccagtattgatgctgtcaggagagacatctccaacaagttttctgaaatgatatc

SEQ ID NO: 41361 - DNA, 1327 bp, Cannabis sativa
atagcaatgcatgtacatctacgtacaagcttgttactatcctgtactacttgccaaaggagagctgccctatgacagctttagcttattactcatctattaatttgttcatttacctacacggtgatatgccatacttaaaatttgagggtaagtgataacttataattatgtcactatctagttatatatgtttgcagtgtaattatgattaatagtgtgttttattcatgtaatcatgcatgtcgtgtgctatcaatttggaaactttagaataaagaaagttaaagaatggtccactatattgacgtgcatatgttaggtattatactgtccttaatacatcaaatatatatacccgtagatggttacgtacgttagtttccttataaaaagatttattttaaaaaaattaattataattattacttagttaaaaaattattattatatattattattattttttatacatatcactttactagatagaaaattataattaagtgtcaccattgcagataagaggaacgatctcttctatccgaaaaaactcatcgtctatccatatatatgacatgtgagagagataccgaataagattttaatgtcgaaagaaggacacctatagctcattatggtacacggaatcgttattcagagttaaccaacaaagacaatcagagcgaaattctttgacttgaaattcaatatctcggggccatctaaattctacaaacataacccaaaatttctacaaactgataatatacctgtacacaacaagtttatataagaatacaaaattatagacacacattatcgactaaaaaaatattatagtcacattttacatattttttagaaaaaaaaattaattattaatattaatttttcaccgctcaaattattcagcaaaaaagaatatcaaaatttttatataccaggtaagaactgcacgtgccatctacaagtatatacttttgtaacttaatgcaccactctagctactagattaggcaaactgtcatgattttaatttattttgcaactaggaaaggtatagccgcgcgaagtgttagctaatattttttactttatatatataactttgtgttttaatttagtatagtataatatgaaatatggtattgtgatgctttataaaaaaaaagtaacagtttcaattatatattcatgcaacattgatgtatgacttaattcgtacaaacattaatgaaagagtaaactgctttcagcaaaaaaaaaaacaaatgaaagagtaaacatcatatggaatatagatcgtgcttttgaggtagaagaa

SEQ ID NO: 41362 - DNA, 1796 bp, Cannabis sativa
  modified_base (1754)..(1771): a, c, t, g, unknown or other
ggtaaaataatttccaacatttttctcaaagagtgacacgaaaaaggagcaaacttttcaagtcacacaatggtacaagagtagctcttcccattgcatccatgaaaggtagccttttcagctgggacaacacactattcacaatcaaaataggaaatctaatgacagaatatatgaaacctatcaaccaaaaaggccaacaatcattgacaaatgaaccacgaactcgagcacgattgtgaagatgtctagaggcaactttcacaaggtcagatggtgcacacaccaatagaatttatagatgagcaaaagtgtgagcatctaatgcttttgtgaatatattagaaagttgagcacctgtggacacatgagtaatagttaagagcttatattctaccatttgcctaataaaatgatatcgtatgtcaacgtattttgtatgagtgtctggattttttgaaatgttaatagcacttgtactatcacaaaatagtaccgaagagtcttgcagaaatccataatcaattaccattttgttgagccaaatgagttaagtacaacagctcctagttgctatgtactcaacttccacagtagaaagggagatggaatttcgtttcttactcaaccatgagacaagattatttccgagataaaaacaccctccagtggtacttttactatcatctaaactcccaggccaatttgaatcactaaaactaacaatagacatgttggtgtctctcgagtaccataagccgaattcaaaagtcccagacaagtatttgaatatgcattttacaacaaacaaatgggactgtttgcgattggcttggtaccgagcacacaaacaaccactaaaacaaatatcttgacgactagctgttaagtaaagaagactccctatcatgctcttatacaaggttggatcaacaaattcaccaaactcgtctttactcagtttggttgtggtaagccaaacttttcgagcatctttttgataatatatttggattgagaaatgaaaattccctaatgagtttgtttgacttgaaatacaagaaagaactaagatcccctataagactcatttcaaattcgttagtcatgagatcaacaaacttggcaacctccctatcacaagtagacccaaaaataatgtcatcagcataagtttgagcaacaaaaatacctggttgcaaattcttaataaataaagtattatcaacagggcctctcacaaactcatgagaaagaaggaaagtagttaacttgtcataccatgctttaggagcttcctcgaggccatataaggccttcttgagtttatacacatgatcaggatacttgggattctcaaaaccttggggttgtttcacatacacctcttcttatataaaaccattaagaaaagaacttttcacatccatttggtgcagtttgaactttaagaaacatgccacaacaagtagtaatcgaatagattcaagccgagccactggtgcaaaggtttcctcaaaatccactccattaacttgattatacccccgagtaacaagcccagccttgttcttgataaaagtgccaaattcatcaaattatttcttaaaaatccacttagtcccaatgatatttatgccttttggtttagggaccaagatccacactttgttcttcttaaactgccccatctcatcttgcccatggtccccgcacaagttgagataatattatcttgtagactcagttaattnnnnnnnnnnnnnnnnnnagaattctaaataagactatgtctt

SEQ ID NO: 41363 - DNA, 2925 bp, Cannabis sativa
  modified_base (304)..(304): a, c, t, g, unknown or other
  modified_base (687)..(692): a, c, t, g, unknown or other
  modified_base (1927)..(1951): a, c, t, g, unknown or other
  modified_base (2320)..(2320): a, c, t, g, unknown or other
  modified_base (2551)..(2554): a, c, t, g, unknown or other
taaaatacttacctacttgtaaatgatattttagtaaactaatatagttattgaaatgagtatcatttaacgcattaagccatgctttaaggaaaccacgtttcacttctaatagttataacatctatagattccatatatatgattagcgctcccactcaattgcactatcatgctcccaagatgtaagtatttggtcgatctatttggtcagctttaacgaacaagtcaaagaacatatataatacatttaagccagaacctaaccacctcaggattaagatctattgatctaagatcaacnaagtgatattgacttagaaaaaaaaacataacagtaagtttatgatatcatttctactatcaatatcaccccagttcaatgtatacataatacatccgatactaaaatactttgctaatgccctagaaaggacattccacatatcattgtgtaagtaaaatttgtcaatgattatcacgtcagtgtaaatctagtgcactaaaatatcatgggactaaatactttgaagcatataattatgattattttccattgtgtagacaacactataatcatgaataactatatgttcatgacttaatagaatttatattttaaacatataatcatgaaagtaataatgtgaaccatacaacataaaatgatttctgatcttttattannnnnnaaatctgattatattaaaataagttttatttagggcataaaatcctaacatgaacatcagagacttgtaggtttgctacaacctttgacccttcctaaatggaaatggaagatgttgctatggattttgaggtgggattgcctagaaccaaaggattgtatgattcgatatgggtgattgtagactgttttaccaagttagcacacgttttaccagtggagacaacccaggcagtgtatccgtatgcagaattgtatgtaaaggaggtagttaatctccatggagttttaaagtccgttgtatcagatagagatcccaaatttacttctaagttttgcaagagtctctaaaaagtcatgggtacaatgctaaaattaattacaacttttcatccttagatcgatggcgagtctgagaggacaatacgaatgttgtatgatatgttacgagcttatgttatggactttgaaggtttctggagcaagtatctgccattgatagaattctgctataataatagttacaagctactatagggatggctccgtatgagatgttgtatggcaagaaatgtcgttctccgattcattgggatgaaactagagaaaggaaatatctaggtccagagacagtacagaggagtaatgatgccgttgaaaagatcaaggctcaaattcttacttctcaaagtaggaaaaagagctatgcaaatcataaacgcaaaaaatatagagtttaaggtaggagattattttttcctttgtgtttcacccatgaagggtgttaaatgttttgacaagaagggcagattgagccctaggtttacacgactatttgagatactggaaaggcttacctcaagcattgtccacagtgcataatgtatttcatgtattaatgctaaggaagtatatatcaaatccaacccatgtcctgagttacgacaccttagaattacaactagatttatcttatgaggaataaccagttcaaattctcgataggaaagataaaattttgaataacaaaaccataacattggttaagatactcaagagaaatagcaaggtgaaggaagccacattggaattagagtttgacatgaggatgcagtaatatccatagctgcttattggaagctcggatatataggtcgatggtccccatactagttgagactatactacttgtaagactcagttagttgattttgattaattaattataattctaannnnnnnnnnnnnnnnnnnnnnnnnttttcactaagcaagggcttagttgtgaagaaaagagattctagggtttatttgctaattaagagactgtgttaagtctaattaataaatatgttaaatggcaatattatataataattaattttagttattaaataattagaattggtatttaagtggttaaattggaaaaatagaatttttgagaaaataagatgaaaaattagaaaaatggcaaaattacaaagtggggcccacaatcgatagccgaccacttcacaagggttttgccactttatttctctattattttaatgctaattaaatctaacgtaaccctatgtggtttcctataaataggtagggatggctaaagggaaaagatgatgnatctcattccttcagtaaaaatttcaagcctccttcactaccctagccgaaaccctatctctatcttcctttcttcaaaaccgaagcctcatagtgaaaagagtgagtgcccacacacattaagtggtactcaatcatagggtgtaaggctgtgaagaatccagtttcaagagaaggagattcggactaagatcttggtgatatcgtgctacagaaatgatacaagggttnnnnatctgagtagaaggagacattatattacgctgcaaccattgtaaggttcctgatactttatatgtgtttatttcaaatcattttagaagttcatgtttaggattttaataacatacttgttagtaaatctagattctgataaaataattccaacaaaaatcactattaaagaccaaagtttgagctctaaagctcaaaccttgaccagattatcctactactacttcaagctcaattgagaagaatagagaaagtgatttcacttccttaaattgtccttcacaacagattgaaccaacaataaaaacaatccaaaaacggttaagcaatgatgctttagtttttgaatcacgtgttttagagaatgataa

SEQ ID NO: 41364 - DNA, 1922 bp, Cannabis sativa
atataagaatgagtgcccaagagtcaaataacacagagaagtaagagttattgaccgagagctgatctattacaactgaggggctagcttctacatctgcttgagttaacgcaaataaccttgctggagcgggtttcgcagcaaccttcagctcttctttcataagttggtggcaatcccttttatagtgtcctggtataccacattggaagcacccttgccgtctacgctctcccagattatgcttcttacaattagggcattctacataagtgtatcgggttttggagctaccctgacgattgcctcaaccctgattccctcgaaacctcttgttcttacctgagccatcgtatgcaataggggcctttcttttctgattaatggtcgagccactacctcccctactaaagcctgaggtaggaggagtaggagccccaccatcaacctgagtccctcgagactcctaggtgcactccactgtgcccttagatcgcagtgccttacccaccatatatgcataggtggtgttgtcattggtagtgatcattaagtcatgtcttatctttgagttcaacccatccaggtacttttctttcttgctaaaatcagttggcacgattccaaaggccaatctttccaagcggtcaaactgggatgtgtattcagtaacactcatattttgtttctgaattagctgagtgaattctttccttttcgcacttctgactgtctcgttgtaatattttgcattaaaaaattcttggaactcttcctaggtcattgttgtaacatcatgagtcaaggacaccatgtcccatcacactagtgcgtcttcttggaatttgaatgtggcacaagccactctatcattgccagtgatgcccataaattttagaattctagtaatcacaattagcaacttctcggctttcctaacatcgagaccttctagaaaaattggaggtgcctgcttgcgggacctttcatacagttgttccattctgttcactgcagctgctagtcctacctgcatagtaggggcaggaggtacttgcactactggagcagggattgcaggagcaccctgctgtctcaggcgttagatctcttcatcttgctctttcattttggcttgtatttctgtaaacctattttcccattcttgggcagcctgtggcggattaacatcaccttgagtaaatgtaacaccctaactattttaggcatgttaacataatttttaacttactgtgcagcgcgttgctaatcaacgaggttatcgaaaatcgtaattaattaagattttgattatttaattaaaaacataaaatagcatacatataaaattttgggattccatttacaaaagcatttacaaaagtttcactgtacatatgcaaaactctgtcgcctagagactatacaaaataaggcctgatgtcacaaagatcatacgttctaggcctaatcgccccaacatgaacaatcttcatttgctcgctctcacggctgctcggccttagccttgcccttacctacacatggaaatagcattgtgagtcaacatactacataagaaaagcataaaatacaacataacagtgtatcccgggttataatcaggtgcccatacacccaaccagaactgtatccccatgtcccacacggtactgagtctagaacgttcatacgataatactatcgaccataatgtcagcctatactcaatatgccagtcatactctaggcttatttatgttacaacattgatcagtatttcaaccaacatacatttatcagtaatcaatacaactctacgtatattattactgctatcaatgtattctaacaggcatgaacatcatgtatgctaaacatgtaattacatattcataacattatactaatcttaccttttt

SEQ ID NO: 41365 - DNA, 1412 bp, Cannabis sativa
tcttatataacacatgtttcaaggaacaaagaagatgattcaggtggttattacagattcattaagttaaaacctgatcaaccattagatgttgattgcgaacagaaagattatggcattttgtatctcaaatatctggatggtattgtagatgatgagaatacaacaccaaagaaatctgacaaagttgaggagattcaacttggggacgaatccgacccaaaagatgaaggtgatgatatatgccaagactatcgcacttttctggattacttggaaaaagaaggtgaagaaactatggttgaggatgatgatatgataatgtgcaaatacttacaatggatgagaactctcatgccgtagtatgttctcgtacctaagccatttatgtagtttctactttgtcttatttcttatactaagtgcatgctgaagctgaaattttttagagttagtaattattacaagcatttgagttcattatgtaatttttcacgttaatgacactgatttggctgagatcgaaggtggtgaagttgcccctacaaacttgcattctcacaatggttttgtcttacaggttcatttctcctttaagcaagacagtaaaaccaagagtccaggtaactggctagcggttatggcttcttttgtgaactcatgacattgttaactagtaaacaacccgcgcttcgcggtggatgtttaaaaaattttaaattatatatataataaatcataacttttatttaatgacaactaagtaataaattgtatcaaattttaatataatttatcatataattttatatgaaaaattaggtgtgtacaaacagatagatcaaactcgtatttatcaaatctcgttattataatggaagccagacacaacctgtataacatgatgttagacttgatccctcaaattgttataagaattaataaatttatagaaaactaatcaaataattttaaaaccactcatcatcgtatatcacttgtagttatcattacattcaagggtgttgttattgtcatatatcacctatataacatgatgttaagcttgaccccactatttttgttgtatatataaaacaaatatgaaaaaagtaactcaaagagattacactagagcccagttgaaaaataagtaggatggattgaaaaatgaatggaagctttggaagcaactcaaggaaaaagaaactagtttaggatggagtatgcaaaagaatacagttgatgcatctgaagattggtgaaatagtaaattacaagtacattataatcttgttaaatatttatattaaactaaaagacttttttatatatggtacatttaattaataaaattccttttgtagactcatcctgatgctgcaaagtttcgcattcggggaattgaacca

SEQ ID NO: 41366 - DNA, 1670 bp, Cannabis sativa
gactgaacattcacaatttttagaataaaatctcttactccttttgattcatcatacttaatggttgtcatttcatccataaaatgtccagtttcgacatttcaccagtgtcatattttacaaaattaaaaaactctttgacatttgtagtgtctcataagccactgttttcatagcgttgagattaagatgatttgatttttcccattgtgcatgaagatttttctgggcaaccatactggtatccgtacgatcaacatgtttttcttctcgcaagcataagtctaaattcattatgcctaaagtaaatttcacatctcgtttccatgccttaaatttggacgtattcagaatttggattgaaacgttattgttgtttacagaaaggagaccaaaaaattcaaaaaattaaaacttgatcaagctatataagcaatgcaattagaaagtattgtaaagttaattggtaattataaacactaatttaagataagaatataacacacacatgatctaccttcataaagttatcaataaatagtttatccttgtattataatctctctccatatccatatgatgatcattattcaaaagaagaaaccatcatcatcgttaaggaaatcatctaattctaattagtaattaactaagttttttggtttgatctcgagtttgcggaatgggaatatttggtagtccaaagaaatgttaaaagtaatgaatctagtttggttggtacattttgaatagagggaagtattttcaaagtatatgaatcgtaattgtacaagtaggggtatttattggaccacatttaatgtttttagacttatttaaattcgatccaattatatattggatgttaaatttatcatccgatccgatgtaattaatttcagtcatccaatcgattcaacatctatcagatatatgttaaattagatcaattttattgggtgtatttcatatatatttattagtttaatttgagtttattcaatattttaaatctaatattttttagatccaatccattcaatatattttaagtccaatatatattagatctattttaatattaattttaatccattcgatatattctatgagattaaatcttgagttatttcgaattgaaggaaaatgaaatctatatatttataaattatttggtgttttaatttattattaatccaattaattaattgtcaatcctcttttattaatttttaccggcaggtcccttttggtaaaaaaaattatggtaggattagttcttctttttggaccatggagagagacttaattaattacaaaataattaattaaggagtttttacaaaaatattagattttggacaaaagtttacaattttattatcacacataattttttataaaaatactttctttttataaaacaaccgtaaaataacaaaacataacaatcaaaacaacagtggaataactaaaaaataaccgtggaataacagtgaaaacttaatacaatacacagtattttaaaaaaaaattctatcccacgataagaaaaaataaaaaagttaaaaatattaatatgtgatataaaaactctattaattaattaatgtaatataaattataatatggcttcatttattaggccttatatttgactacatcaaaat

SEQ ID NO: 41367 - DNA, 1247 bp, Cannabis sativa
  modified_base (192)..(203): a, c, t, g, unknown or other
  modified_base (941)..(944): a, c, t, g, unknown or other
gttttaagtcacgaggtacgggttggggttgagttttggttcgagtcttggtttgggtcctgatttgggtctggggcgtggttgaggttcgggtttcggtctcggttaggatccgaacgtgggtcctcgggtctaggtccaggtctcggtcccattccaatatcccagtccagttccagttcaagattttgnnnnnnnnnnnnagtgtgggtctgggtcttggtatgtgtccgggtcctggtttgagttcgattttgggttcgggttctggtctaagtcctagatctagacaccgactactagtcaggtctaagcatcgagttccgaatcccaggtctcgaggttggtcctaggtccaggtttgggtctggggtcgggtctcagatccctatccaagttctgaggcccaagttctggtcctagtttgggggaccaattcccaggtctgggtcgcccatctatgttcggttcctaggtcccagtccgggtccaagttcgttttcgggtttgggtatgggtccagtccgagtccaaatcttggtttgggttcgggtccgagtttgggtcctagtttggtccgggtttcgagtcctaggtttgagtcaagttcttgggtcctggtttcggccctggtttttgggtcttggttttggtctgtatctaggtcccggtcttggtttaggtcccaggtcacaggtcgcggtttgggtctaagtcccgctatgggttctggtctgagtttgggtttagattttggccctgttacggtccaatatctgggttctagtcccagtcctagtctgattccagtatcgggtctgggatcaggtcagacttgaacctgtgacccgatcccagacccaaactctgacctagacatggatttggatacgaacctagacttgaacccaaacccagacccatacccactgggatcgaannnngggagttggattcggaccgagaccaagaccatacctggacccatacccaagacttggactcggacctggacccaaacccagatccagactgagatctggacttggaccaagacccaaccctagactcgaactaggactcaaagcccgacctagacggagacccagacccaaacccggacctgggaactgggactaggacctgaacccaaatatggacccggactaggacctaagacccggacctagatgggggaccttgacccgggcctcagaacacagaccaggatcggaacccgagactca

SEQ ID NO: 41368 - DNA, 2952 bp, Cannabis sativa
agaataatcatctacaaaagtaacaaaatgtctgaatccaagttgagacaaaataggagaagggtctcaaccatcagtatgaattaactcaaaaggaaaactagcacgtttattgactcgatgactcaaactaacacgatgatgtttggcaaaatgacatgactcacaatataatgaaaacaccttactatattggggacaaaatttcttaagtagaggagtggatggatgacctaaacgacaatgagccttaaaagcagaagcaacacacggataagtaatagaggctggtggaaatggatcaagaacatacagaccgccagattcatgttctttaccaataatcttcttcgtcataagattctgaaacaaataatgaccgcgaaagaatgacattgaacaatttagattacgagtgaattgactaacataaggcaaattaaaggacaaattaggtaaatataagattgatgactaagtgagcaaaggtgtgggagcaacaatgctagatccaagaatatgagatggtgatccattagctaaagtaccagtagaagtagactgaaatgtggaaaagagactggaattacctgttaaatgatttgtagcaccaaaatcaataactcatttttaagatgtggaaagaagacatacatcagagttacctgtatcagctatcgcagtgacagaaggagaagaagacttaaagtgattcctaataccttgagaacttggcaaattcatcagtagaaataatgaccgattggtgagatgcatcactagtgcttgcaatattagcagagtgtttttgtcgatttttgaactttaactttctacactcaaacttggtgtagcttggtttcttacaatagttgcacatgatgctccagaatctgttggtcgataatcaggtccttgtgaattacttcctttgtatccacttggagtagagtttttcctagtggaaaattgttacgactcaccaaggcactataaagaagagctaaaaaagtagtttttgtgcgaagaacacaagtaaacacatcttgtaaagaggagacatcagaaccagagagaatttttgactttgcagagtcaaattcagatgagaatctggcaagaaaactcataataaccatttgctttcattggcgctgttgaaccttcacatcagactaaatgtcaataacacattaagctccacatatgtttttttaaatgccataaaataagtcataagagactgatcttgtttatttgcgcgataaaaggctttgcaaacatcatatatgcacgatatgttgtctttaccagaatacaaaaactccaagtaatccattagttctttaatcaattcacaatgattaatcaaactagttacctcattgtcaatagaatttcgaatttgaagaaacaagcgagcatcctcatgtagccacactttctttaaatcgtcttttttttttggaggatcatcagttaagtgatcatctttgtcaatactccttagatatagtcaaattgtcttactccattccaaaaagtgaaccaatcaatttatggttcgtgattttagacatcacgggaaccacatcggaaacaactagtggttttgaatctagttatatctctgccataatctcataaacaaatattgaaagagacgaggtagaatcgagtaacgaaaaataagtaaagaatgcccaaatacgaagtagggagaaataccaaactacaacctgagacagatgcaagtagacttaaggggagcaaaaaacgaaccggttacacaccccaacggtaggtggtagaagaaacgtgcggcgcgtgagccacacgcgcgaggaatccggggaccggactttggggtttggcaaatcggcagctgggcaatccttctgagtgggtagtgagaacaaaagatccccctaaatatggttttcgaaaaagaaccctaattgaaaaacctaaatttgtaatgaaccctaattgaaaattgaaatttgtgataaactctaatttcgaattttgaattcctgatctcacaatcaactctgataccatgtaaaacatgatgattgaattgtatattgtattacatacaatagtatgtatttatatacaaagctagaagacgaaataagaaactactaaatacaaataagaaactactaaatacaatttaccctaatttctacaactaatattctaacactatgcattaaacatagcaagatgcttttgttttgtcaactttgaaaccaccccatatgtacaataatttagcattttcacctactaaaattaagggctttgtattattattttttcaaaagaagatagtagtgtagctaaaatataaacgaggttccattcctttacaattgtgtttgtttgtaaggttctcttctttagacttgttgatttgtcttaggaatctctttatttatttatttatttttttgtcttaggaatctctttatgcttattattgtccaattaaacataatacagaaaataaaattctaacttacttctatttgtattatgggtaactaagatgtcaaaaacatggaacgtcaaaaagcttgcaaaattctatggcagtgatcataatcctttattgtaagaggagacgttacaattatgaaatttcttttaaaatccttcctaggaaaatctatttgtgagcaatctggtcaaaaagatgtgatccacattccctattgtcaaatggaattataaaatccatggatgaacacttgacttgagaagtgagtgacctagttagattatgtttacctcaagaaaatcatggttggagacgtattgactctcaaccaggcatctaaatcctcccacatccacaagaacagaactttcttggtcttgcggtttgttctctatttctgtgcctgcatattttgacaaggaaaagcttctttgaagtca

SEQ ID NO: 41369 - DNA, 1413 bp, Cannabis sativa
  modified_base (679)..(689): a, c, t, g, unknown or other
aaacattgtaaaattgtctttacagaaaataataccacaaggagcaaaccattgtctcggccaaaaggccaattttctaaatataaaaaaaaacaaacaataagttaaaaaccaagtctacatagtaggagacttggatgggtcttcttggtctacctcaacctcatcttcctcattaacctcttcttttctgttttctcgcagaaagcaagcatatcttcagctccttgacccagaaagctgaagtctatctcgggattggctaaccaggcttgatagatggtgcttctggcaattctattgaccctgtttttggtatcaactttggcatcttcaagttttttgtcatcctcggcctggatggtcttgatggaattttcaagctctttgatcttcttctagttagcttgacgttgcttttcagcttcctcctttaccttagaaagctcagactctgactcgttccactttttggacatggcatctcgatgctctctagtctgacgaagctttgtctcaagcattttaactctctaatgccctctatgttgagcggcaaaggatagtagagatgcctctgaggaatgaagacacgaaataagaaagaggtacaaagacgaggaggaaaaaggaacaaaaagaaaaaaaggactaacctgatgcatgagatcataacttnnnnnnnnnnnaccctcaaaattgccctttgttagtagatccagtagctggattcaaagccttgataacgctaccaaccgttggtagcatgtagcgagaaaagttgtgaaccttcagtcctagctttaaggggcaaggggcaggagggctcgagaagaaccatctccgggcgagaaccaaagaatttcacttggtgtacagacccagttgggttgttcactagcgctagtgcttgccacagtaggcgcaaccttctctggagattttgttggctcaatagtgagttggctcgtggacttcttcttgttgacagttgttttagttcttttgggttctttgatagaacttgaggcttcatttgccagggcagttcatttcttggctcttttgtcaatgagcggggggttgctgaacatgttttccaagtcaagatctatatcttcgagacaaaagagatgcatcaaacactagctcaaaaacaaataaaagggaaatggggaataaactcccacttaaagaaagctaccataatcatcagatgatgaagaaggaggactatagtaattactaaattccctagaccatgtgatcatgaatatattagaagtatttattggatctagatcccaatttgaatctgggtggctcgccctatccaagttggtcccgtattgctcggcaatcccataatacgagctagtgcaactaagctggatgtggaacctaggataccaa

SEQ ID NO: 41370 - DNA, 3450 bp, Cannabis sativa
  modified_base (1728)..(1735): a, c, t, g, unknown or other
gacttggctggaagggcaatatgagaagatctgcagcagcagcagcaacaacctttgaagaagatgatcgaaatttcacttttaccctagccatcaccgatggttcaatcgaaaaagtgccaacattttcgactcgagatggaaccaccacttcagatggtggtgcatcgactccaagatcaaaggagatatcatgaaatatcatgggatattttttggagagagaaaaaactttctttcgagccttaatcttggtggtgcgaccaatagaggccattggagctattgcaggtggcggggtggtcgaaattaaagccagaggagatagtggtggtcagacttgagatgcagcaggggccttggacgatgatcctcaaccacactcacacacgattttgtgatagaaacacaatgaagaagaagagaatagaaattgtgtgggaaaaagaagtaggtgagaataatttataagacaagacttaccatttttgaaaagaaaaataccataaaggcgtttcctttttcaatttgaaccaaaaaggaaaccaagtcccgagtatgcaactcacacgatcagccaagaggttacccatttttttattaaaaaaaaattatttgcaactaaaaaaggaaacaaaaagaaaacttttatttattttattcgtaaaagagcaataaagaaaccacaaaaattgggtccattaaaccctacacgatcagcccaagacagcttcctccttttttaaaaaaaaaaatcaagataaaaaagacagcaaagacaactaaaagatgacaaatatcaaacataccataaaaggataagttgacaaaaataaataccttgatggccaagaatattttaaaacattctattacttcttaatcccttgaatatttttttaattaaatgataaacgagaatgacaaaaactcaaaaaaattacctatgatcaatgtggattatcttaaaaaaaaatataagacaaaccaaatgaaaatagatgtgtgtgtatgatagagataaaaatacttgtgatttttgaaaaaaaaaataaaaagaattttcgagagaaaaaaacacaattcaatcacaaacacatattctttaagaaaatcaatcaacatgtacgagtctgatacacacatatgggagtaaaagtttgagataatacaatagaaaaagtgatgttcgataatttattttaaagaatggagtagagaaattgatatatgggagtaaaagtttgaggtaataaaatagagaaagtgatgtttagtaatttattttaaaggaaggaatagagaagtgtgctcatatacatcaattacaaaggctatagacaaacttagataaaggcaagagaggacaatggactctctttatagtacaacatgctcctaggtattgtaattctaattgtttttatgataggctaattagtattttttccccctccccccaaactttgatatgtaccaaatcacgctctctgaactttttggtcgttaaaaattccccccgaactattgagattgttagatttaaggaattttttctaatttcattcaatttgatttgttcagtgattgtttatatactaaatcatgctccccaaactttgatttctaccaaattatgcccctcaaattttgatatgtactaaatcatgccctttgaactttcatctatgttagaatttttgtactaaaaatagacaaaagtccttnnnnnnnncaatctcaatagttcagggggaaaatttaacggccaaaacagttcagggggcatgattttatacatatcaaagttcggagagaaaaattactaattagactttatgataatattcattgtagttgaatttgcactgccaaatttatatttcaaaatagtttagtttctatcacttgtgtatattaaaaaacacataataaaattatttaattttttttttcattactataaaatattcgaaaatatatataggaattttattataattataattaacactgtcataaaaaatacctaaattgagccgatttggaaggatgttgtaatggtacaacacataaaatatattataccctagagacctcctatcatatataaagatttgatgtaatagtaaacgtgatattttttttcctgtaagatgttaagatttcgaattgtattatcttttatataattataaaataattttttaaaacaaaaattgaagtgtcaaaaatttaatcctttatcttgaggaaagataggacaactacagccttcttcatcttatcttggggtgttaagatttcgaattgtattatcttttatatagttattaaataattttttaaaacaaaaattgaagtgtaaaagatttaaaccttgatcttgaagaaagataggacaactacagccttcttcatcttatcttggggtgtttataaaatatccaatttaattcaatctacaccattaaatttaatctaattcgcaaagtgtagatatctgcacttatctaatccaatctgcaaagtgcagatatatgcacttgtgcgaattgaattagattgaaaaatctaaaatctgcacttgtgtgaattgaatattgattgatatgtaaaagtaaccgatctaatacaattcatacatacttataaacattaatatatatacaattaatattcttaatgtaaaaaatacatatcatacctctctcataacacacccctcctctctctcttcctctattctttctgtgtctttcgctatcttcttctcacgcacagaaagaccctagcatcccacgacttctaaccaccgcgcctccactcaaagaccaccaacccaccaatgactacaaacccaagacccaagatctccgaactatgaccaccgccccgtgaatgtaagttttccatttcattttattgtattctgtgtgatttatggttaaaatgtatgattttacttataggtttattgatttaggaataattgtatgattaatgtctgttatctatgagttgatgttagatttagggtagaaaacggtcggatctgagttctaggtaaaaaattggtttttttccaggcccgatggtagtcaaaatgagtaaaagttgaagacgaaggtctaatggtggtctaatagtggtctaatagtggcccaatactacctataaatgtaagatatggttcaataatagtttgatggtagtccgatggtagtctaatggtggtctgatgctaccatttttttatgtataaaaacataaaaaaaaaatatatatattacatcgggccaacatcagactcccatcaaaccaccaccggtatggatgggaatgagaagtatggatggtgaagttagaagagaagagaaaggagaagggagaagggagaagggagaagggagaagggtattatgatattaatataaagtgtgctcattt

SEQ ID NO: 41371 - DNA, 1013 bp, Cannabis sativa
  modified_base (717)..(723): a, c, t, g, unknown or other
gtgcaaataattttcttaaaggtatttttataaataaaatcatttttaggtataatattaaaaaaaaaccctatttatatattggaatcaaaataataaattaaaaaagtaaatgggtaaaaaaaaaaataatcaaaaataatattttattatatttcttactaaactatccgaaaaattaaaactttatttttgtacataattaagaaattgaaaatgaaatttaactaaattatcattgttaaaaactataaagtgtttgcatattttgtttttttaatttctaattaataaaataaaaaataaagtagatatatagaaagggatgtataataaaaaggagaatttttccctttttttttcttaatttaagtgaccccactaacttctcataagagaataataccttcttattccctttttaagtaaacatacattagtacttatgttgtgtataatattatatttgataaaacccttttctttctatatcataaattacacactaaataaaataaatacatgtatttttctttcaatattaattagtacatgatcaaaaatatcagttaggaagtggtccttaaaaataaatgcaccgaagagtaaactattaggtattattcttgtaattttgttggttttttagtttttttagtaattttgagctaatgatttgggttgtgtgttaaattttaagtttgtattttagatttnnnnnnnaagattgtcattctaatataactgtgttttggtttggtgttgtgatgttttttttagtctcgcttactctggcgacaactattaataaagggaaggtgtttttcaaggtgatggggtattgttcaaattcgttatagctttattgtctaaattttcgggagcagttttgtcctatgtgacttgcgttttgttttccgcagctcatggtttggcaaaatatgcttttcggttagacaatgagctatcctggttcgaggggcttcactaccgattgtggtgtgctgcattgt

SEQ ID NO: 41372 - DNA, 1237 bp, Cannabis sativa
atagaaattaagtgagagggtgtacggctgcggcagagaaagtgccgagcaaatcataagagaaacttgagagtgaaattttaacttagagtttagagaatttttggataggtgtgactgagtttcttaagccctaagaagtagtttggatgtgcgaaaacaacttagaagcaccaaggtcggggttcgcaaggtttatgttcgaaaataccgttctagaaacggagccggatttgaacgcgcttaagttgtttcagagatcaaaggaggttgtgtttaagtttatgggaccccaaagatcagttttaacgtgaagaatcgaagcttcaaggtctgaaatgaaatttaccattttggactccactaacaattgtacaccgaagttggagaagatgactgcgatctcacgctttggggttgttatcttaggtatttcttgatttttttgaagtcctaagcactttggaaagcttccacctcgaaaggacacgtcaagagcaatcggagacaaagttacacttcgtcggcgacagaaccgacgtgaacgctgccgaccgtgtttcaggtagttttgaggtgtctttcccatctttttttatagatttagattctacatattattatagagtgtttgatgaagtttcataattttcttgcaattatttgatttataatgaattatttggtttatttgttaaattaattagaaaaatactcaggttgctcagaaaaatctaagtttattttctatgattgtttatggattataaactgttacaaaattggtagattttaattttagtcaattttgtatttttcatgaattatttgtgttatttctaaacttaattatgaaaaatacctagattattcaaaaaattgaaagttaattatttagggcttattacatattataaactgtgttagaatggttatatttggttttcaatcattttttgtattttcataaatttatttatttaatacctaaaataattatgaaaaatagttaagtgatgctaaaacagtaaaatgtatttttgtaatgctatttactatctatggtatgaaataaaaaggtttttataatttattagttactgtaagtatttattacaattaattgtgactaattaactattcaattgagttttaaatagagtaaatattaaaaattgtgttcactatttgggaactctctatatgatgttataatataattctagtctatgaaata

SEQ ID NO: 41373 - DNA, 1331 bp, Cannabis sativa
tctttttttttttcttctttttcttctaaatagttatatatttttttttttggtaaataataacataactactcaaaattttaaatttgtaagcggcataaatctaatatttatttttagcaacataagtactcatgtttgtaaaactataattttctttcagtttcgacagtacagactccgtttcaaatttattaaaagaatatttataagatagtgatactcatgtctctgtctagatccaatgatctagaatttgagctttatatgtgtactgtttaagacaataacagaatctgtattgacgaagttagaaaaaatcatagttttacaaacattaagtacttataacgataaaaataaatattaaatttatcacttataaacttaaaattttgagtaattatatcaataaaattatgatatgtgtattagttaattaattttctaaaatttttaaataccttatggcatgaaaatcatgattcaaaatagtttgtttcacacatttaaaaaattaataaattgtaaaaattattaatataattctttcacgaaatattttactagtagtcttttcactttttttatttgtatgaaatttttttttggggtaaatattattttaaactatatgttttgcaaaaattgtcaattagaccctctgtgttttgttaaaagacaaaatagaccctatattttctaaaatggtaaaaataaaactctgagctcaatttttcaataattttattttttttaatataagcaactctaagacaatttctaacacgagaaaatacagaaaatgtaactagttttatcataacatctctagattagattattattaagttttattttgacaaaaaatatgttcagggttctatttgtacaatttaaaaaaatatagagtctattttatcatttaacaaaataaatggtctaattagtaacttttataaaacacagggtccaaaatgatattaacccaaatttttatctcaatttttcattctaatttggcaatactttttttttttttcctttcttaccaaacaactctttttttttcatctttttctctcctaaattatttcttctcacttttttttttctccttacctgtaaaaacccaaaggccaaagcagcctagtcttattatgaagctatgattgagatcagtcttaaattgagtgcttattaggtaagtgagaatagtaccaccttattttagatgaaaaattgcctctcacaaatatattttttgatgtaaaacaaggaaatcgagttttattgatttattttgaaaatttgagtaaaaaacttatgag

SEQ ID NO: 41374 - DNA, 1416 bp, Cannabis sativa
gaacgtctagagtggatagcatgaataagctcattggcaatgagaatattgtctgtaatctgacgaccctgaaagaaagcactttggttgatgttaataatggagtgaaggacaagtttcaaacgattagcaagaacctttgagagacatttgtacagagtattacaaagactaatcggtctgaaatcacggaccagtttgggatttttctttttcgggatgagaacaataatcgtttcattgatcagagaaatgtcaccctgatggttgagaagttgaagcatagctcttgtgaaatctttcccaagggtggaccaattttttgggtagaaatgagagttaagaccatcggggccaggagccttatctcctgaaagaccaaataaggcttgcttaatctcaagctcagtgaaaggttcttcaagaaaagctacctgctgaggggaaagcctggtggagatcccatgaaggatagagtttatatccatatcactcactccttgagagttgaaaagagtagtgtaaaaattgagaaattgggagattatagtaggagtatcatgagagatggacccatcaggaagagtaatctgacgaatgaaattgttctctttacaaatagaagcgcgacgatggaaaaattttgtgtttttatccccagcacgcagccagtcaactctagatcgttgcttccaataaatctcctccttaagaagcaagccatccagttgcgattggagagtggcaacttgagatgaagtgtgaggatttggccgagtatcatttaacagacgatgaagattagcttgagtacgggaaatttgaagctggagagggtattgagttttactccaggttttaatatccgagaggcaagcggattgtctgtcaaggaaagaatgaagaggggaaataggtagggtacttgaattggtccaggatgattgaacaatggagacaaaggaaggatccctaagccaatgattttctaagtggaatcgattggaagtacgattttgagagctgggatcctgaaacgagatcttaagcgcacgatgatcagagccatagaatcctaaatggaacagggtagcttgaggatacgaattggcccagagttggtttgaagtgcaccaatccaggcgctcaagagtagtaccatgcctccaagtgaatttagggccaacatgatggagagggacatgactgaatttatgcaaaaaagagtggaaaaaatgcatagcatgaggaggaggggagttatgcgagttcctatcactaacaaacaaataatcgttaaagtcaccaattactagccagggcaagagaggagcagtgtcataaagccaattaagtaaagtccaagtgacagatttttgatcgacataaggcgaaccataataaccagaaaagtgc

SEQ ID NO: 41375 - DNA, 1594 bp, Cannabis sativa
tggaacattcacgaacttctcccagcggtggttctgaatttgttgcctcatggtctcgaataatgggttattcgcgttgggattttcatcttattcgatacctcgatccataatgaaagctctcttttgcaattcaaagtatctttcttgtgctttcaaacttacaaatctatctttttcaaaagtggactttgacgccggtgtttacggttttaacgatgaagcactcgattgcccagttctagtacgcttggaacccatgacaagcttcaaaattaccacacaaaaattttctcagaaaaattcggcagcacctccccttaatttcttcactcccgaaaattcaattattcaccaatatcataccacaataatccaataacaataatattccacaatattcaacaattcctcaaaagaaattcacaaattcccaaatgttataaataactattcaaactatcgggaaactcgcttaattaaccaaagttttgaaaagaaagagacttactaagcgagaatgtcgtccatcaacctccattgttgcatatccatggaaaactcaaggttgaagatgatgaatagtagcaatttcggatttgggtgaaaaagggtaatttgtggtgtgatttttgaaggaaaaggaaaatttatgagagaaaattgggtttttggtgatatagatgaaagatttgaagagaaattgaagaaatttgatgatttatagtatgaaatggctttggtggctgagaagagggcaagaatcgggtggcttttgatttttaggttaaatgggggttttatgcgatttggggtatttgtcctgcggaagggggtcccgtcgcgacgggcaaggtgcccgtcgcgacgggatttggcagaaagactttgatcttttttttcaccatctccagtcgcgacgggcaatacccctgtcgcgactactgtagccgtcccttttttttcacgattttcacggttttaattacaactaaaaatgtgcaaatctaaccttaatgcaatgaaacaaattaaaatgctacaaaacacttgcaattgtcttctaaaaattctaaagaaaaatagagtaaaataaattgggttgcctcccaatagcactgtagacgctgatttctgttttcaaagaggcgccagaatcatggcggacttggattggtcaatttgacctcccaagtagagctttaaacgttgtccattaaccttaaaggtttctggaccttctcctttcaattcaacagctccataagaaaacaccttgaccacgctaaacggacccgaccatcttgactttaacttgctaggaaataatttcaaccttgaattgaaaagtaaaacttgctgcccgggttgaaactccttcctgactaagcttcggtcatgccactttttggttctctccttgtagatcttagcattctcataggcctcattccgaaactcctctagttcatccaattgcagtaatcttttttatcctgcatccttcaaatccatgttgagagtcttcatagcccaataggccttatgttctaattccaccgaaagatgacaagcctttccaaacaccaaccga

SEQ ID NO: 41376 - DNA, 954 bp, Cannabis sativa
attcaatgtgtgggaagaatggagacaagtcaagtcttacttctcaggaagatgaacaacatcatgaaattcttccaatcgaatgatgatgaaagggtaaaaaaaacttttatactgattctagtatacaatatgagaattgcacaacaaaaaaaagcttttataaaagaagcagtaccccgtgtaaatactccatctaccatttgatgtataaattttgattggatatttaatgtattggatttttagacaccccatccactatttgatcttatccaattagatatttaaaaataatatccaatccaatccgatcataattagatatttaatatttgacgatcaattgtaattaaatcggtcgattcttattgaatttaatcgattgatgcacacccaaatgttaaaagaattaactaatatatattatgattttttttgtaaggatattattatataatactagtttttggatgtgcattgcacgtgtaataatataattgaagatcacatattattattataattagggtaaatatcattttgaatcgtgtgtttcgtaaacgttaccaactaaactctttgttttgttaaatgataaaatataccctgtagtttctaaaatagtacaaataggatattgaactgattttttgtcaaaacaaaacttaataataatttgatctttagatgttatgacaaaactggttacatgtttatgtatttgttcgtgttaggaaatatcttcaagtttgttatattataaaaaaattattgaaaattgaactcagagtcctatttttataattttagaaaccgcggggtcaattttatcgtttaacaaaacagagagtctattcagtaacttttgtaaaacacatggtccaaaatggtatttacccttattattaacattaattattcacctttggtttatttttagggaatcacttt

SEQ ID NO: 41377 - DNA, 966 bp, Cannabis sativa
aaaaaactaaaatgcaactaatcagcaacgttttcaataattttatacaaactaactattttgtcaaagtattttctctttttttgctgtcaaaagaaattcctgcaatattgattaacaccataatgaaacggcgatgcaactacaaatcaacttgaaaaaacttaaaacataattccaattaacatggttgtagattaattcgatttggaaatcagaaaaaaatgacaatgcaactgaatataccttagctatattgtttatgcttttttcattgtattttgcattatgcctgatttggattgattgggagctcctgattttttgttatttcaagtcatttgttgccaattgtgaaccctatttttttttttaatatttttgtttgtatcaaaatatttttgcaactattataaaacgaatatgaaactattttgataaaacttaccatatagaagcattatttttcaaagtgatcttcccttttcaccatcaaatgaaattcttacaaatttgataaatactattataaaacgataatgcaattacaaagcaaccaaaaagaaaaaaagaaacatactttacgtaactggctgtggatttattcgaatttgcttttcttattgtgtttataaataaatatattccatattggaaataaaaaatcaaccgaaatacaactttatataccttagattattattcatgaccctttttttttcatattatgtacctggttttggattcgggggggagctccaaatctttttgttagagatctacattatatgaatctgaatttcgatactaggaggagttattttgatcgaataaaaccgaaaatcaatgtttaatttcagtttcgtcccaatttttctgatatatttttcgtcaatttttgtttagatcgttccgtgtcttctttttagtgaaattcgcggaaataaatggtggtcttcctcttgc

SEQ ID NO: 41378 - DNA, 1093 bp, Cannabis sativa
taatttaaattttttatttttttttagttttcgtaaattaacaacgacaatgtcgtcattgattatattatcaatgacgacattgtcgtcattgaagactggctcaaaaaaaaatttaataattatattaaaattatttttatttaattaattaatatgtaaaattatattaaaattgtttaatgaatattaattaattatattaaatttctatttttttaattatataaaaaattatttaatcaattaaattataaatccatctgatttttttgataaaaactaatttatattaaacattcatttatttttacaaattaatttttattaaataattttttaattaaacaatatacaaaataattaaattaagagtaaaacataataacaaactaaatatttttatattaaatttaaaaaattaaatacaatccataaattattaatacaccaataataaaataaataatacacatatttcattttactttacacatattaataaaaaatatacatttcacaaaaaaaattttgtgaacactttcctccaagctgctaaaaatcccacttaaactcttctgcccaatttgcaaaataacaaaaataaaatattttaaattacagaaatgaaattacaaatataaaaaataaaaatacacataaataaatttatatatacacatatacactatagctaacataatttaaacaataaaataaaaaatatcaaaaaatatattaatataaatacacatatatataaattacaaatcaatatatataaatattaaattaatatataagaaaagaatgagaataataacattacattattgagatcgtagttcaacaaattttcagacggtggagaagaggcggcagcttgcagtgttctggtgatacaaagagttttgtgggtttggatatgaagaggagatttggaatgagaagagtaatggaagaataaagatgaaatgaagaatattaaaaggagaaaaaatagagagaatttcatatttggagagaaaaatgtagaagggagaagataaaatagaaaggggagaagatgaaatgaaatgaaatgaagaaggag

SEQ ID NO: 41379 - DNA, 2090 bp, Cannabis sativa
gaaggacctaaccagtattcccaacaaaagcatacagaaaacataaggaaaaccctaagttctaaataatgggttgggatgaccaaatccccatatttcttaagaatatatatatacgcgagtatttaagatcttcatctcaatactcgcgagtattcaaggcagcaaacaaaaaagatgcgaatactcaaagtgctcctcctaaggttcacgattatgaaaaattaaggcttattctctcttgagaattaccaagtttttagcagagaaataaatttttatatgcattccctacaatgacatacattttccattccctaaaacacaaaatgcagattattcctcataaaacagaagaaaaattcgcaaaagtttcaaaaattaaccttgagatttatcaattcctcctttgatcgatttcgattaactctaaaacatagaatgtttgaatttctggagaaaggaggatagaaatctacaaatggattttgaatctttgaaatttcagagaaagaggggaagaggaaaatgaaaatgagagggaaagtatgaattgggttcgtataatgaggcttaagtaccattatccctcattaattgggattatgacacgtggcaaaaggaatcacctcgtgacatctcttcgcctctctctcgattatagtttccctcatgacctcatctgtcagccgcgaaactaggggcatgtgttatagtgagatttttctcacctagaaactcgagatcgcactcctattaagaagacacgtgtactcactttcctcgaggagagctgagatgtcaatgagagacctctcgagtatgaaccttcccagaaccaaattcagcgagatgatgcgaatattatgaccaagtctaatcgcagtctaatcgcattcaaatggctcgcattatgtaggaccaagggtatatacgagtatcaccatgatcctcctgtgaaaacataaagatcgattctctatgttacgagctagtcccattgacctaactgccttgataaaccaatatagactcacatgtcttagttctgtcagcttattatgagatgtccatataagcgactccgagagggcacaaacatcctagactcgactagtctcgaatgcatcctaagccttggagcttatgcaagaatatgaacagccaactcgcactatagaagtcgcatacgttgctgtgttaagtgaataaagcttgaaactgttcttcatttattgtgtttatgttttttggtttaattactgtaattcaatgtctaaatggattgataattaattcgatccttgtataaatgataggacacttggtttgtatataaaggagtgattcgccatgaaataataataataaaaaaaaaagaaatccttgcaacagtggattaagcagaccgtgatctagctgaaccactatactcttctccgtgcataatatttctaatttttgctaagtattttgtgtttctgattcgaatactcgctattctgggtcaagtactcacgtatattccctatttattattattattatttatttttggtgttgtaaaaattccttcaacaacaagatccacttcaaggaagactaccagtaacctccttaggaactaggatagatcttcccctgccagaggaccagcgggtcgttgtgcggaaatttaattttgacagcatcttcatcgttgaaggttatagtcagctctcctgctcatggaactttgggcctcctttcttccacggccaggataaccttttcttgctcgttctccactgttcgggcatacctctcccgagctttgctcgaatctccagcaatgtgtgggcctccaacaataacttacagatgcccatctaccggtggaggtagcaaatcttggttattgtcgtctctttgaccctgattggtcttaacatacttctgcaggtgtggattgtttttccttatcaggaattcaagttttcgcttcaagttgtctcattcgtcagtgtcgtggccgtagtctccgtggaaccgacaaaactttgtcatgtccctcttgttggcatctttcttcatgggcctgggcttcttat

SEQ ID NO: 41380 - DNA, 2246 bp, Cannabis sativa
ttctagcgatggctttggtggtagtgactatgatagcagtgataatggagaagaggaagaaggagaaagaaaataagttagggtggagaggattagggtttcagggaaaaagaaaaaagaaaagaaaagaaaaaggaaaatgtttttttaataatttaataattaatattaggtgaaccactaaaaatttagcacgtgtatacttttgtaaacgtgggtagtctactatggtacttaattagagtttttgaacggaagtgtaaaatgtaaaaaggaatgaggtttagtacatttttccgtcaaaaattgtatttatgtggttaactgttacaaaacgtaaaattctggttgttcatgccgctaatatcccttttaagtatttttaatttaatccctcaataaattagaaatatcccttaagatatctacacatttagctcttgacactttaatacctatggcccataattattaaaatgatgactttattagggtaaaacttcaaataataatacaccaatatatatatatatgagcccatattgaggattttaatctaacaatctcctgggctacatatattttcttataatgtgtaaccttataagcgcttaaactttgctatcataattataggtatttcaaaacaatcttgtccattgattatactaacataggatcaaaatagatttcgccacatttagcgtggctaaacccatcattaattgtcacgtatgtcaatataaccaaatgacatagatcaatcatggatgtgcaacataaaaattacacacaaatgtgatcttaccatgcctatctccatttgttcttccttaattaagatcaattctttattctttctaccttatacttaaacatcaatagaaagagtacattcagagtacttaaacatcaatgtaagtacttaagtccatacattatctgtaaaatataaatatgtgtcaacttgatacaacatcccaaatacaaactctcactaaactagtacaatcttaaataataccacatccttatatgagcaacaagctcctgaaaagtcttaagttgtatatcctgaattatcgagatcacacaaaatatggagattatttttattatgttctatagacaccttattactctgaacttcattttaataacaattagcttaaagtcaatgtgcctttgaccttgtaggactcatgttgttaattaaattcaacatgattgatttattatcacaacatatatctttaatattttttaataccatttctaattttatagccatatgtgacaaaaatctcgcagttgaattccttataatatcataatcagaaattgttgttggaggaattttgacaacaccaaataatatattaaataaaatcataaatgaaagtatgcgactactccacctaaaatggtgagtattcaaagaatggacactcagacatactggaaaatataaataacacaaaggaagtatagtggttcagtcagatcatggtctgcttagtccactgttgcaagggttttctgtcctctttatttcatattggatcactcctttatacaaagcaagtgtcctttgattatacagaacttgattaattatcaattcgtttttaaattgaatatcaacactaaatcaataaaaacgtaaatataataaatgaagaatagttttgaccaaattcactaattatatcaacgtatgcgaccttagtggtgcgagttgtctgttcatattctcacataagctcgcgggcttaagatgcgtacaagactaatcgagtcttacgtgtttaagaaatctgcgtcctatttgagtcgcgtatacggatatcttgtaaaaagtcgataacccaagacatgcgagtcctttatcgggttattgagtgcgttaggtcatccggaccaactcgcttagttaagaattgatctttactaactcgctagaaaacctttatggtcatcgcatatatcttggtatatgcgagtcttaaacccggtcttcggtcctgcattgtacgatgcataataatgcgacttgagtctgtcagggtcacattatttcgctgagtgtggttcaggcgaggtttaatactcaagtggtctcctactgacagttgagcactcctcgaggagagtgagtccacgtataatacttatgggagcttggtctcgagtttcaagaagaaaaattcacactataacagaaatctcaatgatctttaagtatt

SEQ ID NO: 41381 - DNA, 1656 bp, Cannabis sativa
  modified_base (664)..(675): a, c, t, g, unknown or other
  modified_base (1603)..(1608): a, c, t, g, unknown or other
tggttttttattagattagattggatccatccaattgatgtattccgtggtacattagatggatctcagggtgggtcttaaaatacgttaccattttttaaccctaattacccctagatcaacaaataactcttccatctaacggctgtcgtacatcatggaatacattccgtaaaagtacatcacgggacaaaatcgtgtcccttaagtatattataggtaactttctttcacaaaaaaaatatattatagataagcagtagtagtacaatgctattccacttctacaaggaagtttaaattttttaatctctattatgttattataagttttatacttaacaataacaattttgtggagaaaaatgaaaacagattagcctatagggtatttaattcaattttatgatattaaatactataaaaaataattacttttagtgataatattttagtcacaatacaaagtttttgtgactaaatgtgacttttagtcataacaaaaaattatttttgattaaaatatagtacttaaatacaagttgtcactattttagttttaatcagaataagtattatgattaaaaacacatttaatcaaaataaattgtgatttttatgactaatacctttaatcacagactttttagtcacaacataggannnnnnnnnnnnaattagtcacaatttttttacttatagttacaaattttatggtgattaaaaataaaaatttttgaagtaaaaattaatggaagatactattaaacaatattgaatgaatcttgaatttttttaaagttataatagacattttgataattatagttcattgaaaatatttaattatttatacatatatataaacttgattcatttccaattgcttatatctcttatagaatattgtgaaattttcactttgagttgcattgcataaagaaaatttttcaaaactaaaatttataaaatctttatttaagatcatttgtgtcgtaaaaaaaattaaatggattagcaatattatctattacaaaaaattttacataaattttactatgattatttaataagtaattttgcgaaagactaaaaaaataatttttttttataaatttatcttttaattaattcataaaatatatatttatttattattcaatttcttattttatatatagtaaaaaattgtcataaaaaagcatttattttaaagctcgcccaaggcctccaaatggctagagacggcattggtttaactcccagttgcaaataaatatctaaatttaatttttaacagtaataatacctaagttataattttagaacttcctagttaaataaattatcatgtagtaatccctgattggtccaaattattaaatttttattttaaaaaaataatttaagtatactaataagaaaatgatacgtggatataatgacttaacatttaacggttaattacttatagagttccataaatatagtttaagtattattaatgtcaaaaattaaatttaaatatttatgttaaacttaactagttatgccctaaattactcatatataaatatatgagtgactattcaatggttacatnnnnnntgtaaccatatggttacatttttcctttaacctgtaatagcaggttac

SEQ ID NO: 41382 - DNA, 1520 bp, Cannabis sativa
tcatttacagctatgatttcagatatcaacctcattggtggatctgaagggtggtaggtagatactggaacttcttaccatgtctgctatgatagaactatgtttaaaatatatgttgctgctattgagggtcagaaagtgttgttgggtgactcccacaccactatagttgctggtactggaaatgcagaaatgaactttatctctagaagaactgtgattctaaaagattttatgcacactcgagagatgagaaagaatctgttcttaggctacattctcaacaaggcagggtttacacagactataggggctgatttgtttactttaaccaaaaataggatatttttagtgaaggggtgtgcaattgagggaatgtttaaattgaatgttcaagttaataaagttaatgcttttgcttataagttgtgttcttttaatacttgacatgctagactttgtcacataaataaacacattatcaagaacatgagtagtttaggccttgttcctgaattatccttaaatggttttgaaaaatgtaaattttgtggccaagccatgattatcaaaacaccacataattctgtgatagaaaaagaaactgagcctccaaatttaatgcattctgatatttatgaatttgatggaactttgactaggaatggtaaatgctactttatcactttattgatgattgttctgatttcacctttgtgtatttaataaaataaaagtgaagctcttgatatgtttaaactatttgtggcttaaattaaaaatcaacttagtagaaagatcaagaaattacgtagcgatagagacactgaatatgattaaactgcttttgttaaattttataattcacatggaatcatacactataagactgcaccttattcaccttaaatgaatggcaaagctaaaagaaaaaatagaactcttattgaatttgttgttactattttattgaattatgtggtgtggagaaattttattaactgtgtgttatgtgcttaatagagttcttaaatctaaaatcaaaattttccatatgaaagtttaaaaaataaacaatccaatatctcatattttaaagcttgggattgtttggaatatgttagaattcttaatcctaagaaaattaaattggctagtagagcatatgaatgtgtgtttattggatatgctattaatagtaaaacatatatagattttaggatttaaatacgcatgttattttggaatctaatgatactaatttttacggacatagatttccatttaacatagtgggggtgcatcatctagtaacatgtcctgttattagggataacgagcatgaagatagtatataaactcaacctagaaaaagtaagagagctagagtcgctaaaaaatttagctctaatttttgtaccatatactctagaggaggatccttctaacctccaagaagctttgacttcactagatgttgatttgtggaatgaagttattacactatgtttgatgggagg

SEQ ID NO: 41383 - DNA, 1224 bp, Cannabis sativa
ttaagactttaattctattactggctttcttgggtaaatatacattactataaaaatagatttcccgacgtttttaaacagttgtttaaagtatttccttcggcttctataatcgtcgcctatacgaccttcgtaaaatgggcagaatagacgacgattcaaaaccatcgctaatatgggttttccgacggtttataaccgtgccctatactataggcgacagttagtataggacactgtttaaaaccgtctcctataccttgttataggtgacagttttaaaccgtcaagaatgtaaaaaaaaaaaagagagagaaaaatacagattttaatggcagaaaaatctgtatttttcctccattagttttataattttacctaaattaaaataaaacaactaattaatttttttacaataacaactaattttaaaacacatttaatttatagaataataaaatatatatataataaataaataagtatataaataaatgtatttataccgagctcggagagagagagaaagagagatagggaaatggatgtgaggtggtggtggtccgacatatgagacggagatgagagggacactgacgggaggtggtggtggtccgacatattcgacggagagtagaggaagactgacgggaggaggggtgggtggatatcgatggacgagagagacgagaagaaagggagatcaagagagggaggaagacggtgagagaggagcgcgatggtgaggaggcgtgtgcggggttttggagagttaagattttcgttttagggtgtgagaaatggagaagaaataggtgggcatgtgggaaatagaaaaaaagtaggggggcacatgagaaatgtggcgagaagtagatgacaattttttaatggaccgttacaggcgacagtttactataggtgacggtttaaaaaccgtcgcctataagggtccattaaaaaatcgcattttattaaaaaacgtcacttattttgtttactacgattttaaactgtcgggaatactaaatttttcccgatagttgtaaatagttactaaatttttttagtgatggtccttaaaaaaaattatttttagggccgtcgcgaattctgaaatttgtagaagtgactattttggaccctgtgttttgcaaaaagttaccaattggaccctctattttgttaaatgataaaatagactatgtattttccaaaatggta

SEQ ID NO: 41384 - DNA, 1930 bp, Cannabis sativa
acattcttaggattcttttttttagggatgaggacaatgatagtttggttgatggaagagatgtccccctgatgattaagaatgtggagtatagcctttgtgaaatcagtgccaagagtggaccagttgcgtttataaaagagagagttgagtccatcgggtcccggagctttgtccgcagagagactaaataaagcatccttaacttccgtttcagtatagggctcagcaagaaaatcaacttgagtggtggagagcctattgggaatcccttggagaagagtatggacagcctctacacaaactccctgagagttgaaaagagagttgtaaaaatggagaaattgagacgtgatagtagctgaatcatgagttatagaaccatcagaaagggtaataagtcggataaagttattcttctttctggtggaggcacggtggtgaaaaaattttgtgtttttgtccccagcacgcaaccaatcaatcctggaacgctgcttccagtatatttcatctttcaggaggaggccatcaagcctggattgtagggaagcaatgagggaacaagagttgggggagtgggaggtggcattcaagtgggaatcgagttcagcttgagtttgagagatttggagtttaataggatgctgatttctactccaattcctaatagtagcaacacagttagattgtttgttgagaaagagctgcaggggggatgaaccaggaggcccagaaaaagcccaagaagagttaagaagattggaaaaagagggatcttttagccaatgattttcaaaatgaaagcgatttggtcttgaagtggcaaaaagaggatcttggagtctaatctttaaagctctatggtccgaaccataaaaaccaagatggaaaagagtagcatgagggaagagatcgcgccagggttgatttgaggtacaccaatccagacgttcaagaatagagccatgtttccaagtatatttaggcccaatatgggacataggaaaatggttgcggttgttcaaaaactcatgaaaagaaaccatagcatgcggaggggggtggtgagcagaatttctatcatttagggaaagataatcattaaaatcgcccataactaaccaaggcaaaagaggagcagaatcaaataatcgattgagtaaagtccaagtaacagatttaagattaacataaggagagccataataaccagaaaagtgccaagtttttccattaaaattatttataatacagtctacatgattcagggaataagagagtacattaacatccatacaatcttgccaaaaaagtaaaatccctcccccaagcccctgcctaggcacctctaaaacactatcaaaacgaagcttgtgtttgaggtcagatccacgtccagcgggcaattttgtctccaaaacaagcaacaacactgggtgatgctgcttgaccagcagggagagattacggaatgctcgagggctccccaaacctcgagcattccaactgcagagactcattgctcgcggcggggccgcgtagcagcacccgccgatggatcatcttcagacattgaaggaacgacagcatcctccaaggcagtggctcttgcacgtttgagcatggagcgcatagagcccccaatgtgagcttcctgacgcacgaaagtaggtttgacaacagggggggtagtagcattaccaggggggcaagaaacattgataactaggccagaatccttgcgagtggttcgggaggagggagcaatcataggagcttttcctttgcttttgtcaatatgggttgaaacagagatggaatcagagatgatgggtgcagtgggtcggacagggaccgaaggagtagcatgagtggtagcagtatttggtggtattccaaagggtgaggatgaaacagggcttgaatg

SEQ ID NO: 41385 - DNA, 1526 bp, Cannabis sativa
agacgtctccttcaatctcagggataccctgttgcgagcacaacgcagtggttagagcactgtgcaccagacccactgttgtcttcatctcagcaaaatggttgatgtttctaaagatgacccagccaatgccgaatgtcattctagccataatagcataaactatgacgcagcgctcatagtctaaggatgaaatgtgtgacatcggcagtattctagagttgaaaaaatatgtccaggctctggcttcttggttgagtttccactggtaaaggaacttttggttctggttcccttcaacatggaatcgaatgccctcttgccctaactcttcggcaattgcatcatcaacgaggacctctctatggagtgctatccttctttcatcttgatcctcacttagtgtaggaaggctaaaggagttgttgatagattccacagtgactgatacattcactccccgaacatagacagtgttgtcatcccctttgtatgggtaatttgcaaaaaattcacacactatattctgattagctttccccacatgctctgcaacacaaaatttctgccattgtcgtcgggcaatctctcctctgatgagttcataccctaggtcccgctcaaaaggtgtatcttgatattcaaaacccctctcctgaattatacttctcttaattaatttctcataccgtttagcttctaggttattcacaaaccttgtgagttgttgattttgatcatcttgaagattaggggtatgtgacgatgaaccttgcgtgaagcggttagctcgggtttttactcttttggttgccataccaatcaactagccaaaaatattagttctagtgtaaaagaatttgggcagcacctcccttgtatttctctctttcccaaactattttatagcagaaacttaattgacacaccaacaataatccaacagccaatatttttctccacattcaacaataatccaatagcacacaatccacaatcaattactcttaaaacaccaacttaaatgaagagaaaacacttacttgaaggataaaggctttgttgcaccaaggattccccaaagatgatgaacacaattaatattggggtgtaggtttttttctgaaatttgtggttggtttagagtaatgtaggtagtttttgatgaaattggtgattgggttatctttgtgggggataatgatgaagattggtgaaagaaatttgtattttaatggagaaaaactggtgtaattcgcaatttttgggggttctgttcgtggctggttcgcgtctagaaaagaagaaaaattttgaaataaaattctggggacgaagctgatttacccctgattaagcttagcatgccacgacatgctaaatccagggtggagcatgtcgcggcccgtgtcctccccttctcataccatacgacatgtcgcttacctacagggttagagactaaataattgttcctaaacactagaaattaactaaattgactagttttcacgatttccacggtt

SEQ ID NO: 41386 - DNA, 1696 bp, Cannabis sativa
  modified_base (1201)..(1206): a, c, t, g, unknown or other
gccaacatacatttatcagtaatcggtacaactctatgtatactattactcctatcaatgtaatctaagaggcataaacaccatgtacgctaataaacatgtaataacatatgcatgacattactctaatcttacctcaattctgaattcaggtgtgtcgatcaacctgagtggaacaactgctcagcaaattataggctcctaaattacatctataacaacacgaataagtgactcgctaaatcacaatcgggacttaagttttaaacccaaaacctatctacatcaacttaatctagaagtaccctacattagcagggaaccaaccaactagaaacctgaaactaggacgaatcgacgagctgaaaatttcggggaactctgctgcaaaaactggttacccaattttacaagtacctgtaaaaccggttacccatttttctgtagaaaacccaaaaaattacaaagctcaaccaaatcgattccaaaccaactcaaaccttccagacctgcatattataccccaataaacataacccaattaataaaacaataatcaaagctcagaattgaacaacaccattaaagagccaagcttgagttctaaaactcaaagcttgctcaatcaataaactacctaccaaaacatgttcaaatcaacctatataaacataatttaactactgaaaacatacctaaacaccagcagcaagaacagcaaccaaaatctcaaaaacatgcataatccattttctttaaaattaagaaactaaagagggagttgcttaaaactttaccttggcttagatcctcttaaatcagctagaaatcacaaccaaatgcagctcaaaattcagaaccctagctggttctatagggtttcgaaaagagagagaggaaggaaagagaggaagcttttcttggtttttttgtaaaaatgatttaaataaaataattcttttgttttattaatgaaatatcagcataaacaataataaaatctgatttaataactttacataaattcattaaagagaaaagcttatgggacaaaatgaccattttgcccctcccacactaaaaggacataaaaagcacttaggggtattttggaaaattctaaaatcccgactattcccgacattcccaatgtctaactttatagccccgctatactaaaaatactaggatgtgattctannnnnnaaacaccgcgttccaatgttgctatacacaaaacatgtaaaaattatgaaatttctatatgtgacataaaaatgcattttgaattcaaattaatcatcataaataattaattcaatactaataaataattttcatagttaagccctaattatctactaatttctaaattaaagttaagcggtctttacaattttccccccttaaaaggatttcgtcctcgaaatctaacctcaacaactcttgatattgagctctcatgtctgattctaactcccaggtggcttcctccacctttctatttctccagagtactttgaccaaagctatggtcttattccgaaggactttatcctttctatcaaggatttgtactggttgttcttcataagacatgtctgattgcaactcaagattttcataactaaatacatgagcaaggtctgaaacgtattttctcaacatagaggcatgaaatacgttgtgaactgct

SEQ ID NO: 41387 - DNA, 1018 bp, Cannabis sativa
ataggcattaaggccatcagagcccggagctttatcccctgaaagttgaaacagagccgtcttaatatcctcagaagtgaagggagcttcaagagaggcaacctgctgggcagtgagcctggaattaacggcagagaggatcatattgacagcatccctgctacttccttgagaatggaaaagggtagagtaaaactggcaaatttcagcttcaatagcagcagcactagaaattaccctaccatcatcaagaatgagcttcctaatgaaattagttttctttcgagaggaggctttgtgatggaaaaattttgtatttttatccccagcccgaagccaatgaactttagatctttgcttccagtaaagctcttgcttatataacaggctatcaagttgggattgcaggtttgaagtttcagctaattgctcaggagaagcaggaagatgggaggagatactattaagtttcttatctatatccctaatcctgaacgacaaactattaaaagacctattccaggtctgaagatcctgaacacacgaatcttgcttataaagaaagctggccaagggagacaagttagccccagaattaagagaggaccaagagctatttacagtggtgaaaaaggagggttcagtcagccagtgattctcaaaaaggaaccttttatttctagtcctatactcactattatcagctaagactaattttaaaactctatggtcagaaccataaaaaccaaggtggtgaagaattgcatgaggatactggtgtaaccatttctcattggcaattccccaatcaaggcgttcaaaagtatcaccatgtttccaggtaaacttattgccaacaaaatgtataggagttaaagaaaacttattaacaaaagcttgaaagttagccatagcatagtgaggcaaagaggccctactacttctatcggcaaccgaaagataatcattaaaatcccctagaataagccaaggaagttgaggggcattatcaaaaagt

SEQ ID NO: 41388 - DNA, 1024 bp, Cannabis sativa
ttaagttttttattcaacaaagaacaaaaagacagagtccattacaaagcttaacgataagcaaaagtaaattaataccaataagggcgagcaaatgacaataaggcgaccaattgaagcacaagtgtccattgaaatcataatcattttcaagtatagatggaaggtaaagaactaaaacaaggacccccaaatcctcagatctctaacaagagaaagtgggttgatgtctgggtcaagttcggtcaagtacgaggattggggttcaaatcatggtatgggtcgggggattggggcaaggtctaggtcctaggtccaagtgtgagggtcgaggttggggttttggttccaagttccaaggtcttaggtccaacttttggggccaaggccaggtctctgggtcgaagtccaagggttggggttgggtcaaggttcatgtctaggtctgaggtttagggtatgtggtctaaggtatgagtcttggtctggagccagtctctaagtctatgaccaagtttggggcttggttcggggtttgagtcaagaccaatactttttataataataaaaaaatataaatttaagggggcaataataaaaatatatatgaatataatagatcaaatattaatttatgggaaaaaaataaatttttaagaaattatatataaaaaatttaaattataaaagtttgagtgggaagaatcaccacataaactgcattccctccgatcttgcacaaagttcttacgaagttacaaagctcaaccaaaaaatctgaaatggttatcttactaaggtctaaataaaacttaacaaaagcctcataataatgagaagaaactaaatttctcggagtaagacttagacaccctaacttcaaaatgacacaaaaacatttctttcaaaagataaagagtatacgaaaacatcagctgtgagccgtaaaggctacaacaaaacacaagtcatccttgagtaaacgagaacaaaccctcaccacaatatattaaattatttcaaa

SEQ ID NO: 41389 - DNA, 1468 bp, Cannabis sativa
aatacgtaacaccctatgctagttacggtgttacagcctacgtgataaaaacttagaaaaatccctccttaccaataaaatttgtccatgctaatgataatcaaaatgataatagtcatcatgaagaggctagtcatcgtcctaggaaagaaccaatgggttcacagaggccacccactccagcaacaacacgttcgagaagaagccaaggtggtcatgatcaaaacccagaaattgggaatgaggaaaccagtactgatactggttatgttcccagaagtgaggatgcctatgatcctattaggtacgtaccgttagttgaattggaaaatcgataactctggcaacgtctggccgagtctaaccaacaaaacactgagttagaaagagaggcaactgcagccagggcgactcaaggaaacaattcacaaaaccaacctaatcctggagtaagaaggccacgaggtaaacctcgaggttcgagaaccaggaggcaggagacaaattaagaaaatccccagaacacccaggaggaacatcctggggaaactagggatgttccagaagacgaacaacagaataatcaaacacctcatcaaggagtacctcaaagaccccagggatttacgaatcaggggaatgaaaacaatgacgtgccagaatcttctcgtagaaatgataacatatggcatcccagaaccagggaacaggagatcgcttgtaataacaagagaaatccttggacataacctaggacaagtgggttaccaccgagacacccccagcgtccttctcaaaccgaaagggatgaggcatacacataccccagcagaaggcgtgcatctaacctttccttaaggagaaggcctgtgcaggacgaggaaagttctagctcgagacattcaagatctcgagagcacagtcgatctggaagacatttgcaaggaggaggagataaacctctccgtaatgatgatcgagagagtatgagtaatacaaggagctaccaatctaagacttactcagaaacaaggtctgtgagtaaccatgaacgaagataaccaaatcattgtgaacatttaaccgaagacaacctgatttacgtgagcgctttaatcagaatgcacctaatttacgccaataactcaatgctaattgaaagcaagaagatccaatctgatttacaatcattgcgttggaagataaattcaggagataccaagatgaggaatatgagaaactgcctggttatgactaggatgaagaacccgagcctttccatccagacattatgaactctgaatttcctcaaggattcaaaaaccctcacatctcaccgtacgatgggacttcagatctatcacacacctcaacaaattcattaccataatgcgagccagcaatgtctctcatagcttaccttgtattttattccccacctcgctaactggagcagcaagtagctggt

SEQ ID NO: 41390 - DNA, 1585 bp, Cannabis sativa
  modified_base (419)..(425): a, c, t, g, unknown or other
taattatatataaaagtgtatgagaaaatgttaataagttttttttgcacatattttgtaattaattaaaataatgtatacaaaattgtaaaatgcccaaagttaatagttttgttactctccaagttattggtagtttttataatgttttatggttttttaaggctttttagtttttttttttcaaaagtgtatatttaatttgtaattgttttgtatcagaaacaataagcattagattacataagaaagtatatatattagtaacaataaatagagaaaattacattgtatatccattttacttaatttgttctaatttttaccttcattttcatatttttttttagatatgctcacttttatggatgatatcactattagaccccttagtttatgtaaattatatgctagacttnnnnnnngagtgagagtatattagacaatccacttagaaaagtaagtatattttaataaaaaaataatatgagcgtattttttattaatggatacaaaaaagagatatttttcaacttatcaccaataaatggttgcacaaatttacccattttcaaataacttcttggaaatttaattgttgtgcttcaatacaattagaaaccaaaaatataactcaaaaaaaaaaataataagaataaaacaacaaaatattaaataatattacaactgttaataaaacatacacataaatatagaatatggagatgaagaaaaggttacaactccaatctgtccgaaataaaacaataatcctgaaataaaacaactcagttacgttctgaccatattgcccaaagtgtacatataatttgctccatttctgattgggaataaatggaggctaagtgcaccaaataatcaccacgcctcatggaggaagactgttgccaatcaaagtgcagatttaaatgcttccatacagcccgagcgtacttacaaccaaatagtgcatgcccaatcgactcccaagctcgtttgcagattgaacaagtggagtcattaatgattttccttcgaaccaaggaagttgctactggtagagcatcatggtagacccgccatgcaaatattttaactttttgaggaagcttaagagcccaaaagaagttccaccaggatgcatccgaagaggaggtggagcagtcacgtgcatctgctaatgatgcagcaaaatgatatccagattgcacagtatagagacccgaattgtgatggtgccaaactaattgatctccacttgggaaataacttagtggtattgtaagaatcctgtcaacatcaatttgggagaaaaatgtctgcaacatagcttggttccattctctgttttcagtgataaaagccgaaactgtatcagtgtgtgaaccagaaaaaaaaacataggcaggaaggagttgtgcccaggaatccacgggtctgatgcacacttgatggaatgtccttcaccaatcttccaacgaagtcccttagcaagtaaatccttcccccaatgtatcccttgccaagtaagagaaggggagtgtccaagagtagcctcttataagaaagagttctgagaaaaata

SEQ ID NO: 41391 - DNA, 1054 bp, Cannabis sativa
tctctctactctctttaaatagatatattgtgtgtcacagaatgagtagtgagctcagggactgagaccctatatttatataggtaagacattttattaaagtctctgccacattaattatcaaaatattttaaaaattgattttaacaattaaattgggtaactgaaatatttagtaatcaaatatgaccattattagaatattttgattaattattaaataattagttatattctataaatcaaatcaaataaaatatttaatttgttattatataaaaagtattgtaaatgttttattatatatataaatttgataactattttttcattttaaatatatatgttcttaggtaatttaacttttttacgaatttatatagtttttctattaaaaaaaattcagacaataattttatattatattaataattatgttgcttttatttatttttatgatactgttacatttacattatgttatttttacattattttcgataacaatgtaaataaaaaatcatacaaaaacaaatcaaaatccgtaaaaatattaaaaataaactcaatttttcaataaaattgtaaaaaataagtgtcattttaagtattttgtgtaaaagtttatatgtcataaccaagtgttattaggataaatactattttagatcttgtattttacaaaagttattgattaaactttctattttgttaaattataaattggactctatattttctaaaacagtacaaaataatattatgaacttatatgttgcaaaattaaaatttaataataacccaatttaaaagtgttatgattgattatattttcaaaaaaaaaaaaaaattattgattatattttatacatctgttcgtgctaaaaattatctttaagttagttttattaaaaaaaattattaaaagttgaacttagagtattattttgtatcattttaaaaaatacataatttattttgtcatttaataaaacaaatggtccaattaataacttttacaaaatatcgaagtataaaataatattaacttgtt

SEQ ID NO: 41392 - DNA, 1195 bp, Cannabis sativa
agtgataccagcacaagtacgggtaaatactgagtgtgtgtggtatatcactcagtggtactcagggtatgaaacaaaccctaccaacacccgtgcagtgaggtatgtagtgtatgtggtatagtggctataccctcgtatggaacattcttactcatctattgagtcttgtaaataggtgttatatgcttttcttatatgatatgttatatgcttttcttattgagtctgtcgactcacagttttgcttccatgtgttggtaaaggaagacgaaagctgaacatgagtgaatctgagctggatcaggttgtacatgtgaaagcagcgcgacctggagtgttcggtctggggacatctggggttgtattttgtagtcgctgtgtaacctggatattatgtattttaaagtattatatttaaaaagtttaaaaacgggatcccggaacttgtaaataattttataaattataaagtttaataattgatataaaagttttaatttgacatgtttttgaagaaatttctttgataagcaaagatagcacagtaattgaaaaagcactgaagcgtgccttagcattagggcgttacatgaatttagaaatgaggtgagattagtataatgatatgcatatatgtttacatgtttagcgtacatgttagttaagcctgttagattacattataaaagttgtatcagtgtatttagtattatattggatatcgataaatatatgttggcttaagtactacacgacagtatcacatcggtacgactagagtacgactagcgtaccgagtataggctaatattatggtcgattgtacgataccacttgagagtatcacatcggtatgactcgagtatgactaacgtaccgagtataggctgatattatggtcagtagtaaaatcgtacgaacgttcttgactcattaccgtgtcggacaagcagatagggttatggttgggtttatggtgcctgattataatttgggttttagttatgttattgttatgcttttcttactaagtctgtggactcacatgtattgtttgcatgtgtaggtaagggcaagactaaggttcagcagccttgagagcgagcaaatgaagattttacggtctttgggacagccggacataatttgtatagttgctaggcaacaacttttgtactatgcactgtgaaac

SEQ ID NO: 41393 - DNA, 1671 bp, Cannabis sativa
agtcagaagctgacattcaaataattgctgaagtactatttgttaataagaactgcgattgtcaaaatgaagcattaagcttttaaacaaagaagcaacgaggcgtacatcgttgaccttagaaagataggggaataagcttcagctcgctatcaaggtcattggtactgagttcctgtctagacatcccagaatgctatgatttaaaatgtgtttaaatacatgatcattttgacccagtaaaagcagattaatcacagttgtgtgattttcgaatattaactgcatttatactacgtgatacgtaatcaaatcccatgattttaggggataaatgttgtaaagattacggtcaactctgtaattaactacctactatgtgattataaatagacgcaagttagattaaaaaagggacgaaaaaatcataagagaaaacgccctgaaaaacctttagaaatctaataagattgactcgtggactacgtagaattttaactgcaaaaccacgtaaaaaatcctttgtgttcaaactttttcctctactattttttttgtgtgagattatcactcttagtctcatgtttggttaacgaaagtccgcgttaacagtttgttactttcattgagagccttcgtgaaaaagctcagaaaaaaccctccttttgtaaaaaagaaaaaccactccttcatggttgaaaacccagaaaacattaatacaccacttgaagaaactcatcaccgttctgggaaagagcccatgggcttcagaaggtcttccaacccacagtctaaatggactgtccgctccaggaggactcaacttgagggtggccccagcacttgaaccactcgttctcagaggaccaaccctgacgttggtcctagtacacgaatgacatgttcgaggagaactcatcatgggaatggctagaatcctagaatgagggatgaaggactcaatcgtgaaggtacacagcctatgggagagagcacttatgaaacaaaaactgccatcttagactccgcctggaggaggcacaacggcggaacgctgaattggatcgtgatgcagccgcagcttgggcggcacaagggactaacactcaaaatcaacctgaaattggagtgagaagaccacggggcagaccttgtggctcacgaactaggagacaggaaaatgcccaggaagaacaactgagggaaaatgggatttcccctgaaaatccaaatgatcagccagaaccctctcatagaaatgagaatgggaggcaaccagaaactaatgaacaagaaattcctcatggaaatgaggaagaccctggaactcaacctggggaacgtaggtcacctgcgaggaatcaccagcattcttgtcgaacccatagagaaagggctcataaaaaccctagtggggggaatacgacaaaccacactcagggggaagaacagagcatgaagaagcaagtgtgacctcaggttatccaaggacccacagccgatcaatccaaagaggagagggttctcgacgagctaatgatcaagaaagcatgggaaccagtaaatctgcgagtcagtcaatctgtgagtaaaacgaggtctgatagtaattactcccagtcagatttgcgagaccacttgaatcgaaaaaaacctaatcttcaccaacaa

SEQ ID NO: 41394 - DNA, 2800 bp, Cannabis sativa
tggccatgacacaaatgagtgcaacaacttgaagtgggaaattgaattcctgataaggaaaaataactcgcacgtgcagaagtatgtcaaggctgactagaatcaacgggtggcccaagcagacaacaaccaagacctattaatgcctccaccagtcgacgtgcatttacaagtcatcatcgggggcccacatattgctggagattcgggcaaagctcgagagaggtatgctcgaaccttataacacgaacaaaaggaagtagttttggccgtagaggaaaggaagccaaaaattccacgggtaggggagcctagtataaccttcactgaagaagacgctatccatgtttgcttctcgcacaatgatccattagtcgtggaagtacagatagcaaatcaaacagtggcccggactatgatagacaatggagcctcggaaaacattctgttgaaaacaccatatgaaaagatgggactccaactcaaaaatccgattccctgtacccaaccggtgtatggtttctccggccagagtgttgcatctttagggaaaattcgtctacccctcactgttggacaagctccaaagagcataactgtgatggcacaatttctaataattaatgttcaatcagtttttaatgttatattaggcggaccagccttatatgacctaaaagttgttacatcaattttccattcgtgcatcaagttccccacaaagaatggggaaaggtgcctaaaaggaaatcaacaagttgcaagggaatgttataaccttgccctaaccaaggccaaaaggaagaatcctctggccagagttcggacagggggaaaagcattgccaaataaggagctgcccaaggtagggacgaatatgtggatccctaacttagggaaaatgttgggccagtggaagaactagaagagatagaaatcgacccaaatgtcccgactaggaaactcaaaattggcaagggttcgctgcttgaagtaaaatcagctttgataaaatttctaaaagcaaacctagacatttttgcctggtcccatgaagacatggtcagtatcgatccttctagaatttcacatgccctaaatatcgatccaaatttttgtcctgtttagcaaaatggaagattgttggacaaagaatgggcacaagcattaaaggaagaggtagaaaagccgtgcaataacaactttatcattgaagctttctattcggcttgggtagctaaccccgtactggtacccaagcctaacaagaaatggcgagtgtgtattgacttcaccaaccgcaacaaggcgtgccccaaagactgttttccacttccaaaaatagatcaactcatggatgcaacatccgggcacgagatcctaagctttatggacgcctattcggggtataatcaaatcaaaatgcatccaccggaccaagaacatacaagtttccaaacatgcattggtctatactattatgaagtcatgccatttggtctaaagaacgctggagctacctaccaaagattggtaaacaaaatgttcaaagatcagattggaaaatgttgaagtatacgtggatgacatgctcgtcaaatccaggaaggctaggaggcatatagatgacctggacgaatgctcaaagtcctcagaaaatacaacatgaaactcaatcccttaaagtgctcctttaaagtcggctcgggtaagtttcttggtttcattgtcaatgcccggggtattgaagtcaatccagaaaaaattcaagccctcctggatatgaaatcgcctacaaaaaccaaagaagtccaaagcttaactggtcggatagccgcactcagtagatttgtttcaaagtcgaaagataagtgtgctcctttctttaacatcctgtgaggaaataagaaatttgaatggacagaagagtgcaaaaatgcctttcaagagctaaaaagacaacttgcaaaacctcgtgtactctcaaaacctctagacggagaagaattaggaatatacatagctgttacagaacacgctgtaagtgtcgtactgattagagaagaaaacaatatccaacatccggtctactacatcaccaaaaggctcgttgaagctgaaggacaatgtccgctgatagaaaagcttacttactgcctaatcttagcaacaaggaagcggaggccctactttcaagctcatcctgttcgggtatacactgaccaaacattttgccaaatattacaaaaacctgacgcttttggatggttactcaagtgggcggtggaattgggtcaatacgaaatagttttttaaccccgaacagcagtcaaaggacaggctttagcagactttgtagttgagtgtacgggcaaagaagaaagcatttcaaaaggtagcccagggccaatacaagaacctcagccgagcaccaatgaagataaacctacctggaagcgtagatgggtcggctacaaatcaactgttcagtgcaggaattgcccttgtcacgcttgggggggcaacacctgcatggggctgtcaaatttgggtctggagcctccaacaatgaagtagagtatgaagccctcactaccggtctaaaacttgctcgggagctacatgcttaacacatcaagatctgtattgactcgtagtttgtagtaaatcacgtgtcaaaggagcacgaggcccaggggaaaatgatagcctatctaagaaaaatacatgatttgtttgcactattcaagagttatgtcctcaagcaaattccaagagaagaaaatacaactgctgatgc

SEQ ID NO: 41395 - DNA, 2059 bp, Cannabis sativa
  modified_base (1993)..(2011): a, c, t, g, unknown or other
accctaagtcttgttttcttggaagatcattatccaaaatcaccacaaagattatctatacaatatggattaagatcatcactatctatggattaagatatgcttccggtagttggtttctcctccttgaatcaacaaatgtattctttagatctatggttatacacttataattatatataatatgtttatctataaaattgaatattgttattgcatattttatgagtgataaagaaactaacaattacatcattgttttctttttaaagtaaataagtgctaaagaatgcttaacattttgttcttcatcttttaccatatgaatttgtctacaaatttattagtcctgtttggctgctaaactgttacttttatttaaaattaaaagtataaaattagtataaactttaacttaattttaacgtttagataacttttatatcatattttttttgaataaaaagtactttttaaattatggatatcattttaaaaaaaattgttttttttttttgaaaaaaacttgtgcttcattaaaaaggaaaacatgcaaagcaacaagttacaaggaaggtaaagaactattccaaactaactcattatctaatccaagacctagcttagcaatcttatgagcaatcacattacaatccctaggaatataagagataactagacttggactgaaagataacaagttcttaatctgaattagaacatcatctagaacactattattccaattacaagaaacaagcctatccactatagatttacaatcggtcaaaagcacatctacaggaagattaatcaattgagcccattccatggcttggcagatagcctttgcttccgcaacaacaggcggcactaaaccaggaaaaggggttgcgaaacccgctaaaactctattacaagcatccataaccaccactccaatactgtgttttcgattatatgaatcagtggttgcatctgtgaaaattctgaagcgacctgaaggtgtttgttgcactgatgttgcatgagtagcaaatttgggacctgttgcctgagcttgctgcacatctagaaacttaaaaaagaaattgagactccagtcatacacttcccgtgggggaagagatgtttgattgtaaaaaaagttatttctctgattccataaagcccacaagaaacaaaacaatataccaatattatctttatccaaactttgaacaagaccaataaaaaaatcatcaatgtttaaatgtttataattatcataataagtagcaaacctggaatatcgccaaacttttctggacctggaacaatctagcagagcatgcttggtggtttcaatctccaagtgacaaataggacacaagggtgaatcaatcacactttttttaaaaaggactaaagctacagggagagcatgagataacattctccatacaaaaagtttaaccttaggaggagtaatagaggaccaaattttagaccagaattttttagaaccagaaaaagaagaggatgaggggagatccaagtgagagaaagccaaatgataagttgatttaacagtaaaaaagccagaactttccctttcccaaatcagatcgtcatgaccataacatcttgaaacaggtagctcaagaatatcattaatcatgacattatcaaaacaagatttgaatttcccaacatcccaagttccagagtcagtgacaaagtatgacaataaataagaagaagagggaggatcattagtgagaaaaaatttatgtctatgattagggagccaatggtcatccagagttcgaattctactcccattacccaccttccaaatgagccctgaagccattaagtcccttccccacaaaatgcttctccaagtataagagggattgtgactagggacagcaacaaggatggaagattgaggaaagtaacgagctttaagaactgaactgagcaaagggttgttgggttttatgccctnnnnnnnnnnnnnnnnnnnataatcagatttattagttaataaagttcagaaataacatttaatgtt

SEQ ID NO: 41396 - DNA, 1537 bp, Cannabis sativa
taatttaaaagttcaaaaagggacgaaaaaacctgatattcgttgctaattccgtcttcaaagtttaaaacttcaaattgtaaaaatttgcagtcaccaattgcccaatgctcatttaaaattgattttctgatttatggaatgatatttttagaataaagttattgtactaataaacaataattatataaataacaattgatctcaattaaaaaaaaatacaaaaatatgattgattgacagtattaaacaagggtgaattacaacatatacatattacatatttttttttctccattagtttcagcattaattatgtaaataggtatatttagtttttaagaaaaaataaaaggtaaaaagacaaataaaaagaaactagctaactactaatactaactacactgttaatcataaaaattgagatacgaatatgattgatgatgactagtagtctaatagatcaaatataacaaaaatacaaatttgagattaaaagtaataaacaatattgatacaatgaacaaagagtaaatatcaaatacataccttctattaaccgttgataaatttgcctcataaaatttcaatgaatgatattattctccaattcttttattttttatatatatatataaaaaaagaaaactaaaaatatagatgatagcaaaatatatctaatatctttcttctcaattctcataaataattttgatttttgatgttggtgaaaagcttaaaatgggatacatatagtcatgtagatgaatataaaaagttttaaaaaaaaataaattaaatggtattaataaatttagtactgttagtttattagaaactaagaaatttggtaattaattgactaatatttggtttataaaaaaataaaaataataattaaaaaggttaaaaattaatgaggttttgttgggagggagaagatggagagagataagaccaacgaattgaaaattagaatgctgaccaagtcagtttttttaaaaaattaaaaaataaaataaattgggccattttcttgcgtgggccctgtgcagtaggtctgccagcacaccattaaggtcgggcctgtacaagagtaacagttgattaagatttaaagcacgctaacatattaaaaatacaaaataacaataacaaaaatactaatactaaataaaataaaaacaatatagcactaaaaagaataatataaataaaaataaatgttaaataaaatcatatttaataaaggttgtgaattaagttgtaacgccctaaataaataggcacgctcccaatatacttatgaaaccctaatcctctaattgggattactagtaaaattaccgcgaaaattaaactttaattacaaacagaatgaaaataaacttgtaatactttttcactttataaaataaaagatacaagtgttgggatcccaaaagtacttaacaaaatattattacaagtttgtttcctctagccgacctatgcggcaaaacagagtacaaaacacatcactggtagaccccaaccc

SEQ ID NO: 41397 - DNA, 1512 bp, Cannabis sativa
  modified_base (1369)..(1379): a, c, t, g, unknown or other
atcatacatatttagtaccctaaacataaaattatttgataaaattttatcaatccaatcaaactgtcttcaattttataaattttgaatttaaatttaattatttaattacatataactaataactgtttggtcaaattgattaaattttattttagggtactaaatatgtacaatttcaaaatataaagtaccaaataagtattattgaaaacacatagtaccaatttttttttttcttgagaaaatatagtactaaataagcatattccctacgaaaattgataaattgatgaaggccaaaaagattggacttctacattcttgaagtaaaaatatctctttggttaaatgattataaaaattaataagttaattagataaaattcctatattattaattaatgaattttatttaatatatttcatttataaagaaaaaagttgcaacttagagtgagtagtttaattcattgtttgatttattttatgtattaaacaaatctattaggaatgatattaacaattgcaaataagatacggtgataacatcgaatttgaatgtaataacgagcacaaggaagatacgatgataaacaattttgaaatcatatgattagttttctataaatatatcaattgtcatatatattcttaattctaattcaatttattcaaacgatatatgtcacaacccgagccctaggctgtgacaaatatgtaatatctataacttggatggtcaaaggttacactttgacccttgttcgaaaataatacttacaagcgatcattttgtttatattacaaaaacaaataaaatacatatttaaaataatagaataactactataacaaaataaaaatagttataataaaataggaccactcatcaatatacatatatatgtagaacaataatattcctacacttatgtagtcactaaatgattatatttaataataagaaaaataccaaaataatactaagcatccatcatatacctcatccctaattgttaatagctatttaaatgatgtagaccacctattaataattaggtacatactcaatcattaaaagaatagttaattaatatctaaaataggactaagctaatcacactattctccatcaacgattccctctcaccaacaagtacaaatttgagttcctggaagaggaaatatagggagcaagcttataaagcccaataagaaaacaactaatatcaaatgaccaacaatttaataaaaaaaatccttgcatggttagctcttaaaacaaaacttttcatcatcatcatcatcatcattagagagaccacaaataatcataagagacaagctacccatgcatatcacaccnnnnnnnnnnnccctagctctcaataccaatcatataaacgacatctaaaacggatagtcgcctagatttaattcgcttcatgtatagattttaggtctttcacctacaggtgagtgcacacctgatctacctatgatgacaca

SEQ ID NO: 41398 - DNA, 1263 bp, Cannabis sativa
ccccaaaccaaaccctaacatgaaaggagggaatggggtccccctaaccgctggaaagaggctccctccggatgtttgccaggaataaatccagggattctcctaggcaaacattgggtgtaaatatcctagaggcagcaaaagcaggagaaaaaggaaaagacgaaaagagagagataagtttgaaaaccgtgtcatactctcaacagtccctaagcaaaaaagttttcgcaaaatgaataagaaagaaagtagcagaacacaaatgaaaagatacgccatacgatggtcttcgccaaaattattccaccgcaaaaatcaaatacgactaaaagctctaccaaaaactctgccctaacatgcaagtgaatagcaaaagtaaaatgtatccataaaacttacataaaggtaatgaactggaaattgatgatgatcgacggtagaatgcagactggcaacgacgaagaaacaacagcaagaaatctatggtttctgaaattttctcagagtttcttgggtcgaagtggcgagatagcgaaagtaacccaataaagaaaaaatgttggcttttatagaccagatggggtgtaaggcaactgtgatcagacaccatcgtacggtggaaattgtaatcgattcgcattctacgaatccaacgcgtgagattgatgggtgccagggaggtagaaaacatttgagtactcttctgacactcggattaaatgcgtcggtttctcaatggacgggaagcgaatcgttacctacaaaaggaaatcaatattaatgatgaccgtcataaatgcagctcacgcgcttaaagcacgtgccattatgtcaacaagcaaaccggaggcatcgagcaagcctcattcacccttcactaaacgaggcttgggggtaaatgttgcctctaattttttccaaaatacgtggacgcggataaaggtggcacgtggatctgaaagcaacatcactcacgaaaatcaattaagtcttcgacaaaagaggaacaccatagggaaggtgcctcccggaaaagagatacatccttactctccgggaggctagagccatgataaggcatgtccgggaggtaggagattacttgaacaatcacttcgtatttaatgtcgcatgggggaaaatgtattggaacctccataaaagacgtgacagatggtgtatgccctccttacgctgattacacaacaatggatgagtctagtgacggctaatttatgaggaatcacatcaatcaagagg

SEQ ID NO: 41399 - DNA, 1552 bp, Cannabis sativa
ccccaccaaaaattagccatcattgactcaagttggttgcatatagtgactggaagtcgaaagcagctcataatataggtgggaatagcttggacaacagctttaaggagaacttcacgcccgccagcagagaagagtttttcattccagttatgcatcagacgccatatcttctctttaatatcactaaaaagttgttgcttatctctgccagtatacgatggaagacctaagtatttttcatgacattcacagataggcatggagagagtcctatggaaaaaaacttgggctgccaaagtagtgttaggagagaaagacatcactgatttatcatagttgagaagttggcccgaagcccgatgataaatatccaacactcttttaatggcaaggcaagagctttcattggcatgacaaaaaagcaaactgtcatcagcgaaaaacaagtgtgagattggtgaggcattcctagtaagcttgaaacccgtcaaccttcccgcaagctcttcatgttggagcaatcttgagaggccctccgaacatatcagaaataaatatggagacaatgggcaaccttgacgcaagcctctggttggggttaatgaacccgagatctctccattaatagtgaaagaaaaggtgttggtagagagacaagtcatgataaggcgggtccattgttcagcgaagcccattttccgcataacctcttcaatgaaacaccattcgacacgatcgaaggccttgctcatgtccaatttgagggaaacaatgcctttcctaccagaagttcgattcttaatagcatgaacgagttcaaaggccacgaggatgttatccgtgattagacgattaggcaaaaaggcactttgtgtctctgaaatgacagatgggaggacaaccttaaatcgactaaccagtaccttggtgatgagcttagagataacattgcagaggctgatgggacgatagtctttcattgtttgaggctttttaatctttggtatcaaagttatgatggtgcggttgagtttggtagggtcagccccatcatttagaactcccaacacagcttcagcaacaaaattccccactaaatcccagttttgttggtagaacattgcggacataccatcaatccccggactcttgtccggactcatgtttcgcaaagcatcttcaatctccgctttggtgaaaggcctggtgagattatcattcatttgaggcgtaaccatggcaggtgttgttttaagaacagcagacaaagcctcggcatcagaatgtgaggtctgaaaaatgttttggaaatagtcttcaactaccgacaccaggtctgaatgagctgtcattttttggccagaatcattaaagagattgatttctgttattggattgccgtgctgaagctttagcatgaaagaactttgtgttggcggtcccccaaaattcatcccaatcaacacgtgagcgttgttgccaatacatctcttcttgttctaaaaggtcatcaagaatagattcagaagctttgagctcctccatagtg

SEQ ID NO: 41400 - DNA, 1846 bp, Cannabis sativa
  modified_base (48)..(50): a, c, t, g, unknown or other
  modified_base (113)..(116): a, c, t, g, unknown or other
  modified_base (246)..(261): a, c, t, g, unknown or other
tgcatgcccacacataacaagtgaatcctcaatcatagtatgtaagannntgaagaatccaaacaactaaaggagtttcgggctcagatcttggtgatactctgagacagaannnntacaagggttagagatctaagcgagaggagttatttaattctgatacaaccaatgtaaggtttctcataccttttatgtgtttattttcttgttttagaaattcatattaggatgttaaaaacatacttnnnnnnnnnnnnnnnncctggtaaaagatattccaacaagttcgacccctcttccgtcaaaaaggttggtcaaggaccttttaaaatacttcaaaaaaattttatttttgaagtattgggtttgcattgtatcatgtatttctagattaattctggttgatcatacatatatgcccctcaagtaattttaaagggtttacgctttataattacttattgaaagaaatgattattttattcacaactgaagtttaaaatattacatcagtgatgcgatttacaatcattaatctcataagcacttccccaatcaattgtttattttatcaatcttccagaagcatctggttttgataaaacgggttttgatgttcagggtcaatccctaacatattcccacaattgtatcaatatccagggtcgatccctgtcatatcccggggttctaggtgaattaatcctggtttttgttgtttgtcttttactgcttatagtagacgacccacttttcccatagcagcttgatacgacaatcgtggcgagccggtatttacttactttgcaatacttttatgtaattgctttaccgcattaactgccccttgtcttcttgtgatgcgttccctctcgagataactgaggtatcccttcctcctacagaggaaggttatgatccttggtcgcttgacttactgggcagatcgtgttgatcatgggcattgtcttgcccctttacatattgttgaaagtgtcctcgcgctatgataccttctatctcatccttcaactaacaacactctttcgtggcatgtccaatatctccatgtattcacaccgttttgttgggtcccttttacgtctcgagtttctcataggttttggctcgctaaaatcgacttcatgtacatgtgcgaggtagatattttctcgagtttcattaagctcaatgtagtcaacataaaggggtcgtgtttcttctgtttcttatccttggatagccttttggaatcgtctttcctctttgatcttgaagcttctgactcgaattcttcaacagaatcattccccgattgctttcttggttccctaacttgatgtctcctgaacttatgctccaactcgtctattcacaaatggaacaaatcccttaatttgctttggaccaagttgttgacgaagatcaggttttttcaagttcaagtgttctcgtaggtcccaccaattatgacagctgtcgaatcttgctcttcctatatattgcattatgccttttttatcatcgttgcgacgagtgttctcttctccttgcattaatcgattatgaggtactatatgcttcacggtagccctcgcctcttctcgttctgctcttcttcttaaggtttgattcacatcgttccccttatagggatttgcacgagctccttttttatgagcttggagagagggttggcaatctccgactgatgttccacatgtcccaggctgtgtccccagactttcctcagtttcctcatgtttcctctcctgagagttctgggaatatctttgggttgtctcctgccccttggtttgcgagttacgaggtttgcctcgtgaat

SEQ ID NO: 41401 - DNA, 1846 bp, Cannabis sativa
aaatataatcatgaaattcttaaagaaattttttaatctaaaatagatataaaataattattagtctacaatatatcctcaaaaaataaatttaatcttgaggtatcatcaaatatctatctatactagttatttatttaaagtttagttatttattttttatttagattgtatctaaaggtatgatcatgcgaatgatttgttttattaaggtaatatttgtgctattataattggttggtaaaatataattgggtatatataagtcataacaaaataatacttattatttacttatagaaaatttggaggaacaagatataagttttgctaaatttaaagcaaacattatgtaacaaaaattaaagaaaatgtgcgatcttaaaatagaagaaaaaattattaaaaacagtcttaatatctgaaatattattagaaaacctaaaaagtgtatagtgaaacttcttcctaatctttcattggttcagctgcttgaatggtgaattgattgtactttgaactcatcgttcggtttgatctacatacaactgtattctccattttttggctgataattgctccgtaattttttggacaaataacctacgtttttgtaaaaataattagtaataaaatttattatacttctatttatgaaaatggataaattttacatatttatttttttatatttacctcgtccgaatatgactttagttgaactacagtacatgagaatatgtttactgcaacatctccgaacatcacagcatccagcaactcggtaccatcgtcgagttgtacatatgtccttgcactaataatttatacagattatataatggttagtatgaatatcaaataagttcaaatattaatttagttatgatgtgtttaccgtggtgtaggaagacatctttttccgcattttagattttcacaatctacttcttcattgtcgttgtagaacataagttttttattacataatcacccaaaaaaaatgagaaatgcagatttttagttagctacttcctttagaatatataattgattcaagataattaaggtattttaggtcttctcaaatctagaatgtgtgaacaacaccacacatgcttttcccaatgaacagtaatactattatatttcctacccttaagacccaatcatggaccaaactttcactaagaatttcaaattcatatgcccaaccaaagaattcgacgccttcaccttccaagatctccgaacacctaacatcttcgacaatacatactatgaaaattgtagatggagaagattagataaaccactttaactcactgctttatttggagagacactcatttcttctaatttttcgtgtggaacttatgacactgcactacaacttctaaaattttgtgctctgactgaggaaaaatatacaaaatagtgaaacaccaattagagcatatcataaaccaaaaattggtaaagaaaataaaaaaataaaaaatatgtttatcctttgcaatttacaaataaatgacagattatctaagcttttttttctagttgtgtatgtcaacaaaagaatggataggaaaggaaaacacttccttgtaagaatgtaaatcacatgaatattcacaatgcaaatcacatgtaagaatgtaaactaccgatagagtagcaaaccacaaaaggcaaaaccttcaatcaccctgagcaaattaaacattaacaaaaccttagtagtaagtcggtggtgggtacattcctcctggaggaccccttgggaaaggagaagttcccgactggtgatggtgtcgacctagataagaccttgaagatgatgata

SEQ ID NO: 41402 - DNA, 1108 bp, Cannabis sativa
aactaacacgtagattaaattattgaattgccttcctccacaaaaaataaataaataaataaataaataatgcaaatgcattaattgatgttggtagggatggacccggggcccctcaagatttttttttctttaaaaaaaaaaacaaatatatgggcacatgtttttaggaatattttgtaagtatctcattatgatatgatttatgttttacgcattttattttgaataatttgtgacataaatacttaaatttaactctgagttacaaataaatacaaaagtttattttttagcgataataatacttaagttataatttcgaaacttttgtatttacctgaatattaagtgaagtaaattaccacgtggcgattcttgattgactcaagtcattaaatctttatttttttaaaaaaataatttaaatataccaataagaacatgacgtgtggataataacttaatatttaacggtcaggtagacatattacttaggtagagatggaaattggtcggttaatgtacggggaatgcaatccctgcccccatccctgctatctatttatactctcatccccaccccatctccgtctaatgataaacggattcggagtaggggaatacccatcggttgtggaaaacttatcggatatccattaaggcaaataaaaaaaattaaaataattgaaaaaaaaataaattaaaattaaaccaatattctcacaaatatttagtatgcatttataatccatagaagataaacgaaaaatctacctcaaactaaaaaaaaaaacataacccaataaaaaataaaaaataaatatgtctcacctttctcttttcccttttccctattcaatttagctttgagagccctgtagtgatctctgtaatgcccttccttcttacaatagtaacattcttttcctggtttggacttagtctttgatttgtacccctagctgtaccatctgttttgattactcttgttgtttaacttgtgatgtccacccttggaattgtttgattcactttcacctttaacaaacaatccatctctaacaccatatgatctttcatcattctttttctgcatttctttgga

SEQ ID NO: 41403 - DNA, 1715 bp, Cannabis sativa
gcaatgcaagcaaggatcgaggaataagataatgagttttgacaggagggtgctcctgcaatgcctgctcaaaaagttccagtggcactgcccctgctgtccaggctgaacgagtggtggcaatgaatcggatggaacctctgtatgaaaggttccgcaagcaagcacctcagtttttctgggaggtctggatttcatgaaagccgagcaatggctaacggtgattactagaatcttgaactttatgggtgtcaccagtaatgacagggtggtctgtgccacctttcagtttcaagaagatgcactggtctggtgggacatcatgtctatgattcacgatgttacgacaatgacctgggaaaagtaccaggaacttttcaatgctaagtattacaatgaagcagttagaagtgctaagagaaaggaattcactcatttaactcagaaagaaaatatgagtgttactgagtacacaatgcaatttgaccatttggcgaggttggcctcgggaatggtgccaagtgacttcagtaagaaagaaaaatatctggatgggttaaatgcgaaaattagacatgacttgatgatcactactgatgaaagaaccacctatgctgaaatggtggacaaggcactacgagctgagggcgcagtaggatacatgacagagtatggtgggactccagttgttggcggggctcctacccctcctgcatcaggttttagtaggggaagtagtggttctgccatggacccaaaaagaaaggcatccattgcaaccagtggctcgggtcaaaataggaggttatagccctttaaatagttattcatactcactgggcaatgggtagaaaaaattgtctaagaattcatattcagagatactattataagagctctaagaaaaggaaccattctccttattcttaagtcaatacaagctacgacgattaggctattaccgaactgctctgggctgaacctttataaaattcctgtgtctttatttgctttattatattacacttgtattatactacttgtcgcttacaaattagactcattgtcgttggctaaaagtgaggtcaacattttggtgctttcattgagagttgaactcaaggattgctctttatctcaaatctaaacgcaaatacaatattggtacagactcggagaggcgtggttgactccacaaatccacaggcggtggatactgcactgtgcaaccctgggaacacgagggttccgccaaccacgaatcttgaacatccattaagtgtaggtcgcggtgtgacgactcctgtggttgaaatcgtgcctggggtgcaaccagggttttcataacacagccgtttcgcccactaccaatgttcaaacaaccattggagatgacactgaaatccagaacctccacactgctcttggaatcatgcaggctcataccaacaccctacatcatgatcagaaggaactccacgccgcgataaatcttgcgtttgaagagcagagatgcatgttcgtcgaatggagggacaatgatatggaaacgttcagggcttagcaagtagtcattgacgaccgtagttagcagaccactctgttgatacaaaaagcctattagactactggacaacagcctgtaaccgtcatctccttgggcgagaccgacgaagatccagcgatgaatgcctctcaaactataaatggtcagc

SEQ ID NO: 41404 - DNA, 1714 bp, Cannabis sativa
  modified_base (1684)..(1688): a, c, t, g, unknown or other
caacttaatgcaaatcaacaacagctggatcccataaattcagaaagtatcaagatggggaacatgggaaattaccccggttatgactcggatgaggaaaccgagccgtttcatcctaatattttgaattttgaatttcttcatggattcaaaaacccacatatctcgtagtatgatggaactacagacccagtcactcacttgaataactttaataccataatgcgagccagcaatgtcttgaataatttgtgttgcatcttattcccgacttctttaactggagcagcgagtagctggtttgacaaattcactcatcactgaataacatcttgggaacaactgtccaaagactttaagaaccaatttcaggatgctagagataggcaacctgaagcatcatctttaactaacataaagcaacaaccaggcgagtcgcttaaagcttacttgattcgctttagcacagccgctgccaaggttagaaacctgaatgaaattatttagcttaccgctcttcaggtggggatcacaaccaacctttctacggctgaagacgagttgtgggatgacctacagggtcgcccagttagaaatattaatgagttcaatgaaagagcacaggtatttgtgtgcaaagaagaagttagaaacaagatgaagttactgaagactaactcaggaagtaaacctagcacaagtattgcaacggcaagtaccgtctcaactaaaatagataacccaagtggttcaaagaccaagagaaaagatgactcaaaggaatcacctaaaagtaaaaagaaacaaaagaagcacgacaaatatgtctcaatatactcagtatataccgagttgaatgaaactcgtaaaaacatatttctcgcaaacgaaaacaagattgcatttcgcaagcctgagctcatgaggcatgcgagacataagaaagattcaacgaaatattaccaatttcataaaaacatagggcacactatagaaaaatatcgacaactaaaagacgagatagagagtttaatcttgcatggatatttcagacaatatgtaagacatcgaggcaacgagccaaactaggccaacaaccctattaacccaaataaccagagattgcaacctccccccattgagggcgaggagatactggtcatttcgggagggccgcatctcgctaaaaatagtaataattcccacaaaagatatatcaataaagtaaagaatggaaaatcagtatttgctcaagaaccactgaaaagagcaaagttagatgaacctccgattgcctttttggaggaagacacaaaacacgtgcagtatccgcatgtcgatcctctcgttgttacaattcagctcgctaacaagagagtaaaaagggtattggtggataacagaacttcagtgaatatcctttacaaaaatacattaaagaaaacaggattacaagatgcaaaggtaacaccttgcatggtaagcttatgtgggttcacaggaaacagtgtcgccagccaaggcatcattgaaattccattaactgtaggagaaccaccattatcaacgacgctaatgcatgagttcctagttgttgatcttccattagtttataatgtattgataggttgccctgcattgattggactaggggtagtaagttctgttaggttttatgccctannnnnaactccatttcaatgtaatctatttt

SEQ ID NO: 41405 - DNA, 1750 bp, Cannabis sativa
tttaaaaacacaattttaaaaattgaaaactgaaaacacagtcaaacaagctcttagtttcttgatgaaggatctttggtaattgatttttgatcgcgtgagaaacaaagtaatttgaatcgcgtgagagaaaaaaaatcttgtgtgactggagggagtgtgatcctattttgaaaaattgagtatcttttttaatatattttttatggcatttcctatttaaatacccatacatttagctcatttggttataaaataccatatttagtggcattaactttacatgctatatatatatatatatatatcaaaatttctacttgttttcctatatttttgtaaatatcccaaaaataaataataaatgtaaaatactaatttgtatataatttagaatacaataataatatttaataattaagtatacataattgatcgatccatatcaatcagcgcaatttgatagtgcaatactatcaatcatctctagatctttaaatcaaaagtaattttatttatctgattatcaaaagtatacaactgtgattagacaatatgtatttatagagttaaggagaggacttagctacataaccctagttgtactgggtttgctcatcaaaaacttcagttaactaaaaaatcctacacttctacttgaactagactttacacacatagatgctaaactcattaactattgatcactaacaatataggctaacacaacaaataactatcaaatcaacctaagttttaataaaatcaataaaaattaatgtaggctcaaataaaagtctaactcctacttggcctacattaattttaatacatatatattatatatcaaaataattttgtttaaaaacaactcatgggatgaacagcaagaaaacatttgtggccactttaaaaaatagtagttctctgatagcatctcaacatatagtgatccaattaaacctttgatattgagctatgacaatcatattatttttaaatcaacaaaagacattcataatcacaaataacaaagtattaaaccgacatggtcaataattctagtagtatggtaaagaattattttcaacatgtgatctatttaaataacataatattcttatcagtcctcaatttcactgataatgtgatgcttaataaataagccaataaatttaaccatacactacttaataataagttagtgtcactaaacatggttaaaaaaaaattaagccaataaatatcattgtcattaagtaaataattaaaggacaataattacaacaagatatgaagtacatgctttcaattcaatcattctcaagaatataacaaaaaataattgaaaatataaaaatccaataatccaaaaattatttgtccacaaaacaaaccaagtaattcataacatccaaaagaaaattacatataaatgtgttgactatggatttagccaaccgacacagagtctaactaggatcgtcgcttatgactgtcatgtgtggaacgataataaatgtaaagagacaaataaatttatagaagttcacccccttttatttaggtaatgacttactcaccttgtagttgtatttactctgattgtttttagctctaaataaaattcatttcaatgtaatctgatttgttatcaatagaagattagaagttatttgtatttacatgtagtttttatgtcaatggtttaatatatacaatttctgttaagttcagaacatatagttat

SEQ ID NO: 41406 - DNA, 1136 bp, Cannabis sativa
  modified_base (73)..(77): a, c, t, g, unknown or other
ttagaaaattagttattgagttgatatttcgtacgccaaaacagagagagacagacagagagagagagagagnnnnngagagagagagagagagtatggtgtatacgatatatcaatttttttgtcaatcttcgagtggattgcaacctgggtgaaagtggatgtttgagaccacttatgtacgacatgagcaagccttttaacgttgtataagggtcggaggtaactgttttgagtttcaccattgttgaagctttgaaggtacaacttaaaaaggacacaaattcgaacgtgtttaagcttgttcttgggtcaagggaggttagatatgagtatatgggaccctaaggattgtttttgatgtaacaaaatgaagcttgaacgtccaaaaagaaggaccaagattttgactccattaaagacaatacaccgccaacgaaggagacaactccgatctgccaatttgggcctcttttctttggttgatcttgattattttgaggtcctgagcactgtggagagcttccccaatcgaaaggatgcgtcaagagcaaccgggaaaaagttacatcttgccggcgacaaaactgacatgaacgccgacgaccacgttctgagtagttctgaggatcttgttctttataaggaaacacattgagttactcaaggtagcaagtgtggtcttagcaactgaggtaagaagagtgagaatctgtgcacaaggtgtatgtttatgcatacaactcggtttgatttgttatttaatttgattatgtgttatgatgatttccttacataattagcatcgttagcatgagaatagtgttagggtcttaccgcttgtgtgagcatagcacttgcaggttataatattatcatgagtgagtacaacttatggtaagtgattgtcctgttggatgccaactatgagaataaaacaaggcagggtaggtgacctcatgtctgatcaacatgattgtataattaactatcgtatgcgagtataatgtgcggtatgagacttgatttatgcatgtaagaacaacatgcattattaatatatttcatggaatgtgaattattattgattaatatttagactaacttatgtcaagcatctagttaggagggttatg

SEQ ID NO: 41407 - DNA, 1720 bp, Cannabis sativa
  modified_base (408)..(411): a, c, t, g, unknown or other
acggactatcctatgtgacatctcgggaaatcggggtgttacacccaggtcacaagtcgtggtctgggtccaagtcccggtatgggttctggtttgagtttaggttttaggttttggccctgttacggtccaatatctgggttctagtcccagtcctagtctgattccagtttcgggtccgggatcaggtcagacttgaacctgggacccgatcccagacccaaactcggacctagacatggatctggatacgaacctagacttgaacctagacccagccagacccatacccactgggatcgaaacttgggagttggattcggaccgagaccaagaccgaaacctggacccgtacccaagacttggactcggacctggacccaaacccagatccagaccgggatctgnnnntggaccaagacccaaccctggacttgaactaggactcaaaccccgacctagacggagacccagacccaaacccgaacccggacatggaatcaaaatcggaactgggactaggacctgaacccaaacatggacccggactaggacctacgacctggacctaaatgggggaccttgacccaggcctcaggatcggaacccgagactcggacgcggacctgaatcaagactcaaacccaggactcaaacctagatctagacccagaccgggatcggaaactcgaacccgaactcaaactagaacttgaaccccaaccgggtcctagactcagactgggacctaggaaccggaccaggatggggacctggatcagggacccaggcttctaaaactagcaccgagacccaggacctgaccccggacccagatcctaaactcggactagggccaagacctaagacctgaagtggaacaagactgggacctgagaccgggatcctgatttagacccgtggcttaaacctaacccatagtcgatgtttggatctgggacccatacccagactaaaatctagacccagactcggacctaaacccggacccagacccagacttagacctaaagttgagccaaaactcggactcggacctaaacccgtaccccgtgacccaaaactggatgcagaacgtaagcgtaccgggacctgttaagaagatcgaggcactgtgacctagtctcattcccggaactagaatctaactaggacctagacccagaccaggactgggacacggagccgaattaaaactcagatcgaaactcaagacgcgaacccgaacccaaacacggacttggacccaaacccagacgcacaaccctgaccgagattggagactcagacttggacccaagtctcagacctagattggggaaccaaacttgaaattagaacctaaatcgggacccagtagtgggattgggatccaagacccaactccggtttctgtcctcgacccggacctgcacccagacacggacactgacacagacacggactaggacctagtatttgaatcggaacgagaccgagacacaagattgggatccgaatcttgacccacatcccggggctttgacccaacccgtagtcactttctcgattttggaatcgtaccaagacccaaacctagaaccatttctagacctggacccaaatcaagactcgaacttgggacccgaaattggaacaagaatcagaatgaggaccttggaactggaattggacctggacccaaaatcagatctagatg

SEQ ID NO: 41408 - DNA, 1980 bp, Cannabis sativa
attaattttatttttcaagattataatgttcaatgtatttaaaatttttagatataaaattaattatttacatcaattacatcatttataaaatcatgcatgaactagtaaataatatacattcattcctagtatgcttattcttcaacttagttcaaggtaaatcttcaatgtatttaaaatttttagatattgaattatttatttattttaattacactatctatataaagcatgcatgaactagttagtagtgcacatttttatcataattatatttttttctcaataatcaaaaaaatatatttttttggatcacaacatcaataacattagcaaggtatgtatttttttattcatatatgtatataatattattgtatcattattattttttttattttgtgtacaacttatttttcttttgatttttctattttttagatgtcttctaatgaagattggatggctgcaccaaaaacgcacagttttatctctcctgtctcgtggtaccaaacatgtcttctgggtacaaattactgaaggcagaaggctttacgatagcagaaccaagatatgtcatggaaggacatatccaggtgggattggcccacttctcctttgctgagggtcccactgataggtctgcggtgctgacctggagtccacgtgtccaataccaaaaacgtgaataatagttacaatttggttcgcacgtcatcaaggccgaaatttgggataacaattatattgtgcaattattatattttattgtatacaaaaattataaaattttaaaaaccaaagtgtattagaggtttccataataataagtttaattaatatactatcataaaaatttaaaatagtttacttctctatacaatcttaatgtatcgacgagtagggctgagtatcggtcggtttttttacaaataaaaatccgaatttcagttttcggtttggattggttcaatccaaaaactgaccgaccaatccagaaacatccttaaaatcgaccaatgtgaattgcggtttggttggttcaaaccgccaaaaccgattttttttttttgtaaaatatagtcaaatttattttttatgtttgagattttgattatgactgttgtgagcattgtttagtttgattcagtttacatttcttattgaattgtatttttctcctataaatacttgtttcaaagttcattcaatccattttattagttttattttgttcttgaaatcatattaatggttgatgcattggttttgagtttcattattcgatatctcatttataattaataaatatatattcaaatatgaattgagggattaggaattccttcaaattcataaagtgagttaatgtgcttgctttgactgatatatatagtggatgcttgattttcctactcagagcagtggctaaacttataaccaaaaaaaattaaaattgggcagatttttaatttgtcaagaaatttcgaggcattgtgaatgaaggaaaatcttgctggtttttcttccttattatgcacttctgctaaaaagaaaaattattatatattatcaatatataatataacaattcataaataaagtaaaaaaattaaaaaaaattatatatgtataagttatttctgttggtttcggttttattggtcggtttactatccaaaaacaaactgactgatcattggcggtttaatcgttggcaatttttttcgattttcagttccgccggtttcggttccaacggtgtttggtaggtcagtttgaacggtttttttggttttctggattttatgcttagccctatcgacgaggtataattttatgatgacctgtctggctatgtagaagcttaacaatcttcaatgaaggtcaaaaccagatggtatgaccaggaaagacaaacagagagaacagagagaaaattaaatgaagattggaaaagcttcacatctttcagtg

SEQ ID NO: 41409 - DNA, 1440 bp, Cannabis sativa
ggtgtattgtagaattttccatatatatatatataaaatatggttatctaactatttttgttagtttaacaaaataatttaaaaatataagaatgtttcgttaaatttaacggtattaaaaatgttagttttataaataaatacataaatattaatattatttattttagactaatttaaatatatatatataaatattaatattatttgtttttggttgacagaagttataccaattttaggttaacttatatatataaaaaaatattaatatagtaattgtaatattattattttattattatttttaatattgggagtatgttacaattttaatattcttaaactttatagttatttttctcaaatttttgaaactttaaatattattttttaaaaaaatataaaaaattaataaatagtttcctttaatttataaaattttaaaaatatacaaaacaaaactaaaaattaaaaatataatatacacataacaataacaaaatatatatatatacactagaagacaattacgtgcaaggtatttgtttgtttatttttttttaatcttgatttaacaatataatttaaaataaaaatattatttaaaacctttattacatttttcataacttaaattgtttcattattcaaaaacattacatcaaaagataatttatatatatattttttaaatattagttataaataatttataaactaaaataaagatatatcaactttctcttattttacttcttcactaataaatttcagtcttctgtaatattaatctcatatattcatgatataagtaacttaactaatttttggatttttatatttatctttgtaatataaaataataaataattatatatcgtacataaataatttaatcaagtatatatatacaaatataagctatattaataaaactaaaaataatctaataaagtatctacaaatataagctatattaacaaaattaaaaataatctaatctaagtatatatatacaaatataagctatattaatagaactaatctatatataaagcaagtttttttttctttttttacagatatctggttatccagtttaagcccattacttaaagtacaacaaaaaaaaatcatgcatttatatatgatccttttaaaaaatagcatatataattttgaaattaattaaaaaataaatatagcatttaggtacctgaaaaaaccgtatatgatttgataaagcaaacattttttattaacaaatcacttatgtttaccatctatttcttttgggcccaacctaactaattcaattgggaaatttacaccacatattttttttattttattttatttcaattttactgttgtaaggaaaatattacatttttactgtctttttctatactgtgtgtactgttttttttttttttt

SEQ ID NO: 41410 - DNA, 1407 bp, Cannabis sativa
aaaaattattattaaaactcaaaacaattaataaaatatatttagagcaataaataatattttataaatatatagcatgatatactaaattttaaaaaaaactttaaaataaaaaatgggtttaaaacatctgttgtaacatatttttagtacaattttttatattttttaaagcttatttattttaaagaagttgatgtgagggctgaaggtaatgcatatggttatcaaaagtacataattttaatttttttttttattttctcttatccacttataattttgcatacttttttaagagaaaatactttaatagttgataactctaaagttaccttttcatgatcccacatcaagtaaattaatgattttttttgtctaaaaagtaacttttttttagaaagaatatatataaataaataaaaagaaagaaaatgtcatgtcactatgtttaatattgagcaatactttagagcatctctaatggaggttgtccattaaagtgatcttatcacatatgcaatgtagtctaattttgaagaccaattatgtaaaatattgctcaatatagaccatagccacataacattttctttttttctttatttttttttctttgttgagaaaaaattattttttaccaaaaaactcattaatttaatgtgaactaagactatggtgaacaactttaacaattgtaactattggagtattttttattggaaaatgtaccgaatcttatctggatgagagagaaaataaaaaaaaaaaatttaagatgatgtgtgtatttttgacaactatagatattgccccaattggagatactgctacataaaatagtcttgaaaattagaccattgctcttatccctcaatagctatatccataaatagttttttttttttttgaaatatttgcaccaacaactattcttattaaattatttaataatttacccttacctattttaatactcacacacaatttaagtatttcttttttataggtataccaatgtatatttattgcttctctctcctaaattctgcctacatgctagctttttcttttttcttgtttttttttctttttttttttagacatagtagcttttttgttttttttttaattagaatcttattttttcaaaataacagtaaactaggttgatcaaatatatttttttttacattctattcttttttatttttattttacattcttttttattttttaatctaatgagcagttttagaaagaaataattgtatgtatcaatgtgaattgtaaattatttatgaaagtatcttagaccagtttattgttttaaataccgctacacgcctactaaaattaaaaattaaccatatgtttttcttttacattttattgactctcctagtt

SEQ ID NO: 41411 - DNA, 1496 bp, Cannabis sativa
aagtgataagtaagatcgtctccaaagagattgtaagtaaaatttaatacaaaactaattatttaacaatttagattttaagaaaataaattgattggatgttgtgaactaaaataaaattgattgaactggaattaagattgaaatattgctacaaatactggaaaattaactgcaaggaaaagtaatcaaaggacaaacaaacttgaatagctaaatccctcaatgtctaaaattgcccaattgctacaacattgcttcatcaaagcgcacaaagttaattagaattcctatatgtttatgagatttttctaaactcgtgaaataaagctctatcatctaattcaatatattcctatattaaatcagatctaagaacacaatctaagcaccaattctcaaagttatgcaatgtagtaaaatattcctatttcacttactaagaataacctacaaatagctattttcttgtatcattcaagtaccaactactagatttaacatttacagtattaaatctagcttaataacttgccattgatttccaaacaacaacaataaataaacatgaagatcacttgaatgaacaaagacaatttagcttaagtaatgcattcaaatttaaaatacatgacaaaaggggttttaaccattcaagtctcaaaagtttagctcataactaaaatagcaaacataaactaaaatagaaaattaatatccatgcaaaataagaaaatacaaaatggagaagaaaggaagaaaagagaacaaagcctagattgatggtgttgtaggttggattttcttgtccttatctttctccttcaattcctcgtgtttcctcctttttcttcttcttcttcttcatgctcttttttttctgtaacttttttccaacaatggtagccaacaataatttttccttttttttccttatttgtttggttatactctctaaagttaggtcattagggtactttgtaataccctaattaaaaagccatttccttcatctttggcccactattcctggtattttttctccacattagccagctggaataaacttaagtggttgccacataattgctgatgtggataagtgaaatttcgttttttagacttcttccacgtcactgcccaaactccccagaatgctatcagtatttcctcccagatagcttttatttccactttgtctttgcatcatttcctttttcctagcaagttaattcttcttttcccacagcaagcaagcatgcatcatttaattaattaaaaaaaaaaacaactaaaataacaatttttacaagacttaaaagctagcttactaaatagaaaatgaagataaaactaattaaaattaagcaaacaaacacactttcactactcttcttttgtaatttattattgatgtaatttgatacttaattttatacatttttatagtaagtttttaactgctcgatcataaagtattatctctctctctctct

SEQ ID NO: 41412 - DNA, 1487 bp, Cannabis sativa
aatccttctcttaatttcttacagttctctaatcttatattattttattggttgtcgaaaacctcggtcaacatatgctataaaatacaatataaaatatcatataaaatgagatataatttttctaggtgacaaaaataaaaaatgatctaccataagagcaaaagtaatagggataataataattatacaaaacactattttttataaaaaaaatctacatttttacatttttttctttttacgaagttttataaaaatatcatgaaaataacaaaaaaaataatataaaactaacagaaaaataacatccaaacaacaataaaaataaacatacaaataataaaaatcaataacaaattaacaatagtacaatataaaaatatatcaaaagaccgtattttctaaactttgggacccctttgattagtgtttacccaaaattttacgacgatgacgtgtcaagagtagcagcacgtggcacaaaaataccgggactaaattaatgaagaatgtataaagtcatgaccgttgagatgaccgccaaccatgaagtgttagtctaggagtataccactacctcctacaccttcatggtatgagtcatgtattttatcatagatacaatgacattctcaaaagtatatggagacatccatattgcaccataactactgacaacggaagaggggtcacccaacgaaggtggtagtcacccctctcaagttgggtcccgaggggtcacccaacaatggtggttgtcacccccccacaagtcgggtccaggggggggtcacacaacgatggtggttatcacccccctcaagttgggtcttagggggtcacccaacgatggttgttatcacccccccttaagttggatcctggggggtcacccaacgatggtggtcatcatcccccttaacgagagtctcgggagtgttgcccccaagtatgagcttcatcgctaaaggtggttgacgaccatgtcacacccataagggactcttatcgtcagtagctccttcaaatgtttaaatctcacgaaaggctcaaagacagttgtcattccacgaaaatagcgggatattatcataaaaatcaaacttcaactacctccgaaaatcaaggagacggttgaggtagctccgcgttagtcgcgtctcctaaagcgagaagcaccgaccccctcccctatattaggggtcatccatgacctgggagggggatccacaattttgaacacttagaaaaataaatacttctcattctttgcaatcaagagcctgttcttaacttttacaactcaggtcaataaaatacaaggagattatgctattaccgacatccagggccgaacctctttgaatttcagtgttttatttacatttaatgtaaattctggtgttattaactgcatttattattgtaattttaatttaaatctcatttattacgactccgcatcggttggctaaaaatccagt

SEQ ID NO: 41413 - DNA, 1549 bp, Cannabis sativa
tacttaattttaatatgtttagtcctgtcatgaaacatagggtttttacataggtgcacacagttttagctatcagagtatatcacaggtatactatctaggagttttagttcttttaggaccccttttacccatatgctatcttttatggcttcagttgtagcaatgtattcagattcagttgtggatagagccacaactgattgtagttgcaccttctagctaaaacagtttcctcccattagtagtatgtaggcagaggtagattttttactgtccctgtccttagcatagtctgcatcactatatcattctatagttgtcttctcttgttgttgtctgtacttgcatcccattttagctgtaccaatcaaataccttagtaaccatttcatagctagccaatgtgtctttctagggttggccatgtatctgctaagtacactaataacataggttgggttaggtcttgtgctaaccattaggtacataacatatcctatagcatttgcatagggtatcgtactcatttcttccttttcagctttagtcccagggcactgtttcttagataaggtgtattgagttgtaataggctggttggcaatcttaaagccattcattgagaatttctcaattattttgtgtatgtagtcttcttgtgtaagactaagtgtgccttctactctgtttctcttgatagtaattcctagaattttagttgcttcacctaggtcttttatttcaaattcaattttgagtaaaccttttataatgtttactctagccctttctttgctaatgatgagcatatcatctacatacattagtagataaatggcttcattcatactagttcctttgtagtataggcaatgatcataatagattctagaaaatccaagcttcagcatgaagccatcaaaccttttgttccactgccttagtccttatagtgattttaccagcttacaaacatagttttctttgccctttgttgtataccctttaggctgtctcatatagattttttccccaagttcactatgtaaaaaagcagttgtcatgtctatttggtctatctccatgttgaattgtgtagctaaactcaacattattcttatagtcttctattttgttactggtgcaaatacttcattgaaatctaccccttccttttgagtaaaaccctttgcaactaacctggctttgtaccttgtaggttcttttttaattctcccttctttttccctgaataaccatttacaatccacaatgctattgtcttttggtttaggcacttcaatccaggtcctgttcttcttaagagattccatctcttcatcaacaactcctttacatttccttgaatatggtccattaatggcctcttcataagcttggggttcattgttgactgtatctgattcactcatgaaggcatatgcaatgtcttcatcgcagatatcaaaactgtacttagggtttggttttggtacccttttacttatgtccctagtcaactgataatcacctaagtcttcttgag

SEQ ID NO: 41414 - DNA, 1680 bp, Cannabis sativa
tatattgatcgaattttataaaggttcgaagtgacaatagatattaaaccattttgtaaatagatcaaaattgaaaaattgagtttttgctaatgtcaataattattatagaaaaacattaaaaatgtaacagtaacagtattgcagaaacaaaccaaaactagaacaataaatttagcaaaaataaaaataacagcagaaaataagatcatttgacacaagagatttgtacatggtatcagtgttctttagaacactcctagtccacggggccacggccagagaaagaaatcaattagtaaagtctcaaaaattacaaagacacttaacttatacaagtttagactccctctaaatctttgtcgcaatcctttgtaacacactttacgaatctgatttctgaacaaccattaaatagcgaactctcttcgtctttgaggtgtgagtgcttacttcctctcaaagtaaggcttgaacaattcttctcccaaaaacctttctcttgctcaatcaagttgttcaaaccgaccctaagaccaatataagaataaatatacaaatactaaaaactagatgaataactaggttttcacaaaaaagaactctctcttcacaaatgataatatgcaaaaaatgaaagctagaagagttgaactgattggctgctctataggttttatttataaaacatagaaccttagagacaaccacaaaatcgtttccacagttgtacaaactttctaaaagaaaatcttgtttgcagcatcagaatcaggttctacagcagcaaaccagaccagaaaatgaaacttgccaaaaaggtattcgatcatgaacatggacttgatacctgccaaaaatagtgtgcttgatctgattttatcaagacacaatcaaacacattaaagagaaatagcaatggtcaaagttttcatataacaccaacttttcataagagaatttcttctcttacaagaagtttccaaaacaagaaaatggacagctgaaaaagattatttcctttgatagaaaagatcaataaatacacaatattaaggtgataaaaatggtttaattgcacaaagaaatcacaccataaataaacaatattttacacctaaattgccaaaaaaaaggactttacaatctccccggcactttaaataatcaaaatattttttaacaaaaaagtacctgcaaaacaaagttagccacaccaaacaaatctccccctgagaaacacaacattaaaccaaaatataatgctagctttaatccaaagtttaacacatgtaccaatctcaacccccctggaaaaagggtccagagttgagaaaacaaagcaagaaattaaaaactattactcccccttttttatttatctaagggccaaagacaaatagaaatgaaaataagtccaacaaatagtcaaaaagaaggaaagaaaaaaaaaacttatgccccgtaaagcttgagcagagtggacaactgcttggacatctcttgttgaacctcctccatgacagctaaacgattgttcaacagaatgacttcctgcacatctgcagaagcagaactgaaacttgcaccagcaacaagatttgcaccaacaaaatccttaggacgcttgggaaaagatccatcaaagtactctgagggttgaaagatggttctagtgag

SEQ ID NO: 41415 - DNA, 1541 bp, Cannabis sativa
ttaagttactgttacaaaaatttctgaatacaattaacattattattactataaataattaataattaataataaaaataaataaataaattaaggctaattatcaattttttccccgaactttgacatgtactaaatcatgcccctgaatttttttggccgttaaaaatttctcatgaactattaagattgttagatttaaggacatttgtttaattttagaaagacctttgtttaattttaataaaaaaattctaacattgatgaaaattcaagcggcgtgatttagtacatatcaaagtttgaaggccatgatttggtagatatcaaagtctgggaagcatggtttagtacataaacaatcactgatacagtaaaattgaatgaaattagacaaaaatccttaaatctaacaatttcaatagttcaggggaatttttaacggcctagaaaattcaaagggcatgatttggtatatgtcaaagtttgggaaaaaaattattaattagccataaattaaggatgacttgcgtctcacacgagcctgggacacattatttattgctaagtgaaagttacatagattttataaaaaagttggcatttataggtttgtcactcttttatgatattttttcacgtttgaatttttttattgtatttaatatgccatatttttataggaaattttcataaatataggaattgagaatataatttattttttatggcttaaataaataacactataaggttatgagttttttatgctatatttttgtaaaaaaaaaaatagaaattccatatttgtaaaacaataataagttttatcggaaaaatcaccggtaccggaaaagttagtatcgccggaaaagtcaccgaaaaaagcacagtcgccgaaaaaatcaccgtcgctggaaaagtcaccaaaaaaattaaagtcaactgaagtaaatgtctcagatatatctaaaaatataactggttcaatgaataaaaactaataattcaatccgattataattaaaatataaccaattttgtaatataataataaataaatataaataacataaaataattcaaaccagttttaattaaatgtaatatttataacaattctcataaatttttctcatatttataattttttttaaaaaaaatatcatatttagtgtaattaaatttttattccatatatatcaaaaacttatattcattttctcatttttttcaaaccattcaaaccaaaatacatatgaactttcattctttccaataaaaaaaaaagacaaaataccgattgttttatttgtgattcttcacccccacaatcaaaattattatctgcgattcttcatctccgattcttctttgttctctcaaactcacacatatacatatatatatatagttatatagttactagcactgataacaaaaccctcattctccccacttcatcacacagcctgctcgatcgaaaatttcaaagaaaaatcgattttctggctctatttttcattcttgagaactctggc

SEQ ID NO: 41416 - DNA, 1154 bp, Cannabis sativa
tttatacataaacatatatatttcagtttatacatataaatgtctaacacaacatgcagtcgagctaacgacattaaacaaaacaaacctacgggagttgttcttacatttttctttttattttgcattgattttatttgattgagccttgaagacaatgcttatattaagtgtggggggattagtaagttttatggaaaaaaaaaagatacaatattgaattgtttggggaagtgattggggaatacaaatgtgaattatttcagagaatattgtatgtgtatatggtgtaatttgagcttaaattaacctttttacccacctttcactctagccaaatattataagcctataaagtcttattgatcttcaaattgtgtgtaattatattagtggagaatagttcgataattaagtttatggaatggattttcattcaaagacacatttatttgagatgatcattggttgttgacatgcatgaattgatttgaatgttagtaatatgatgagttgattgaacacacacgcaaaaaattgagtttgaaaagtaattatcttaagttgaaattctaataatttaagagtttgggattttcttggaattataagtggatgtataatttttaaaactaaaattatttttcataaaaaactgatttgtttgagcatcattcattttatcattaaatgactcaaggacaagtaagagtcaagtgtgagagaattcaataagtcaagtaagagtcaactcatgaattaatatttttaaattgattctttaaattattaattagtggaattataatttgttaggatattttaaagactaatcatacatttagaatcatttggagggatgttagcacattttagtagaaaaaagtagaagtcggcgagctcgattttacaaggtagtacttaatttcaaattttgacgatattgtaagtagtactatacttggagctcaacataaaagttgtagatcttgttcttagctttccggaacatcttgaatcatcaaattctaagttgtattgaaaaaattatggccaaaatactaatcacgtgacataaattttttagcagcgagtcatggtcgcgacaagcaacctcatggccgcgacaaggaggtgatttctgggcgaaattt

SEQ ID NO: 41417 - DNA, 1477 bp, Cannabis sativa
cttttgcatctttcttggaagctcgatcatctcatgaaaaagtaaaaaatagcacaatgttttgagatcttcaggtgaagctgaatatcgtgctatggcaaatacaacatgtgagattgtttggttaagttttgttttgaaagagttgaagattgattatcaaggaccatcacttttacattgttataacaaggcagcacaacatattgcagccaatcctatttaccatgagaaaacatgaaagcatattgagatagattaccacattgtgagagaaaaaattcaagcaggagtcataaagacagtccatgtctcaaccaaggatcagattgtagacttgttaacaaagctactgtttccaacagagttccaagctctcaaagacaagatgggattgcaaaacattcattccacatcttgagggggagtattaagtgagcttttgtattctgttgttagttggaaagagttgtttagtctgttatattttcagttacagctgttagttagctgtcagttagttaagctcctttgttctgttattgattcatatataaagttgttgtcttcatcaatgaataatacactttgtttcttctctctatttctctctgttatctcttttctctctttgtaaaatatatctaaggacaccatatattttaaaatataaagtaattactaaattgtgtaattatcatcttagtaattatattattacgaagttacttcttttaaaaaaaaaaaatgagataatccattaacagacacaaaatttaaaaagtctcaaagtacaaataaagttaaaaatgagataatcacaggttttgtggaaccctcggctatcccgagctctatcctttgtaatgaccgggatgtctaattttatattatcaattaacgttttcatttcaaaaaagtacaaaaaattaaacaacaaaatctataaaaaaaaaaaaaaaatacccaaccaccaaccacgggatccatctaaagcctacttctaaacacacctttaattattttatgatggaatatggttgctgtgtgggaaagctctcaagacatgagggatttgtctaagaatggcagccaaattggtcaacattggccattgctaccttctttatattttgactataaaacaagacaactacataacctatcatctacttattacatttgataaaagggagtattttttttttttaataaaattttaccaaagaatttttacatatatatttttacggtattttataaaaataatatgaaaaaattacaaaaaaaaaaaaacataaaaatactaataataataataataacatacaaataataaaaaatcaataataaattaataagagtataacataaaaatatctcaaaacctatattttctataaataaaattataaaaatcgtaaaaatacttaaaatttcgtacaactgtatctttttaatttatttattgttttta

SEQ ID NO: 41418 - DNA, 1262 bp, Cannabis sativa
ttctcctcggagttccatgcacaattctcttcttctcaccaacttccattgcacttaggagatctggtcgaagtgaagcaaagaccaggagaaccttttcgagcttacatcattagattcatgatggaggcaactaagtttgtacgggtgaccgaatacggaaagttgttcgcgatactggggggcattgaggttctttatgaactttggaaggacatcaggaagaacgggccagtagattctatgagtgacttccttgatcgcgaaaaaggtttcattaagcttgaagaagccattcaatgagtagaggtggagcagaaacctaggcagccaaaagctccctctactgggatatcctcctatttcccccaatacccaagcaattcgagctcgggtggtaaatggtccaacaacagtaataggcaaggaaatgggaaaatgggaatgtttcctagtaaaaatgaacaaactcccagggagaattctactaagtttactgcattttctatcctgatagaagatatagaaagtgttacatggctacccagtcggtagctccttacaagaagcccacacccattaaaaaagatgtaagcaaaagagacacgactaagttttttttcgttttcatggggattacggccatgacaccaatgaatgcaacaatctgaagtgggaaattgaatttttgataagaaaaaacaattcgcatgtacaagagtatgtcaaggccgattaaaatcagaggggcgataacaaccaagagttactaccaccacgagtagatggacatctgcaagctattattggaggtccgcacatagctgaagatttaggcaaagcccagcaaaaggtatccccgaacagtacagcatgagcaacaagaagtagttctggcagtcgaagaaaggaaactgaaaaatattacgggcaggggagcccactataaaatttaatgatgaagatgctatcaatatcagtttcctgcataatgacccgttggttgtggaagtccagatagctgacaagatggtggcccgaaccatgatagacaatggagcctcttccaacatcttattcaagacaccgtatgaaaagatggcgctccaacttaaagatttaactccttttctccagcccgtgtatggcgtctctggccaaggtgtcacacctatagggaaaattcgcctacccctcactgttgggcaagctccaaagagcatagctataatggcacaatttctagtattggacgttccatc

SEQ ID NO: 41419 - DNA, 1933 bp, Cannabis sativa
  modified_base (1901)..(1907): a, c, t, g, unknown or other
caatactgtcaccaacgaccatattgatttcactctccaagccataatggtctggttttgtggaaaccctcccactacaacgacaagttgtgaccttctgaacaggaacattagttgtagatttcttggttgtatcaacttacattggttcagccgagggagtgggattatcctctacttgtgtagaagaggatggaacattggttggagttatttttgaaatcattccctctaacactactttactttgcagcttgaagttcttaatatagtcttcttcaaggaatgtggcatttgtataagcaaacactttattatccttgtgactataaaatagtccacccctagtctccttagactttctgacaaacatgcaactttcagttcacacttcaagttttccttctttctttcttaagacatgagcaaggcacccctagattctataatagtataaactaggtatacgaccattgcatagttctactggtgtcttaggaactgctttagaggtaacaacatttaaaatgtcattagccttttgaataacatatccctagaaggacgttgttaaatagcttagcatagacctaactatttctaaaagtgtggattttcttctctctccaactccattttgttgtggagtgccaggggtagtatattgcgattcaattctaagttcaattaaatgatctttgaacttcatatccatatactctccacccctatcacttcacaagatctttaatgttttacttaattggttttgagccaaagcatgaaattgctgaaacttctcaaacgttttagatttcttttgcattaggtaaagaaaactatatctagtgtaatcgtcaatgaaagtgacaaagtactcataacctcctttgactcttagatttagaggtccacagacatctaaatttactaaccctaaagtttctttggcatgctatccctttacagagaaagaatgcttagtcatttttccttctaggcaagattcacaaactagtaattcacctaaggtgacatttttcaatggaccacctttggttaacttgtgaagtctatcatagcctatatgacctattcgtaaatgccatagatacgtttcatcattattatcaatctcttttcttttatggtttctaggtttagctatgttgagaagttcgttattaagcgcaattggtatatttgttcttaaatcataaaacccttgtttcatgtgagcaacacataaatgaatggcattaagagaaatagtacaaatagaactcaaaaaattgaattgataaaattgtgtttgtaaacatgaaacactaatcaagtttatactaaaattcagaataaacaaaacattgtctaaaagcaaaaatttattctgaaacttggaccgatactaattccccattcccaactttgagcttcaactcccctagatttaggtaatcccaagttcaagtagctacaacaaagaacaaacatggttagtagatctagaatcaacaatccaaatggatttgtcattctctaaaacacatgattcaaaaacaaaatcattaccttcgttccaatagtttagaagtctgagacatctttctttcgaatgtcccttctctccacgatgagaacatagaagaatatgtctactcatttgttctttaattgtttcaattgccggttcaatttagattctagctctcaaaattgaaccggaagaagcaacattgtcaaaggcatcatcctctatttctttagctttcctttttcccttatctacaattctggaggtgttgggtcttgtgccctaaataaaatccattttcatataatcaaatttattaattataaaatatcagaaatcactttaatgtttcatggttcacatgatnnnnnnnatgattatatttaatgtataaattct

SEQ ID NO: 41420 - DNA, 1159 bp, Cannabis sativa
gtatattttgtggcttactgtcattgatagattgaggctaaaagaaagactatttatattaaggatggtccaggatgaaaattgtgtcatgtcttgtgtggctcacacagagagagtaaagactatgtgttttttattttccatgtgagtgatggatgtttaaaagcaatcaaacagtggttggaatggggagtaaaaaatacaacagttgttgaatatattttttgattgtgataataatgatgagttagtagtgtgtaacaaagagatatttgatcataattggtttttaagttattgtttgtcatttatttttatttatttgttgtgaaatcggttctattttaatttatgtattagtgtttttagaactggttcctcttttttttttattataactaatttctgagttattgtgtgttatttgttttagtcatattgttatagaacttaatctattttaatctatgtattaatatttgtgaaactaatttcctctttttttcaattataactgatttttgagctattgtgtgttatttgtttttagtcattttgttgtagaacggattctattttaattaatgtctcatttggttttttatttagtcatttcagaaaacggttcttgaattatttattttagaaatcagtttttgattaattaattaaaggaactggttttgtaatgaccgcatgatttagatagggattagtgagattataaatactaattttattattaatcctatcattattgatgaatatatgcgaatatttatatttattgcaaaatatcatattcttgtgattttagcttggtggcgatggaaaatgcaacggaggatattttagtcacatgggtaaacatagagcttttttgttatggaaaaatgttttgtaggctcaatagtgagtgttggcggggttgtggtattggaccattttacccctaaaccgtttattgagttaggtttagaggtaagggtagtttggtaatttttcttctttggataggtgtcttcaccattgtttgacaattgtcttctttggtttgtataggttatttattatctttttattagataattctgttaaaagcaaaaattatggaaattaggaaaaacgtagaattttcctattcttcttcttgccattt

SEQ ID NO: 41421 - DNA, 1612 bp, Cannabis sativa
  modified_base (704)..(707): a, c, t, g, unknown or other
ccttaatgtatgtgtagttaattataaaatttaattaaataagattcaatatataacaactaaatttatagtttaccatttttttttcaaatttaaaagttagtaaataataaattatattctcacaaatttcttttataatacctttcaatttttataaataaaatcaattttaagtataatagtaatccataaaattagttggtacattaattttattcaaatataaattttagttacttcttcgttaataatttataaaaaaaaaaaaatgttacttttatcttgtttatcttttcatatatcagaatgtatatattttttacaacttaaaatataatttaaaattgctaaaaacgaaaggtaacctcaatgtatcttaaataattaaataacataatatagcctaaatgttaaaaaaaataaaatcatagttttaaagtaactgatcaatataagcaactaaatgtggattagaaaaaaattattaaaataattttttttaataaaaagtaactaattgatatattatttacatcaaaagcaactaaaatgttacttttttaaaaacttacaaaacacagaaattcctgaaagcgagatttttcaagttttttccactttcggtaattattttggatttcggtgtttgtgctgaggtggcacaccagtatttgtgcaaataattttcttaaaggtatttnnnnaaataaaatcaattttaggtataatattgaaaagaccccttttttttatgtacatgtattttttttttcaaatatgctaaaataagaagaagaaaagaatgaaaaaaatttaaataataaaaatattattttttataactaccgaaataaattatatttttaacttatgttgcaagagaacccataaaattttcccaacattgatgaaaattttaaataattaataaatttatatacaactaaaaaattattaaaattatgatgctaaacatattcataaatgaataaaaaataaggggggatttacaaaaatactcaattttttgtcatttttattgtcactcttttttttttttttttttttttacatttttactgtattaagttttcaaaaatactgtgttaaagtttcaaaattataaaaatactgtgattcagcaaaataagaaaataacttaaaagcaactaaaaaagaactccaaaacaacttaacaaacaacataaaaacaactataaaataataaaaaaaaataactacaaagcaacaaaacaataacattattgcaatatgcgcaaaacaatattaactcctcaatctgtttttgtattacaatttttttttacttagttttgacaatttgatttatctttttgtactcagggccggcaagagggtggggcggccaggacataggcccaaggctccacaatttttgaggccctaaaaaattaaaattaaaattaaaatatataatatataactgtttaatttactaaaatgcttaaaagtcatacaacacaaatcgtaatgtggaatttacacttactatgggattttaaaggttcttatgataaatatgacacatttaagtttaaccaatttatatggtatttttttgttttta

SEQ ID NO: 41422 - DNA, 1408 bp, Cannabis sativa
caaggagccgtctgaaaagcaaaaggagcggatagacagctttccaagcagacttctcggccgacatcaagtaatatatcgcatatatagactaatgcatttaaatttattgttattttaacttatcttttcttgtccttgcagagatgacattcctgaagtccgcaccggttctcaaccgcaagccaaagactagaacagcgacgacgtctcctatcgttccctagaagagaaaaagcaatgtcttggttatccctgccgcagattcttccaagaagctagctaagcctacgcaggacaaggagaagaaagtcgtgatcgatccagctgttcgagctcgcgatttcctagttcttcaggaaaagttcatgggcgaggagttcatatccaaggttgagaggactccctctaaggaactcatgcctcgttctgcggagttggcttcgcagttcatgaccatgttctggaaggcctttgttgctagctccaaggaagtcgaactgtcaaagaagcagaatgcccagctttaggagagtgtgaagaagctgaaacaggaagcggctaacaaggacaaagagcatgaggaattgcgtaagcaagtcgaactcaaagccaagaattcgaagacgaagatcgaggagatgtctcgcgacctggaggtcgagaagaagaatggaatgaagcaatacgaccaggcagtctctgactacatctacacaactctttccaagattccagacttcgacttctcaatccttggggcggaggcggctgagatggccgaggcttttcgagccatgtcacccacgcagacccaaggaggtgggggaaatctgtttcctgaggacgctaatgctgcggataccaaagaagtcgtggacgaggctgctagtaaagtcgcagatgaatccactactcctactgcccctactgctcccaatgcttagcttttttactttaatattacttttgctaaacttttttaagcggtacaagggtactcgtaatttttacttagacaaatttatgtttattttccttttgaacaacatatatcccttcggggatatttacttatgttattatataatatcttcgccgtacacgggtactcgcgtttttttgtttatttatcatctcgattgtggtttaattacagcttggtgtaataaatactaaggtagaaaaattttaaaatctcgaaaaaattcataactctttgatagatttagtaatagtacaaagtgagtgggttatataccccctatacttagaatatttatctaggtaaattgactaagtataaatacatagcgactacaaacgatacaatgccagtactattgataataaaattttaaactttcgccattccaggctcttcgaattacagttccatcgagttctg

SEQ ID NO: 41423 - DNA, 1067 bp, Cannabis sativa
ctaactttccacgagacttctttcgaagattttttttcatctggaggaaatataccacaaaaaaaaaataataatattttgtaaaaacagtctttattaaaaaatttattaacaaataattttatcgcagaaacaaccataaattatactgtgcgaccacaaatgatcactataaacgtaaaacgaccatagatttacattgtgggactttcatggtcacacaaagtaaatcaagtgaggttattttgtatatttttgtatttcacatggttaatttggtaaatttcaaaggaaatgaaaatctttgatacaattagggtgcctttggtaacacatttttaatcacttttttttttaagtagaaaagtgaaaatattttctaaaaatatgttctataaaattgtttccattttttcaattttttaattgagaatcaaaattttaaaaattttggaaacaaaaaaaaaaatcactttcaaaattttttaaatatttttttaatcaatattttagactccaaccctaactttgaccttgacaatcaaactcgtacccaaacctcggagcccaaccccgaccccagccctggtccggacccaaacctggacccagaaccccatacctggaccccgaacccagatctgaaccccaaacctgaaccccaatcccagcccagaccccaaaactgaaccttgacctcagcccggactcgaaccttgagccaaacccaaaccctaagccaaacccaaacccgaacctagaccccaacctcgaccctggaccccggacccagaacccagaccccgaaccccagccccagacctagaactcggaccttgggccttgatcgagactcggaccccggccccagccctggacctggacccagcccccacctttgcccctgccccagaccctggcccttgccccagactgcagaccccggacacagacttggatcctgaccctagacctcggacccagaccccaggcccaaacccagaccccaggcccagaccttaccccagacccggacctggccttagaaccgacttaaataacatcaa

SEQ ID NO: 41424 - DNA, 4000 bp, Cannabis sativa
atagacatataaaaagagaagaaagacattcagatagtaggaatcccaagctctcgatagggatcaattttgtttgaaggagctgcaggatcgtcggtttggactgcaggaacttcggtgttctggtcagtgggagttgtagaggtggttgcctcgtggttttctatggtcgtctcaagggcagctgtctctaggacgtccacctcctcttcgctcctccaccctagacatcttatctccgacctccttcacaagttcctcctccctggtctttttgttcttaacatcctcctccagtttgttaagaagagtacggagactctcccactcatccttgagatgattgacctcttggggatagagaaacattgtcagcctccagttcctcggtcaaaggcatatcttgcaactctttagtcagctaatcaacttcgatgttggcagcaagaagcttcttgtttaccttcccaagttctttcctcatggccttgagctggttccacatatccttagtttccttcttggccaagtccacatacctctgtatcatgctggtggtggcaaggttcttcacagcagctgatttggctcgagagtaagcataagccattttcacacaagcctgcatggaaaatgtgttaaaatttgagctatccaaaagagaatgaaattaaaaagaaggaattttacccgagtaacttccaaggataactcgttgtccgctccggacagctggtcgatcacttcaggaagggaccgggtaaggtagtgttaaagcatgtctttgtctctcctagcctccgtgcacagcgctaggattgtcaaaggggccctaacttgttcggatccgaccgtaattttttcagatccatccctaacttgtttagatccgcctaagctccctcctctggaactcttggactttgagaacttctgagctaggaggtccatcgcaggtcgctcctcgaaaaggccaatgaccttgtcaactggcgccttctccttggacggagtctcaccacccttaaacctcttagccagaggatacaagctcgagctgtctcctactcttttcctcaatgcctgaatcatcttctaagacatttatgcacagataaaacaacgcaattagaggaaaagataaaatatgtgaaagcataaaaatcaaagaaataaatgcaagttgaagtactctacacgctagcaggggcattctcccaaacaatcactggtggagaatcatcatctgaggaatcttctagctccaccaggacggcttttccttttccttctccaagggttggtggccgagcaggcataccaggttccctaatcctaatagcatgtattattggcgcttgcttggtaaggggagctatcttcttcttgcttggcctctcctgctctaaatattcttgagcatcctactcctgctctaaatattcttgagcatactgtttggctccaacacctcccttcaacttagcctcatgcttatgttgaatgagctctttctcctgctcagcatcctcacctcggctcagctttgacttcttcttcttcatcttcacaggctttggcacaaaatcctccggatagagtttgtaattcacaaagttggcctcagtggtcaacaaagtgatattccgagcatccttcggtagttggagaattttttatgccctctccctaactttcaacgtgaaaggagggcggtagtacgaaggaatctgttggaaccaagtgtggaaggtctccatgcccgtcacaaagtattactcgtccacaaagtgccctattttgttgactgcagggtctacgataccctttagtcacttatcatcaaactgagagaagtgaaaataccccgacctactctgcttggggtccacttcaagttgaagagtcagttggataagtacttgagtggcataaagaatgaacaaggcggataagtacttgatgcccttgggtgtgaactgagtcgggcaaaggtggtaatagtctgcaatccttttgaagtacggatgcagaggcaacatcgcaccttgcttggtgtgagcacccgactaggcacagtatccctccctcggatttgttgccttgttctttggagaatggaaaaagtattcgacaccgcccaagtatccatccttcttcaaactcctcaactcggcccgagttacaatagatgggggacacacccaccgagccctaaaggcaccttgcctcctttgaagaaccacctcggtgtactcctcggtgacatagtcatcaccttctaccaggacgtcaccagtctgagacactggttccctgacctcattgtagtctctgaagcgcaaaggccaagcagctccttctcctcagccttagaggaactatcaggacggacctgaccctaatcctctgtttcctgaacttcaacgtccccttcgtaatcctcttcctcagcagcaggtcagacctgttcagcgctcgacatcatggcgtgtcaggccacgtgagggtcagctggaaaaatcttctacatagtttgtttcgtgtgggccatcatcctacccctagacggtggttgattgatatgtcgtgcaacagtcacggcaggagcagtaatgggaatgccaaaggaaccaaaacttggacgacctacagaaatggtatcagctacgtctggctagacgatatatgtccagttggacggaaggtaacatctccaccccttcctgagttccgaaatgaacttcccgtagccttcacttgcgatatgctcggaataaaaatggtgatgtaccttggtttcttgggaaggtgtaccctcactacttacctcccaatctttggaactcgagttagaaagtctgtcactcgagaaggacggactagcgcaaagacgaggttgatcctcgtacaaaagttggcaaagatcatggtcgatatggtgttctcctccccaaaactcaccagggctcatctacataaggtaagacacaagatgagtatttggccgggataccgaacaaaaacatgaaaaatatgcccaccaggtttaatcaaaagattaaaaagacaaaaatttcgcgtgatttaggttcataaccgagaatttcaaaacctcaaattaagtgttaatcttcactaaacctcgaatgggcaaagtgagagccgaatatcgtgaagttaaagtcagaatgccacaaaaatcaagttatatgatctactacattagaagtttcatagttctaaacttagattttctatagtttcctaaaacaagtcaagactattaaagtttctacaatggaaacccagcaaattgaagattcaagcatcaaaggagaaaaagatgagaaacttactcactgttcgaagcttggagtttgctcggatgacgttggtccactctttttgttaattctacgaaggattctagagagaaaggtgttttttgctctgaattcactaaacaagaaaaattctataagtggtttattaggattttttgccctattcataagcagattagtgaaaaggtgcaatcatttcgaatttcaaacgccttgatttccctccaaaagtaaaaattgggaaatccaaagcaattaagtacctagagaagggtaaccgtcaaaagtatgtgaatagttggtgcgtctcgaggtgcgatttaattagacaaaacttgaagggactctttgtcagaatcacgttagattaccaacaggcacatcagacatgtgccacccgttcagatacagacttgagatgagtgaagtctacacgcgacttcggaagtcccgtgcaaacttgggggcaaatgtgatcccattttttgcactatgacatggcaacacatactaatgacacgtggctcctatttcctacatctagttgaaggggaattccgaacagagctcaacatacatctgtaggaatagagtctgcctgaccgagcagggcaagggtagacgatctgtacaatgtatcaagacttagcagt

SEQ ID NO: 41425 - DNA, 1263 bp, Cannabis sativa
aactagcaactaaacatgtgcctattgcaacatgctgcctgatgtgtactgctgcaccagaaacaacacttcatgtgcttgttcgttgcccttttgctgctgtgtgttggaggcagacgaaggtgcctgctgttgcacctgctgcaatgctattcacgagctggtttgaggcaggattgatctcttggagggaagaagagagtgttgaagcagccatggttctttggtctatttggaatactagaaatgatgtggtatggaatgctaaaattcctatgatggaggaggtaactcagcttgctaaaattacctatgtggactggtttaatgcacaaaaagctgctgcagacactcccaaagattaccatgagcctcggtctgataaatggaaggccccggagtttcctatcatcaaagtaaatgtggatggagcagttttttctatggagaatcggtatggagttggtctagtggcttgggctgcttctggtgtggttctacaggccaaaacagtgtgcaagttgggcgcacttcagccacatgaagttgaagcaatgggaatgaaggaggctttgagttggattaaagctaatgattggcaagatgtgattgttgagtcagactgtctacaagttatttcagatttaaattgtaataaaaatatggcttctccttatggccatattatttctgattgtaaggtgttgtttgccgaaattgataatgtttcgttatgttttgttaagcgatctactaatagggtggcgcattgtctggcgcgatcctctcttggcgaggctgatcgtattttcagtagctactctttacctactgttattgcttccctagttcgggatgatttaagttaataaagtttcgattgtattcaaaaaaaaaaatagtaatttaattatatacttactaattttatttcatgattatgtaattagtctatacaatgcttatggattttttacttttgaaaaaaaaaattacatgatgtactaactttttcccatttattacaaaaatactgtgacacacttacatttacatttttactgtttatatttatttggcagtatactgccattagttataggtttttatatattagcttatccccatttcttacacatttcccttttttttagttcggtagtgtactgccttttcttttaattcagctttttttttttgttttttttttactgattgtgtaaaagtgactaactcttcatttttttttattttaatagattt

SEQ ID NO: 41426 - DNA, 1171 bp, Cannabis sativa
aactagcaaattcaccatccttgattcactgtcaattgtcttccttatctccggaggcttcgctaggttctaattaactgctgatcatcttctccgacaccagctacatgcaattgcatcaagatcgacaacaaatcaaaagcattcaatacatgaaacgaagaaaactcataacaacatcaaaacaaagcactcaagtcacgaacaaattctacgctaaatctcgaaactcatcaagacaggtatattcagcctactataaaaattatatataatcataatgatataataaaataagatctcttagaatatatatatcatctaaaaattgaattagaatagaaaaaattcaatttcaatatatatatatatatatacgaatatcgaaaaatattctgaatgtatcaataaatcaaaaccgattaaattaataactgaaagggaaaaaaactaagaacattgttataaacaaacttaaattaatgatgcattacaaatgtaagaataaaaaagtaaaaaatcaaccataaataacaaaattagaaccagaacaagttctactttcaaataaactaactacaaaaccaattttaaatgtaacaactgaaacaaataacaaacaaattagaacatgttatatcaacaaatcgaaaatataataataattgaaaataaattcaaacaatgaaatgaaacaaatataaatacatattaaagaaatcggttcagtgatcaattcatacagaagtactaatcttaattttcttttttaaaatgtaggaatagaataaatcatgtgtgtgatcaagtatgagagccaatatacagacaatacaagttatgatgactacaatatgactaggatactaattccaactaattcttcactagagaacctaggttgagatgataaaaaccgagataaagtgcaacagaaacaacattaatatatcctaccagatttcactaggaaaaatactaatgaagctactaagtggcaactccctcataatctatattgagctcagaaagacacaaacactagtaactgatcctccactatgcagcacaacaatataagatacagctacacaaacagtagagaatccttcattcgaacaacaaatgtaaaaacaaaacaacactgttgaagaaccagttccacaaatac

SEQ ID NO: 41427 - DNA, 1809 bp, Cannabis sativa
acttttatgagcttgtgtctgtccacaagaagggggataagtttaagggcggtcttttcacactccgggcccatcctactaatgagggccgggtcccttataattttcaaaagaattttaaggagtaccgccaccgtttcttcttctctttcggctttcaggccgtgaatcgcccagaacttctcacggagtgggtcaggatccctccactgcatcgcactgatcttacccagcttttcctccagcacgctaaggtcttctcaacttacgacaaaaatggccttaacgtgggacacttggtcacaacggagaactgctagaaggccaagcttatctcgggaagccaatcagtggacgacttcaacctctattaggtcctctgcccaattattcgtaccccggacgctaaaaaaggtactctgggcagacattattgcctcagcggaggttcgacatcagaattacctcttcatgagggaacaggagttagcctatattaaggctcaagctgctgctgggaggaccctctggatagaagcgggtaaagaactggcgccttctcggcctaagttgctgttgtcggtccccaatactggggctcctgatgtcaggaaatccggattcggtaagtctcccttaacggttcatcatgttccctccgcttaagattattctcagtgtaggcctatagggtttgacaaacgtctccttagatttaggatgccccctacccggtggggtgaccatgccaagggtttttatttttccaacttaggtcatttttaggccggtcccggatggggtttgggcctcccgcatctattcctttggatcatttagcttatctgtcttctagctggtttctcccctcgaacaactttcttggggatgacgaagccagtattatagtataagactttgctagggctgaattagattgtctgggtaggactagttttactgctttatttttggtgtgcatattttctcgtggccattctgacacttatttgttcgtttttcgaagcagccaggccaaaggaggaacttttggcgacccttgcccagacctatagtcctgactctgctcatcctccagcgccggaccagatggtgaccccagggaggtcttcttctagcatccccttaggccaaattgtcttgatcgacgaagacggggaggtcgaggaggaagagggcgagatcctcgcccctttggactggaagcggaaaggcaaaatggtggaggctgagtcttccaaaaagcctaggagggttgatactctagccgtcagctctgacttggggatcccacctgaagcggatgaaacctgtgcctcccgacattgtccatactcccgttcccgctgatgaggagagacaacagctccggatcgtcaagcacaattacactatggctgagtatacgagagggaacgccgaggtggaggctccgtaaaaggtcttaagggaggcccaggagaactccttgcgtgatgagacttttaggaatgcttgggacatgaacatggaccctttgacggactggttcaaccgctttatctggcctaccctcgctccatttgcctccgagttgacgagccacttttctccaacctgacccaactcttggccaagagatacacaacctgcgcttacacgaactcgatctatcagatccaggatatcagtgctgctatgaccactataactctctgttagtgttcttgggccttactttatggcacctgatccctcgtacttactccctttttctttgtatttccagattgacgtagagatcggttg

SEQ ID NO: 41428 - DNA, 2159 bp, Cannabis sativa
aattttgtaagagaaaaccagcatccggttatattacgttaacgatagtgctcttggaaggtaccccaggtaagttatctcttttagtctttagcgtcacttaaatttaggggttgaacttaaagatttttttagttttaattttagttatttttgtgtttttatgtttattgcctgttatgagtcaattttctaagtatgagtcaatatgaaagtaagtagatagcatggtttaaaaatttcatttattttcaaaaaaatttgtgtgcttagttagatcacagtcttgactaatttcaattgtgtgctttaaaagaacatagaatcataataggtaaatttctagtgaatgaattggttaatgtatgctaattttgatatgtggaaaattctagaacttgcttgctatttgaggcaaaataataaatgatgcatgactaagaaagcgatttaggcattctttggattgattgtgcctttcaaaccatccataaaattttaatattagttaccttttttgagctttaactggccgaatttctttgtttctacacattttgagcttaaataagataaactcattattatccaaaattgaccctaattataccataagtagatctttagtttgggagaatttggatgggaagtttgttatatgtgtgtgagaagaagagtgaaaattgagagaatgtgaaaaaaattaattggcaacaacttaaaaaagaaaaaaaaattgataagaaatgttaaattcgaaaataaaaataaataaaaataaagttgttgcaatattgtagaaaaaaattctctcaaagtattagaaagaaaaaggagatatcaggattgtttgtaagaaattattgggtgacatgattggagaagtttatggtataggcgagtttaaatgaccattctatctacatgtacctaagcctaacattacaaacctaaaaataccttttgatttttagttgtgcattgatttatattagtagagaatagtaagtattgtaagcttatgggatatattgggttttagtattgatggatgtaatttgcattcgtaaatagtttcaactgttagttaagtgctaattatggtttcgtgaacaaaatgaaagattgaagtgagttaagggtgtgattaatttaaaattttggattaatatacataggtgaaatttttcgtacataaccatgttatttggcttacttgaaaattactcatgtttcggttgactgacttgtttcatttaagttgtgttatttttagttattagtgttttactcgagggtgagttaaggttaagttgttagtccccagcaacagcgccaaaaaacctgctgtggtattttcaacacacaagtatatgtatcgttaacaagttatagacagacaaaaagtaaggtcgattccacaaggattgtagctaaatgctttaaaattaagcttttaattctatttggttgttcaaaattaagaaaagattaacactagaaagaaaaaacaataaaataagtacgcaagatgcaagtgaattgatatgaaaattaacgataattgaaagttagggttattaattttaattgtatctatctattatggtctaatatgattcaattcacattactaattgctatgcaataacaggtttactcaagtaattatagtcttctgagatatattaatctcaattacatgcaaattttttacttttgtgataaattaaacatgtaaaaggcattaaacagaaaaaccctataagttatccaaaccacataatactctcgtcctatatcgaaatttattcttattttactatagcataattgacactcacttttcagatctcgtatcaaaatcattaatatttatttgatggtcagataattaaaagtgattaagtacgaatgaaatagaatacatacaaaattggagaaaaattaaatcacattaaaactataaatagatgtcaaataatatccatcaataccctaatattcttgttcatcgtaacaacttgacaaatatcaattaagaacaaaagaataaatagagaagaagagaatattaaaaactccatcgaaaaagccttctcggtcgtttcaactctctaattttcgtactctctgaatgcttgttgaaaaatatgaaa

SEQ ID NO: 41429 - DNA, 2234 bp, Cannabis sativa
gttatttagtaatttcttacaattgctaatcaacatacatgttaaactatttgcttttttaagagtttgttggtccatccttaagataacttattagaacaataagatcaatagtttctagtgattaagagttcaattacaatattaatttgagacacaaactaaactgtggagtgcaaaaaattgaaattgtggtacaatatactatgaatgaataaatgaattttttaaagagcaacgaagtctatctttagtaaagtttcctaatggggtggaggacattaatcataagtttttcgccaataaatactcatttgccacatggaaaaatataaagatataaaacaagactcattgctaagaggttcattaaaaagaaagaaccaattaccaagagattaacattctcatttgtctttatataagttgacttttgttggtcattctaattcattcatcaattctgaaactgtaaactagaggagaaagtatacaaacaactataagattttcctctgatggtggtgaatatgtgcaagcttaaagagtctacctatagattaaaataaattttttacaaatgatatatcatcttatcatcttttccgttagttttggaaagaattatggattaattaaatataccagaaggtcagtgggagctatatttattttatatgtggacaatatgttactaagtgatgataaaagtttcttatataaggtaaaaaaattcatatctcaaataattatttttgagataaagaatataaattgtatatataattttaattaattaaagagtagccacaacatctctgattaataaaattatgtatacttcatcttgtgttacttttatctttaaaattaagggtgataaatttaactcaaaccaacgtctgtaaaatgacctggaatgagaataaattaataacatttatttgcttatatttttgaagcctagtgtatgcctaagagcttgcataagatttaacattgtatttatttcaagtatgtaaagtagtatcagaataacttagttttagagcgctttacatttttatacaaaatgatgaagtatctttaagatgataaaaattacatttatacatactttattaatataaattaacattttagaaatattgttagcaacttacattttaaccttgttggctacattcattcatgtaaatcaacatccgtatagatgcaatgattttaaattttaatcgcattaatatagctacatgtaatgtaagagagataactgcaataggtataacagagtagtacttgcaataggcaacgaactgtgggttcttttagaaatattataaacactttttctatttttatttaacaaaaaataataatagaaaatatatttgtttggtaattacaatagatgaagtagtcacaataataaattcttttaaaaatattataaacacaatttttattttattatttttttaataataggaagatagtttaaatttaaattgcaatgttaaaaaaaaataatacttttgttatatggatacattcaatagagatttataatagagaggatttatgagtgtggtgttgtgattcgaaatcatctcggtgagtgtctaacatttttgcctcttcctttattgcttatctttcaccacgagttgtagaagcctttgttgtgcttcatggtttaatgctttgttcttagcttattagaatttgagataagatgaatgaggttccatctcaaaaccaattggatatgggaggagtagctcattcatctgatacatcacaatttatttccacacattaacaatgtgggaataactctaatacaccctcctcacgtttgagcctaaaaagtgtgggtataacgaatgacctttaagagaccacatgaccgaatatgacatttgaaagaatcccacaaggccaaatattgggaaatttatgggtgtacacgttaggaaatttgtgaatttttaaacaggtcaaagacccaacactggaaactgacacattggccgaaaggtcccaaatggaggttaaaggggagacatcggaagtatctgtttggaccggcagtactttggctcacaatggatcacaaacgactttttggactggtagcactttggactcacaacggatcacaagtggctctgataccatgttataatttggagataagatgaatggggttccatctcaaaaccaattagcta

SEQ ID NO: 41430 - DNA, 1177 bp, Cannabis sativa
gcattatgataatcatttgtgtttcattggtttgcttttgttggaaagtactgttgagttgaaatatttttttgctttatgccatcttagctttgctttggcatttttataatttatttaaatgcactatattagttttgccagttgttccagtttatatactccgctttgatttctcgttctcaattttgcaccaactgaagctttcgtaagattcataatcatgtttgttgaattgctgaaaaattagttgaaacctagttctaagtgcttataaatatatatgctttagtttgtagaaagaacctaatttgtctgattatccatgggcttgtcttaagctatttagctaactttatcattcccctttattcaaattgctatattctttgtcttcagctatgaaaggattgcaccattgatttaagttaggttttcattgatttatgttgagatttaggccaggctgagatgagttgctcatccctccaaatcattcatagaacacatcacagtgttctttgaaacctttgagaataacaattcacaatttgacatctatactctttgtttttgcagttttcaatactctgctctgaattctcgtctaagctaagtattcctaccaatgtgtttattgcaacgttgcataaggaaaaaacatacaagacatttgttttgttttttgtttttcttgcaaagaacatacaagacatttgttgaaaactgctttataacgtgttaactgcattaaaatatatttacagtgatttaggtttccaaagaaaacttattttattttcattatatacattggctttgctttccttactttaagattttttttttgtttagaaaagattgcataggatcataagggtggcaaatatattaatatgtatacacacatttatcaaactaataaacatcatattctagttctaaatctgacagttttgggccagagaggccttttaacatgtccctaatttaatccaacggtacttgtacaaatagatatgatgcggtggacacttgttcgaatgacctttcttggccaagctgatgcccttggccggccagcccttcgctaaacaattgtccttggttggttagcccttagctaggtagctggttttggacgaccagccctagttggatatggccggccagtcct

SEQ ID NO: 41431 - DNA, 981 bp, Cannabis sativa
acagctccatctccgacagtaacggactttatgaacctcgaagcactcattttccaattttcaaatttctaaaacaaaaaaataaaaataaaaataaaccaaagccttagatcaggtagcctctaattcccccaccaatcaaattctcttcacaaacacacaaatgagccaaagccaaacgtagaaaaaaattagtataacttaaatcttctcatcgtattaatagaaaattgatgttgaaaacagtaaatcctatctatcttctccaatcaaaaataataatctaaagtaataaaaataaatcaaagataaaaaaactaaagacaataaaaacgaaaagcaaatgctagcctttaattaaacaattgcaatttttattagaagaaaacacaacaagacacatagattatttaacaatctgagtaattatttttaaataaattatgtactttttaaacacataaaaaaatcctaaagatcaaattaagtaagagacatatatgtatatatacagaaaacataagacaattgaaaaagttataagaataagagaaattacaactgtgataggtctgcttttattgggtcaatgtaaacatttattaaatacgttgtaaatcgtatcgttctgggacgtctctctaggaacatagcaacaataaccctggtagcaagctggagcttttcccatgtctttttgagattgataatgtaagcctcgtcatttctgcacttgaagacataatgctctatctgaaaattgcagttcttgctgacaaggttaacttcagcagtcaacatcatttgtatgtcagcttttatctgagagagctgactcgatggagctgtgaacctcattgaaagatgtctggagctgattagtgaatgtaccatgagcgcgccttcctgtagcgagatgaatgcctcgctattagttgtttggatttactcgactgttatacttagtttgtaaaatgtgta

SEQ ID NO: 41432 - DNA, 1675 bp, Cannabis sativa
ctcgtattggtcttcttgatactcgaatgaggaaatatcaacatgcaagtatagctactattgaaactacctcaaatggaggaacagtggtcgtcactctgttttccaatttcaacatgtctcttagagacaatcgactgactgatgcttttaaagtagaaatacagacattaggagtggatcaagactcaacttctcttagcaccacactccattatcagatggcatatcgacttcaagatcatgctcttgatcttaacatccctcaaacacaagacactttactcatcattgttaattctaaacaagtaccgacctgtacacatgtcccaaagtaaatgatcactgaagaactcacaaagcttttacccaaattgtggttcaccaactatgaaaagtttcataagccacatcttggggttcaaaccacaactgagccttcctaccacacaaaagaagatggatctgttgaaattgtttttgatagaagccaaacaaaaccacctagttgttttcacacccaatttgtcatcacacccatccaaccaacaaatgcagaaatcttgtactttgattctcagggaaagccaatttatgcttttgaattctcagacgcgcataaatattaaaatgtttgtaactgcaaaagttgtctaaaaaatgatgtgccctcatgacgtcccactctaggaaagcaactcaagcgaaagctagaaaagggtaacaaaaacatcggtctattaggccaaccatccaaaaaattcaactatatagtcaaatactatgcaccaaagagctacaatcagcctataccagaacctactagatgtgattcagatgattcttcaaaagcttcacagcacagattgtcttgccttgttacaaaagacaagcgaaatggatgaagaagcatggagaaaaatttccagcaccagcttttcaaccatcagttcaattacttcctgacgcaaacatgatcacccccaatccttccattgattatgatgtacatttccctcctctgaagaggttcgaaaaaattaaagagcacggtgccacttcccaccatccaaaaaatacaaaatctcacaactaggaatgttaagggaactctacaaaaagtcttcgcagtcgaagaagaattgaattggcaaatagaaaatatgattgcccaaaatcatgtcttaaaatgggtaaaaaaaaaacaaatcacccacacagagacatggtcaaacaacaatcacaagttacgatcattgaaaagttgacaaacaagattaaccagacgcatgacgaactcatggccatcataaaatcaaattctgttccgatgtcattattcttggcaaaagaagttgaaatgaaagcccttaaaacccctgtatgaatctctaataaaaacaatttttttttaaagagaatcatattctacatggtaggttggtgttgcagatgcgattgaggaagaaggagaagcgaacagggagaaagcagaatctgacttaggcgatgggcatgggcgtaacgaggatcagacctgggctgataaagtggagtccgacgaccttcaaactcaatcttagagtcaatggaggagattatccgccagtaatttccaggaccaggaaggccgactgagatttgaagaaccgttgattaaggaaggcattaaaat

SEQ ID NO: 41433 - DNA, 1259 bp, Cannabis sativa
tataaaatagagaaaattttgaaagaaaataaagttgaaacttcaatcctaaattcagatacgttttaatcatattttggaaaacgtcaaagcataaaagttttagatctcttttttagctttccaatgcatcttgaatcaactcatttaaagtttttatgagaaagttatgtctattttactgagagaggtagaagtagaaaaaatggatccagtggccgcggcgagacttttggtggccacggtgagggactacagaaagctcgttttttcacttttctacagtcgatgcggtgctgacttcgtacaggtcaaggataacttcgtcttttctcgttttttgggctgaaaaactctgttttaatgagagggaatcgcgaattttagaggttagacagaatagaacccaaaaaataaaagaagaacgctcttggagcgagcatggaagatccgcgacaatcctccatctagtttctttctcttctcttgatttcttatatttttatttgtgtgtagtttaattatagatttgattatgagctaaattctctatttagggatttgatagattttgactaagattattttatggattaatgctatttgattgttctttctttctctattatggtaatttattcatatttgtgcttactacatgtgtttgattggccaccttatgcatgatttatgatctcaatataaaatctaaaaagtgagtactgagaatgctctaaatgaatagacataggttttgatgtgaaacgagagtattcacatagcttatgtggctttttagattattgcttaatgtgaattgtatgttgttctatttcaaagatgcagtagttggcatgcaatttaggacttttatgatttgaaaaaagtttaggttaatttataatctgacatcacataagaggaagaagaatggttaattagtgttaacaattgggtaatcaaagcaattgaaatcatctccctaattttacatctattgttaaatattttatttgtttattttatttaattttgcttagtttatttagttccaaatttatttattcgatcgccaaatagaaataagaatttaattgattggtacttgactacagtcctcgtgagatggttaggttctggtttaagtgtattacttgtgttctttgacttgttcatacaagctaaccaattagattagtccaatacttatatcttgggaacactgtagtgcaattgagtgggactgctaatcatagata

SEQ ID NO: 41434 - DNA, 1740 bp, Cannabis sativa
gagcccaagttgacatttttccaatcatttttccaaaaaattgttctagtaatttttttcgtcatcagaaataatgaagatacaagtaaactcagggagaaaatgggaatcccaggggcatgaaagttaagccatgcgcccaggttgacctggtgcgctcgatcacttaaatacaatttttgctctgaccattctcttcggtgtggttaaaaacggggtaggagacctcgtcctcaatttcaagaaccttagaagtaacaaaatgacatctcaaaagctccaaaaagagcgcataggttgaagtatgacctggtgcactgggttctgcttatctgattttgattttgtcacgaacattcatttagtttttcacagtgagcaagagctataaacccagacaagtcaaattcataacttcatattttcaattttttgacaaagtgacttagtcgcaaattgggtagtttcgagtctcccaaatcagcgaaacagtaatctctccgagaaatggtcaacgacttcactagaacacaaaaattagctaagtgatgtcaaaatatcacttaggcctcaacaaatacatattcaacatgattttcccttggcccaacttccaggttggcatcatatgtctacctaggcgttggtatcagagtaacctttagtaaaatagccataactcactcaatattaattcgattgatgcgactcaacttgagttttgaagctattttaatgctctatcaagtcatgtctcaaaatccaatcataattctaaatttatcaaatccaaatttcttcttttaactacaacttacttgaagtctcgcaaatatgactcaagctccagaaattgacgattgacatccagagtcaattttaatattagatcatcatcaacggtcaaaactggcataaatatattttttatatatatcttttgaatatttattattattttaataggatctcattccctattaagggagagctcccctattttattttttacattcagaaaagtatctctctatagaaattagagctttcagaattagttatttttcttgtaatcattctcgcgagaataaaaaatcgaagtagacgtagctccattattgtcatgacagacaaagtgaactactataaatacttgtgtgtgctctctattttactaagttacttctaactttcatctagtctatacatatgagtgagctgaccagatttttgcatcaacacttacgctttaatctgtttaggcaatccaataatagaaataattttagattgctccttagtatcaaatcttggttcattcttaagacttctgaaatctaacatatcaaattaatatgtgagaataaccaaaaatggattccaagcctccattgcaaatgagtcatacatacgaaacctaagagaattgtacaagaagatcagcaaccaaattatcatcatttttgataccttgatcattaggaaaaggatctttaacactttcaacattcttcacatcgtcttcaacatcaacattcacttcatccttcattgaatgataatcaacagacgcaacatgtccataattctttctgcccttatcaggttcattatgctcattgtctttttttgaattattcccaccattctcattcctctgatcatcctcttctgcatcatcatcttcttcagacccattatcgtcatcatccccatcatcttctacttcctcatcatgag

SEQ ID NO: 41435 - DNA, 1246 bp, Cannabis sativa
aaattcacttgataaagtatttaggctagttaattaaaataaattagataaaaactaattcaattacaaaaattaggtataaactaaatttgattaaattaaattggaaaaatctaattttgttaaattggattagaacaaatctaatttaaattaaccaagctaaattaatttaattaaaagaaatattttattttttggcttgttttgggtacatcagaatttttactttaaaaattttgaagcattaattttttctatgtgttcttggtatatacatataaaaaaaagaacaatatgtgtgtgtccataagctccaagaaaggagctgaatggcacaagaggagttgctcgcatggctccataagctccaagagaggagctaaatggaaaaagtggagccgattggcatggctccatgagctccaacaaaggagccgaatgacacaatggagctgaattgcacaagtggagccgattggcatggctccatgagctccaacaaaggagctgaattgaacaatggagtggaattgcacaagcggagccgatcggcatggctccataagctccaacaaaggagccgaatggcaagtggagccgattggcacaagaggacccaattagcatggtttcctaagctcctccaataaagacaaaggaggtatttggtcaaaaggagacccaattggcatgattctctattgaaaaaatgtatatatatacaaagggaggcgtggggatgtgtatatatgtttatgacatatatactcatcaattcctacctattttagcctactctactttttttatctttacttcttaaagtctaaatagccacaaacacattttctcctccattttattttttttttggatcaaactagggatttcaaatgttcatcactatcatcatcatgttcttcattttttcctaaaaagtttatccaaatcacaccaaatatataaatctctctcctttctaaaataagagtggattaagataacccatagcctacattgctaagtttcattcatagattctaaaaattacaagccaaatttcacaacattagaaaaaatcaaatatgtaaaaatagggttttatgaaaaagtctaaagaatactatgatattcatactttctatattagttttatgtaatattataatttagagaaagaaaatagagaagatatgagaattttttgagtgttttattccaataggtgatctcctatttatac

SEQ ID NO: 41436 - DNA, 1505 bp, Cannabis sativa
aatatggattacattgaaatggagttttatttaggacataaaacccaacactagattcattgagtggattatgacttgtttaaagggaactagctataatctgcttatgaacggaagaatctagggtaagttcaaaggtgaaaaggggctgtgtcaaggagatcctatgttcccgctcatctttgttcttatcatggagtacttgacaagattgcttgcccaatcctctgggaggaaagggtttggatttcaccccttatgcaaacatttgaagctaactaacctgtgttttgcagatgatcttattattttttgcaaggggaatcttaactcggtcagatatgtgaatgaggcttttatgaatttttgccagagtacaagtctctcagcaaataagtccaaatcccacatttattttggtggggttaaggatggtattaaaactcagatcctggatcttgtaaaaatagaagagggttccttccctatcaaataccttggggttaagcttcgtccaaccaaatggaaggttgaagactgtggagttatccaagacaagataaataagaacttaaactgttgggcgagcagaaatctttcgtttgcagggcgctctcaattgattcactcggtcctcctcggcatcagaaactattggatgagtattttcactcttccaaacaaagttatagatgccattgatagaagatgtagagaatttttatggggtacctttgggaatcgctcaagttgcacttaacatcttgggagaaggtgtgtctccctaaaaagtatggaggaattggctttcgtaagggtaaaaagtggaataaagccttaatggtcaagttcctttgggccattgctagaaaacaagatagcctttgggtgaaatggataaattctatttacctaaaggaccaaaatgtgtgggagtacccagtcaaacaggatgtgagctggtatttcaaaaaactaatgtccgaactagtactaatgagatctcccttttgcttgctgaaaaaggaggtaagttccatgctaaacttttttataacttacacgaggatgcgcaggaagtgaattataatagagctgtttggaataagctcattgttccaaagcacaggtttattttttggcaagcttgcaatgttcaacttctcacccgagatcacttaagcaagtttctatgccttccctcgaacctttgtccggtttgtgagattgacatagaaacacacacacacaccttttctttgaatgtgtgtatgcaaggaaaacttttgcagagataggaaactggctgggagttatagactggccaaaggatgcaaagaatattcaacagtggtgttccagggggcccctcgattttaagaactgagtgataaactctgtttatgcagcaacaatctacatgctttggaaaaacagaaatggttgtgtctttgatttagtttgttcctctcctcttaagttgagcatggagattaggaagattt

SEQ ID NO: 41437 - DNA, 1115 bp, Cannabis sativa
  modified_base (939)..(950): a, c, t, g, unknown or other
  modified_base (1043)..(1054): a, c, t, g, unknown or other
aaaaaaaaaaaaaaagccaaaattgactaaaatatatataaaaaagattaaaaaaaaaccttttcaagctttaataagtaaaaaacattgaaaaagaaaaaaaaaattaagaaaagtaagtaaacatttctttgccaaattataaatgtaatgtttgaaaaaaaatgtagtatttagtataaattttccaaatagaaagaaaccctaaaatataaatgtaaaataaattaaaaaaaaataaaactaattaagcttgaaacaaaaacatgaaatatgggtttggataaaaggtttacaaaaatatggcatatcaaatatcataaaaatcttaaatgtgaaaaaataccataaaatagtgacaaacctataaatatcatatttttgtaatttttttatgaaatcgcatatttcatgtaatttttacttaaataaaaataattaataattaactatcaaatcaagcctatgatattgtgcgtaagaaaatttacttcagaagataaataaaataaaagtaaaataaaaaatttgacttaaacaaaacaaaaatcgatatcatataatttttcttagataatttatatcatataatttttttttacaatatctaatttatttgaaattagtaaagttagaaataaaactaacccttaaatagtgaagcatagataattaagctggtagaaaaaaaaaaaaaaaaaaagaaacataactgcgaattaaataataatcattttgtaaataaaaaactaagggtgattctacaatacaccctttaaaagggatgtactgatacaccactaacttgttttggtctcgagaaaatctttttaatctaatcttttttcatattcatatacgttataactatttaagataacctacaaaattttgagaaattttgaataatttataatatagaaaacaatgttcaaacannnnnnnnnnnncgcgtataaaataaaataatcacgggtgcaatacaccatttgaacatagttttcggtgtcttaaacttttccaaatttcttaaaattttgcannnnnnnnnnnntaactataacgtacatgatcatgagaaaaaatttaagtacaaaattatttcggatgctaaa

SEQ ID NO: 41438 - DNA, 1215 bp, Cannabis sativa
aaatacaagaagagtaaaaggtaaagagagcaaactattagcataatctcaatctctttcattccttgtacttctcctccatttttttcttttcttcttctttatcctcttgagtttctttgaataatggccgccaagaagtgtgttcctttttttttgttttggtataatggaggcttccgtttttttaaagaaaatcttaggttatgtacccttttcctaacataaaccctccacatgtcataaatctagtctctccaagtatttgcttcagcagccactcctagaacgccatttcacctatttttggccacatcaattaatgaattgccatgccatccttttcaatattagttttaacaatcaaccttgctacttttgctgcagcaaagttcctgcaaaactacagcaaaacattgcagtttctctattaagcccttttctttaccaaaacccaaataaaacttaataattcccactaacaactccaaattatctaaaagaacataaaaatataaaatagcatatattctcacaaaatagaaggaaaagaactatatataggtaaaaatacatacacaaattaagctaaaaaaacataaataactctttattcaagagttatcagcctcccagaagtgggatatgccttctccccacgaggtcagcaggttttttgatttgaatccacccctaagcaaggtaggtcgaggtacttctatttctctcaaccagacctcaagtggttgacgggcatcaaggataaggccattagcaaaattgggcgttttgttgatgaatacttcatggtggatggcatgggcaccacccatacacagttccagaagatcccaagatatcaccgccctcccttcactcttgttcttaaagatagagctcaatggcttgctcaactaccgcgggatgacccaaatatcatctagttgacctccgaggacagctttgtgaattatgggctctatccgaaggatttcattcctaagcaagtgaaggggaggaagaggaaatctggtgctggacgggctgagagagctcatcaagaggatgagctgattcatctgaagcgtgaggctaagttgaagggaggtttaagggccaagcagtatgcttaagagcccttcaatcctaaagatgaggctgaggaagagcaggtgactccgctcaaaaggaggaagaaactttcggcccagccca

SEQ ID NO: 41439 - DNA, 2013 bp, Cannabis sativa
atccaacagttaagtcataaccgctccatctgcagctcgatgagcttatgagacattttgtaatcaattaaaatttttaattttagcgcaactgaaatataatatattttttcaatcttaatgtagagattttagagtcatgtagagtgtattattaacaaaagtttttatatttagatttttttatcattacaatttttgtataatttgaatttaactttaattaattttttagtatatatattttaatttcttttagttttgacgtttgattttaattagttttttatttatgtattttgttaaattatatatttgtttaaataaataaatatgagtcctaaatatatttgtgaaagtaaaatatcttatttattttaatatttatatataatcaagaaaattgattcaaatgattttattaatttctttcttctattgattttaataatgtttttttgctaatgacatcgatattaaatatagtagcgactataagtgagaagtggtactaagaattgtgactttgattgtagtgacgactactagtgaaatattgtgatgataacgactttgaacatattggcaactacaagtgaaatacggtaattacaacaggcttgatagtggcaatgatatagatttgaatgtagtgacgactacaagtgagtacagttataaaaacgactttgaacaaagtgacaactacaagtgagatacagtaataatgactttaaactttttcttttaattatttttcaatctacatagctaaaatatagtttttgccttatattgtaataattttaatcacgtagcataaattaattttgtcattaatcaattaaatgaattattttctattttttataattaatatatagaaaataaaaattattcgagttaattagatttaatagatattaattaaaaatatttatgatatataatatgaatttcataataaatatccactaaaaatattttaaacacttatatacatctaatataaatttaaatttaaattactaatctatttattttttattacttatagtataaataatgttgtacctaattttaaatatttttaataatttttgctatttgaaaattttaaatttatgtttttatttttttattttaatttttaaaatattttattcattaatatcaactcaataagtataaaagaaaattgataaatatatattttttaaaaataatataacttatatttaaaactgtcgcacaaagagcagctgtgttatctagttattaaaataattgtaaaatatcaatttgtaaaattatactttttttatataaaaaaaacttggtaatatagccccatttttttagtattataataaattatttagtaatatattaaataataatttaaaaaattattctaataaataacaatacttaaattttagggaaattaccccatatactattctttaaccttttttttttttttaaatttacgatttggatttctccggtatttctccggcgatttctatgtcagttgctatacaaattttagttgcgatttaagttgctctgttagttgctataggggtttccatgtagaattctataaaaatgcaaaaaataactgttttgaagtgtaaaaataaaaaaccccttaattttagcatctaattatatattgttaataataattttatttattaaaaaataaaacttcataaagtaaaattatttggaagattattgaaaagctaataaaatctatattattattgtatatatatttacagaattttaaattattttattaaaaaaactattattaattataaaaataaataaatagggtggtatagaaaaagttagaaagttccctataaatataatacattatttttatatccgatcatttaacaccgtatctcactcgttgtcccacgttgtctcatgtatcgtatctcatacgtaattattgtatctcacctgttatcattatcgaattggagtgtt

SEQ ID NO: 41440 - DNA, 2130 bp, Cannabis sativa
aaataatttccaacattaaccacaaaggttataagtgtcttgacacttctggccgtgtgtacatctcaagagatatcatttttaatgaatctcaatttccttatgcttcacatcagcaatctcatataacaccagaaatagttgcctctttttacccatctgttgctattcccactattacaaactcctcatctggtttatctcaacatgttgcatctattttacctcatacacatgctatctctagttcttctaagcctgtgcaggcaccacaaatgataccaacaacaccttgtgacatctctgctatccatacagtacagcactagcaaataccactactacagtagctcagactccacagttgcctatatctggagtatccaacattgccactgctcctatagcctccttttcttttcctatcactgttgagatcacaaatgctcccagttctgcagcagtcaataatgaaaatactgcttttgtgcctaatgagaccaatacaactgctgccacaacaactgatattccaaatgttatcaactctcacaacatgcagacccgttccaagtcaggaataagaaagccaaaagcttatttagctctaaaagaaccaacaagtgtgaagcaagcaatgcaaagtgcacaatggaatggagcaatgtcaactaaaatgtgtgctctaaagaagaacaagacatggacttatgtggttctaccacctggaagagaggctattgggtgcaaataggtctataggattaaagagaaccctgatggtagtgtatccacacttaaaacaaggcttgttgcaaaaggttttcatcaacaacctgggtttgacttcactgaaactttcagcccagttgtcaaaccggttacaattcgtgttgttctttctatggctctctcaaatggttgggatatcaaacaactcaatgtaaataatgcatttctcaatggttacttacaagaggtgtatatgacacaaccgcctggttttgtcttgcccgatgctccccatctagtgtgcaaactcaacaaagccctgtatggcttcaaacaagcccctcggacttggtttgagaaattgaacaacaccctcactgatcttgatttttcatcatccaaatcagataggtcattattcattcagtacacaacctcctcaacaaccatgatattggtttattttgatgacattgttatcacaggcagcaactctcaggtcattgccaacattatcaaattgctaaattccaagttctctcttaaggatattggaaatctaagctactttcttggtattgaagttcaaagtacaccagcagggcttcacttatctcaagcaaaatacattaaagaactactgttaaaagccaaaatgactgaagcaaaacctcttcctacacctatggtgacaggtttaaaactctcagcttatggccatgaaccattcgatgatccataactctatatgtctatcgttggcacattgcaataccttctaatcacttgacctgagttggctttcagcatcaacaaagtctgtcaatttatgaagaacccccttcaatcacattggcaagctgtaaaacgaattcttcgatatctaagtggcactgttgatcacggcttgcatctccacagaacaaaattgacagaccttattgccttttgtgatgctaactaggcttccgatcccgatgacaggccctctaaatctagttttcttatttttcttggtggaaatttaatcacatggcagtgcaagaagcaacaaaccatttcacggtctagcaaagaagcggaataccgcaacttggccaatgttgtctctgaactcacatggttccaatcattgctcactgaacttcatctctctcaaccaaagatccctattgtctggtgtgacaacctgagtactgttcttcttgctgccaaccctgtgttgcacgctagaactaagcacatcaaattagatctttactttgtgggagaaaaagttcttcgtcaccaagttgaagttaaacatgtgcctgctacggatcatgatggtctcaccaaatccatctctagccaaaattttcctcgatttcgaaccaaactcacaatttccagtccttc

SEQ ID NO: 41441 - DNA, 1270 bp, Cannabis sativa
ttttttagaaaaaaaaaactataactgctattgttttaaatactatatttatttaattatttagtttgagtttaaaatttttaatttactttttctttcacttttgatttttttctattttttgaatggaagatttaaattttattaaccattaaatttcgttaccaaaactgataaaaaaatcagtggggacatcctttaactaaagctacgttcaggatgaagaatgagaagctctaacaaaactatgagcaactacattcgcggatcgtttaataaaacaatctttcacaaaagataaatccacaaacaatattttacaatctttaataatatcatcgaataaagaaattatagaaattgaactcctaaaaccttgcactgccacgagataatcacactctaaaaaaacctgctgccacgaactctgcttaatccaattgagagcttcccaaatgctcacaacatctgcaacttcagccgcgactaatcccaaaaaaaaactagtcggtccttcaatgatgaagtctttctcatctcgagaaaccaagtcataaccaaaaccatttagctcctcaaaaatagctccatctacattaatcttgacactattcgatggtggaacagtccaaagctctgcaccatcattcccggtcaaactagaaaatgacaatttcaaacaaatttttttggctttactccattgttcaagatagctaacaacagaggatattatttccaaaggactaacacacttttggttcgaaaccttttcatttcaagcacgccaaattgcccaacacgtaacagccaacaaacatttcttctcctgctgtagacacataaaacaagtctcaaactagcagaaaaaatctgcattgttcgtccccctgaacctattcctacttagttcctgaccaactaggcagctggacaagacaaaagacaatggtgaattatttcagcctcactttgacagcttggacaaacaagattaacatctacatgcttagttcgaagctgcacaatcgtggacagagtgcccaaacaagcacgccaaaccaaatttttaatttttagagtgacctttagctgccagaacttcttccagaatgagatgaacttttagcactctgattaccattcaattcttggattagattgtaggtttattttatcaaatacacacctgacacttctttaatccatatgtgacagtcagtagtcccgtgatctgtaaggggaaataccgggtaagctgtgcaatccc

SEQ ID NO: 41442 - DNA, 1337 bp, Cannabis sativa
atatatataaatataaaatcatctttttttaacaaattaatccaataaatgatgataatgttgtttatttatcagaaatattgtgaaaattatataatagaaggagacagaaaaacgtcacacgtggcgtctttataaggagacggtggccaggcgcttgagtctctcctctcattctcaaattcattccccatcgatttttcggattggaaaaaaaaaaaaaactaaagaaaagaagagaatagcaaaaatggtagttgacgacatggtgaagatgagcatctgcgcaggtccctcttcctctagatttccaagtgtttatcctaaaaggtataatatttgaagattcctttcagtattttctttctttctagattcatttcaatttttagtaactttttccatggatctattgctttccattctctgcatcccttctttcgttgatttcaagagattcttaggctaggtttggatgtagtctttctttagcgtttcgtaacaatctcttccgttcttttctttgcctctttatacaagatttgaggtcaaacagatttgatttaatgatatctacttcttcgatactttgttttttaatttttaagtttaatttttctttctctagggatctctttcatttacgttcttataataccaatttataatgattttgtttcattgttctggattttgatgtgggtatgagaaatttattatttgattgtaaatctaggcttttgatggaggggagatacagtggggattgatgttgaaggtgtttataaggttgtttacttgaattatttttggaattgcaatgatatacctgccgccgactccgccagcaataaaaccctccaaggaattgaattgaaatgggagattcacgacttgcttctctttcaatggagaatcatcacccttccaccatgttgtccatggattccagtgcctcctcctctcacgaagaattggatttggagatgaatcgccaaattatagcctctcaccctccagatatcaatctacctctctcagttgagggcagtcctcctcaacaaccctggagtatcgactcttgcgacattttagatgttgggctctcttcacaagtctgcgagactgaaactttgatcagtattcccaaggttggccggaaatgtgccaagcgattggatagcatttggggtgcttggttcttctttactgtttacttcaagccggcgctcaatgaaaagtccaaggccaaaactatacgagaccacaatggaatttctgggttcgataaatctgatcttaaccatgacatctttatggtccagcatgacatggaa

SEQ ID NO: 41443 - DNA, 1812 bp, Cannabis sativa
gggatcagcagaacaaaaaagtatactatcatcagcaaacaaaaggtgagaaatcgaaggggcattcctagcaatcgcaaggcccctaagaaggcctcgactctgataagtgctaagaatagcagaaagaccttcagaacaaaggatgaacaaataaggtgacaaaggatccccttgacgtaaacccctagtaggtttaataggctcactaataacaccattaacagcaaaagaaatggcagcagaggataaacacttaaaaatgagagaaacaaaattgacagggaagttaagatgaaacataacattccttaaaaaatcccattcaaccctatcaaaagccttagccatatcaagcttcaaagcagcccaacccctttttcctactttcctattagttatattatgaactaattcattagctagaataatattatcataaataatacgaccagacacaaacgcactttgaaaaggggaaataacactattaagaacatgttttaaacgatttgccaaaattttagagataactttataaaaagtagtacacaaactaatgggcctaaaatccttaagcatattagcccgagcctttttagggattaaaacaattagagtggaattgatttcagaaaaatcagcccccttattgagacaatccaaaatagcagctataaaatcattacccaaaacaaaccaatttttctgataaaaaaaggcattaagaccatccaaccctacagccttatccccagaaagctaaaacacaacccttttatcctcatcagcaacaaacggctgagagagactctctacactttgatcagaaagcctagagcctagacaatcaaaaatagaggcagcagcctcaatatcacttccctgggaggtaaaaagatcagagaaaaaacgagtaattaaatccataatcccctccaaagagttgacaacctccccagtgtcagttttaagatatttaatatggttagttttacgccttgatgtggcatgtttatgaaaaaacttagtattcctgtcccccgcattaagccatttaactctagccctctgtttccaataaatctcctctttatagagtaaagcatcaagcaatgattgtaatctacccaaacgagccctatcctcatcattcaaaaacaactgatcttgaagcatattaatttcatgagtaaggtgttggattctagttttaaagaggaggttattgtccctattccaattttttagagaagaaatacaatccgcttgcttcttaagaaaactcctataaccacctacaagaggattatgatgaccttgcacagaatcaggaaccagaatactattccaagcatttttaaccacatcataaaaggaggggtcttcaagccaagtattctcaaacctaaaacgcctagtcctattgacagtatagttaatattagtaggagctaaactaagtttaagaacacgatggtcagaaccataataaccaagatgttggagactatggttcggataaagatcactccaagattctgacactacaacccaatctaaacgttcagaaatagttttattagaccaagtgtacctattccatagagaaactgtacaggaaacatgttaaaattagttaaaaaatcagcaaaaagagacatagtggaagaatcaaggtgatcacttcctattttatcagaactatacaagtaactgttaaaatcccccatgaccaaccatgggaggttaggagcattagaaaaaagatcacacaataatctccaagtaacatgcttaaaagaactaaca

SEQ ID NO: 41444 - DNA, 1776 bp, Cannabis sativa
tttttttatttgatttctttgtctagttcttcttcttcatcttgttttcatttttttctttaatttttaaaattttcggtcacgtttttgagaaaaataagagtattattttcttcttctgattttccagaactgggcttgtaaatttaacatctattgcatctagtgtgaggttgtgcagaagataattagttttttttttaattttttttcttttattttttttgatttgttttagtgttgttttacggttgttttgtcataatttatttatttgacgtcaattttactgttcttgctctatgtctccagaattaaaggttattttccagttattctcgttttgctgtggtggatttttccgtaggtgtggaagatggaggctataaatacatttcttcttctttttctgtggttatttttgtgattttttttactttgattctcctataaatacatttgacgaactcattggcaaaaaggttttgaggtgtgtggttcttttatgtttttctaagtgattatttttgcttcaatgttttatatttgttttgtgttggtttaggtttgttttagtattttttttattctaattttttcaggactaagcttgtaaatatagtcgttattgcatatggtattaatgttgtgcagaagatgtttagtttttttttaatctttttttgtttttttatttgttttagtgttattttaccgttgttttgccatgattatttatttttctctgtttttgttcaaccttaccagaattaatggttatttttcaggtgtgttcgtatttttatggtagttctgtgcgtgggtatagaagatggaggcattattcttgatattcagtgtctatagtataaaagaaaaaaaaggttaaagacagtataaaagtaattttcaccgtgtaatagtaaaattataaacatttgtttaaaacctagtatttttgcaagtttcccatatttaatgtattttaccccaatagtgggcttttttcagaaatcctagatgggtcatgggtatgcccatgcttgtactttagcctataaattacacctttattttcacacaaaaggggggatcaaaaaaggtgatgggcgaagctctgtgaaaatctctctaagctttcttcttcttcaagagaaaccaagagaatacagttagggtttcctactgtaaatactattgtaatacattaaagaagccttcgaaagtcaatatactagctcgtggactagagatcattaatatccgaactacgtaaagctcttcatctattttatttattgttttactatttcttaagcactaatttaattagcttctaaaaatattggtaaacaattaatttttttataatataatttacttaggtagtttattaaaaaaaaaattattttggctacaaaataatattttactacaaagataaatagagtttacattaagttcttttgtatgtttatgaaatgatcttaaggaaaacaattagagcctctaaaaatttttattaacttatatatagtcgtattttttgtgcatgcacattaactatttgatgagaatgaatatttgcttgaagtgtagatgaatgattcgttagcagaaatattttgtgtaagtgttgttcataaaaagataaattgttggttcacatgtatgtataattttataaagttcaaaatatgtcttgatctgattaaaaaatacatataaataaaaaatatatcttttcttcttatttcaacatatttaaaaaaatgt

SEQ ID NO: 41445 - DNA, 2067 bp, Cannabis sativa
tcgaccataatatcagcctatacccaatatgccaatcatgctctagccatattgatgtgatagcatcgatcaatatttcagccaacatacatttatcagtaacctatacaactctattcatattgttactgcaatcaatgtactctaataggcataaacaacatgcatgctaaacatgtaaatacatatgcagaacattacactaatcttatcttgttttcgaattcaagtgtgccgaccaacttgagtggaacaactgctcgacgaattacaggcccctaaatcacatcgttcataacatggttaagtgacacgctaaatcacaactagggacttaggttttaaaccaaaaatctacctaatgaaagttaacatggcaataccctaaatttatagggaattaaccaaccaaagctctgaaactaacacgaatcgacagcacgaaaaattcggggaacctagcagctgatccggttaaccagttttacagggcctgtaaaattggttaaccggtttacaacaaaaaaccccaaaaaatttgaatacctaaccaaatcgactctaaaccttaccaaaccttccagacctgcatattacaccccaataaacatattccaagtaacatttcaacatagcatgctcaaaatcaaaaattaccattaaagagccaagcttgaattctaaattcaaagcttgctcaatcaacactacagccactcaaactagctcaaaacaacatatctaaccataattaaacctcagaaacacaattcaaacaacaacagcaactatagaactcataaactcaaatcatgcataatttcttaactttaaacccaagaaatcataaggaggagtgctagaaacttaaccttgggttgagatcactaaaaactagctgaaaatcataagaattgctgaacaaaactcagaaccctagctggttctatggtgttcgaaaaagagagagaaagtgtttttcaagaattttctaatttttgtaaaatgaatgaaataaaaatgattttattaaacaaatattaacctaaaaattagaattaaaaacctactttaaagttcactaaaagacaaaaaagttaattaggcaaaatgaccattttgccctaccaccctaaaagtcataaaaattcacttagaggtattttagtcaattctaaaatctcgactgttctcgacattcccaatgcctaactatattgccccgctatactaaaaatactaagatgtgattctaatagccaaacaccgcgttctaatgttgttaagcacaaaacatgcaaaaatatgaaattccatatatggcatataaaatacattttgaattcaaataaatctccgtaaaaagataattcataactaacatgtaagtttcataattaaatcctaattatctgttaatttccaaattaaagtaagcggtctttacaattatccccccataaaaggattttgtccccgaaatctaacctgaacaactctagatattgagccctcatgtcggactctaactcacaggtggcttcctccaccttgttgtttctccaaagtaccttgactaaagctatggtcttgttctgaaggaccttatcctttctgtctaggatctgaactggttgttcttcatatgacaagtctagttgcagctcaagattttcataactcagtacatgagcagggtctaaaacgtacttccgtagcatggaaacatggaatacgttgtgaactgctgaaatagctggaggcaaagctaaacgatatgctacttatccaaccttctcgagaatctttaaaggtccagtaaatctagggcataatttgccttttttcccaaaacgcttgatctccttcattggagacacccgtagaaacacatgatttcctatttgaaactctacatttttgcgtttcgaatctacataactcttttgcctactctgagaggcaagcattttggctttaatcttctctattgctccattagtcagttgcactgattttggacctagatatttcctctctcccatttcatcccagtgaatgggagat

SEQ ID NO: 41446 - DNA, 2073 bp, Cannabis sativa
cgtccaagggttccccaaaccttgaacgttccaaagtaagagtttcatggttgtaggcgaccctgcccagcagagttcgcctcttcctcattctgtcccgttgttgaatctcttgcctgagaaacttcaaccggtatggtacccactttgctcttcctattctttgtgtccttctttaccgccacctttcttcgatgttcctttgacatattatgtttacccgatcccaagttaaaggaagatcctccatagaaagcatcaccctccttagcaaaggcgattgggacatcgaatagttgtggctgtccaagggaatcattagccgaaatatctgttttttggagtttcccataccccattcctgcttgtgtttctaccattcttctctttcctttgtgttgtgcttcatccctttccggatttcccatcagttcggtctcatcagttggtgtttgtgccccacaatgttcattcttcttgctattttcacctcttatcatctctgaattgtttagcaagagattcccatgtgaaacagacttccctgtctccatttcatcgaccagaggagtaaagggatttgccaccttcaaaccttggcttgggagacttattttttgattatccttgatcccttgctgcacttccttcctcagttctttttggccttcatgaaacccatccctctgttcattgtccactttcaaccacatcccataagccttcgcgcgcacaccatctgcccctttaatttctgtatattccaaagagcattctttttggttgtgtccaattttcccgcatcgaaaacacataaaggggagttcttcatatttgcaagcaacccaacactttgaatccccacatggaagtaaatacccaggccaaactggtttgttaatcgacatccacacttgaaagcgaaagaatctgtttgttaccattcgggacacatcggaattttgaattgaaatcacagcccctgccattgatgccagtctcatggtgttctttgcagtcaagagatctgtaggtacccctagtattcttccccaaatcgggaatattgtaagatcatttttccaagattcattagtattcaccatcttccccaaaatcagtagcccattagataaataccatggcatcttagctagtattcttgattgagtatgttcggacacaaaggagaaagaaaggaacatacctgtatcatgtttgtcctgaatctttacatcccagtctgtctcctttagtcgccaaatacgtcccagaaccttcttgagaaaccccctgctatggtcggctttcgacaccagacgccccctaagattgaatcttgcaatcgtcgaagacaagctcttgtcgatctcccactcttcttcatctgagacatgaagttgagtagttttggcaagcaattcctccatggcaggtgattccacacagtccggttaaccggagtcccttcgttgccgagggaaaatgataactccgatcaagccctagcagagagcacacgcgggaaagttgtaaaaattatgttttatttagtataaaaaattggaattatattaatataaataaatttatggatcaagattacataggaaaactttataaaagtagagaatatttgcaaaaataatacaatttataataaatactacaccatatagagataatttagtattgaaattcacgattatagtaacaaaaaacgactacttttagtgacaactttttactcataacataatttttttgtgattaaatatgacttttagtcacagcaaaatgttacttatgactaaaatataggatttagttacaagttgtcactaatttagttttagtcacaacaagtgtaacaacctaactagcataggcgtgttagcgtgattttaaacatactgtgtagctcgttgctagtcaacgaggttattgaaaatcgtgaataattaaaatttatgcttatttaattaaaaacttaaagcattacatatataaaattacgggatcccatttacaaaatactttttaaaagtttgctatacacataaacaaaagttt

SEQ ID NO: 41447 - DNA, 2114 bp, Cannabis sativa
tctccatcatccttcttcttccttctcaaaccaagccaccatgatagccactagagcccagctttgactgaagctccgccctctttgcctccatactcaccaaaacctcgaccgtatgagaccccactactcataaacccctctccattcgacccaagccaaaaaccccaccattaccctccagtatcacctgaacctcaacccgcttgtgaaatgaaacctagcctttacgacccagctccgccatcactctctacgcacagagaaacactccagcttttgctttattttgggtttgttttctttgtgcctagttggagtgcaccaactcttctaaggtttctgtggtgtctcaatttaggtggcagcagctacaactcaggccagcaagctcccttcattgtttccctgagagcaattcaacacaacgagcaacttctcttggccaatcgctccttttcagcctaagatatattttgagggagctcttttattttctttcatttaattatttttctcatttttattatttttatagttttatttagctttataatcgtattatttcttgttatttctttattctgtattgttactatatgatatatgttgctctattctatgtttagagtagttaatttgggtgtttgtaatgtgttgtgtttaattttttttttttttttgtgttgctttgttatattagtcctaattttgtgattgagaggaaattcttttgcttagtgtgctcttaacaatgtgctcaatgattaaccacaatttttttttttaaaaaaaaaatcatccattcatttctttgttgccttttgttgtgtaattggctaattgtattcataagtatttttgaagtgataaaatttgtgatgaaagtgtttttcccaatatcatgtgcatagcttgaccaaatctatcttgaattcctagaacgagttagattcttaggagagcttaagtctctagaattgtttaatgtttcctttgaggcgaaatcctaggcaacacttaattgatgatatgattaaggccatctttggaccgtttgagccttttgagctaaccgatatatatatttttatccctagtctcccccattgagcttaattgatctctttattcataactcatgataaacctccttaaacaccttgatctacttagaatatgtattaatttgagagaaagtgagaggagtgtgaggatttgtggagtttttggtgccaccatatcatatgttcatattcttagtggcaacattggggacaatgttgagtttaagtttgggggagagtgtatgttgtgttttttttgccacttttatatatgtattgattcattattgaaaaaaggagagagagataaatgaaaaaaaaaatcttaaaaaaaaaaatgagtgcgccccttttgaaaaagaaaaaaaaatatagccaaattgtataaatattatttgaaattaagtttgggggtgtatttctcttcttattttgaaagtggcaagagtggtattcaatgtttgtggggacattcttttgggaaagtgattatgtgtcttattacttgggtcctagaaagattgaggtgtttaaggtattttgagccaaaaataatagcttttatcctaccttcaccttagcctaacaatacaagcttgataaagtcctattgatccttagttgagtctttgtctacattagtggagagggaagcattgagtcaacttatggagacaaaatgttaggctttaggattgaggtcgagcttgttttaggaaaaaatgagtttgttttgggaagagctttgcattagctattgggagagacacttgcattataattttatcacttcattaacacttgagtaaattagtcgaatgcattagcaagaggcataataatcatcatcatcatcctcatcttccatcctcatctcaataaagttttgagagcatttctcattgttaagttgcatgctaagtaaagatctcctctccttgtctcaagtcttgtgtgtcatttattttcttttgtgtgagttgtattttgagtcaattttctttgtcgtgtgtcttttattcctctttaagtcatcactcgaggacg

SEQ ID NO: 41448 - DNA, 980 bp, Cannabis sativa
gatggaagatttcttagaacacatcatcagaattggtcccatgttaacaaaatctcaacctgggcgttgggccttgcttttggcacccaggaagtgttgtttcttccgcaaaagtacatgtttcccctttttcatgaaaacaaagaagatgcaaaatttggatcgtcaatttgatacttggaagacacccaaattggcaaattggcaacttgggcattgggtgccagggcaacgtacagtgggtgctacaagttctcaaaaatgaacttgctccaaatctaattctaatgcctcaaatatttgtatggtatgtctagttgatgtaccaatacaaaggttgacccatttgcactaagacagtccctaaaactgaaaccctagttaggaatgccaacctaggcgctaggtgaaacactaggtgccgagattggcttctagggtgcaagctcatgtaatttccaccctcagtgcttggatttcattgctccatgtcttcatggtacaaaatactcaatggtattgagttggattcatgttattgaagtcccaacttccatctcaaagcttccaaaatcaacataggtggagggctagagtcccctcctaagttgactgctgtgacttggatctactcaactcctcatccttcttgtcacatgtcaaacattgatgttcatgtcaccaaggaaagttttttggtcaacatggttagatctctctatcggagagccgctggattggaaaatgatctgaagaagtgaaggtgtgaacggaagtagtatatatatatacataatgaaaaaaaatatcaagggtgtaataagagcatgtttatgagaggaaactcaccaaaaatgttgcccactcccttcacaactaagaactttatcttcgatttcccaaagttacaagcggtaagcataacaaagctatggtgtgacaccaaaatattgagttaataaaagcctatgctcctagga

SEQ ID NO: 41449 - DNA, 1078 bp, Cannabis sativa
agtcattgggtgccacaactcaatgtctgggaggaggaagatacagaaccatgtgtgaaatggattacagatgcatagttgttagagcacttcagaatttctcagatggaattgtatgaaggaaggacggaccccatggaccatctatcaatgtacagtcgaatgatccaagtaggaaaagctagtgacgcaaaatgcgtatgtttttcactaaatatgtcaaagtctacagaagatcggtggaaaaggttatatcccagatcaatttgcaattggaaggatttatagacaatgttcaagaaataattcatagcaactaaggatttgatttggaagttagttctctgacaaacattaaataataaccaggagaaagccttaagaagtacatccaacacatgattgatacgacaacaaagacaaaggttactaatgctatgaagattgtagcattgagttgaggaataaccactagatacttgttatggggagaacttcaaaggaaaaaagaagactctttatctgacttcttatctagagctcaaggattcttaaaccgtgaagatgcttttgcttaggcctatggagtacttccagcagcttcagcaaagacattcacaactaaatcatcatcgataactactctaactatattgcctttggcatctatgttcataacacccactgtttacggagcaaatacttttgtgtagccaattgtacaagcatgtttctcttgctatggaggggcacaaatcaaatatagtcctgctcttgaataaacaaaccaacaaatagaatttccaaattcaaggtaagtcattctaggaaccaaagaagttttaaagctcaagttgaagaaaatttgtaaagaaaggaagaactcaaaaaccaagatattctgagtatacctgcttagttgatgctcgtgagaatgtatataaggctatttgtaatatggttcattataaaaggcctccacctatgtacaaaggtggatgttatcccaaattttttccacctgacgtggcatgtccacctaagccaaacataaagtacaggtggagtacagctctgc

SEQ ID NO: 41450 - DNA, 1221 bp, Cannabis sativa
  modified_base (437)..(441): a, c, t, g, unknown or other
gaaacaaggacttgaccatcgggacacaaccccgaactcgaacgcaatcctaaacttaggacccgtcccaagacccaggacccgaactagaacaagaccaagactaagacccgaactaagactcggacaaaaaccagtcccaaacccaaacttggacctgaatccgtaccgtctgaccaaaaatttgaaccgaaaccggaagtagacagggacccgagaatgggactagaaccgtaaccagaacttggacttagacctagaaccgtaaccggacttaaacctagacccagaactgtaaccggaccaggtgccagactccaactaagagccagacccaaatcgggacccaaacctagatcccaactcatacctagactcagtgctgaacctagaccaaaactcagacctaaacatggaaccagactcgggacacaaannnnnggccgggacctagaaccgcaccccattctcggtccgaacccaaactcggacttgggacccaggacctgaaccggaactagactgggacaggtgactgggactagatcagggactcaaaccaggacccgaacccgaacctggaccaggacccaaatgcggaccgtgacccaaaatcaagaggtggaactagaacctgaacaagaactgcaaaaccaggacccttgacaagagtaggactgtgaccaggacccggacccaaaccaagaaccgaacttggacctagccccaaacccaaagcgagaccaaaactcgagcccaaaaacaatcctgtacccagactgggagcgagagccggaccttgacctagacctgggacccgatctaagacctagactttgacatagatagggatccggatacgaacctaaactcacacccagacccagacgcaggttggcatcgaaactcgggacctagatccatactgagatcgtgacccagacccagacctggacccgcacctaagaccaaaactttgacctggacccgaacctagacccagacctaaacccaaactcggacctagactcaaaccaagactcagaccccaaccaggcccggacccaaactcgaactcagacactgaatcgaaatcaaaactgggacaaggacgcaaacccaaacatggaccaagatcaggacttaggacccggaccatgacctgcgcctcggaacccagacccagatccgaacacaggactcagactcaaacttggacca

SEQ ID NO: 41451 - DNA, 1406 bp, Cannabis sativa
tcctgcaacaacaacaaaaacaaagaagaagctttcagcaacttaaaagttcactaatcaaaatagttcctgaaaaatcccacttaatgagtttgaacgataactactactcatgccaagtcacagcaaaataaaagacctaactctactctcactaatattagacttagaatttgttaatctctttaggacaaggaaaacacttttaccataatcaaaaactcccttctttatgacaaggaaaacacttttaccataataggatatttgtgacgaaaccctcttaacatttacaattgttatacatatgaccctaataaaaaaaaatagcagcaaaagtactttttcttacaattttgttacagttgtacccttttttagttattaagtctcaacttagaaacacgtggcaacatattattggactatgtattaaataagttaaggaaatatgtcgccatatgtttttgagctagtacttaatgggcttagctgaaacttaataatcaaaaaagagaaaaattgcaacaaaatcgtaagataaggtacttttgccgccatttttttttattaaggtcatatgtgtaacaattgcaaatattggggaggtttcgccgcaaatatcccttaccataatataacatctaaaaggcataaactcccttccttaggacaaggaaaacacttttaccataatataaaaaatccaataacaaatgaaccatcataaatcatacctgaacctccccaattccttcaggtagtatttttcccatttcaagcgacacaagccgacctaaatgatccaatttggctctaaatgcgtctcctatctgtctcacaatctcacctctctttggtgctggtatctgccccaagaaaaacagaagtgtcttataattcacttctaaagcagaaccataacttacgtgataacttatagaccatttcgaaacaatgtactaacagtcatccatgtctttgctgcttcactacatgcatgtagtccctcctcataatcttctagagaaacttccttgacttgagcaattttctatatccaaaaacacattaatcagagaataatctcactgttgcataaaaaagaaacataacccaaaaattcacgtgttgctcctttgccataacataaatttctcaactaagataatcaaacaaactcaatgatcgccaaaaataacaaaaaagaagtcttcaaacagaaaagggaaacctgattgttagaaggattaacagtagagctcaatggtccgcttgctttccacttgccattgacgtacccaccaagattttctgatcccaaaccgatctccttcagaaactcgtactcttttttctcgaaacccatctctcaaaacaaccctatccacaagctagacagcgag

SEQ ID NO: 41452 - DNA, 2286 bp, Cannabis sativa
  modified_base (1989)..(1997): a, c, t, g, unknown or other
  modified_base (2141)..(2143): a, c, t, g, unknown or other
  modified_base (2230)..(2242): a, c, t, g, unknown or other
ggatagccgcactcagtagatttgtttcaaaatcaacagacgagtgtgttcctttcttcaacatcctgcgaggaaataagaaatttgaatggacggagtcacggaggaatgtgagaaggcctttcaagaactaaaaagacaacttgcaaaacctcctgtactctcaaaacctctggacggagaagaactaggaatatacctagctgttataaaacatgttgtgagtgtcgtgttgattagggaagaaaataatgtccaacatccggtctattacatcagccaaagactggttgaagctgaaggacgatatctgctgatagaaaagctaacttactacctaatcttagcaacaagaaagttaaggccttactttcaagctcatcgtgtttgagtatacactgaccaaccattacgccaaataatacaaaaacctgatgcttctggacggttactcaaatgggcagtggaattgggtcaatacgagataatatttcaaccctgaacaacaatcaaaggacaggctttagcggactttgcagttaagtgtaccggcaaagaagaaagcatttttcaaaaggcaaccctgagccagtacaagaacttcagtcaagcaacaatgaagataaacctacctggaaattacacgtggatgggtcggttacagatcaactatctggtgcagggattgcccttgtcacacctgggggggcaacacctgcacgaggcaatcaaatttgggttcagagcctccaacaatgaagtagagtacgaagccctcattgtcggtctaaaacttgcacgggagctatatgctgaacacatcgagatctgcagtgactcataattggtagtaaatcatgtgtttagagagtacgaggcccgggggaaaatgatagcatatttaagcaaaatatatgatctgcttgcacaattcaagagctacgttctcaagcaaatcccaagagaagaaaatacaatcgttgatgccttggcccgtcttgtaagcagcaacatagctaataaggctaatctaatcccaattcaatttcttgaagaacccagtatcacctgtgcggaagaaattgaaatgattgacgcatctctgaactggataacaccaatagcagcctacctcgatactggagaactttcagataacagaaatgaagctcggaaaatgaggagaaaggttgcacggtatatcatcgtagaaggagttatgtatagaaggggattctccatgccactacttagatgtgttacacaagaagaagctgcacgactcttgtcagaggtacacgatggattttgtggcaatcacgcagccaggcaaagcctatcaaagaaaatactaaggcaaggatatttctggctgactatgattgaagattcaaaagcctatgttaagaaatgtgataaatgccaaagattttcaaagataccccgtgcaccgcccaatgaactaactcacatgcaaagtccttggccttttgctatgtggggaattgatctaatcgaacaattgcctaaaggtacagagggagtacaatatgcagtggttgtagtggattattttactaaacggatagaagtcgagccattggcaataattacatctaagaaagtgctagactttgtggtgaaaaacaaaatatgtcggtttggactgccgtataagatagtctcagacaatggcacacagtttgacagccaattgttcaccgatttctgtgtgaaccatggaatcataaaaagtttctctgcagtggcacacccccaagcaaatggtcaagtcgaagcagtcaataagacacttaaagatactttgaaaaaacaacttgaagatgctaaggggaactggtcgaaggaactactagaagtactatggtcatatcgcacaactgaaaaaatagcaaccggacaaactccattcgctatggcctatggttatgaagttattgttgtaatatattttaccaggatctagannnnnnnnnaagtatgtttttaacatcctaaacatgaactttcaaaacgatatgaataaacacataaaaggtatgagaaaccttacaatggttgcagcggaatttaatgtctccttccgctcagatctcaaacccttgtatcctttctgtagnnnagtatcaccaagatctgagctcgattccccttctcttgaattaagatttttcacagccttagacactatgattgagtaccacttgannnnnnnnnnnnnttactctaatcactctagggttcggtttgaagagaggaagagag

SEQ ID NO: 41453 - DNA, 4817 bp, Cannabis sativa
  modified_base (26)..(34): a, c, t, g, unknown or other
ttgaacatataattaagattatattnnnnnnnnntgacaacactataatctttaacactataatcaggttgtatagaatacagtttttctataagggagacattttgcaacacatgagtaggaagtctattagacaagtatacaaaggttcgaaatgcctcatcccagaacttgagaggcattgaagcttgggcaagcaaagtaagaccattttccacaacatgtcgatgtttgcgttcaactaaaccattttgttcatgagtggttggacaaggatgtctatgcacgattccaaactgtttgagaaggtcagtaaaggttctaaactcacctcccctatcagtttgaagacatttaataggctttcctaattgaagttcagattcagccttgaattgagtgaaagttttcaaggcatctgatttttgtttgagcatgtatatctaggtaaatctagagtaggcatcaacaaattggatgtaatatttatatctattaatagaagtgtgtatagcaggcccccatagatcagcaacaaccagttgcaggggtgctgtgtagacagtatgggaagctttaggaaatggtaatttgtgaattttgcctaaacaacatgctgtacatattgaaagaggtgttttattactgaattagatattacatgactgaagtacagatttgacaaccctttttgagggatgtccgagcctattgtgccacaactcataattggaaacttgagatttattacaatttgaacaaacagaagcattgttctcatgatgttgggacagtgtggctgtgttgacactgggggagacatctgttggagtgagttgaactttgaactgggaggggttaaatgtataaaggccattctggtgtttcccagtaagaaggattgctcgagtgacctggtctttgacaaaacacttgtcagcatgaaattcaaagaatacattgttatcataagcaaaccgagacacactcaacagatttttagttatttcaggcacatgtaggagattgtttaggacaagaggatgagaagaattggaattaataaaagatttaccaatatgttcgattgacagacctgaaccatctccaacatagagttgatcttgcccttcatattctgtgcatgtagtcagattttgcacatttggagtgcaatgattcgttgcacccgagtctggataccagcttgtgtcctcagtttgtgttgtctgtgcaagattggcttggtttgtaggagaatttgtgcctggaaacacccctgtgaagctttttatcaaacttgtaaaaatagtcgagtactgtgtgcccaattttatgacagagttggcactgcacacgattggctggtgttggaaatctgcctcctctgttgacagtagaaacaccacgactgttagtgaagctaggtaatccatagttgttacatgtaggagttcctcgagctgagtatccacggcctccaccacgagttgtgggataaggagagggagtacgattgaagtttgagaatctggtgccacgattgaagttctggtatgcgatattggcctcagatgattgatcaagatcaatagttgcaagatttgcacttagatcagcatcttgatcaagatcagtcttctcaatccgagatttagaggccaacaataaagcttcgatttctgaaacagaatattcctcaattctggtgttagtagagataataaaagtatcatactcactgggcagtcccttgaagatagcagcaatatgatcccttgagcttagaacttctccaacagaggcaaggaggtcaacgtgctgcttaactttcaggagatagtcattgagggacatagaaccttttcgaagcttctgtaatttggttcgaaactccaagatcttggaggagacttgtagtgtgaagtgcttttcaagagcattccaaatttgtcgtgccgtattgcatcccaccatgcgagtgaggagactttcagacattgaagataacagccagcttaccaaaagttgatcctgcacttcccaatccagaaaatctgggttgaatatgttcgagacttggtcaaaatcgctcaagaactgcggtggtggagctcgatcttgaatgtatttcatcaatctatttcctcggattgcagctaacacctgctgtttccacaaaaggtaattgtgatcatttaatctaatagacatattatgattgaaatacacaggattaagatcggtggaggtgtttctcgatcggttgaatgcaggggctccattttgttggttttgaactctgctggtgttggagttaattggatcgccattgttgccgactcctgtgctcgccatgtttgctataaggggggaaattgctctgataccatgttgaatctcttggccatagctaaagatcaaacagaacaagaacaagaacaagactaaaagaaagtcacaaagagaaaacaaaaagaaagaaaaagaggattgatgaaggaaagagcaatttcattgattcagtgttagagatacaaggttatatagtgaacagattagagcaagaaccagtagttgattacaacagaaaactaatctaacagaatagactgtaacaaactaattgatacaacctgtcactaacagacataaccgaatacccttaacaatatatgtatatatatctatatttttataatgtttataacttcttatattaaatctatatatatgtatagagtacgtataaataatatatatgtatttttatggttgtatgtatatttatatgtgtatgtgtgtataaaaatatgtgcattttatataaaaaaaattattcaacagtaattttttaaaatatctattcataggtaaagtataaataaaaaaagaatcattattttattttataaaaaatagaactaaaaattaagataacttactatagtaggtaattgttattttttttaataattaataataagaatgggaatcaaaattagcttattagaatagttgtctaaaatttttatgctgactcaaattaagtattactaatatacaatataatataatacaatactttataatgtgttattccacattttaaaattttttaatttatgtcctcacatatactcatctataatctatctattatccatattaactattaaaaaatagacaattcatgtggcaaatttccttaaaatgttacaatggaagacatcactactacaaaaataattttttccaacgtttttaaacagtcgtttaaagtatttccgtcagtttctataactgtcgcttatacgatcatcgcaaaacgggcagaataggcgatggttcaaaaccatcactaatgtggacttcccaacggtttaaaccatgccttatactataggcgacgctgccttataggttggttacgttttttagtttttttcagtcgttacattagaaatataggaaaaaaaatatagattttttgtaataatttttttttcccctgcattaatttttaaattttttacaaatctgtatagtcataataattagactaatgctagtatcgtctaaatatatttaaaattctgtttaatcacaataattaaactaacactaatatcatctaaatatatttaaaaatttataattaagttaacgctaattataataatctaaatatatttacaaatctatatagaataaatcgagatatatacacacttattaacacaacaactattgtcgctccacttctactttcacgtaatgaatccaccgatcacgcataacatttatctcatcatttgtgtatgcagtggagaacctatcatgtcgggtcaatagttgtattggatcttctacggtgataaaactttcaatgaatttcatgtcatagtatccacactatttgtcgtctggttgtttaggacaaataggagtcatccactagataggtcgatcaggccgtcctatcatttgattatatatagtgaacaatctacacaaaaagtaaagttaattagcatatataaattaataaatatagaacatgcttgcatattgggatgtttgatataggacttacgttaatatgatgaagtttagatcatccagcatgtcgtcgttgcctgaatccaagtatgccactgtctgcgtacttggctggatgagtacaagcatccagtgaaacatcttcctgcacgaacaaatatgtgtaaaactgttaatgtatacataataataaattttatgaagagttataaatactgaaattatttatataaatttacatataacgattattatatggggcaataagctatttgtatgaattagtcatcctagtcattcgagtgactagtgcttgacaacgattactatcagcccctgcatcaatcgcacctatatttcagaaattcatatactcgattcaaccccaaccaattccaacaatctttctttcatgttccagataaaaagtgataattaataatttttgctgttaaaagaacattgtcaattttattattaagagttcaaaatcatacttgcacctgactcctattggttgggctcccatgtattgcatggtgcataattcctgaatgtcgcttttaacaaggacgacatatggacgactcctatctgtccagtggataggtcgatgagctatttgggtcgaagatgagctcataagcaacttgaaattggattatggacgacttgggccaccttttgatggagttccaaaaggtaatgattgacgaagtttggtgtggttcgacataacaaccatgaccttttgc

SEQ ID NO: 41454 - DNA, 1306 bp, Cannabis sativa
  modified_base (682)..(685): a, c, t, g, unknown or other
atttatatataatataaattaattaatattggagaaaaccaagcgtacagcttcaagccagtgttgtaaagctaatttctgagccttctcatacttgcacaaaccttttccgacctacattaatacaaccaaataataatcaaaatgtaaacaatacattatatatcttaaactatatatatcaagaaaaaagagacatgattttatatatgtagaattgaaattttgagttttaaaattaattgctagctagcatgagggtatatttatatttatatatatagaaatatcgagtattaatataaccttggcagcccttgtcctagctcttgaccatctggaaattgcagtttctggcttatctgagtcaaaaaatgacacagagctcctcctaagggcagcaaaatctaatgccttccaccttcatccattattatataatataattaacaatatatatatatatatatacagaatttttctggcaaagtgaatttacttttagtcctcactggtgtggaattaaattcagtaatatcattggtgagatgttaaatgttatggtagtgtctggtaatatctttttaattggttttttgtttttaaaattgtagaagttaaaatattttttcaaaattatgttttataaaactgttctcactttttaattttttaattgagnnnnaaaattttaaaaacaaaaaaaatactttcaatatatttttaaataatttttcttcttaattaatattttgcactttgatcagacccgatccaaatctccccctccccacctccttggcgttgaacttggcctctgacccgaattcgagcttggacttagactagacttaaataaaatcaaaaaatgaaaatgaatatgaattttatagaacaaacttttattttctgtttttaaaattaaaaaataaaagtagttacataacgtatttttattttggtgattaaaaaattaaaaaaaaaaatattattaaaccacatctatattaatactgtatgtatcatattttttctttttaaattaaaaatacttaaaaaaattaatcagttttaatttttaagccactttttctactatttttgttggaatgcatgctgggtctatatgtttttgacccaattatataacttataacatcactatctcgtatatatgctagcatagaatgaaaatccattatataatttatagcacttttactaaattttaattggaattagaataattaatgggagaaatatatcggtttaaaatagaaaataattagaaacaatattttattat

SEQ ID NO: 41455 - DNA, 1816 bp, Cannabis sativa
ctcttatcgccaattaattttgatatataacctcatgcatcttacaattctaacacactataccaacacagtactttcttgcaatactccaccgcatatgtgagtcttctttgttatctcttgacttcatttttgttagtatttctcatataataatgaatatttttgttagacactagtaatatccacttattcagtaatcttttatagggggtaccttataattggttagcaatattctctaaaatttattttatgaagttatataagacacactatttaattacattaataataatataacatcaagaaatatacaagaaatatactagggaccaataatatcttttaacaattcactataataattaatgattattattattattattatactacaaaattcacccttggaaaatgggaaagggataacattcgtagtatataattaatgactattcactatatatttttaaaaggaatgactaatgacttcactattgctacagtgctttcattcacacaattatataaataatatcttaacaacacaataatctaatttttttttttttgaagaaaagtgtatgtcattaatagaataggttagacctcacggtcattacataatatgtttaacagaatagtagatagctgaatatcaccaaataacttgtgggtaaacgcctacttagccacattatgggtgacaaaattacacgtcctgctaatataagagaaaatacaactcgaaaataaaaaagcttgactattacaaaaagagatataattttcaataacccaatgagactccttcccattgagagcattgatgactaccctcgagtcgctctccacgatgacaaacttggcatcaacttccaaagtagtagaaatagccaagcagcatgtcgctgcttccccacaaagagcatcagaaatatcaagacaagtcgtatgaactcgaaccacctcgcctaagtggttcctagcaacaattgctatacacatgctatcaagccccactttaacatcgcaattcagtttgatccaatctgaagggggggagaccagcactccattaggcaagggacaggggaagggaaaatagtagcatgtaattctgcgaaagaaaatcgaatagagtcaatgcacttcttcacatctagagtgagattattatgaaccttcacattttgagtgcaccagatggtgtcgaccacaagtgaggcatacaggaaaacctcctccacatcaatctccttatgtttcaagtcccaaatgaatttgacccagtcccacatccggataccagtatcacagatcggataaataccccaaggagaagatcgtcagacatggaaagccacatcacaagtaaaaaataaatgttccatagtttcctcttccctcccacacaaagggcatctcgcctcctcgatatgaaatcttttcctaattacaaacctgacagggacggcgttgaagagaatgcaccaccaaagaaccttatgccgctccaaaactttactattccaaagcttattctaaagtgagggagcaacctcacaaaagagagctcttttcaaggcctgagtaagataagcatatttacagaagaacctcccatccttttcaagagtccaaattcacttgtcttgacccattccagagggagcaccatctcttaaaatcgcagaatcagtctcatgatcaaaaaggcaattcaacttgtgactatcccaacctccatctgtagaaagcaactctgcaacaagtctgtggtccctggcaggagacccaatgggcttaggga

SEQ ID NO: 41456 - DNA, 1116 bp, Cannabis sativa
gtaaaataacttccaacaaaagaccattcaccctacaacttttaactgacacatgtgatttaggagcttctcctgcttctaccccaatggaacctaatgcggctctcatccgatattggggaaccttagaaaacccaaaaatatatcgcaacattatgatatttcctttgctgtaaataaactaagtgagtttttatctaacctaagagctgcccatcttgatgcatagaattttacgatatcttaaaggcacttctggccaagggcttttttctcaatctgcatcttctatcaatttatctgcttatgctgaaactaacatgcactacaacaataatggtttataccaacgccactattaccaacgccaaaaaagtcctcattaaaaatgatagtatcaataacgacacttacctgtcatcgggacaattattaatttttttttttaaaaaaaaagtatcatcaataacgacaatgtcgttattgaaaaaacttcaataacgacattggctttgggaaagtgtttgattttttttgaaaataggccgttgtaaaggcggtaaaattccctccactttcagctaccaacgacaatgtcgttggtatctgtcgttggggactgctggatataaaaaaaaacacagcgagcttcttcattttttcagccaaaacaaaccctaacccttcaaccattcctcacctcctctgatcagccattatcagcccctttaaaactcaaaaaaccttcctccgcctgaagctacgtcccaccaccttcctccgcctgaagcttcgcgcgtcagctcagcccagcaccgggtctctcctccgcctgaagctccatcagcccaccaccggcggcgatttttgaggtataccctcatttttaatatgtatatattgttttatatttatatatgtatttatatgtttagataaattttgttgtttaaatgtttgtatttattttagatatatgtttaaatatatatgtatttgagatatatatgtgtttttaacaatgtatgtattgttttaagtgattgtaatttttttttctttttaatatatatgtgaataatctgaatttttttttagataatattccgaaaatag

SEQ ID NO: 41457 - DNA, 1867 bp, Cannabis sativa
  modified_base (58)..(69): a, c, t, g, unknown or other
  modified_base (422)..(423): a, c, t, g, unknown or other
  modified_base (659)..(659): a, c, t, g, unknown or other
attggatccaaaatatgaaatccgcacttagtacggattggatgttgtttgaccaaannnnnnnnnnnnggatcggatgaacacccctatcttctaagatgggggatgaaagataaattctaataacttgttaggtattttttattaggagtgttcataaaatagtcgattcaatgcaatctgcacgattcaatccaatacaattcgcaaagtgcggatatccgcacttgtgcgaattggattggattgaaaaattcaaaatctgaacttgtgcggattagatgttcattgatatgcaaaagtaaccgatccaatccaatacacatatttataaaaaaaaaaaaattaaaaaattatatatactaataatattttaatataaagaaaatagtaatttaaaagtctaatacatataatacaannatatttcaaaacttaatagatcaagtgtatattatattcttatatatatatatatatttctacatacaatttaaaataaaattaaacatttttttatacatgcaattttttttcctttctttgaatttattatttgttattttatttattttaatttgttgctggggacataaaatactataatttattttattttattggtagttatgtgaattttttttataaatattaaatantttaatattaaaaagtaaccaatttaaaatgaacgatccaatttaataatttatttatttatttatttattttcagattggattggatttgagctattgtgcggattggattggatctaaaaaataaaatccgcatctagtgcggatgggatgcactatgaacaaaatcaaaatatagtagatattagattagatgaaccctagtattttctctaaaaatatcactttaaaaaagaaaaataatatatatatatatataatatatttaattttataaatactttcagttcatagtcatcataaaattacacaaaatgatgtttcatggtcttcatcttaattagaccattaattctaagatttttaaaccaattaaaatgatgttttaacttttattcaaaacatgagaaatattatgtggaaaaatatgaggggaaggattattggtacgtctttgttgactttctagtattttcattttggcagcattaatagttaattgacttgttgttaataataaattgtagttataattaatttttttttaaaaaaataattattattattataggtaggggtgtgtataaatcgatcaaatttacataagaaccgatcgatccaataacaaccaaccgtcaaatattagatatccgattagatgctattttcaaatatccaattgtatcagatcggatggtggatggggtgtccaaaaatccaatacatctaactgtattaatttgcattttcatttaatttagatgagtaattagattttcttttgttatatgtaaaatctgtaggtatatatgaaaattaacattaaaattttactcttttttttcttggattggatggatccagttcaatctattacgtactcgacttaaaagattggatggatccgatccgataaaaaaaatgctaggtctgaaatatttgataaactcaaattaaatcaataaatatgtatgaaatacgaccaatatagatagaaaagatctaacattaaatatataagtggatcagatctagatagacttttctaatgaatacccctaatgaagatatgaaatttgtgtcatgaaatttaaggtcaaaatttcagaaaaaaaaattaaaaaaaaaaaagaaatttatatggccaagttatcaatggcaaaaaaaagcgaaaaaaacccaaaaaagtttacagctaacaaatgatt

SEQ ID NO: 41458 - DNA, 1298 bp, Cannabis sativa
aattaacttattgcttcatatgtctattaacattcgcaatcgccactgcaatagtagttaaacgcaaaatttaattaaccatagagaataataataaaaattttaatttaattagtaaacatattctaattttttttgggtagtttaattacctcgattttttctaaggtacaactttattgtccatgatatcccaatcgaattttctgacctgggtttcggaggctgtcatttgagggaccatcaccatgtaatgagtgtcacatacaccacactggtccaccaatttggacaataaaaggcaccaagcatccatctgcgtcttcagttcgtcttctgttagagttccaatactcgaatcgaagacgaatagcttccacaactcaagattttcctccatagcgatcaaatgtttctgtcggtccaagaaaatggccatgtatatgcactccatatccttccaagacgacatgaatttgtttggatccccacgaacgagttccaagagggactcatcccagacaaaggcaacatggtcagtattagtcttccaagcgtcccaccgacccttcaacgatgaagcaaaccaagatggcatgacagtacacttacgtgggtacaactctgggaagaagtgttggcgccttctcatcatatggaaagcctcatccaaatgctgcacaacacatacaaataagtcagcacaaccacattagaacattaaaaaaataaaacaaataacaacaataaatgacagtaaataacaaatcataatacttagttaataaagttacatcatcagaaagccattctttgttcgtcagtagcttctggaaccaagccacgccatgaacaccgatgaagacgtgcctcagatacttgtttccgatggttcccaccaaccaattttgaaaactatgtagtagcttctcatcaacgggccgaagtgggtcaacattcgcattggctatcgatggcttcatcttcttcttcatttcggtgtactcgtcaaaccaccttgctcttttcttcgatctcttctccaccggtgttggaacggtctctaaaacctgtacctctgagtcttgcgtatctccaatggacgtaattgacatgttctgaggagtatggagtacatcttccacttcatcaggtctgtagtcattaggaagaatgaagtcatctcctggagagacggggtctggctgtggctctgcctctacattgggccttctcggatctcccatgagtaccaatagggtcttcaagtaacgcattatctctatctgcccttttag

SEQ ID NO: 41459 - DNA, 2583 bp, Cannabis sativa
  modified_base (1557)..(1566): a, c, t, g, unknown or other
  modified_base (1647)..(1656): a, c, t, g, unknown or other
tttagccttgcaaggtggtccttgctgattcacacgggattccaagtgtcccatgctactcgaggacagagcataagctagtgatattttttgctactggactctcgccatctagggtgtagcactccaccgcttcacctagcagcacgacgcttgtattgctctcataataatcaatataagcattcttaaaacaatcaaaacgtcatgagttcaatcctttaaaagtaatacttttttctttttctttatttatatttaatttaagatttcaattaatttaataatttcaaaattttatcatattttattaattaatttatttttaaaattataatgttcaatgtatttataaattttagatataaaattaattatttactttaattacattatttatataatcatgcatgaaataataaataatacatattcatagtaagcttgttcttcaacttagttcaaagtatttaaaacttttgaattaattatttattttaataacactatctatataaatcttgcatgaactagttaatgcacattatcctatctcttgttaagtgacatgaatttaagccttgacaccttcatttgttaattttatacaatttattttttgcatatttcatttttttaagaattttttttatcttctctttatcattctcaatagcgataaccatacaatccattctgcactatattttgagcgcattcgatctgtactaagtgcggattttatattttggattcaatccaatacagattagattaattattttagattggttaatttttaatattgaattacttaatatttattattttttttacataactaacaacaaaataaaaataaattatttttattttcgccaacaacaaactaaaataaataaaataaaaaataacaaacataaggaaagaaaaaattatatgtataaagaaatgtttagttttattttactgtgtgtacttgcatagcaaataaattaccattgtgtgtacttacatagaaaataaattttacaacaataaactattatatttggatgatattaatgtcttaccacacgttttataattatcgaaagttgtcatagactatcaaatttaaatgagatcgacggtaatcaagatcgttcaaatattttttagtgcaaaacttttcatctatttattatgcatttttatttgacaaaatttttcatttgattattattattgcatgtgttattttattattcactattatactttatgtaatacaactatcaatatatattaacaaatacaaattgggtaaattgcggcatacataactaatgtttcagattttatatacttaaatactttacctttatttttagaggtaaaaatacccaatgttacaattatacatctgttactagcacttctgttaactcataaatatggacacgtggagggtccaaatgcattacatttatttattttattttttgaaatttaatattcttaatatcaaaaactaaatgctacctgtttcaaaaacaaaatttgtgactaaaagtnnnnnnnnnntgactaattataaatcatcattcctatgttgtgattaaaatatccatggctaaaattactagtcacaaaaattacaatttnnnnnnnnnnaatgtgtttttagtcacaatatttgttgtgaataaaactaaattagttacaacttgtatctaaatattatgtttcaatcacaagtaactttttattgtgactaaaagtcatatttagtcacaaaatttgtcgtgactaaaaggttgtcaaagacagctagcattttctttgtagtgctactttagcacagagatcagtgtcgagcctctatatatgtagaaaacttctcaaataaatttaactataaatactacttttacaaatatgaaactattagatgattcaatgacgaataataaaaatatctatgtttactttagctacttaattaaaaaaaaaaagtgcaaaaatatatatttttacactactaaaaatatttatatacaaaatatttaaattaaactcaatttttttttttatcttagcgacactctctaaaagctattatattaaactatatgtgatccgatacttattaaaccaatagtgatattgacacgtaggagggtgcttggcaccgctagtgccttttacatttctctttatatatggaacacttcttaatgggtactacccattgatacgtactaaacaaatttaactataaatattaattttaaaaatattaaatcattaaattttggtccgataacgaataataaaagagaaatttaaatttctatgcttaaattagcaacttaattaaagaaaatatataaaaaaaaaatatctctttctataatatatcaaaaatatatttatatgaaacatatttaagtcaaactcaaatttatttcatcattttttttgctgaaaactttttttattatatttttttagctgatgaaccaaccacagcccatataatataaaaataagaaatttttctaattaaataaaaaattaatcataaaactcaaatttttc

SEQ ID NO: 41460 - DNA, 1562 bp, Cannabis sativa
catggctgcccagaaaactagtcgaccggttttccaggtaactggcaaatcggtcaactggttttgccagcaggggaaatcttgagttttctcctcgagtctgatttttgtttggggtatctttcgaagtgtaattcagagtattttagggatatttaagttagtttgatccaggggaaatagggttgtccggttatgagaattagggtttatccctggaaatttgattaaaggttttcattgagtttttagttgtcgtgacataggaccgggatcgcccagcttgttttccactcaggttggcctgcacacttgagttctggactgagctaagaaaaagtgttatgcatcacttagggttaagtgattaacatgtgtattgtaagcctcgattatgatcaagatcaagattatttgtttgttaagcctcagttatgactgagggttgggaaacggtcattaccgttacgagtaattactcttgaaactgcagataggtttcttacttatcgtttgctttctcaggcaacgatagtgacatattcagctcgtggttaacgagtggtaatggtactttataaagtacaaggatttgtgtggttacaatgttgtgtaaatgtttaaatatgttaatataagattgtatatcgataaatgttacaatggttattgttttaaacacttttcttgctgagtgtctatgaatcatgggtgctatatggtgcagataaagggaaggccaaggctgagtagccatgagtttgaaggtcctagcagcaatgtacataacaaccgtggtgttacggcccattgatcaggtcattccattttgattgtattttgatatatcaacctatgttgtaaaagcattgttaaatcggtttgtaaatattttgaaaatagggggtccccgtaaaaattagtaattatctttaacgaaaattatgtgtttatttaaactgattttttttttaatttacctcacttttgatataattatacttaatagtaaatgtaatttttataaaagcacaaacgtggcatccctgttagacagagtgttacaacatggtattagggcgctaaggtttttagatcctgaagactggtttgatatgtacattggttgtaagtcgactcatggttcagtaagttttaattattacattattagttgattacctgcctgtatgtttgtctgaattatgctagctgttaaaaaagagtgcaaagtttgagatgtttggaaatacttataaatattgtcattacttggaatgtgatcgcaggtgcatagattatgcactcgaggtggactggtagaggtaatcgcaagctagctgggcttagggttgctggtgagggtgagaaccctccaccaccaccaaactgggaagagttatatgtcgcgatgcaagagactatccgacagcaaggtgaacaaattcaagagctaagggagcagcaagctcagcctattccaaaccttaatcctgatcctccggcaactctggtagtgccactggatgcagggaattgtctggagttgttgtatgagtggt

SEQ ID NO: 41461 - DNA, 1080 bp, Cannabis sativa
ggtgtattccttagtaacatagtcttcaccggcctctaggattttaccgacctcgaacacaggttgtccatcctcgttgaagccaccaaagggcaacctccgagctgcatcttcatcctcaacttcaaaaggagtatcaggacggacctcgccttaatcctccatctcttggacttcagtgtccccctcaatgtcttcctcctcgatagtaggcgtgtcttgctccgcactcaacattgtggcgggccgaggtaggtgtgggtcagttagacaacactttcgaactatttttttagtgcgtgccatcatcctattcctgaaccgagcctgattggtatgtctggcaatagctacggtgaatgtagcaataggcatacctgcagtagaagggtttggacggcttataggcaaagtatcaactgtatttggtctgacaatatatgtccagttggacggtaaatatcgcctacaacacttcttatgctcctagataaaacgtccatagccttgaccttcgatctggccggggtaataatggtgttgcagttcgggttccagggaagatgtatgttcgctacttatctcccaatcttcaaagcttgaattggagagaccgccactagataaggatgaactatcacgaagaagaaggtgatcctcgtacagaagttgaagaagatcctagtcgatatgacgttcgcttccctaaaactcacgagggctcatctataaaaggtaggacacaagatgagtatttggctgggataacaaacagaaacaggttggctatatcgaccaggtccgatcaatgatcaaaaatagaaattttgcatgatattgaggtttacgatctagaatttcaaaacttcaaattaagggttgattttcactaagccctgaatgggcaagtgaaagtgaatatcgtggaattgaaatcaaaatgcagttataacgtagttaagcatagtaaagatttcatattcctaaacctaaggttttctaagataatgactaagtcagaaaataaagtagaaaataaaggagatatttttcttaattacaaaagtgttctatcatctt

SEQ ID NO: 41462 - DNA, 1055 bp, Cannabis sativa
actttgaattgtttcaatttactttggtcaacaaacccttgctaaggctattggtcatttggtcatgcttatctctttctcttaaagaaaggtaacaataaataaatgagaagcaatacaaggtaagtataggctgtaatttgtgtgtaaatggtaagtacgtatccaacatttaattttcaaactttgttatattgctattgactcgttttcatacagtgtatcaaattaacaaccaataatagtctattgtaaccgtcttactagtactactgacatctggcactgattatattaggaatacaaattattactattcactattctgtgacaattaatttttgtctaaaacatttgtgcttatctttattctggtgtgctaaaaccaaagctcctactttttgttgattaattttgtaagtcttgaacaaggtccttaaactcttgatgcaaataaccaagttttgttatgtcaccatgtaggggtagtgactagagaatagagatgattttttttttcctggcaagaacccaccctaatggagcagggattctttgcttaacagattacacagagtatgatggcaacaattttccattccaaatatcaaacagaggtaggatggagtaatggagatggcactcatccctccaatggagcccgtttaattttttaattattttatatatttttttaggagtattatcgttaacatttttttacaatattttagttaacttttatgtctgaaaatacatgggagaatatttttatacggtggtgttcgttatagttacaacatcaataaatttttgaaaattttcaaataatctatagtgccaaaaatagatttgaagttttttgaacacaagaattctattttcgatattgtaaactaataaaaaattttcaaaatttacaaatgataatattgtaactatgcatcccaaaaagaggtacattgatgcaccgcttatttgtttcagcatctaaaaaaaataaaattagtctaattttttctatagttgtatgacgttataattatttaagacat

SEQ ID NO: 41463 - DNA, 1118 bp, Cannabis sativa
ttcagggggtatgatttagtacatgtcaaagttcgggagaaaaattactaattagcctttattttttcctaattttctatgtattctatttcacatgtatttatttcttttaattgtctggctatcaattaattatctatgattttgatatgaaagctgaaaagtgagtgtcaattatgctatagtgaaataagaataaattttgatacaattaaaatcaataaccctaatcttcaatcattgttaatttatatatcaatttacttgcttgtttttattatttttattatgttaaattctagttttaattttttcttaaatttgaatatccaaatagaagtaaaagtttaattttaaagtactttactacaatccttgtgggatcgagctcaccctttgtgagtctataacttgttaacgatacatatacttgcatgttaaaaataccacaataagtttttggtgttgttgccggggattgatagttaatattaataaaaataaatttttgttctaatttgttttttttttcaattttagtactaattctgtttgttttaaatttttctcttttttcaggaacaactagtttatgcgacgtcaatgagcaactgccagattgcatgttgatcttgaaattgagaagacttgcagacaaaacaaaaggaggaaaagattggaaaaagttgtaataggggttgaacaagaagtagttatggttgacaacgccaacgtcgacaacaatggtaataatggaggtgttgtggaagaccaagctaatggtcgcaatcaacctgatcatagcctgagcgactatctgctgcctaacttgacaggtgccaaatcttgtataaggccacttgtcgttggtggaaacaatttcgagatcaagccgaccatactgtagatggtccaatccacagtctagtttgggaggctgccaacagaagacccaaacatgcatctctctaactttgaagagctttgtcagacatttaagatgaatggagttagtgagccattagactgaggctgttcccattctcattaagggatcgagccaagagttggttggtatctttaccacccaattctatcaacacttgggaggaattggc

SEQ ID NO: 41464 - DNA, 1091 bp, Cannabis sativa
tccgaggttgaggaccaaacttggagaaagaaagtgtagccacggatgcaccaagggccatgatcaagagcccaactcctatcttcctcacgagcaaagcttagctcaaaacagttagtgtattgaggcccctcaatcagagccaccacggtcacagggaatttccaagctttggccacaaactccactacattggcctcacacacagccatgggggccaccacttttcccaacagacagaaagtagatagagcttttcgagaagattcgcaaggaaccaacttaaccgatgcatcattaacagaaaggcatttgcctttaagagggggagtcatagaagcatttactacctccataaatgccgacaaaacaaaagacaaaacctaccaactaccagggacaaagacaccgaaaataaaagcttcacacactcaaacttacacaacagaaccaacagaaatgccccagggaaagacaaaagactcatcaagacaaaacagaagttgaggacaggaaaaaacaagcagataaccaaataaaaccccacaaagagacacgagtaagaagaaatagaacctcagccgtcaaaaaacaatctaacacggggactcccagacagaaaaacacatacgacacaaagaaacccaatagacagacacacgaaaccaagagaagcgatctaataactagaggttctcagaccaggaagaaaagaaaacaagtcggctagagagagagcacagtagaagaccatgctctcttttcaatacataatgtttattgatacataatgtttatattttgttgcaattacaaacggttaacttttattgttaaaacaatgacatggaaaactagattgggtatgattagggtaaccagttaccttatacttgtactgttttctcatattttttttaactttttttatttatttttttcgtaaaataactttttcgctaataatctatatttttataaatttataccttaaaacccataaaaataaaaattcctcccaaaaaattgatctgtaacaactagaagactttacaaatttacggaaatactgtttttttttttatatatat

SEQ ID NO: 41465 - DNA, 1674 bp, Cannabis sativa
  modified_base (1140)..(1147): a, c, t, g, unknown or other
  modified_base (1630)..(1634): a, c, t, g, unknown or other
ttttttttttttttttggcagcgtagattatagtgttctcaagtgttgatcttgatgacatatctgatggaggaagtgggcattttgctaagactgtaaaagccacgaaggtccttatttctatgtcaattactgttgtatctcactaactctattttactttttagtttcattgtattttgttagaaattgggtgatattaaagttaatttaatggcttacacaaatccttttatccaaaatgtaaagcctaaaaacatggttgaagttgggcaatataatattgaagtatgagattagatgtattagcacacaacattgagactattaaacgcatccaacgagtgctaaggtgctttcatcttttatggagttttaatacttattgtttgattttgatttatctttggagagagaaatagagagagtaaagagctatcagaacaaacagtatttacagaaatataaatatataaaaatatcttctatatttgaggtatatactcttttctctgtcaacgtatttttgtatgatttatatagcttaaataagtgttcaaagaatttttttagttggtgggtttttttcaagagcaacctcatatgaagagaaggtattgagtttatctccatatagttgtatattttgaataagtatgtgtctattgacttgtaattctaatttttagattcttatgtttatatggattgaatgtcatattctaattttctattttgtggtcagatactttttatctgctttagttacaaaaatagtgttgcttatacaaagggagagatattttgaacatatttacgtgaaaattggaatgagcaaatttaaatctcaaataaaaaatataatatgctataaaaataaattaaatatatgtgcaatgcacgtaactttaatctactatggatatctaatctatataaatgtggttatgtaacgaaattcttagtttaatgatgttatttgggtttccatgctaaccttaacaaaatatcctattatttaacagaatattctttattaattttataataatattattatatatatttaaaaataaaaattttataaatattttacataaagaaatttaaatttaaatttaaaatacttagaatattatnnnnnnnnttaatcatatttttaaatttattagtttaactttgaactaaaataaaaagaaaaattatgtagatattttatatataaaaaaaaattaaatttaaaatattataaatatttttaaccttatttttaattttattattatttattttatattttaaattgaaatggttataataaggaattaattgctttccgttttaattatggtaaaccgattcatatatcatatttttcgtaaagtttgggaataaaaaacatttatattaaatttacatacacacttaaatttggttatgtgaattttcgttaataatatagtaaattataatatatgcattatcagagatattgataactaattaaaaaaatttaaaaaatacatatacatatataatcacattcaaatgacacactaatgtagtaatagttaaaaaaaattcttcaagatcaaaatctcaaaactcattttaaaaattaaaaaaaaannnnnttacttaaataaaaaaattaaatatacatgtattacactt

SEQ ID NO: 41466 - DNA, 1337 bp, Cannabis sativa
attatttaaataagacaaataggccttcacaattggggttattcatgtgagggagggctaggtctagtatgtcgtacccactactaatgaccgtctaactctcacacaaggtccaaaagagaggaatttaaccattatttaaataattgttattcattgaataagcgcaatactaattgagcctaaataactatcaagagtgatacttcattttagaaacctagtctatttatctatctaaattttgaaaatttagggttgttaaaacaaccttaaatatcttttcaaaaaattaaaattcaaaatgaaactaattttaaaatatctaggtttaattgaattattttatctaattaattttttttttatataaatcagcaatgtattaatccacaaaacatttacaaagtaagagcatctcatgaaaaaggagatctcaaaaatatttctaagctattacaaagtttggtaccactctctatcattttgattcactttttttggccaaagggaatcaattccatgtttaactgtaagctgaagtttctttacaattgtatctacattatcaatcttatcattccatattttgtcatttctagtatgccatattgagtacactaaccctgctacagccgctgcaagaactctcttcttgaaggtgctgatctttgcacggtttatccaccgaaggagcttgtcgaggtcattggagagagtaccccagaacagccagcttttaatctgcttcaaacactcctgagctaactggcaattgaaaaacaaatgcttgaccgattcttcatggtgagtgcataagttgcagtttgcattagatgctatatgaagtttatgcaatctatctttggtcttcaatcagttttgaagtgaaagccaagtgatgaagcagtgtttggggatattaaatctcccccacacttcattactccaagcgactttattttgtgatgggcagggcaacttataaccaagagagatagtgtacctattggatgtgaattgttgagtatcaattagttctttgagttgatcttttgcagcaacaatttgtttccaataccaggtcccttggattggagctttgtagctccaccactcttcctctttgaggtaaacattgtgaatccaacggacccaaatgttgtcttctttgttggtgatggcccacacgtacttaaacaaggcagcaacattccattcaactgtttttgtaaaaccagcacctccttccgatttgggttggcaaaccttgctccaagtaggaatggcaaatggggcgggtctgccccgccccgcttctgacccgccccgccccg

SEQ ID NO: 41467 - DNA, 2267 bp, Cannabis sativa
cgaagttcatttgaaaactccaattgattttcagctctcgacaacaatgtcagatcgtattcagatgaagttcaaaacccttactatctgtgtaatagtgaccatcctggagctagcttagttccaaaaattcttaatggctgtgaaaattatagttcatggcaaagagccatgacagtcgcacttgttgcgagaaacaaactcaagtttgttaatggcaaacttcctcatccggacgaagatgatgaagattttgtgctatggaatcgctgcaacaacactgttatctcatggattctccatgtgatctccaacgaaataactgaaagcgttatgtacatggatgatgccacctagatctggttgaatcttgaagaacaattcaatcagaaaaatgctagctcctagggtttttgaagctatattcgtgcgaagcagtctcttgcataaggatccaatagcattacaagttactttactagacttaaatctctttgggatttgattcaagagtatcgaccacaactgatttgcacttgtggagctatgaaaatgattcaaggttaccaggaagaagagagagttcttgagttcttggttggcttgaacgagtcctatgccagtactcgatctcagatcttgatgcaagatccattgccaaacatcaataaagcgtatgcctccgttattcaagaagaaagccaaggtgtttgtctattgttccagctgaaaatgacaagaacggatctagcaatggatttggaacaagctccaactcaggtcggtttgctggaaatattgaacctcatcgacctaaaatggtctgtacttattgtggtatcacaggccatactatggctaagtgttttcgaatccacggatatcctcctggacataagttgcacgagaaatttcttaacaggaatgacaatcgcaataccagtaatcacaccagtagctcgggaaaaccttctgctgcaaactttaccaccagttctgaaagcagtgaagggaacaatggagacaatgttgtgggggatcaggacctggttgctagcctaactgttgtgcagtgtcaaagactaatggccttgctatctcagagaacacctaaagcagcaagcagtgctcctgttgagcctcctatggtgtcacacttttctggtaagaagtctttcattcctaactctaaatggattattgatacaggtgctactcaccatgtgtgtaatgacatttctttatttaaaaatatacaatctgatcaatctataccttctatcaaattgcctaatggaaatttttctaaggttgctaacattggtacagtgtgcatttcacaagatttttctttgtctaatgttctttttgtaccaaagtttcattgcaaccttctctctgtttctgcattgactaaccgtggcaattattcctttcatttttatcctaatcattgtgaaatacaggacaatttgaacaagcaaatgattaggatgggtgagagaataggcagattgtattacctcatttctggtgtaaaaaatgtcattccttatgctttttctgttacttcagattcaaaaataagagatgacacggtctggcattacagacttggacactcctcttgtatcaatactcactcattgaataaagctttacattttcacccaaattcttccaattatttccattgttctgtctgtcattatgccaaacagaaaaagctgccttttgtttcaaatcacaacatgtctactgcaccatttgatttaattcatgttaatatatgggggccttttaataccttaactctagatggcttcaagtatttcatcaccattatagatgattatagtaggtacacttcgacacattttattaaagccaaatctgaaggtcaaattatcctacccaatttttttaggcttgttagtactcaatttgtgctaaaatcaaaggggttaggtcagataatgctaaagagttggattttaaagatcgttttgcttctttaggagtcattcactatcattcatgtgtccaaagacctcaacaaaactccgctgttaaaaggaaacatcaacatctcttaaatgttgctagagctctattgtttcaatcttacatacctttggtatattgggatgattatattgctacatctacatacctcataaatagaacaccaatccccaatttaaagtttaaaactccttttgagaaaatttattccaaaccaccagcttatgagcaccttagagctt

SEQ ID NO: 41468 - DNA, 1552 bp, Cannabis sativa
gtaagtataagtttataattttttttaaggtaatgtaagcatagaaattcaaatttccctctcaatatcataaattatttaaaattttaaaaaactagtataatacacatgccacaaacagagacgcttataccagtaagaacctccgacaaaaataacaagataaatataaatgctttaaattaattattagatttttttttgaataaagcacaactttattaactcaagccatccaaaaccatgaatgaatcacaagagaaaattcttagaaaaaaaatattatcaacctctataagagagaattgcgccaatatatgtgctacctaatttgctgatcgttttacaaaagaaatagaaactgaaattgtagagtcaagtaaaaccttacaatcattaagcacatagctataaggagaagctataaattaaaaattatttaagtcttgaactaatgtaaggcaatcaaattcaatctcctcattagcctaagctttattatttatccaagtcaatgcctctttgagtcatagcctcccccatgagcaactgtaaagaatctagctaatgcttctttttcgcttctagcaccataccagtagcagctcaagcgacaaacctgcacctaaaatgacccttctcaatagataaagcactatcaacattaactttgatgttaggaaaaattagtttggtccaatatgcttaatctcacctctattttcattttaatttagaggtgttcttctatatcgaagcattactccattaatcaaaattgagtttagctgttgtaactatatccatattagaagagatctttccatcccaaattagatcatttctaaatttccaaatggcccaacataccattgcaacttccactgattcttccccattccagacttgtaatccttcctggaaccacgctgcaaaggtcattgcagcagcaccagacttggcactcttatgatgttccatcggctttgggcaaatggacaatgaaccaataagtgtagagcagtttcaggggtccctaaacaattaggacatcttacatcgttgtactttcttaagagataactaaaattgagttggcaaacaattagaacaagctctccacaaaaagttttattgtacctttggtaggatttttagttgccacaacttcctccaaaactcgacattatcatcttgttttcgatctccaatattctcctgaatcatcttataagcactactaacagagtacttcctaatttttcccttatccaataccaaaaattaccatctatgttatcacttaaagaaacataccagagccctatccctctcattaagcacatctgaaataacatttgaattccactctttacgctccatcttgaagaatgaataatctacagttttgtctaccaaggcaggatgttaaaaagtaacaaaatgattactgttatcaagaaccaatgatcacgaagaatactaatctccctgccgctcccaacacatctttcagtcccaatacacatcagatctctagcctcaacaacac

SEQ ID NO: 41469 - DNA, 1785 bp, Cannabis sativa
agactcctaggaatacaagggtcccaccaggtaccaatcctgagcaaccaaacacgcacccaccaactgtgggccaaggtgtgacaacccctctggctggggttacacccggtgtgcaagagactggaaacaccagttcgacagccgatcagagtactcccagcactggaatcccttccacaactaatgctcagacgacaataggggatgatactgagatttagaacctccgtaatgctcttggcctcatgcaaggtcacaccaataccttgcatcatgacgaggaagagcttcatgctacagtgaatcttccattcgaagagcagaggcgtcagttcatcgaatggagaaataaggaaatggaaacattgaaggctcagtaggtaaccatcgatgagcgaataagacaggccaccatactgatacaaaaagcctaccaagttactaatcagtaaccaactaccatccagtatctcgctgggcggcacggaagaaatcctgctgagcataccgcccaaactcataacagtcagctatccaatccccaatcataggtttcacttgtgggccaagcggtaggtggctagagcttatccgacaattccttaggtggagttatacctaataactccatctacgctgacagttctggccaacagacttgccaaaccaacaaatcactaagatagcctagtgtttcattattcaacagactaggtacagcccacgatctcagggatgatttgaatagaaggagggctctcgacgaacaatatgttcaaccgaccactcagcccggtatccgcatccaggacccaactctaagagatcctgatgtgacacaggtcggcaagaggctgaaccagttcacccatctgtgcaagcacaattagatgaattgaaaaatatgtttcaaggcctggccagccaaaaactcactaatctcaagttggatcgagcatgcagatcacccttcactcccgagatcaacgttctagaactacccatcaagttcaagaggccgacctggaagatgtacacagggaaggaggatcccttgtcacatcttaagtattttgagatgcaaatggatttgcaaggggtacgaggagatgtgcggtgtagagtattccctgctacactttcagaagccgcacaacagtggtattttaagttaccaccaagaaggtttaattcctggaaagttttctcctcggagttccatgcacagttctcttcttctctccaactcctgttacatttagaagacctggtcgaagtgaagcaaagaccaggagagcctctgcgagcctacataagcagattcatgacagaagctacgaaagtagcaaggttaactgaagaagggaggctggccgcaatactagggggcatcgaagtacttggagaactgtggaaagacatcacaaaaagtggccccgtagactctatggcagattttctagactgagtagatgggttcatcaagcttgaagaggccattcaatgggaagacgtcgagcctaagctgggccaatcacatgccccctcagcaggagcgtctgcttagaatccctaataccctagtagttcaaattcgagtggcaaaagatctaataacaacgacagacaaggcaatggaaagaagggaaagttcacaggcaaagccaaacaaacccctagagaaaatccttccaagttcactgctttctctgtcttaactgacgacttagttaagacaatctacatggcgactcagtttgtagtcccgtacaaaaaacctgc

SEQ ID NO: 41470 - DNA, 1203 bp, Cannabis sativa
atagtcattctaccaaaatggtgtaaaggctattccattggaatgacattcaaatactattatatgcaaccaaacaaatgaatggaatgaagattattttatttccattctattctatttcattatcttcaatcaaacgccacctaaatgttttttaaattataaattttaaaatgctgccagttattaagattctattataataataatattataatttaatttattataatcataaatatatgtataaatatattatataaaaatattattttttatatatttttaattatattttttcgtaatataaatttatatgcatttgattataattatttaaaatatttttaaattatatttacttcttaaaaaattgtagtttgaaagaaatttaggttaatattttcttttacataaaacttaggttaatattgtttgttaataatataaatataaaatattttgccaaacaaaataaaaataagaaatttaaatattatttttgttaaataattttttaatatataataaataattaaatatatttagtaaaaataatttattatgaagtcttttagctataattttttcataaaattttcaataagatgttttttaactgcttactaaatatttttttatcacaattttttcttttttaaaaaaaaaaataacttttaactttttaaaaaactgtaacaaacaggcatgaacacaaacatattttgagccaattgatattccttaatgtcccaaaaagaaagaatattaattgtcatgaatgaataaagtcttactaccataacaatagcatggtggtgtatcaataccattattaaaaataaaaataaacataaaaaacaaaacatagcaaataaaaataacacaccaagaggattaataccagtaaattaagatctgatcccaagctaatgagcaactcaaatcttttagacacacctctaaagaaagaagatggagaaaaaaaagaacactcacacaaaaagaaagaagatggagacaaaaaagaacactcagacaaaaagatagcaacaattccagtgaaaataaaaatagtgtggaaatcaataagacttaactagaaccaccctctaaggccaacgaaccttggccaggcaaaaaaaatcgagcagagactatgaacttctaaaaaaaacattagagagaaacccaagcacaaaa

SEQ ID NO: 41471 - DNA, 1552 bp, Cannabis sativa
acttattctctcaaaattacgaaaatacccctaatacaccaacaagctcttaaaatgcaatttatcaatttaattccatatattaaattatatactaatatacttcctcattatacataattaaactagttagggttgctaatttggtttcataaacctcatacaacctagctcctagttaacatgggcgctaggtctttattctggctcctagatggctgtatttttttcctaaaagcaaatgtatcttaattgttgatgaaaacagagaatatgcctaaagacttcatcataatcatctttaaatatggcccaggttaaaaatatgccaacctaggtgccaatgacaaagcccaacaacaacctgggccctacgccaccagtttggcctccaagttgatgcatttctttcccgaaagcacctattttctcatttttgatgaagacaaagaaaattcatggggaacatttttagaaaataaattagttggaagcaccataggctatgtcaacttgggtgctaggtgcatcataaggttaacattgaggctgggtgcccagttgcgtccagtggaatgtgttcctattttgattctggtgcctcaagaatgttcatggaaggtcttattcatgtgtaagtacaaattttgagccatttgcactaagatggacttgaaaattgaaacttagcctagggtgtcaacttaggtgcagaattaaggagccttcctaaagttgaatactatgactcggggtacttaactctgcgaatgttttccttcttgctacgtgtcaaatattaatgtccatgtcaccagagtcaatttttgagtaaacactactctattgtagttaatatattttttttttaaaaaaaaatgagatatatcaaaaataaagaatatttaaattgtgtagaggaaaaatgaaagaattgacgattagcataatgttaaattttgacacaaaattaaaaaaatactgttacaaaagggatttttttgtcggttaacgtgtttggtcaaacttgttcaccaacgcaaaagtcaagctacacttttttacttcaattatctaccaaaataaataattattaattaggatctgttatctataagatgctaaaacataaactaaagcaaaagataaaatataaaaaaaaatatgtatacaatattagtgtcggtctacaactgacgcaaaaagccattatacacactattagcgtcagtgcacaatcgattcaaaaaggaatgaaaaaaaattagttatgggcttcagcccattttataaaaatctaaccctaaactataaatctaacttctaacccaaattttcttctcagctgcccctctctcatttatatctctctaacacctaattctctctctttacccatcatcaccttaatcttcttccttacttcatagcccaaccaaaacaatgaacctaccaaacgctaactgtctctttctcatttttttacaagtagcattgaagcatcatcgtcagccatcatggagcacgagaccatctctctctctctctctct

SEQ ID NO: 41472 - DNA, 1108 bp, Cannabis sativa
tgaaatagtaaaaattgtaaaataacaagggtgtcgtttctctataataacttcatctattattatgtcatggtcattgtatggtgagattttaaagtaagaatcacctacgatttgaggaaaatccataatagctttgagtgtttaatttaaaagaaaggaatagagaatagagaatagagattagagattagaaatatttctgtttttataaaaaaaaaaaaaaaagtaccagtttaatcttatatatatcctattaatattattattgagagtatctatatcatattatttagatataagatgacaggccactagtttttttttttaaaataagaatagatatataaaataaaaaattgatggttaatttacagccactcaacactacattttcccactacatatataagtttagtatagcttcagaactaataaaaatattttccaatttttcatacagattacttgttataatttggtgagttttaatgtaatgatggtattgtggcctcttcatatattattatttgtttattcttaaaagaattcgtaattaaagaaatactttgattgcaaaaatttaactttagtttttttttttactttcagttggactatgcagccaggattgaagaggcaatgtttggatttgataattttatttatttttttgttgtattgttcataccaatttttgagtttgtagtcatattttattaattataatataattatttttgtgtatttttttattaatttagatgtatttatattacttaaattaatttgtaatttaaattgatattatacccatttaaattcttaatatattatattcaattaaattaaatattattttttaaaaaaaaatatttaatatagtggcactttctgtgtgtcactatatctccaaaaatattaataaaaaagaaaaaaaaaaaagaaagaaagatatagtgaacttcatgtgtgtgactgttaccttttcagtctgacaaaatctaactctataggcctatagtgacacgcagaaaatgaatgcaaaaggtttcagtaacacgtctgaagtgtcactaaaaattgtctttccagtcaccttcattag

SEQ ID NO: 41473 - DNA, 1905 bp, Cannabis sativa
tcataaagtagtcgtcactaggctcattaatcacagcgtagtagctccagaaggggggttacgtcgtcagactttaatattaatggcagtttcaatacgccttctcccatgcggcattaaatgcgaggtgactgttcagatagggtttgatgtctcccgaaggtgctgtgttatagccttgctctccgggagtatgtgaaatcctcatgccttctccgggaggcatgttaagtgttgacccttttaattaaggagacttagtcgaatcatctcaaagttttgcttcttcaatcaacgtgtcatggtccggttggtccacgtattttgcacaaaataaggggcaacatttaccccccaagccttgtttggtagaaagcaaacgaggcttgcttaggtgcctccagttgccttattagcgtcctggcgcgtgccctgagcgcgtggggatgcatttatcaccaccattactgcagttattcgctttttgcagacaactattcgtttcctatccatttaattatacggcgcattaaagggggtgtcagtcgagtactcaaacgtttcctaccgccttgataaatgcttgtcccaaccgttggatctgtggaatgcgaatcgattgttatcccggccatacgatgatggttgatcacaactgtcttacaccctttctggcctataaaagccatccttctcatttcatttggttactttcaccatttcaccaaatttttcagagcttttacagagaggaaaaattttaggcgccatagattacttgcttctcttccttcgcccttgtcagtcttccctttaccggcgatcaacaccaacccccagccttcaatcttcatgtaagttcttagtgcactttacactcgtttactgtttgtttatattgcatgtttacgatttctgggttgaatgtcgaacttctggggatgagtttgcctaagtttgctgtacaacgcataaaatctccttttcttgtgccttgattgttttttttactacgttttcttttgggactcgcctttttctatcgtaatcacgcctttagggcttagagtgactctgtcttcttttcctttttctctttctttctacaatgtcactgcctttgggatttttgcacccgatgtttgccaaggatagtctcttggggtttccttatttggcaagcatccggagggggcctctttccagcggtttaggggacccccattccctttttacacattagggtttggtttggggcctaactgctggattttcttaattttttcaaaaccaaaatgtctgcttccgcatctaaatccaagtcttccaagaagggggcagctcaactggccaccctggaagaggtcatgaagggtcccgtggcccaggaaaatttcaagtctcgtgccaacagctgggaggcagacgagctccactccacgctgacttgtgcccaccatctcgagaagatcgtaacgctggcaggcatcaagccgtcagcctccgggaccttccatcgcctgcctcgagatgaggagacccccaatcataactacggggggtttggagcctggagccggacccatctgatgtccggggctatgctccctctttaagattattttgttaatttcttagtttttgttggcctcgcgccgtaccaattaattcctcaagcataccacctactttcaggcataattattttgtacgctgctcgaagctgtggttcacccagtccggccgaaattttatacttttatgaactcgtttccatccccaagaaggggaacaagtttaaagatgttttttattgacttcggtcccatcctttgaatgagggcccagtcccttataatttccaaaaacatgtgaaggagtaccgccaccgcttcttcttttctt

SEQ ID NO: 41474 - DNA, 1695 bp, Cannabis sativa
ttataatagtttactgaaatatcattacaagaagctaagtgttttaaagataaaatacactaaatggtaaaatggtaaatttgtccttgctcaatataaagaggatcatttgattatttagattggaacaatagataattatagtgtaactatatttggtatatagagcattctatgtaataaagagtgcaattctaaatctatactgaagtgaagttaggaggaattgatatgttaggatatttactaagtaaatttaagaactaattagtgagagcttgatttcataggcacgtcgtcctcacattatttaggataatactaccttgtagactcaattaattgatttttaagtccattatattttcctaccccatcgaatcaaacctaaccctattaagagcatatataagaaatgagatggagctttaattaatgagattattaaccataattttgagtgattcagtaaaagctgtattttccttatagaattcaaaattcgtagtctctcaaacactttcttatattcagccctatagtctattgagtaccagcccactctattcatggtggtactcagatctgtgtggaagactttttagtttgttgttgtttgagttaaggaaagcaatccaagttcatcacttcgttatacccttctacataaagggaatcaagggttacagtgattgaatgaaatgagtcaattattttcgttgccatcaatgtaaggaatcctaaactttatatgtgctacacgtcattttatgatttttatattttaggatgttagattatttatgtaataatcaaacattacatgttagcaaattaaaatccttggtactaaattaggtatgcagcggaagagtttcgtattatttgattattattgtaccatatcccaatggatctccacatgcgtgtaaattaaatcaaaacaataaatagtaagtttagagttaatacattttgatgaatatcagggtatcctcaaaacttctcgtatgttgtatcccttaatccagataatgcaatttgaactcccactagtgtcttccaaatcgtttcactggacacaaggaatggtgtgggctattaggataaagtgtataggtttgttctttttgagttctcaacacatgatcaagaacagatgagaaaaaaattctttctttcttctctctcttaatttcgaaaattaatatgtcagggaagtgttctaatttttcatatcaagcttctatttatagtagttaaaaaacctctaattaaatcatattaaattatttaaataaataaatatctataactgaatttggttactgatatttatgagagaatctctcaactacttgagagaacatctcaacaaccttgaaatatctataaccacttttcaaattagatatttacctaattgaattaattaaataattaattagcccaaaagacaaactctatagggacatgatatatgctagccgcctacccttgttgtttaggacaaggatgccttgtgtcctgacaacttttgtcttaataatttttatcttttccctatttaattaatttgagaaagtatttatttattacaaaaataaatatttactatttttccaattcaaaatagatttttgcgaatgatattatacacctctttatcacaatccttggcagtgttttaaggtg

SEQ ID NO: 41475 - DNA, 1195 bp, Cannabis sativa
  modified_base (276)..(283): a, c, t, g, unknown or other
gttcacatcattaagtcaatctcacacaagtgtaaagttgacttgggaggcaaatgtttataccaagcgtagccctgatgatgtggacatcaatgtttgacacgtggcaagaaagttgacatctcagagttgagtaggttgactctaggaactccaggatggaagttcagacttcaataacttgaatcaaactcactatcttttagtattctgtatcataaagacatggagtgtaactccctaaataattaggcacgctacccaataatcttatgnnnnnnnnatcccctaattgggattactagtaaaattagcgtggaaattaaacttttattacaaacaaaatgaaaataaatttgtaatactgtttcactttataaaataaaagatacaattaccagctggacaagagatggtgatgacaacacagcagtattccatgcaagtctcaaagccagaaacaaccaaaatagaatcctatctattgtggatgcacatggcactagagtagatgacccaaacacgattactgaggtattcctgggttactatcaacaattacttggtacgaagatgatgaatagaaggaaagtaataggccaagttctcaataaagggcctacagtctcgatgcaacaaagtctagcctttgtggctcccattacagatgaagagatcaagaatgctatgtttgctattcctggttccaaagcaccatgccctgatggctactctagctttttctttcaagataactgggatttacttggaagtgatgtctgtgaagcagtgaggtccttcctccattctagtaagatcctcaaggagatcaattctacggctctcacaatcatccctaaagtgaaatgtcccaatacaccaagcgattataggccaattgcatccttcctacttttgtggctcaaaaccaagggggatttgtcaaaggaagattcattgcccacaatatcatgatatgccaagacttggtgaggcactatgggaggaaatcatcaaaggctaattacttgatcaaacttgacttgcaaaagcttatgacacaatagaatgggatttcatttaggaggtgctaaggggtctactttttcctgaaaagttcattactcttgtaatgaattgtgtcaaaactccaaaattctctcttttcttcaatggatctcttcatggattcttt

SEQ ID NO: 41476 - DNA, 1616 bp, Cannabis sativa
  modified_base (1549)..(1562): a, c, t, g, unknown or other
tagttccttacatttatagttttcagaattcttttcttttaggcttgtgtcggttatgcttacaccatggacaattagcacaagaaatattttgaacttgtagagaaacttttagttacgaagaagcaagcccctaatgcaaagagtaaggtggctgacttagaggaagctatcaccaacttggagagtagtgtttctaaactttaaggagtaattaataaagctaaggctcaagaggacagtttgaagaaagaccttatcgtttctcaaaaaaagacttccaaagttgaagactctcttcgtcaatcgcttgatgagaagacccttagcattcctaagctagaaggtcaagttcagtcttttgagagccaagtgacagactaagagtagaaagtggatgaagatattgccttctatgatggcatatgctttgatgccatctactatgcttggttggccaatggaggagcatggccattcaattgggatgctttcctttccatcgtgacaggccagttctctattgctggtactttattgactgttttaattgattctggtgcgacacattcctatatttcaagttgagtgattagaaatttgcatagacctagtgatattttactgagtggttttagtactttgctgcctactagagaactggttatttctagcaaaggttaggtcccttccagtgtttgttgaaggaagagatcagttgatttgatttaattgaatctagaggattttgatgttatataggggatagactggcttgcaaagtgtaatgcaactatcgattgtaaaagaaatatggtaactttagaaaccagagggtgcggacccatttgtgtttgtgggcaaggttcaaggatcccaaataccattaatctcggtggttaaggcaagatattttttatgggatggatgtatcagtttcctagctagtgtggtggatactacgaaggaaacaccaacgggaccggaacaagttctagtggttcgagaaacgttggatgtctttctagaggagttgccaaggtttcccctaaaacaggagattgattttgaaattgatctaataccgggggcagagcctgtaacaagttctagtggcacctacataattggaagagttgaaagttcaattacagggaatgttggtgttacgccctaatgctaaggcacgctacaatgctttttcaattatagtgctatctttgctaatcaaagaattttctcaaaaaacgtgtcaaattgaaacttttacattaaatattaaactttatgatttacaaaattatttacaaacatcgggatcccgtttttaaacttttatacaaaatatgtcaaaatacataacgggtcgtacaacgacaacaaaataatatccccagatgtctcgagaccgaacactccaggtcgcgctgccacgacatgtacaacctcatcccagcttaggttcactcctgttcagcttttgcctttcctttacctacacatgaaagcaaaactgtgaatcgaatcgacagactcagtaagaaaagcnnnnnnnnnnnnnnataataccgacttgtatctaggtgcccatacacctatttacaaggcttaacaga

SEQ ID NO: 41477 - DNA, 1189 bp, Cannabis sativa
atttactgatatcgtgatgcttaataaataaatctgtgaaattatgtacactacttaataaagaagttagtgtcactaaatatgcttaaaaaattaaattaacaaactatcattatcattaagcaattaaacttaaaacacaataatcacaaccagaaatgaactacatactttcaattctatcattctcgagaatattacaatacataattgaaagcataaacatccaataataaaaattattggcccacaaaacaaatcaagtagttcgtaacataaattatatgaatataatctcaaataatagaataggaaactctcactaacccaaaagaacaaaagattataaaatgtgcatataaacaacatgtttattaaacaaaacgacacttaattaatcatttggttagatgatcagcaaacatcaacttggtcttgcaatatgctatcacaatgtctcctttcttgaccaagtctctaatagtggaatattttatttccatatgtttggaagcagtactaatctcattgttctttgaaaataaaataatagtattattatcacaatagattagtataggagcaggaatagttacaactagtcgtatctctaaaatcgaattctttaactacaaagcttgcaaagataccccatatcatgcgacaaactcaacatacatagtagatgatgtgattaaagtttgtttaacacaagaaatagctgcactagccaaactaaaaatatagtcagaagtcgactttaaatcatctacacaaccactaaaatctgaataactaacaacttaaagattgtcgacatgcttatacacaagcataaaactatttgttctttgcaaatatctcataaatttcttggctgcaagacaatgatcatagccaggatcagattaatattagggttagcactttttaagcactaattctcgcccagactaaggactccaaaatttacacttactaaattttgggggtcaacaaaaaacaagagagaagtagagagtaaaattaggagagcaagatagtaaaggagaattaataaagggagaagagagtcacaaatttataggagagaaaagcagtgagagaggaagggggtgtggtgtttagtacctaggcccgacatcttgatgtggcagtagcgacatggtcgaaaggtgcttggtggttg

SEQ ID NO: 41478 - DNA, 1134 bp, Cannabis sativa
  modified_base (679)..(680): a, c, t, g, unknown or other
ttatctcaaaagggagtgagtcacaagaatacaaggggcagttaccccggtaaagaaattgtgtacaagaattgtgacatgaatagatatcgactcactatggttgccatatcagactgtcgcgtggaaagctggacgttaaccagtagcagtcaaagacaaaactaaaaccaagattactttacctgaaaccccaggatatatcagggagtgaccctggatattgaaacaattgtgtgagtatcttagggattgaccctaaacataaaaacttttttatcaaaaccagatgctcctgaaagattgataaaataagcaattgaactggggaagttcttttgatattaatgattgtaaaccacattactgatgaaatattttgaatctcagttgtgaatatcatttcttttaaacaagtaattataaagcgtaaactctttagaattacatgaggggaatatatgtgtgattaacagaaattgatctggaaatacatagtacaatgcaaacccatcgtttcaaaaaaataaattttttttgaaaactttttaaaagggtctcgaccaaactttttttacgaaagaggggtaaaactattataactctttgaccgaactttttttgacggaagaggggtcgaatcgttataacaccttgatcaaaccattctgacgagaannggatcaaacaactataattttttattcataatctatctgacgagaaaggaaaattaaaagttatgattagcgcataaagctgaatactaacggctcgcgctaatggtaactattaaacgagacattcaaatgtcttaaaaaaaatacttaaacccaacacgtgggtagaaaatttaattactcatgtaagcaatgaaaatatatactaaatggcaagttcattaaaaatatatttgaattttcttaaaataaggtcatttctgatgatcgcgaggtggaatcgatgatgactcgcagattgaggaacaggcagataagttgctcgcacgtaaagtaggaaattaagtacttaaaaagttggaggaaaatacaagcaatagaaacccctaataaactttatgcatgtgattgtttatattattaataaaacgcaagcaaacattcccatattaaa

SEQ ID NO: 41479 - DNA, 1078 bp, Cannabis sativa
cattaaaagaggggtcattttaatcgtcctaccatcattgccacgcctcctaagaaaggcacccccgacatgcatgtgttgtcaacaattacattaaaggcgttgtatgtgtgtcacgctcgtagtaccttcattttatggcctttttacttggtgacaactcacgaggtgcatcgacgatcccaacagttaccacgtgtcaagaacttatctccaagaaattaaagaaaactgcaagctctcggacctcatagagtcccgaaagcttgggggtaaatattattcgtatttttaagcacgtcacacgtggcatttaaagaaaggaattagcctcataatttctctaattaaaatcctccattacaatcctatctcagagaaacctcgtggatccaagagcaagcaaagattaaaaaatacatggaagtccacttcgtcctgtcctagcttcccggacgcggaaggtgcttagtctctctcggacccggagggtctaaatatggaagccttcctagctgatatccggatgcgtactcgaatggtgtaatacagatgtcgaccgcccaggagtgtcgtggacgtttacctttgatacaagccaggtcaccaagtgactgttatactttttctgacgcaaaatcaaatattgtcccatgtgtccaagcatggtagtgtgcacacctccaccactttttaaatagacggatattatagacctctacttttaaaggtgaaagctttgggcgatatgtggcctctacttttaaatgctaaatttttgaacaacacgtgtccatatagtacaaatggtcaccgttgtcctgctgcagcacgcacggacacaatggtttccaacagacccaacattgagctctcacttcacatgtaatttaccctattaatgaacttttagcagaaaccctaagcggtttatggacatgtccatacctgtcacttagcctataaatcaaaaatgctctaaaaggctaatagactgactcgtggactaaagttaattaatacctaaaccacataaaaaaaatttcatctcttcatttttacattttattattttttt

SEQ ID NO: 41480 - DNA, 1144 bp, Cannabis sativa
acatcaagttacaccctcagttttgagctgcattcttagcagcatactcacaagttgagccaaaaacgtatgctaaggcatcactttttcagcactggcttcaggctataatgaaacccaagctctcgaaaaaaataaaacttgggtcatcaccaaactccccctggccaaaaggccattgggtgcaaatagatttataaagtcaaatataaccaacatggtgatgttgatagatttaaagctcgttttgtcgccaaaggtttcaaccaaaggcaaggcattgatttctctcaaacttatgctccagttgccaagttcaatactttcaaaatctttttggctcttgcaacaatccacaattggcatatccaccaattagacataaataatgctttccttcatgggatctccatgaacaagtttatatgcaaatccccccgggatataaagcccctcccaactttgtttgtaaactaaaccagaacatatatggcctcaaataagcttctcaacaatggtactctaaactcagtaccacactcactataacgatggctttaaacaatcacattctgacaactcattattcatcaaacactcacagtcagacttcattgccattctgatatatgtgaatgacataatcgtggcaagcaataacacaactaacatcattcattttactaattctcttgactaaaaattcagactaaaagaccttggtaaacttcattttttccttggccttgaaatcggtcgcaccaaagaaggcatctcaatttctcaaagacccttccccattcaattactccatgacataggttacatgggaaccaaactcacttccacacctatggagacaaatttaaaactcagcaaagaaaaagaaactcaactcactgacccgaatgcatatagaagtcttattggaaaattaatctacctaactattactaggtcggatatcacttatgcagtcattcacctcagtcagttcttatcatgtacccgagttcctcacctctaagctgctcatagacttttataatatctgaaaaagacaccaggccagggcatttttttccctacaaattcctgccccaacatcactgcttttgcagaaactagcctatctcctaccaat

SEQ ID NO: 41481 - DNA, 900 bp, Cannabis sativa
tttttttttcaatatatactttgatataaacaaattttttaattacaataatatcatccacatcataaaaaaaatacattaattaattgtgttcatatacaaaacatagtcacccagacgagctcatcaagattgttttgattcattaccgccaaacacatatcttccatccccacacgaatatcgcaactcagtttaatccaatcaaaagagcgagaggaccacacctccaacaagccatgagaagaagaaggaatgtgcgatattagtgatttgtaagctttgcttttggctgatacagcagtgtgtaattgagttggtagtttaatgaaccttttgttaaaaaatgttcttgattaagaaataagtataaaataacgttatttttgtaaataatttaggtcaaggtaagatcgcattattgttacacacgttagagaaaattaaattttatatactttattttctgtgttaatttttatctatatttctatattatttaagatatacatatttttttagatgatatcctcactataccctttaaattaatataaattatgtgctaaaattaagtgaaggatgtgagtatattaggcaacctacatacaaaaatagatacattgaaatataatataaaaatatttttaactaatgaataaaaaaagaagtatttctcaacttattttcttaataaatagggattttttcaataatatacataaatagaaaattatttacaatactaaccttacaaaaacaattcacaatctttaacgtgccatgtcaccaaagaatacccatctttaactattagtgcctgacaataaaaaacctagaaacaagtaaatatttaggcttttttttgtttaatttagaaaccattagatgtctttttcc

SEQ ID NO: 41482 - DNA, 1620 bp, Cannabis sativa
tatgtgtttatttcactgttttagaattcatattaggatgttaatgaaacatacttggtattaaatctagatcctggtaaaatatttccaacattatggtggacccgagtaagattgaatcagtgaagaattggccgaggccaaaatatcagtgaatgaagtttgaagttttctcagtttagcagggtattatcgacgttttgtcaagggattctctaagatctctatgccactgaacgagttaactaagaaaaatcagcgattcgtgtggtcagacaaatgtgaatcaagttttcaggagttggagcaacaatttataacagctccagtgttagctttgccatcagattaagaaaaatttgttgtttactatgatacatctagggatgtgttctgatgcaagctgacaaaagttataggctatgcctctcgtcaattgaaagattatgagcagcgctatccaacacaagatttagagcttgctgctgtggtatttgctctaaaaatacggcgacactatctttatggtgaaaaatgcgagatttacactgatcataaaagtcttaagtactttttcacccaaaaagatttaaatatgaggcagagacggtgtctggaattggttaaagaatatgactgtgagattctgtatcaccccagaaaagctaatgttgtggatgatgcactaagtagaagaggtcctgagcaggttttcaccactattataatatcttctcaattggcttcagagatagttaatgcagggattgagtttgtagttggaaaattgcagaacttaacactccaatctgacttattaaagagaatcaaaaaggcgcagttagaagatcctgagctagtcaagattcaagatgaggtaatggctggccgacctaaagacttttcaatctcaaataatgaaatgttactgtataaagctcgggtttgtgttcctagtgttgatgagttaaagaaagaaatccttgatgaagcgcacaccgcaccttattcactgcattcaggaaccaacaaaatgtctcaggatctaaaaccctacttctggtggtatgtgatgaagagagatgtaatagattacgtgtccaagtgcttaacctgccagaaaatcaaagctgaacatcaaaagccggtagggttattgcaaccattagcccttccttagttgatgtgggaggacattgcaatggatttcgtcaaaggtttgcttagaaccataggaatgtgtgactcagtatgggtcatagtggacggattcacaaaatcacctcactttctggtagtgaaagttacttatgcagtggatcagtacgttgaattgtatgtaaaggtgatagtttgtctccacaaacctcctaaatccatcatttcagacagagatccaaagtttacatcaaagttttgggtgagtcttcagagagctatgggtacaaatttgaagtttagaacaactttccactctcaaactgatgagcaatcagaaagaacagttcaaatactgtaagatttactatgagcctgtgtcatgtactttgagggttcatggagtaagtacttgcctctaattgaattctcctacagcaataactaccagagtacaatagg

SEQ ID NO: 41483 - DNA, 1529 bp, Cannabis sativa
atgtaataactttatgattactggtttgatcaaaactagtatttacagcaccaactaagggtgttcgtagtgcgggtagtgcagattttgattattttttcaaactaactaggtacatgcagtttttttaatttttcaaattacatccgcaccgcaaaactaaaaaactgcaaacactacaccgcaaaaaatggtgcagtgcgatttctgaagtttgaactgtcactaaataattaaattatcacaaatacaataaaacttgagcaacacctatcaaaaatatcataaggcttgaaaataaatattaaaaaaaactttcaagtttcaacaatacaataattagtgggctttgggctgggtcttcacatattggaccaaataaatataaaaattgatatttttataatatacggtgcggtgcggtttgaatagtatattaacaattcaaaactgcaaatcgcaccgtaccgcaccgtgcagtttaagaaaaattcaaactatgactgcaccacaaaaaatttcaaatcgtatttttttgtggtgcggtcagtttcagtagtttgatgaacaacgctaacaacaacaaacaattgtataaataaataatgtagaaagtaaatattatacaagtaaatttagtcaatgaggcctcgcccaaaaaaataacattaattagtaatatatacaagattacaaaaaccgaattgacttatactttgaaaaccttgttgttatttgtgttttcggcaaaagatacatggatttcaagtcagcaccaaaagtccactagtagaagataatttgggccaaacccaagtcatataagaccttccgagaatgcacctcaacgcaccgactagataagcttccgccaatgacaggctgtgtccagaagcagctccaatatcatggtgcttgagggccaaacagcatgatcctagaagacaagtatagttttcccttttattcacgcccatagaataatgaatcaaacactgcttagatcttaacaaaagatcatatcaatctaaaaagtgaaactaccgaaaatatagatcaagcaattaattcatgattaaatgcccacaatcatatccaatctatctagttagcagatcaactccttcataggctcccaaattatgtcttttcatgaaactccctattaaagggaaaaaaaaaagaaactaagtttaattcccttaacactataaatactcaacaaatcgttcgaattaagggttaattctcttgcaatatttgctcatgtagaaagagagaacttatgtgcattgtattcccaaaagtttttccatcttaagatatcaactcggggattaaggttcgttgatgccccaaccatgtaaaaattgtatattattcttatttgtattattaaattatttattcttcaactttaattttttaaagaccgcatatgaataatacgttgaattatttaataattaaagtttatgtatgagattttattattatcaataatattatgattatgggaatttatttga

SEQ ID NO: 41484 - DNA, 1034 bp, Cannabis sativa
gaatttaagttcaatttattttctgttaatgcttatcttgaatattgtcataataaactcacatttacttttactcaatgtttgattcaggatccctccttaacttctacggttgggatagctaagaatcttggacaactcgatcataagcggctatatttgggctcactatccctaatcacaagtgactcttttgttcgactttttggatcggtatttttgaatttttggtggctctttttttttatttttgcttactatccccgaatcacaagtggcattttttgacttttggctcttggatcagttttgttttagatttttcatggctctttttttttttctttacatcgatcagtttattttttgttggggttggatagtcattagaggattttttttgtttgtttttcgacactaataccatgttagaatttgggaataagatgaagggggttccatctcaaaactaattggtttggggaggagtaatctattcctcttatatattctattatctttccacacattaacaatgtgtgactctctaacatatatcattgtatttcgaattgctcttgagttttcttcatgataattcgtggtccagggtgattgagagtatgcctactcatgtcaaaacagtacctagcatagtgtgaaaattgtgcctaaagaaattgaaggagagaagatccaggttcagatcttataatgctctgcgacagaaagaaataaagagttagagatctaaatggaatgagtcaatattatttcgctgccatcaatgtaagaatttcttaaactcttatgtgtttatttcactgttttaaaaaatttatatttagggtgttagattatagaattataattaaatatacatattattaaatttaaatcctaataaaataaattctgacaactaattctttaaaaatattaattttacacatatacacactataattaataaaaaaatatattttttaagggggcagccatccactatgggctctatgtatgtaagtccacct

SEQ ID NO: 41485 - DNA, 2910 bp, Cannabis sativa
tggacgaactaaagagtatgttccaaggcatggccggtcagaggaacaacgatctcgagttggactgagcacgtggaacccctttctcctcggagattaatatccaggagttgccccacaagtttaagatgcgacctagaagatctatactagaaaggaagatcctttgtcccagctcaagtatttcgagatgcaaatggatctgtaaggagtacgaggagatgtatgttgcagaatttttcctgccaccccctcggaagccgccgagcaatggtatttcaagttggcacccagaaagttcaagtcatggaacgctttctcctcggagttccatgcacaattctcctcctcttgccaacttccatttcacctaggagatcttgtcgaagtaaagcaaagaccaggcgagcctctctgagcctacatcaatagattcatgacggaggcaactaaggtttcatgggtactcgaggacggaaagttgtccgcgatagtagggggcattgaagtccttggtgagctctagaaagacataacgaagaacagaccagtagactcgatgagtaattttcttgactgtgcagcaggctttatcaaacttgaagaagctattcaacgaacagaaggtgagcaaaaacctggtaagtcaaaagctccttcaactgggacatccgtcgagctcccccattacccaagccattcaagctcgaatggtaaatggtccagcaataataacaggcaagggaatggaaagaatgggaagttcaccggcaagaccaaacaagcctcccgagagaatcctgccaagtatactacatttaccatcctgacggaggacatagaaagtgtttatatggccactcagtcactgaccccgtacaaaaagcccgcacccatgaaaaaagatgtcaacaagagagacatgactaagttttatcaatttcatggagactacggccatgacaccaatgaatgtaacaatctggagtgggaaattgaatttctgataatgaaaaataacccacacgtacagaagtatgtcaaggccgatcagaatcagaggggcaataacaaccaagacatactaccaccaccggtagatggacatctgcaagttatcattggaggaccgcacatagctggagattcatgcaaagctcgggagaggtatggcccaacagtacagcacgagcaagaagaagtaactttggctgtagaagagtggaagccgaaaatcccacgggcaggagagcccaccataacattcaatgacgaagatgttgtcaaaattaaatttctgcacaacgacccgtttgtcgtggaggtccaaatagcaaacaagatggtggccagaacaatgatagataatggagcctcttccaacatcttattgaagaacacatatgaaaaaatggggctccaactcaaagatctaaccccctgtcttttgcctgtatatggtttctccggccaaggagtcgcacctctagggcagatttgcctacccttcactgttggggaagctccaacgagcataactataatggcacaatttctagtattggacgttccatcagcctttaacgtcttgctaggccgaccagccttgtatgatttaaagattgttacgtaaatattccattcatgcctgaagtttccaacaatgaatggggtagggtgtctaagaggaaaccagcagattgctcagaaatgttataaccttgatgtggccaaggctaagaaggaagtatcgtccagccagagcacggataagggaaaaaagactttgaagtagggagcttcccaaggtagggatgaagatgtggatcctcgacttggggatgcaatcagcaatgttggacttgtggaagaactagaagagatcgagatcgatcctgatattctggctagaaagctaaaatttggaaaaggtttattgctcgaagtaaaatcagcattgataaaatttctgagagcaaatctggacgtttttgccttgtcacgtgaggatatggtcggaattgatccttctgtaatttcgcacgtcctaaatattgatccaaacttccgaccagtccaacaaaagcaaaggctattggacaaagaaagagcactagccttgaaggaagaggtagagaagctacgcaacaattatttcataattgaagctttctacccagcttgggttgctaatcccgtactggtacccaagcccaacaaaaaatggcgagtgtgtattgatttcaaagacctcaacaaagcaagccccaaagactgttttccacttcaaaggatcagcttgtggacgcaacagttgggcataaatattaagcttaatggacgcttattttgggtacaatcaaatcaaaatgcatccaccagaccaagaacatacaagtttttgaatagatatgggtctatattgctacaaagtcctgccatttggtctcaaaaatgctggagccacataccaaagattgtaaagaaaatgtttaaagaccagatcgggcgaaacatggaattatatttggatgacatgctcgtcaaatccagaaatgctgggggcacatatatgacctggacgaattcttcaaagtcctcatgaaatacaacatgaaactaaatcccttaaagtgctcctttggagtcagctcgggaaagtttctgggctttatagtcaatgcctaaagaattgaagccaatccagagaagattcaagccctcctagatatgaaatcaccgacaagaactaaagaagtataaagtttgagtggtcggattgccacactcaagaaatttgctacaaaattaagagacaagtgtgttccatttttcaatatcctgcgaggaaataagcaatttgagtggaaagaggaatgtgaaaaagcttttcaaaagctaaaaacgcaa

SEQ ID NO: 41486 - DNA, 2377 bp, Cannabis sativa
gttccaatattaccggacacaaaacatgcaaaattatgaaatttctataaatgatataaaaatgaattctaaattcaaataaatcatcataaattaataattcacaattaataaataatttctataattaaatcctaattatttgctaatttttaaataagcggtctttacatgaacataggtcatttacagagtatctaagagaatcaggcatagtctatagaaaaccttgtcctactactcattaacaaaatggtctagctgagagaaagcatagacacatagttgaaaatggtctaacacttcttgctcaagctaatcaacctttaaaattctgggatgaagctttttaggacatctgtttacattcataattgacttctcacccatgtgctttccctaaagtctcccatcaaagtattgtttagcattactccaaattacgccaaactcaaagtttttggttgcatctgttttcccaacatcaaaccctacaacaagcataagcttgagttcaggtcttttccctgcacttccattgggtacaaaaggctataagtgtcttggacctctggtagattatgcatgttgagaaatgtcatatttgatgagtccacatttcccaatcacactacagatacatcactatctccatctcagtcatctgtgtcaaatacatctagtaaaattccaactgtcagttgcgctgacactgttgaatttttgttcccacatgacactaccaatcatccccatgttactatttgtactaacttttctgtttatgagattagtgaagaacaatttttacaggatccaagttttgatgcttctccaaggattcatgctcctcctatagctgtgatttctcatgaatctcaactaccagtgttatctttaggtcctgtccccatctcatccactggccaagtcactaaatcaatacaaaccaatttttgtcatgcagcatcacctgctgctgtagcatcacctactgctttctccacaccagttgttacttctggattaccctcccagctaccatccaaggtatcgacacctctcatacctacttctggtaatacacacaacatgcgaactcgtggaaaaagtggcatcagaaagcctaaagcctatctagctactcaagttcccacatccctacaacaaggccttcaacatatacaatggaacaaagctatggctgaggaaatacttgccttaaaaaggaacaaaacacattcccttgtcaaactacctcctggtaggactgccattggatgtaaataggtatacataattaaagaaaactctgatggcaatgtcattaagttcaaagccagatcagttgccataggtttctgtcagcaacctggctttgactacacagaaacctttagctctattgtcaagcatgtcaccatcagagttattcttactcttgctttatctaaagactaggatatcaaacaagttgatgttaacaatgcatttttaaatggtgaattgtgagaacaagtttatatgttgcagcctcctagttttgaacaacctagttcatcagatcttgtatgcaagctacataaagccttatatggtttgaagcaagccccttgagcatggtttgagaagcttcatcattgtctgctgtcattggggttcgtttcctcaaattttgaccacatgcttttcattaggcacacccctctttcaatgacagtcattttggtgtatgttgatgatattatcatcacaagcagtgaccccaaactcatttcccattatacatttactctgaatgccaagttttctctgaaagatttggggcctcttcatttctttcttggcattgaggtgacaactaaatcaacaagtcctcatttgtctcaaactaaatatgttcgagatcttctccacaaagctgacatgactgaagccaaactattcaataccccaatgatcagtggtctcaaactctcagcttttgggtcaacctgttgataatcctcagcaatatagatccatagttggagctttacagtacctagtcatcaccagacctgaaatctcattcagagtcaacaaagtatgccaattcacggctaatcctctccaatctcactggcttgttgttaagagaatcctcagatacctaagtggcaccatggactatggcattcatcttagaaaactagaaacttatgagctcacagcattctatgatgcagattgggctacataaacagatgacaggcgccctacttctggctatgcaatcttttttagccgattgagtgggagcgctgatcattgatatggaaactataacttttataagtatttagaaatgaaacgatgatcttcttcgagcttggct

SEQ ID NO: 41487 - DNA, 1525 bp, Cannabis sativa
gatagggcaaacctcatgagaacatcatgttgatagatgaattgagacatatgcatagtgtcagagagttccacatcattatcaccagtgagatacccgaacaccttttgacgatcaaaatccacatcagttgtctcaatgctcataggcagattgagagcctcagccacatccttcacagtaaaggaataccagagggcctctttctcttttaaggaagaatatgacttggagaaacaatgggtctttttcctttgtccttctttggaactggagcaaggaaaacaactgggtctgcacttataggttcagcttcaggctcttcactttcagacccaggatcatcagcagagggctgttctttgggcacaaactcttcacttgaatcagacataccctctgattcgtgatcctcctcggtctcttcttcaagtttagaatctgatgatgagacggaagggggattttctttgagacttttggcctttgaagatgaagacaccacctttttccctttggagacacttttgggcagaaccacttcaggtttttgaggagtggataccttggaccttgtttgagaactcaccgtgggcataggcactattgctttcttgacatttggagcaccattcgaagaagtagacttcgacaatgtgtgattggatgaatgagattcatcatgatcaccaaatccaggagttggagtagcaatcgaagaagcaaagactggaggagaagcgagattgtaagtcgacttttgagcttgggtcttcgactttttggcagtggtcgtcggagccgacgatgatcaggaactccgatcactggagcaggtggcgcaggtggggtgatcagagaagcagaggcagagccaagagaaggcttcttggaaggttgagcattttttgtctttgccatttttctttgaaaccttagaaagaaaacgcactctcaaacttgaagaaggttagacttttgagaaagaaaaaatgagagaagtgaatagtggtgatcgtgggtaaatgagaagttgaacatatatagcatttaaaattaaatacccaatagtcagaaaaaatggaaaaaggaaagtaacttccttaccttagtcaccacgtgaggagaaaaaaaaaagaaatcaaaagatatttcaaaaattggtcaaacgttaccataaatggaaaaagaaaacaacatatccccacaaaatctaagaattaaaaatccaactaaattcgaaattgccaccaaaaagaaaatcaacaaaataattaattaaataaagacaagtttcctaaacaccacaaaaaaaaaaaaacaaatccccaaaaaataaaggaaacacaatagataaaatgcaataaaaacatgtttccataaatgaaaaaataaaagaaaaaatagccaaaaaatcaaaaaatgatgcccccctttttctttaattttttcaaaatatgccccccatattaatttgcaaagaacgaacaagacaacacataatgacacataaagcaccaatcaa

SEQ ID NO: 41488 - DNA, 1228 bp, Cannabis sativa
gcatgttcccaaaacgaagcaagcttccacctcttcgagcaaagccctcaaaactctgcctatcgaggcgggagtactagctcggagtacactggagaattggcgcagcttgttggcatcatttcaaggccttactccccaatgaatgggacttaatcaataatgggacctggagaagatgcttgaaaggagtgtcgctcatggccttacggtaaattcctctatccttatcttcttacttccttttttaacatccttcaaaaatagtcacgcatttttgtttgttggctttcaacaaactttcatctccttcgtcgcccaatggcggggcatgaaaaaaaggaagtacatggagagcgagattcagaacttgataggtcagcgcgaggctgtgactaagaagtggaatgatgccaagtcagagaacacttgcctaattaacgaagccgaggaggtgaagaggacccacaaggccaagcttgaagttgctaagaaagaggcaaaatataaggctgatgatgccagaaactctatgaggaacttaatgcaaccaaagtaatgctcgatggtaaagaagctaaaacgattgagcaatgcaatgttgtgggactacgttccatctaccaagccttaatggcaaatctaaggatgtatacgagtttcctgggaaagtccaagggggaagttcttgcttactgggataaggctgagaagaagaagaagaacaatccaagtctcctaccatgtaggcttggtttttattattttatttatctaggcaaatggccttaaggccgagacaatggttttccccttgtggcacttttagaaagacaaatttgcaaggttggatggccaactttgcttttattttatctttaatcgaatgcttcgtatttttgaacttaatatatgtgtttgtgttttcattcacaacttaaacaattatattttgatcagatttaaaatactttaagcctttccattgctcataatttcctttgatattatttaagtagttagtaatctactatgtgcgctagcagttattatctgctatgcttttgatttgcgagcagttattaattttactttgcctaaacagttataatctgttttaagcaaacttgaatatactcttaatgattcatcactttgtatatttttgattgcttatttgagcagttaagggttctattcatatattaggtttaagtatttttttcaa

SEQ ID NO: 41489 - DNA, 1233 bp, Cannabis sativa
  modified_base (170)..(197): a, c, t, g, unknown or other
gtttcatgagaaggagattcggactcagatcttggtgatactctgctacagaaaagatacaagtgttacagatctgagttgaagtagacaatatattctgctgcaaccactgtaaggttcctaatactttatatgtctttatttcataccgttttagaagttcatatttnnnnnnnnnnnnnnnnnnnnnnnnnnnnatctagatcctcgtaaaataattccaacagatacaagatttggtattagagtaggttgagtagttgtagcagcaggataaaacacaagagtttgtgtagaagaattagagtgatcatcagggaatagaaactcagttgtgtacatgtgtgttgatttacgaatagtagtagatggcaaaggttcactattcagaataggtgcagatgaggaattagagatagtagtcttgtacggaaactttgactcatcaaaaatgacatccctagagatgtacagtctaccaaatgcatctaagcatttgtatccattgtgattcaagctatatccaacaaaggtacatggagcagacctaaaatctagcttatgtttgttgtagggcctaatgttgggataacatagacatccaaaggttcttaagttggtatactcatgtttgatattgaacaacaactcaattggagactgttgttgtagaacaggtgttggtaatatattgtggagatacacttcgaatctgaatgcctcatcctaaaatttcaagggcattgaggcatgagcaaggagacttaggccatgttcaacaatttgcttatgttttctctcaacaagacaattttattcatgagtggtggggcagggatgtttatggagtatgcctacttgtttcaatggtttagtgaaggatctaaactccctccttctgtctgtagggttttatctttttttcctatttgaagtttagtttctgtttaaaaattttgaaaggttcttagggattcagacttgtttttgagtaggtatatccaagtgaatctagtgtaggcatcaacaaaattcatatagcatttgtaacaattgtgagagatggtgtgtgagggtccccaaagattagataaaattagttgtaatggcttagtgtatccagtttgagataattttaagaaaaggcattttgtgaattttgccaaagcaacaagcttcagaaatagaactagatcttttattactatgaaaaatattacaagagttcatgat

SEQ ID NO: 41490 - DNA, 1596 bp, Cannabis sativa
  modified_base (1318)..(1321): a, c, t, g, unknown or other
gaccatatccaactcactcatgaatgcatatgcaatgtcttcatcccatatattaaaactgcatttaggattaggccttggtactcttctacttctgtccctggttaattgataatcccccaagtcttcttgagtcccttcatcagtaataccagtgttgtcttcatcaagttccacctgaacctggtccccaggttccacctgaacctgatctccttgattctgttctggtgtgttcactatttgttccacctgaacagttccaggtctgacctcaatgttgctacctgcatggtcagtttcttttgtacctacactagggttagttgtaataggcaaacatggaaaaatatcttccttaaatattacatccctgctatttatagttttaaaacctctttgttcccaaacccaaagcctataacccttaactccttcaggatatcctagaagaacacattcatagacctaggttctaatttcccaataatttggtgtgcatatgctgcacacccaaatactctaagattagataagtcagggggtttaccagaccatttttcttcaagagttttgaatccatttgtactggatggacttctgttgattaaataaacagcagttaaagctgcttctccctaaaatccttgggatagccctgattgtaatagcaagcatctcactttgttgagaatggttctgttcattctctctgcaactccattttgttggggtgttattctaactgttctgtgtgtatctgtataccattttctttacaataatggttaaactcttcattacaaaattctaatccattgtcagtccttagagtttttaatttttcatttctcaaattttcaacaagtgttctccactgtgtaaatttagaaaaagcctcatttttatgttttaaaagaaatatccagacttttcttgaaaaatcatctacaatagatagaaaatagacacaacctccatgagtacttgttttctctggtccccacagatcagagtgaacatactctaaaattttctttgtgttgtgtgtgcctgtggaaaatttcagtctatgatgttttcaagaacacaacactcacaaaaattaagtttacgtaccttgtccttacctaggagttcctgttcactcattagttgcaaacccttctcactgatatgccctagccttttgtgccaagtcatggcatttgattcatcactgttgctgtgtgcagtgaaattacacggaaccactggtgtaccatttagatagtataggcctccttctttatgtcctttcatgatagttagggctccnnnnctaattttcatttgtccagcttcaatcttgcttacaattcctaggtcatctagaacacttagtgaaattaggttcctggctaggttaagaacatatctaacttcacttagggttctgatcatgctatcatacatcttgaaattaatagaaccagatccttgtatatcacaggtttggttgtttccaagtataactcctccaccattagatttcctgaaatcaaacataaaattcttattgttagtcatgtggaaagtgcaaccagagtcaaggat

SEQ ID NO: 41491 - DNA, 1578 bp, Cannabis sativa
  modified_base (393)..(394): a, c, t, g, unknown or other
agagagagagagagagagatgtattttttggtttgttagctttttggtattatttgtataaattagttaagagtctaaaatttgataatgagtaaacttttaagcaagattagtgatgtttattttaattaattaaactatgtttggtaggagggagaagtggagggatgaaaaggagagcagggagagagttgggaggagataacaatctttttgtttggcaagaggattgaatgagagaaatgagaagggttgttcatcaaactactcaaccgctcaaaccgcccacaccgcagaaaaatgcagtttgaaattttttacgctgtggtcgcagtttgaatttttttctaaaccgcacggtgcgatgcggtttgcgattttgaattgttaatnngcggttcaaaccgcaccgcactgcacattataaaaacatcaatttttataaatatttaggtccaatatgtgaatgtccagcccaaagccccctaattattatattattgaaacttaattttttttcatatttatttttaagtcttataatatttttgacaagtattgctcaagctttgttgtatttgtgaaagttcaattatttggtgatagtccaaaccgcagaaactacaaaaaccgcactattttttgcggtacggtttctggggtttttttagtttcacagtgtgggtgcaatttaaaaaattggaaaaactgcatgtgcgagttgatttgaaaaaatagtcaaaaatcacatcacctgcactgcaaacacccctaaaaatgagaggtgagaagatagcaattattgtaactctccatcttcaattattttaaattacaaaaatacccacaacaaatattattaaaaataattacaatgatgaaataataactttataaattagtaactatctatccttcttctatcacttcattctttccaccaaacatattattctcttctcccacttaaggaatctgcaaatgtattgtcaatttatacctaattgaagcaataatttcttatcatatacaatagctatcaaaaaaaaaataatctcatacaacaaagtgtcaatgaagtccgtgaataattgcttaagatttgtttaaaaaagaaaagaataagagtcccctcttttatatccttaagacatttttatttatagtttaattttgtgataatttattttatgttaaatttttaaataaacttacacaatgtgagtaatattcagtgcaacaagttttctttagttgaaagaaactaagttcattaagacaaaggtaaaaaaaaaatagaaattacaagggaaatttctcccccataaaacaaatcagcattcgctatagagattctaactcttttaacaagaccatccataaaagtattcaaacactacgactcaaaaaaaaaaaaaacttacaaacattgaatttcttaactaaatctaaaaaatcacacaatttagtgtacaaattataatggatttcaaatatccttacagatatcacaatgtaaagaattgtcaataaaagctttctagtgcattgtaaatttttatccaagacttgatgatg

SEQ ID NO: 41492 - DNA, 1563 bp, Cannabis sativa
agacccccaccaaaattgggagatcatacgttggatggtgtggcaagtggctttaggaagcttaaaacaagacaaggcataagaaggcgccacttggattatagctttattgagagtttcctttccatccttagaaaataatttgccattccaaacattcatcttagaagagacatttttggttgagttgtttaggttgtttccttagttgtgtttttatattgattggattatataaagtaagaaaaatgactaatttttctgtttatggaaagtaaggcataaatggtaaatttgatgactcaacaaatttctatctatccagctgtgtgtatatgatcctttgtgagtttcttgaaatgtttgatcagattttttatgaggaaaactgaagcaagacttttcttttccataaaaggaaagtcgcacttactgctcacgattctgtaggtacaaataagaaatttcaaggctgattgaagtgttttagaattttcaagtgagttgtggtcttagaccatgtatgagctgtcaataaggtgtatattaattataaatacaccttataacaactagatcatgtatctctttcatacattttgaattgtattcatatcttttgaaaagcgagtctttattttgtagagaagagtttgttcacatctttttctatgtttatgtatttagtattatcttgagtctgtaatcaagtctacaaaagaagaagagcaacagtgctaccttcaggagatggtgctacaagcttttgagagattgcttttccgtcttgtcttgggaggaagaaagcactcttcaagaagatcgaagggagttcgagcacttgaagttttaacaagattcgatcagaaggtagaatacatcaagcttgtggcatacaataaaagaaagtatatttatgcataagtcaattattttgtatttttgagatctatctaatgaatcttatctctgggtgtagccacgtggactagtaacaatctgcaaggattgttgaaaccacgtacaaaaaccttgtgtgtttttacgtttctgtactgtttgttttctggtttattctggagttacaaagttgttttctgtagctacagaataactgctttagcaccaattctattattatttaattaaataattaattggtaattttaaaatatagaattttaattggtatcaaagcttgtcactattagtaagatcttgagattattttcttccgtttaatttgttttgtatgagatgtcgttgtttgcagaaggaagctctattactcgatcacccctgtcgaatgaatcaaattattcatattggaaggttagaatgagagcattcattaagtcacaagatgagaagcattggagggctatacttgtaggttggtctcgacatactaaaaatgatgatgaaggtagtgctaaggtaaaacctgaactaaattggactactgaagatgaaaaattgcctgattataataataaaactttgcatgctatttttaatggtgttggtgaaggctttatcaaattaatatcatcttgtgaatct

SEQ ID NO: 41493 - DNA, 1650 bp, Cannabis sativa
acaaacggttgatctaaatgtctgttacagtaggatgtccggacagggtaattgagggacttccaaccaaagtataaactcatatgcaccgagcaagatatatgagttggcaattcaaaagacaagtcttatcgcttccaggacacgaagataatccctatatttgtggcacttcaagatatatgagtttctcattctttacattgtaattatagaattaatgtagtttcctattttatttattataggttaagggaaactattcttcatgtaataagctcctaaaaatagtagcacaatctcactattgagggggacgagaattaatccaaacaaatacccaagagagaaaagtgatcaaagagagaaaataactcagagatcgattgtaagagctttagagagagaaaaaacacttcattctttctctcaagtcaatacaactacaaggggagtaggctattaccattcttacagggtcgaacctctttaaaatctagtgttctttttaccttaatattttttctttctattctttattttatttaatcgctttatcttgactcattgtcgttggctagatcgaggtcaacatatccattgttataattcaaataatcaaagatcctctatagatgatttacatcaagtaaggataaatttaccattctactcctcaatgtattttatcattacaacactaggtttcttgtaaatgatatttcagtagactaatattaaaactaaaataagagctcttttatttatctctgttaagtcaagctcaaaggaaatcaccatttcacttctatgtcattatagaagttatagattttgtatcaatgactagcgctcccactcaattgtactatcatgttcccaagatgtaagtattgggatgatctatttgatcagctttaacgaataagtcaaagaatacaaataatgcagttaagctagaacctaagcatctcaagattaagatctattgatctaatatcaactaactgatattgacttagaaagctataacaataagtttataatatcttttataagttcaatatcggtccagtctgatgaatattctatacatccgatactagtatactttaccaatgctctgggaaagacatactacttattcaagtgtaagtaaactttatcgctgattatcatgtcagtgtaaaattattgcactaataaatcatgagacttaaactttgaagcatataatcacaattactttccactgtaatgacatcactgtaattatgaatagctatatgttctgaattcattaaaaaatgtataataacccataaacatgaaaataacatgtaaacttaaatgacttctaatcttctattgatagcaaataagattatattgaaatgagttttatttaggacataaaatcccaacaacctattcaaaggctggttgtcaccatcatacgagcccagggctgttggagaaaacagaacaggtcatgtaatgcttctttctagtagggatagcctcctcaacctcgaactcgctatccgggctctcaacactaaccttgtgaaatattacaaaaataaagtgtgtgagtaggagtcccacatgggatagaaacacttcatttaaagtgtataactagtgcaa

SEQ ID NO: 41494 - DNA, 1112 bp, Cannabis sativa
gagctcaactatatgtggttgagaagtaaaaattgtaattatatgactcgactataattagtagagctcgaccattcatggttgagattcataattattaatctaattgatttttatattgatcaaattttgtaaaggttagaagtgacaataaatattataccattttgcaaatagattaaaattatcaagattattatgaaatgtaaagaatgtagcaatagaaattatgacaattataaaatatatagttttgtctaaagtaaatatgaaatgtcacaataatattttagaaataattttttttttcttaaatagattaaatcatcaagattattatcaattttctttattagtaaagaatgtggcaatatacattataacatttataaaatatatagttttgtctaaagtaaacatgaaatgtcacaataatattttagaaatacaatttttttcttaaatagattaaatcatcaagattattattaattttctttctcaatagagaatatgacaatatgcattataacatttataaaatgtatggttttgtctgaagtaaatatgaaatgtcacaataatattttagaaatataatttttttcttaagaagattaaatcatcaagattattattgatttatttatttgtagagaatatggcaatagtcattataacatttataaaatataaaattttgtctatggtaaatatgaaatgtcacaataatattttaaaaacataattttcttcttaaatagattaaatcatcaagactgttactaattttctttattagtagagaatgcggcaatagacattataatatttataaaatatataattttatctaaagtaaatatgaaagctcgaccatattaaatcatatagctcgactataatgtgtagagctcgaccattataaagtatatagctcaactgtatgagttgagctcgactgtatatggttgagattttcaaaaagttaattgtcattagtagagtcggactgtttatggtcgagatttgtaaacactaaacaaaattaaagttatcgcttgtctgtaaagagtagagctcaactatataggtcgagatttgtaaacatt

SEQ ID NO: 41495 - DNA, 1293 bp, Cannabis sativa
tgagttttgattcagattcgcgtcttgatctgggtccgcatcccgatccgagtttgggtctgggtcctagtcagattctagttcccggagtcaaaccaagactctgactcggacccttgtctggggtacgggtctgggtctgggccagggtcttggtctgactctgggtctgggtttgagtccggatatgggtcctagatccaaacactgactacgggtcaagtccaatccctgggtcgagatctggatcacagtctcgctacctagtctagatccgggtccaagttcatatcctgggtctcagtcccagttctgatgcccgtgtcctgggtctaggtctgagtcctaagtctcggtccaagtccaggacccgatcggggttcaagtcttggtccgagtctagatttaggttccgatatcggtctgggtccagacgagggttcgagtctagttccaagtttaggtccaagtcccaagttttgatcttggtctaggttctgaggcccaggtccaggtcccccatccaggtctaggtcataggtcccggtctgggaccatgttcttgtttgggtcctagtcccagtttcaatttccaatcagtgtttgggttcgggtttgggtctgagtttgggtcgaggtctgagtcctggtctaagtttgggtccggtctgagtctaggtacaaatcccggtgtcggtctgtgttcgagtccaggtcttggtttgggttccaagtgcaggtctaggtctggttttgggaaagggtgtctgttcggatctaggtcccgagttttgatctcggtctgggtttgagtccaggtttgtattcggataccttctaggtccaagtttgggtttggcatcgtgtcccaaatctaggtccaggtccgggttcgcgtctcggtgtcggtctgggtacacgaccgtgtctaggctcgagttccagtctcggtttgggtttggggctaggtctgagttcgtttctaggaatgggtctgggtcctcatcacggtcctagtcttgttcgagggtcctggtcttgcagttcttgtttaggttccgatttcgggtctcaggtttatatcagggtccgagttttgatcctggtccgggttcgggtcctagtctcagtcctagatctggatccctatcacttgtcccggtctggttctggttcaggtcatgggacgcagttctgagtttggcttcgggaccgagactgtggtgcggttctaggtcccgaccccatttctgtgtcccgagtcaggttcatgtttgggtcttaattcgggtc

SEQ ID NO: 41496 - DNA, 1487 bp, Cannabis sativa
tttttttgttattttatgtgtttttctttttatacagttattatttagtttatgtatattttttatcgtgtatatttttagtttattcgagataatatttttgttgtatatatgtgcatttgttttgttagtttttcgttatttttcagtttatagttatttttttaactatcactaaaaagaaaaaatgaaaaaaaaaagttaaaagaataaagttgtaacgacaaatttcatgaaaaaaaaacacaatttaatagtacaaaaagataaattaagttatcaaaacttagtaaaaagaaaaaagaaatttgcagtcaaactcccgtatgtttcaattattaaacacttagcccctaatctttttttggtggcaatacccccttacctttgatcttgtttgcaaataagtgagtcggggcttgagtctcaggaaaggcaatttgtgctcaactgagttttagagggcagtaagagcgacgaaatgaggctagctatatcctctttgtgccttagcttcatttgtgtacgcttatatatgttgatgtttcctcgctagcaaccaaccttgcccgagaagcagccttccctttccaccctagtgtgttatctatccgtaaaaaaacttttccttctttcttttttcaaagtcatgatcagaatgaaaggtagttcgatgggtatgttgacactagctaaccaactgcaagaacaaggtttagatgtaggattgtccttacaaggaatgaacattccaagtgcatccaacaggaatcgaacctacaaatttccctggctaggcactttcaccattcagccatggatgcttagagactcagcgagtgaactaggttttggtattccttctcgagcttctatttcgtctgttaaagaagatcaagaaaaagatgtggggaacagccggattgggttggtaatgaacttgagtgggcaaaggaaagggaacttggggtgcacttggcggaaattctttttcttcaagttgccttcattaatatctttgtttttatttttattaacaaaaaattatttacccaaaaatataattgaaaaaaaaaatcaaattaaaaaaaataaaaaacacaaataagaacatgtcaatttgcattcttctacgatattatagatatatatttattaattttaaaaatattaaaccattagattttagtccaatagcgattaataaaagagaaacttaaatttctatgcttaatttaactacttaattaataaaaataaaaataaaatacatctttttatactatatgaaaaaaaatatatatatgtatatgaaaaatatttaagtcgaatttaactttttttttatcacttttttgccaaaatacttttttaattattttttttttcagctgatggaccaatcccagtttatataatgtaaaaataaaaaaaaaaaaaaaaaattccaattatatagaaatattaatcataaaaactcaaaattt

SEQ ID NO: 41497 - DNA, 1710 bp, Cannabis sativa
  modified_base (581)..(604): a, c, t, g, unknown or other
ccattcttcaatatcctacgaggaaacaagcagttcgggtggacggaggaatgtgaaaaagctttccaagagctaaaagcacaacttgcaaaacgtcccgtactctcaaaatctctagacagagaagaagttggaatatacttagctgtcacagaacatgccgtgagtgtcgtgctaatcagagaagaaaacagcatacagcacccagtctattacatcagtaaaactcgcttactgctttattctagcaacaagaaagttaaggccttattttgaagctcatcctgttcaggtatacactgaccagccattatgccaaatattgcaaaagacagatgcttctggacggctactcaagtgggcggtagagttgggccaatacgaaattactttccaaccccgaacagcaatcaaaggccaagccttagcagactttgtggtagaatacacaggcaaaaaagaaagcataccagaaaacaaccccgagccggtacaaacaccccagccaagtaacgatgaagataagccgacctagaaactacatgtagatgggtccgctacagatcaactatctggtgcannnnnnnnnnnnnnnnnnnnnnnngggcaacacctgcatgctgtagtcaagtttggattcaaagcatctaacaacgaagccgagtacgaaggtctaattcctgggctaaagctagcccaggagatgaaggccgaacatattgaaatctacaatgattcacagctggtggtaaatcatgtatccagagaatatgaggctcggggagaaaagatgataacatatctcagaaaaatacatgaactgctcgcacaattcaaaagctacagtctcagacaaattccaagggaagaaaacacaactgcagacgcattagctcgattggcaagcagcaatgtaagtgataaggcaaacttggttcctatctagttccttgatgagcctagcatccctggcacgaaagaaatcgaaatgattgatacttccccaaactagatgacaccaatagcagcctaccttgactttgggaaactcccagataatcggaatgaagctcaaaaaatgagaaggaaagctacacggtatatcatagtagagggaattatgtacagaagaggattctcaatgccattactcagatgtgttactcaagaagaagatgcacgactcctatctgaggtgcacgatggattctctggaaaccatgccgccgagcaaagcttatctaagaaaattctaaggcaaggttacttctggacaacgatgattgaagattcaaaagcttatgttaagaagtgtgacaaatgccaaagattttcaaagatagctcgaggtccacctaacgagttaactcagatgcagagtccgtggccctttgccatttggggaattgacctaattggacaattacccaaaggtaaaggaggagtgcagtatgcagtggtagcgattgattactttactaagtggacggaagccgaaccactcgcaaccattacaacaaagaaagttcaagactttattgtgaagaacataatttgccgattcggactaccgtacaagatagtttcggacaatggcaagcaattccacagccaatactttactgatttctgtgcaaaccatggtatcatcaaaagtttctccgcagtggcgcatcctcaagaaaatggtcaagttgaaccagtcaacaa

SEQ ID NO: 41498 - DNA, 1157 bp, Cannabis sativa
aattctaaattcccttagggattcaaaaatccacatgtctcgcagtatgatgggactacagatccagtcgctcacttgaataactttaataccataatgcgagctaataacgttttgaataatttgcagaacattttattcccgacgtctttaactggggcagcaagtagctggttcgacaagtttactcaccattcaataatgtcttgggaaaaactgtccaaggactttaagaaacagtttcaagatgccagagatagatgacctgaagcatcatccctaataaagcagagcacaacgcaagtcacttaaggcttacctgagtcgcttcagcacaaccgctgcaaaggttagaaacttgaatgactgtattcagcttacttctcttcaagcagggatcacaactgagctttcaacggccagaggtgagttatgggatgacttacaaggtcgtccagtaaggaacattaatgaattgaatgaaagagcgtaagtgtttatgcgtaaagaggaagcaaggaacgagatgaagttgctaaagactagctcgggaaataaatccagcacaagtactgctacagtaagtactgcctcaactaaagtagataatctgagtggttcaaataccaaaaaaaaaagatgactcgaaagaatcatttaaaaataagaagaaatagaaaaagcacaataaatatgtttcgatttatacagtatacactgagttgaatgaaactcgtgaaaacattttcctcacaaatgagcacagggttgcctttcgcaagcatgaaccaatgagacatgcgagaaataaacgagattcaataaaattttgtcgatttcataaagacatagggcatactaccgaagagtgtcgataactgaaagacgagatagagagcctaatcttgcgtggatattttagacaatatgtgaagtgtcaacggaacgaaccaaactagtgcaatcaccccaataacccagataactagagattgcaagctccccctattgagggcgatgatatattggttatctcgggagggccacatctcgttggtgacagtaataacgcccagaaaagatatgtcaatgaaataaagaacgggcaatcagtgtttgctctagaaccactgaaaaaagcaaaaacagaagaacct

SEQ ID NO: 41499 - DNA, 1869 bp, Cannabis sativa
tagtaccaatcaatccatttaaaccctcttcaactatgtagtcccatacctatacagtctcagaatcatcacacatgacattccccaggcgatatgtgggattgtaagcttccagtattttcccttcggatcacagggccttaactgtcacaaaaaaagccaatgcttatccatttcaacttctctctctctttttgaaccaagggaagaaaggggaaatccagggtttatttttaatttctgggattttttgcaagaatttgtgggttggctcaagccaaggtaaggcccttctcctcctctctttggttttgtagaatttagcttggttttagcttatagctttggtggtttgttgctgttagaaccctagaccttttgaggttgttttttgggttagtttaaggttttttggtgtttgtttgatgttaatttgatggttgattgttgagttgagcaagtttgagttcaagaactcaaacttggctcaacaattgtggaatttgcatgttgagtttatttttggttttatcacttggtattggtctattataatgttattaggtgatctagagcttggttttaagtttgggattgttttgagcaagatttgaggctttgttgttttctacgatagaaaacggcaagccatttttgtggaaatggtctaccatttttactggtagagaacccagaaaaacggcttaccgtttttatagaaatggcttgccgttttttaggctattttatcgtagttttctcgtgttttctcaatatttagggcatttccatgctatttattaatagaaaaacttctgattttgagtttaggtctccaaaaaaggtttagcaaattgtttacctaatttatgtgattgtgatctagggcctccgtttagcacgtgattttctattcaggtcgattggcacgcttaaatttggaaacgagataagactagcacagaatatgtatgtatatgtgtgtaggtatgtaaattacatgatgtgtatgtaattcatatactaccaacactagtacgatagtagtatttagtgcattggtatagtatatgatgtttaaagggttcgatccaatattaccaacgctagtatggttaagtacgtagtgcttgtggtacaatactcaatagtactcgaggtacgattcagccctacatacactagaagggacaagtgcttagtgcatgtggtacaaaggtcgtccttctgttaagaacgttcttcattatatgttaagccttgtggataggtgtataggtgcctaaatttaagtcggtaatatattatatgttatatatttttcttactgagtctgttgactcacaattattgtttgtatgtgtaggtaaaggaatagataaggctaagcaccagtgattccagagctcgggaatgattgtacatgtcaagatggttcgacctggaaagttcggtctcgagatgacttgggctttattttgtagtcgatgtgcagcatatatttataaaatgaattttaaacatgaatataaattttagaagcagaattctgacgttttgtatggatacatgtatatagtttaaagtttaattaaaaagttttaatttgacacaatttttaaagaaactctttgattagcaaaagcgtgcacagtttttagaaagacattgtagcgtgcctaagaaatagggtgttacaagttggttgcaagtggatattcagagaaaaaggatgaataccatgtgttgagggtaaaaggttcaaggcaaaactagtttccaagggtttcactcagaagggggtatagactacaatgacgcattctcagcagttgtgaagcaagcatcaataagagcaattatggcaaa

SEQ ID NO: 41500 - DNA, 1335 bp, Cannabis sativa
atattttaatgtaaaaaatataattgatgcaaatttatttcaaaatttaataaatcaaatgtatattccattcttatttgtaaggaaaatataatctaaaacaaaatattatcgcgacgtgtgtgcagaaacccaaaaataagtaggtttgcatattaaaagtaattaatgttgtgattaattgcgtctcgaataatatttatatgattcaaaatttaagtcttgctttgtatcatagtggtaagtcaaatttactgattataaaatagtaagcaaactagaccaaagacctacactataacctcctcaggaaacagtattgcacataaaaaatggcttctttggagattcgcgttataaaagataagttaaaggagagtaagaagaaaactaagttaattacaagatcgaatgctttcaccacaaaaagcacaagagatataatttgatagagtttgcttataaggattatacaaaaattatccaaaatctcatttgagataaaacatgataactctttaaaatagagttatttttcatcattaatcttttggatttgtgctagtttagagtcctttaagttttttttattatgttttgtttattttattcattttgcttagatttagtattaatttgttatttttgggtttttggtagaaaattattataagaaaaataaaactaaaactttaagcttaaatttgatcatattctcataagatttttaaaaaagtcaaaacataaaagttttagatcttattctcgacttttcaacgcatctaaaatcagctcatttagagatagtacgtgaaagttatgtgtattttattgagagagattggagtagaaaatacttggacaacaaccaatctgcaagcgcaggcctttccacgcatgtgcgggtctgtatgggctgggccttaagtaataattgctaattttaaagtgaattagggttattagactgaggtttttagcaataatcacaaggagggaaatcaatattagaacatacaaaaacactaatatgaaagattgatcaagattgaagacctaaaactagttcattttcttctcttctctattattttttttttgtttgatgtctaattcttattattcattaatggtatttccaccatcattatgcattaaatacttttttttagagttttaatgttgtctcttaaaactctaattatgaattaatgcaatttctttgattcttttcgcaattaatatttaatgcttaatcaccatttgcaagatatatgtttttgattcaaaaattgaaatgtgagaattgaatatgctacaattattgtttagata

SEQ ID NO: 41501 - DNA, 2280 bp, Cannabis sativa
ctagttcaagtttcgatttagttctcgagtgtgggtctgggtctgggtatgtgtccgagtcttggtttgagtttgagcttgggtctgggttttggtgtaagtcccaaatcaaggcaccgacaacacgttgggtccaagcaccgagtcttggatctcaggtcctgaggtgacttctaggtcaaggtttgggtctggggtcgggtcccgtatcccgatccaagttctgaggcccaagtcctgggtttgggtcccccatctatgttcaagtcctaggtattggtcctggtccaagttcgggttcaggtcttgagtccccgtctgagtccaggtcccagtttaggtttcggtccgagttcttgtcctagtcgcaatgtgggtctgagtttcgggtcctaggtccgagtctggttcttaggtcttaggtccgaccccagttttcgggtttgggtctgggtctgggtccgagtcccggtcttggtttaggtcgcaagtcacaagtccaggttcgggtccaagtcccggtatcgcttctggtttgagtttgggtttaggtttgggtgttattcctttctcaggtctgggttctagttgcagacctggtccgattctgattccaggtcttgaatcgcgtctggatcccagtctgggtctaggtctaggtctaggtctgggtacggatttgggttcgggtcatgatggtcttagtttggtttttggtttgggtcctgttatggtcccatgtgtgggttctagtccatgtccgtgtatgactctagttccaggtccgggatcaggtcaaactttaacatgggagacgatcttagacccagactctgacctagacatggatctggatactgacctagactcgaacccaaacccatgcccagaccgggattgaaacttgggacctggattcagaccgaaacctagacccaaaccttgacttgtacccaagacttggacttggagctagaccaaaacccagacccagaccgggatccggacttggaccgagacccgaccctggactttgaccaggactcagaccacgacccagaccaggacccgaacccgaacccaaacacagaatcgaaatcagaactggactaggacccaaacccaaacatggacccggactaagacctaggacccaaacttggatgggggacctgggcctgcgcctcagaacccagacccggatcgaaacccgagactcggacccgaacttggatctggactcaaactcggtactcgaacccagatctagacccgcactgggatcgaaaactcgaacccaaactcggactaggacttgaaccccaaccgggacctaggactcagacctagatggggacttggacctgggacctgggctacagaactggcatcaagaccaaagacgtgaccctagacccggaccctgaactaggacccggaccagcacctgagacccgaagtggaactagattgggacccgagactgggatcctgatctggacccgtttcttggacctgacccatagtcgatgttttgatctcggacccatacctggacttaaaccctaactcggactagaagctaaacccggacccagaactggacccgtaccttgtgaaccgacacccaagaacaagatcaggggacaaggactcggtctcggtcctggaactggaatctaacaaggacccagacccagacccagaccgggagatggacccaaatcaaaactcagatcaggactctggacacaaactcgaacccagacagagacttggacgtagacccgaacgtagattccagacagggattggagattcagacttgtacccaagtcccaaacctagattggtgacccaaacccgaaattagaagtagaatcgagacccaagattgggactgggacccaagacctgaccccggtctgggtcccagacccagacttgaacacggacaagaactaggacctaggatctgaatcagaacaagatctggacccaagattgggatccggatcttgacccccaacctaaagcttggacacaacctgtagtcggtgtctcgatctcttaatcgtaccaagacccgaacatggaaccatttctagacgtggacccaaacccatactcaaattcaggaccttaaaacaggaattggacgtggacacataacgagatctagacacggaaccgaacacgaatgttgacccagattgggatcgatacccggaccaagacccaaacctgaacctagaattgcaccaggacctgcgacccaga

SEQ ID NO: 41502 - DNA, 1089 bp, Cannabis sativa
tatatataattatatatgagtagtctgtaaagttattcacttaaatgtaagtcaatgtagcagtaaaaaaaatcatattttacactaatttaattagtgctcgatagagttaataaattctctgttagccacatcaagtgtgagagtcatgtggcttttgccctatagtgcaatttcatactgagttaattcatgtcaaggaaaaaaagaaaaaactattaagtgacttataagtaatactgtacaatctttcagattatttactatatataaataaaatcttacttctgttctgattaatatacaaacactacctttaaataatttgtttatttacattttttttttgttttaattagtaaaaatttcattgcagccaaaacagaacaaggacaaaagaatcactgtttacaatttacaagtttaaccaatccaaacaattgatcttctcaactagttttctaaacaagaaaaattagaaatacaaaatttttttattttgagaaaatacaattaatgaaaaaatcttcattaattgtttatttttttatgttttctacaaatacaaaattgttattattatttacttattttggtttggaaaaaccggttaaaaaaaaggaaagaatcatattggcggctaaaccacttgaactttaaattttttaacacttaaccacaaaaaccaaatttttgacggcaaaacctactaaacccaggttcccagaccctggacgcgaacatgaacccggacccaaaccctggactggatctagactcaaacccgaacccagaccccaacccaaacccatacccaaacacagactcgaatgtggcggactcgaatcccagacctcagacctagacccagaactgacccagacttatagaccccaaacccagactcggacccaaacccttgacctggacccgaactcgaacccggacgtggaccttggacccctggacctggatccaaacccgaacccagaccttggactcggggctagatccgaggtccagggtcgacttctaatttgagtccaagtccaagttcaggtccgagtttgaggttcgaggtccaaggtc

SEQ ID NO: 41503 - DNA, 1541 bp, Cannabis sativa
tatatatctatacatatatacatacatatatatatatagctaggacttaaaagtagttttttttttttttatataaatttttgaaaaaattaagatttgaataaatatgggagttgttcaatcaccaacacctcctcatctttatccacaagcattacaattaaagctttatcaagccttcatattctcaattcctatactcttttccatcatattatttctcttgttttatttgttctatctcaaaagaagagcttcaaataatattattaattctaataatattccttcacgtccaataagatcacatcaaactactacaacttatatttcttcggtaattaattaattaattaatttatttattctctctatttatttcatattaattaatatttattatgtgtatataattttttttttgtttattattatttattatatatagccatgtcatcggttggatttgaaggtggagctcaaagatgatcttccaataattttatttgatgaagaattgaagaaaaaagattctctgtaagttattatttctctcttattttatttttcaaaaaatatatattttcttctgttttttttttttctttctttctttctttaagttggtttggaaacattagtacatatttagggaccagaccatgtgctcaacattttttggtgttattatacataatttcctatatataaatataattttatatacataatttccaccatcaataaaattcctataattttatatatattatataaagataattttaaaaaaaaaaacacacacacaaataacaaaaaaatatataaaaacacgatttatatagaatttttaatatttttacaattttttaaattttatttatataaaatacgattttttttatattgtactcttgttattttattgttaatttttttttgtttgtatattatttttatgttgttttaatgttatttttttattactttcatgtgattttttttgtgttattttcttatatttttataaaatactgtaaaattaaacctaaaaatgcaaaaaaaaaaaaaaaaaaaaaatcagaaattagtgttttatataattatccatatataaatattatatatatgaactctttattacacccaggaaatattacaagattttgtagactttttttgacttagtttattctaaagttttttttcttcagttttttagatttaaaaaaaatccattcatgagtgaataaaaaatgaaatttccacttttaatttagaaatctttttgggagaagtttagatttctagcttctcacatgagaacttttgagaaattattttgaaaataattatataattcataattactcaaaaatatattttttttaatattatctaaatttttcaaactttgtttttttaaaaaatatatctttatctaataattaatagccaaacggataggcaaatcaataattatcattaataaataatttttgatcaattacataaaataatatcaattgatatagaaagta

SEQ ID NO: 41504 - DNA, 1747 bp, Cannabis sativa
taaaatgagcggttatatggcctaggattgttaccctagtgattaagtaattttgaatataatgccatgctatatatgttgaaataaagaattatacgctcaaggcataattaggttagactccgtaatcaaaaccgagataaactattctaagtccttattgtaaatagacatgtgagtgtaacatgtgggtctacgctatatagacataaatagacgtgtgagcataacatgtaggtccatgtcaaatagacaatagatgcagtggcatcaataattaagtgatcttttattattgtgtatattttcatttatactgtcttgttgggcttggctcatgagtgctctactgtgcaggaaagggtaaatcattttgtgatcaaccatgagttcgagggcttggcggtggattgtacatgctcaggccacactagaccacactggttaagtctaccagctgatgtatctgtattcccaatttttgtcgcttaggtcgccatgttaaaatcactcgtaatattttgtgaaaaggtttctatgggatcccgagacatgtggaatattttagaatgctttgtaaaatttaaatagttacaagttatattttcattccttaaataatttaaagtttaaattctactcttatttctagtaatcccagattagcgagattaggtaatgtttattggaaaatcgtagcgtccctaattgttagggcgttacagatggtatgatagtaggtgatatctgagttggaaatgatgtttgagaagaaagagcagcttgagcaaatgggaaaatggtttcatcaaataacacatcccttgaaatataaagtctaccatctttggataaacacttgtaccctttatgggacaagctatatcctaaaaagacacatggagtagatctgtagtttggtttaaccctattgtaaggcctaagattgggctaacttaaacatccaaagactcttagcatagtgtaatcaggtttgacattaaagagtaattccaaaggagtgctaagatgtaatttgggtgtggacattctatgaattaagaagatagcagtacgataggccttatcccaatatttgagaggtaaggatgcttgaggtaaaagggttaaaccactctccactatatgtctatgtttacgttcagcaaccccattttgttcatatgtgtgagacatgacaactggtgaataaatccatgttcatttaagagttttgtaaaaagccttggtattccccaccccaatcagattgtaacttttaattttgtaaccaagctgcaatttaacttgtgttttaaaggttataaaggttggtaaagcctcacattttgttctcaacatataaatccaagtgtgtctagaataggaaataaaactaatgtaatatttgtatccacttgatgacacaataggggcatgaccccatagatctgagtgcaacaactgtaaaggttcaacatatttagttgtggaatttggaaaaggaaatttatgatgtttgcctaaacaacatgcagcacaaagatcagagaaattgacatcagttttattacttattttgatgttacaagatgacaagacactttgtacaattttggcaatgggatgccctaatctattgtgccaaagagaaaattgagagtttattgggggtatagatgtactgttacatttatctttttggttgtaggttggtggtgtcgctgacttggatttggtgatgttg

SEQ ID NO: 41505 - DNA, 1214 bp, Cannabis sativa
caaaaccttccaatacctccaaaggaggattagctcctaacacataacaaacaattgcagaattccagtacgaaacctcctcttcaatgtcatccattgttattttcactttaggttttcccacagattgaaaagatttatgagaaaagtaagagccttagaagtagcgagagcaagagcaacaacaaaaacctaaaaaatcaacatggaaacttcatgttgatggaagttgcactgaccaattgtctagtgcaggcatttccatcataacacctgacgagcaatagctgcatggagcaatcaaatttgacttcaaaacctcaaacaacgaggttgaatatgaagccctgatcgctggcctgaagctggtgcatgaagtatgggctaaccacctagacatatacaaactagtcatgaatcaagtcctaggtgaatatgtagctcgaggtgaaaaaatgatggcctacttgagcaggattcaagagttgctaagtcagcagaaaggctataaaataaggtagatcgctagagaacagaatgccacagcagatgcacttacccgcctagcaagcagcaccattgctgacaaggctaacctggtgtcaatgtagttcctaatggaacgaagcattacaatcattgaagaagtcgacatgttggattacagtccaaattgaatgatacctattgtagattacctctaaattggagtcttgccttaaaacaagaatgaggcaaaaaagatgagaagaaaggttgctaggtatctagtccaagatggagtaatgtacatacgaagcttttcaatgtcgctcttaaggtgtgtcaccaagactaaagctgagcgattgatgatagaagtgcataaaagcttctatggtaaccatgccaagggacaaagcctatccaaaaagatactttgataggagtacttttggccgataatgatcgaggattcaatggactatgtcaaaaaatatgacaagtgctagagattctcaaagatccctagagctccacccaatgagcttatgatgatgtagtctccttggccctttataatatgggggatagacttgattggtcaactcccaaagggaaaagaagggtgtagtttgttgtagtcactgtagactctttacaccacaagtgggcagaagttgaacccctcacaacaatcacctgtaaaaaattccttgattttgttgtcaaga

SEQ ID NO: 41506 - DNA, 1031 bp, Cannabis sativa
gttaacatagaaatttacaaaaaaaatcgttacacaagaattctcttacacgatgattgcacctaaggatcttggatttggtctaggatttctgcaggataagatgatgatcactgaagttttcttctcttataagacttcaacatgcaggtatttctcccattctagctatttaagggtgtgggttctttggcgttctttactcctctgcttgattttgttttctttgtctgagtattattgggaactttacttgtctttgttcttctgggaaatggagggtattactgaaaatatggctcatgtgttatctcttactgaaaaagaagttgtggttcatgaacacttggatgatgtgggaggggatatacaaattgggagaactttctgtcttgtctttcgagtctttactacccgaactattaaaatcgagtggtttgaagaggttatgagaaatgcctggatcactcgtgctcccattactttctctgaatatggtaatgggatgtttatggttgagtttgggtgtgaaggtgatatgaggagagtgattgaaggccaaccgtggcattttgaccattgtttggtcactagtgctaaccctgctggccgtgacactcttctccctaaccagctcaggtactctccattttggattcaagttcactccattccttttggtatgaagtcttataagcttgccaaaattgattgggaatgaagttggggatttccttgaggttgataaaatcactcctctcaaagtttttggtttgttccttcgtgtccgagtcttgcttgatgtttccaaaccaatccgtagaggtattctagttgattttaggaatatgcacaaggaaaaatggctaaacttcaagtatgaaaatctgcctaatatttgctttcactgtggtatgtttgatcacactcttactaaatgtgtctcttatcttaaaaagtgtgatgagtatgcttatccacctccactgcactataaaactcctctcaaagcccctgctaaatcaaatttt

SEQ ID NO: 41507 - DNA, 1341 bp, Cannabis sativa
gaaacgtgggggatgtccacgttttatgagcaattgtaagtgaatagatcccaataaaaataactgtcatcatatacacctataaatagggacggaatccaaaaaaaaaaaggacgacaaaattgagagaaaatactattatttacttttattgaattgtactttgtattcaaataaatattcttaataagaagtagagtgtgtagattttaactacaaaaccacataaaatatctggtgtttatttattattattatttaattttgtagtaaatttattatgtaaaaggctatatatttagttaacaaaaatatgtgttaacaaattggtgctttcattaagagccttggtgataaaaactcaaaaaaaatctctcgttataaacacaattacaaatccataccaatggcagataacattccacacaaagaaagtcatccagaggaaactacccatcatcttggaaaagaacctatgggatctcaaagaaccagtacgactgaaacaccacgttctgggaggaacgatggaaatttcaatcatgctgatgaacaaatcccaaagagaataagtgaagatgcttatgatcctaccagatatgtcccgctggtagaattagaaatagacaacttcaataacgcctggctaaatcaaactgacgaaacgctgagttagagcgagaagccacgacggccaggactgcacaaaaaacagttcctcaaacctaacctgatccaactgtaaggagaccccgaggaagacctcaaggttctaggaccaggaggcaagagaataaccaagggaatcccacaaatgcttaggaagaacaacctgggaatgtgagggatgtcccaatggatagagaaaatcaacctaacacaagtaatacaagaaatcaaggtcatcgacgtgatgctccaggaacttcccatggatttactaaccaagggaatgaacaaactgatgtacctgagtcatctcacatgaatgcagaggcaagacaactgtgattaggaaaccaagaaattcctcgtaatgatggaagaaatcctgaaaaccaacctggatccggtcgacgcccaaggcatccacaaaggccttctcccacggacagagagaatatgcatacttatttgagtaggggacgtgtgtctaatctctttcggagaagaagaccaatgcgaaatgagatgcgtgaagcaagtttgaatacaggagaatcacgatcctacgggcatagtaggttgacttgaacaaatagacaaacgcgagacgggagcagatcttgatgatattttactgaccaagaaagtatgagtaactcgcgtagttaccagtct

SEQ ID NO: 41508 - DNA, 2053 bp, Cannabis sativa
tggtggtgacttgtaaacgtaagcaggcactggtggtggtggtgacttgtagacatatttgggggacggtggtggtggtgacttgtaaacgtaagctggcactggtggtggtggagacttgtatacatatttgggggatgggggtggaggggatttgtacacataagcaggaaccggtggtggtggagacttgtagacatacttgggagatggcggtggtggtgacttgtaaacataggttggagttggtggaggtggtgacttatatacgtacttgggagatggtggtggtggagatttgtagacgtaagctggaaccggtggtggtggagacttgtagacatacttgggagatggtggtggtggtgacttgtaaacatagaccggagtaggtggtggtggtgacttgtacacatacttgggggatggtggtggtggtgacttatagatgtagactggagtaggtggcggtggtgacttgtagacgtacttgggggatggtggtggtggtgacttgtagacataagctggcactggtggtggtggggagctgtatacgtatttaggagaaggtggtggtggtgacttgtacacatatgctggggtagcaggtggaggtggagacttgtagacatacttgggagatggtggtggtggggagttgtatacatacttaggagatgggggtggtggtgacttgtacacatatgctggggtagcaggtggaggtggagacttgtatacatacttgggagatggtggaggaggagacttgtatagatacttgggagatggtggtggtggagacttgtagacgtaagctggcactggtggtggtggcgagttgtaaacatacttaggagatggtggtggtggtgacttgtacacatatgttggggtagcaggtggaggtggagacttgtacacatacttaggtgatggtggtggtggtgaattgtagacatatactggagctggtggtggtggagacttgtacacatatggaggagggtgcacaggcttggtcttgtggcattcaccataaggagtctttgaagcataagcaaaagacttggcgtagagcacaatctcgtatttgttctttgacttcaccctgagtttggcacccttgtcaccattgtggtacttggttggaatgttgcatggggagcccttgggggcagcgtggagcatggctgtgcaagctttgcctccatatttgcggtaattgaaaccttcaactgtgatgctgtacttgccattgatctttgtttttccgtaagctttaacttctttgtctccagccttgcaagtcacctcaacgatagctcctattacacattgagacaatgttttgtgaattatgggataatattgaatcatgatcacgtatattagaatcactacaacagattttcgtaaaaggtttggttattgaaattgataactttttttttttctaaattattctcgtatcaagtatggaaacatgcaattcaatacaataaggttgaagttgtgattttacaattataaaaaatatttgtatttaatatatataatttgctttgataaatatttttattgaaatcatcaattttctcaaaacgtgcttttaattttttttctattaattaaaaacatcattaaaatttttatacatttattcatttttagtttgtataaacaactctgaagataactaaataaatatgttgcacctatttaaaatgtgttttaatatttattatacatttaacaggatttcaaataatctaacaatattatatgaacaatataaatataacctcataaatatttaagattaaaaagtaaaaactacatatgtgggacaataatttaaagttaattcaatcattttttataaaacttaaaaaaaaataagagtaaacagtaaataaataaataaaattcttaagaaagtagtgtacctttaaggtgcttcttgttgtgggacttctcagggtatgtccaatcatagcatctgtagcagtatactttaccgacaaccttgaacaccaaagggtgtggg

SEQ ID NO: 41509 - DNA, 1408 bp, Cannabis sativa
attatgactcctaaatttttttgacctttaaaaattcttcctgaatttgaatttgacggtaagaatactaagtttaatttttgattgtaaataattacttaagtttaatttttagcggaaataatacataaattatatttttggaacttccgtagatacctggccgttaaatgtcgagtcattatccacgtgtcattttcttattggtatatttactattttttttaaaaaataaaaatttaatcacttgtaccgattaagaattgacacgtgataatttgcttaacatttaatagttaggtcttacataagttccagaattataacttaggtattaattttattattgctaaaaattaaacttaagtatttacttacaactaaaagttaaaattaaatatttataccataaattactctaaataaaataacatttttaaaatttttgtcccaggcctaataaaaattaaaaaatcacttcctgcaaatgtagttatctgataaattacctaattattcagtaatatcgattgttcctcttttattttcagtaatagtatgtataacaaatatataaatttaatttatattgttatatacataattgaatattgaatttattaaataaaaaatgagtcattaaattatatatattattttaataaaatttattatttcgtaatttctactacaaaccactatacaaatgagaaataaaaatataaaaatataatgactcttaagactttgcaataatatatataaatattttaagaatgtatatattagaaaataatatatatatagaaattttatcataacaactttcctatgttaaattttagttactatataataagaattttttttatgtaattatgtaaaataaaacaattgaaatttatatacaattgccacctttataaataaatataccatatattaataatttttgttgtactttttttttttaaatcaaattacactctgaatgatatcatccactcttaaattataccctgaatgataatgagatgcttttacaatagaataaacgataccattaacagagcgcttagcaaaatataaaaaaatattagacaactcaaataacaataaacaacaatcttcaaccaaaaaactaaattgagaaaccatacaaattgtgcttaatattgcttgaacactcacaagactatcaaactctaaaatcacattgcaccagccacgacccatgatctaagtcaacgcttccttaattctcattatatcagccataattaggtcaactaagccttctatgcaatccgccataacacccaaaacaacctcaatgtgatcttgagtacacccgactccaaacttattctcattttgaaacatcgcagcatcaacaataaactaatta

SEQ ID NO: 41510 - DNA, 1887 bp, Cannabis sativa
  modified_base (322)..(322): a, c, t, g, unknown or other
  modified_base (1745)..(1751): a, c, t, g, unknown or other
cctgccactgatagaattcttgtataacaacagttatcagagtacaatagggatggctccctatgaattgttatatggcagaaagtgtagatctcccattcactaggatgaatcgggagagaagaaataactgggtcctatatcagtgcaacagactaatgaagcaatagaaaagattaaggccagaatgcttgcctctcatagtaggcaaaagagttatgcagatccaaagcgtagaaatgtggagttttaggtaggagatcatgtgttcctacgggtgtctccgatgaaggggatcaaatgtttcgggaaaagaggcaanttatgccctaggtttacagggccttttgagattctcgagaaggttggactagtggcattatgtgtagctctacctccagccctttttgcagtttacaacgtatttcatgtttccatgttacgaaaatacgtttcagaccctgctcatgtgttgagtcatgaaaatcttgagctgcaaccaaacctatcttacaaagaacagccagttcagatcctagacagaaaagataaggttcttcaaaacaagaccatagctttggtcaaacatgaggtctcatatcaggagttgttcaggttagattttaaggacgaaatccttttaacgggggaataattgtaaagaccgcttaactttgttttgaaaattagcagataattagggcttaattatgaaacttgcatattagttatgaattattattttgcggagttttatttcaattcagaatgccttttatatgtcatatatgaaatctcatatttttgcatgttttttgcccgggaacattggaatgcggcgtttggctattagaatcacattttagtatttttagtatagcggggcaatatagtgagacattgggaatgtcgggaatagttgagattttagaagtgaccaaattacccttaagtgattttatgacttttagtgtgggcaagggccttatggtttgtttacctaatgagatttttcttcagtggaattctaattgactaattaaacctgattttttatgttgaagttaagttaataaaacctaaattatttatattattttcattttattaaaaaaatcaagaaaaacccacttatctctctcttcaaatctttctctctcgaactccctagagcagctagggtttgattttgttcttcaataatttagaggtttttagcaagtttctagtgttccaatccaaggtataactttcttagactctcctttatgtttattttaagtttttagttgagttcaagcatgttttcttgagatagggttctgtagaagttgtcggtgtttgatattgttttctaaagttagattatggttatttatgttgaattgagctagttttggtggttgttataaggtttgagcaagctttgagtttaagaactcaagcttgcctctttaatggtgaatcttgattttgagcttgtttagttgttttgttgcatggaatatgtttattggggtatattgaataggtctggaaggtttggttgagtttgggattgttttgagtgagacttgtaggaaccgaaattccagttggttcccagaaaacccctcagaactggaattccggttggggaaccagtcttccggttggggcagttttgggaacccttgtttttcccatttttgcggtatttagggtattgccatgttattttttgatagggaaacttttagtttcannnnnnngtccccgggaagtgatttagtgtatcactcaccagttttatgaaaaatgtgatttaggggcctgtaattcgtcaagcagctgttccactaaggttggccgacacaactaaattcagaaacgaggtaagattagtat

SEQ ID NO: 41511 - DNA, 1350 bp, Cannabis sativa
accataattattctaatagtttccaattgtgtgggcttgctccattggcaaactgtcgacatctatagggcaggtgtcagtggcatgagatcctccacatagcttacatacaacttgagcttgtttggcttgtgcagtcaccagctttattaatgcctctatctgggctttcaacttggttattgcattaacttcatgtatttcggcagcctttttagttgggcctctctctgttgaccaatgttgattagttatggccatctcttcaagtaattcaaaggcctcattagcacttttcctcatgaaagctccaccagcggcgacatctatcagtgtttgggtgttgttcagtaatccagtatagaagttatgcacttgtaaccactttttaatcccatggttttggcacttcctcaataagtccttgaatctctcccaggcttcataaagagattcattgtcatgctgggtgaagttgttgatttcagctctcagcttggcaatcttcgcaggtggaaagaatttggaaaggaatttcagggccaattcctcccaactgttgatagaatgggttggcaaagagataaaccaacttttggctcgttcccttagtgagaatgggaacagccttagcctgatggcatcatcgctaactccgttaatcttgaatgtctggcaaagttcttcgaagttagcgaggtgcatgtttggctcctctgatggcagtcccccaaattggactgaagattggaccatctgcaatatggctggcttgatttcaaaattggtggcgtcaatagcaggtggccttatacaagatctggtccctatcaagttaggaagtaaatagtccctcaggctatggtcattgttgttgcgacaattagctttgtcttctacagctcctccgttgtttccattgttgccattattggcgttgtcagccatgactccttcttgttcaatctctagtgcagctctttcaaatttgttccatcttctgttatttctaaaagtcttttctatctcatggtcaacaggtaatctagaagttggaccttgacttctcataaactaatgaacctgaaagaaaaaataagatcttgagacaaacagagttagtactcaaattgaaaagaaaaccaattagaataaaatttaatttttaataatattaactaacaatccccgccaacggcgctaaaaaattattttgatattttgcacacgcaagtgtacgtatcgtcaacaagtagtaataaactcaccaagagtgaggtcgatcccacaaagattgtagttaagtacgttaaaattacacttttacttctatttggttgaataagaatt

SEQ ID NO: 41512 - DNA, 1008 bp, Cannabis sativa
ggatcccatttaaagttgtaatatcatatgtttaatagctagttgttattttttatttaaatttgtatatgtaaactgttaagaaaagaaatctaagtaagtttttaatagttcttattaatcgatgaagattatagataaatccatttcatataacaatatatcaaataaatatgaagaaattctacttttccttttcttatataaagtgtactcatcatgttaaaattgaaaattacaaacttaatttgataatatatcaaattagaagtgcttaacatagcaatattttaatcttaggatggaaaacatccaagaatcacttaattagacatgtacacatagtcccctgagttcaaattcatcttaggaaaaaaaaaaaattaagccttattataaaaataaatggtttttataaaaattattaaaaaattatgtatatcttttaaaaaatattttttttttatttgagtcctaaaacggtgtgtcctaagcgcgaaactaacccaccttagtcaagagtttacaaaattcattggattagttcatatgtctaatgttgttgtcatgactaataatattctttcatagactcgtatatataatgaaaaatactaaatgacatcattaatgtctagtaccccttttggttgtcatatagttattggtgcacaatcccctataatttaataatatagtaacttttaaaaaatgtcatttactaatcgcagtgcatcacctctaaaaagtattagacactactgatgcttaataataatgctctatatataatatacacagactaataagaccaataatcattgtcctttttaaccaaataaacagaaattcaaaacttgccaacctgctctttgtttgatgaatttttatctcatatctgttatacttggacataggggtgttcattggatcacatccaatggatttagacccatccgatcaaatccaattatttattggatattggattttgccatccgatccaat

SEQ ID NO: 41513 - DNA, 1283 bp, Cannabis sativa
catgggatatgaactcttatttacaagagaatatagagtacaactttgacatttggatttgggccccaaggggtacccatttttgtgcgaatggctgaggactcacacacttgacccaccacacacgtgcgcacgccctgtctgtccgatccgagtcgggttgggttggttggtgtggtgtggtgtgacactctattatttttacagaaaatgccatgacctgagccctaggccgtggaagatatgtaatatccataacttggatagtcaaaggtcacactttgacccttgtaggaagataaaacttataaatgatcctttaatttatatcacaaaatacttatttaaaaataatagattaactcacatattgataaaaaaatattagtaagaaaattacgaccactcatttatatgaaagaacaataatatctccacaattatgtagtcaccaaatagatagatttaataggtcgataaaatacccaaataaaatctagcatcaatctttcctcttttctaactagtacatagttaatttaagtcgtccagactatccattttagcttaaatacaaaataagtttcattgaaagtttaataagtagaataagacaaaactaataatgattttcttcctcaacggtaccatcctcatccactagtatcaaactgaattcctggaaggagagaaaataggggtgagcttataaagcccaataagaaaacaactaatatcaaaggacctttggtttaataaaaaatcctggatggttatcattttaaaaataaaaatatctcatcgacattatcaaaatgtataaacaaagtagagaaaccacaaataatcacaaaatcaagtgtcaaatgaatatcacaccgtccactagacccctatctctcaataccaatcatagaaaacgacatccaaaagtaggtagtcgcacctaataaccaccataataccggggctcagattcaatttactccctgtacaaattctaggtctttcacctacaggtgagtgcacacctgatctacctatgatgacacagagactaggtcgtgaaataacaatatgcaccgaacatgatcaacatgactctcataagtataaccaaagtaagcaaataacaaataatagcaaaagaacatattccattttattttctaaaaaattcagcagcataacggttgtattttgaataaactcaaaaatcataatttgcataaatatttgtcaaaaataaatttggcagtgcccccagattagtccggaaaaat

SEQ ID NO: 41514 - DNA, 1337 bp, Cannabis sativa
  modified_base (727)..(733): a, c, t, g, unknown or other
ggttgtggagggtggtggtgggtggtggtgggtactgggtgtaatggtggtgatggctgaagaagaaagttgaggaaaagaaagaaaaaaaaaatatattttttctttcaaattttttatttttttaaataatttttttttgaaaaatatattttttattttaaattatttttttaattttttaatttgttaaataattttttcgtggaccaataaaattgtgtcatatgtacatcttgtccacgtagatgtacgcatagacagtccaacatgacacttagcacttaaaatgtatggaaactgtaaattactaacggtttcctaattttggggttttaccgccaaaatttaaattttgtgagttaaagtacaacaaaagtaaaagtaatgggaattttaccgtcatttatcccataaaatataacattcaagttatcacgatattttcaataaagaaaaatttttatttggcaagttatggtttagttttgagtaatatttcattagttaataacaaatttagagtgcgtttggtatcttttttcaattagttttttattttcaaagttaaaaaaaataaaaatattgtttttattttttaattttttaattaagaatctaatttttttttttaaaaaaaaatcactttaaaatttttttaaaggtaaattgcggcataaatacttaatgtttcagattttttacacttaaatacctaatgtttatnnnnnnnggcaaaaatacctaatgttacaattctcttacacctttactaccacttctgttaattcataaatatagacacgtggagagttcagatacattatatttatttttattttattttaaaacttaatatttttaatatcagaatgttctcataacaattttcacataatattggcacttcaattcgataatcatgttccatatactacactggttcactcagctatggtaatttagtattgcatttatcttattttttaaataaaaaacaagtagtatttagtttttgatattaagaatattaaaattttaaaataaaataaataaatgtaatgcattttggccctccacgtgtccacatttatgagttaataacggaagtggtagtaacgttgtaagagaattataacattaggtatttttgcctccaaaaataaatattaggtatttaagtgtataaaatctaaaatattaagtatttatgccgcaatttaccctttttttaaacagttttttaattaatattttggattctaaccccaacttaaaccttggaaaatgaacttagacccggccctagactgagacccgcctccggtcccgacctc

SEQ ID NO: 41515 - DNA, 1447 bp, Cannabis sativa
  modified_base (574)..(578): a, c, t, g, unknown or other
  modified_base (1051)..(1054): a, c, t, g, unknown or other
  modified_base (1211)..(1220): a, c, t, g, unknown or other
gttctatgtttgggtctgagttcaggtttgggttcgggtcccaagtcctggtctgggtttggattcaggttttggacccaatcctagggtgtgtctgtgttcgagttcgggtcctggtccggttacagttttgggtctgggtccagttcttagtcttggtcttgttcttgggtccccatccgattctagttttggttccaatttcaagtcacggggtacaggttggggttgagttttggtccgagtctgggtttgggtcctgatttgggtctggtttgagttcaggtttgaggttcgggtttcggtctcggttaagatccgaatgtgggtcctcaggtctaggtccaggtcccggtcccgttcctagatcccggtccaattccagttcaagattttgttttggttcctgagtgtgggtctgggtctgggtcttggtatgtgtccaagtcctggtttgagttcgagtttgggttcgggttctggtctaagtcctagatctagacaccgactacaagtcgggtctaagcatcgagttccgaatcccagaagtcgaggttggtcctaggtccaggtnnnnntctggggtcgggtctcagatccctatccaagttttgaggcccaagttctggtcctagtttgggggaccaattcccaggtctgggtcccccatctatgttcgaatcctaggtcccagtccgggtcctagctcgttttcaggtttgggtacgggtccagtccgagtccaaatcttggtttgggttcgggtctgagtttgtgtcccagtcccagtctggtccaggttttgggtcctaggtgtgagtcaagttcttgggtcctgggttcggccctggtttttgggtcttggttttggtctgtatttaggtcctggtcttggtttaggtcccaggtcacaggtcgcggtctgggtccaagtctcggtatgggttctggtctgagtttgggtttaggttttggccctgttacggtccaatatctgggttctagtcccagtcctagtctggttcaagtttcgggtccgggatcaggtcannnntgaacctgggacccgatcccagaccaaaactctgacctagacatatatctggatacgaacctagacttgaacccagacccagacccatacccactgggatcgaaacttgggagttggattcggaccgagactaagacccaaacctggacccgtaccnnnnnnnnnnactcagacctggacccaaacccaggtcataccgggatctggacttggaccaagacccaacccttgactcgaactaggactcaaaccctgacctagacggagacccatatccaaacccgaacccggacaccgaatcgaaatcggaactgggactaggacctgaacccaaaatggacccggactaggacctaggacccggacctagatgggggacctagacccgggcct

SEQ ID NO: 41516 - DNA, 1727 bp, Cannabis sativa
ttggcaacatggtttgatcattaccttttgaaataaaacaccttcccagaaaagaaaatattttggtcgagcttctatctagacctacgtctataaatatggtcttctcatatttactcaaaaccatccccttaatcagccacaactcctcccataccattacatacatatatataatggcatcatcatcaacatcacaaaagaattgctcatttctccgagatgcaaagctcatcatcctttccaaatcaaaaaattcaacaaaagattgggcctctcacagggctatttatactcataaccaaattctctctaaacttggaccctattttcaacataattttctaatttatccaaaaaatccttttgccaatctagtccccttccaaactgcacttttcactccaaaatccatagctcctcttttttggtacctaacatgcatatgtacgatggctgtcgaagtccaaactatggctcttcacattgctatatagtctttcctcgaacaagcctaccaaatccaaattgacattttgtcttggtacacttctctagaatagtggaaaaaatactttgggatgaatgggaaaaagttcacaacaacaggcatgtctttgtttatccatcaggaccacatgttgccaacatgatggattcctacactgtcttccttatcagtcttgatgcaaaattggacgagaataaaaaaatagttttcgatcccacctttcaactctacggctcccaagaagcacctttcagagaaagttcagagtacgtggatctccaaaattaaaagatgatgctccatgggaaatgtttccctcaaattattcacgactctagaaaaattctaaatttttgaaaatagtcacaattaggttcaagcccctaaaacaaagaagaaaaattcatcactatttaaagaaacagacaatgtaggggtcctactccgtaagacaagcatttttgaggattcacaagatctatacatggaccaagaaatcaacgaggatccctatctctttcagtacaatggacttgaatgggagattgtttattgtgaatatgatgtgtgtcaccagttggaagtgatgaagatgataaaccatcaggttagcacccacttcaggaggaccccaattatgactcaaactacaatgctaatcacgagccaattattgaccgttaataagtagagcaaagcgattccatatctcttacttgtgtaagataacaataaatggaaaaattcttgatagtcatgatagttttaggaattttttcttatcgtttatttgtcgatttattgttttctatgtttgtcagtttgtccattttaccatttgttgtcagattgtccttttctctatttgtcatttcattagtttgtttatttgttgtccatttatccttttgtatgtttgtttgtttgtaggaaatttttaggaagtttcttattttgtatcctaccccatgaaaatagctatatatatagagccatccttttcattgtaaggggcatcaaaaaagcattctactaaataaaatttctagtgttcttctttcaaaatattcttctaaattttctttaagagatttctgaagtagtgatagtgtgcattatgggtcataccgaagatattactgttataagttaggtatcactcaagtgtaaaggtaactaaggaaattatcactcataatcgcaagtcacgttgtag

SEQ ID NO: 41517 - DNA, 1324 bp, Cannabis sativa
atggttatgtcttggcttgttaattatgaatctactgaaatcgctcaaagcatattgtactttgatcttgctacggatatgtggcaagatcttgctgaaagattcaatgaggcaaatggtcctcgcatctttcaatttcaaacccaattaactcgtttgcatcaagatgatcagtctgtcacctcctacttcactaaattgaaatttctatgggatgaattgaaggagtttcaacctaacacaacatgtacttatggagctatgaaggcatttcttgaccattataacccaaaccacgttcttcaattttttgactggtttaaatgagtcatttgcctcaattagggctcagattctacttaatgagcgtattcccaacctttcaagggtcttctccatgatagttcaagaagaacgtcaaagaaccttaggcacctctgatgcatcctgctttgcatcatcggttaaaccatcataccccaccaatcccccaaaaaacaagaagccaagaccctcttgttccaactgtggaaaaccaggtcattttgtcgaaaagtgctatttcttgcatggttttccacctggttatggagacaaaaaaaggcaagagaaagggaagggagctgctaatcaagccactgccaatcttcactctaaagataccaacaacacctcggttttagttgatctgtccactcaatgtcagcaactaatttcgctcccaagtcaacaatttcatcagcatgctcctcgaacagatcctaatgttcctacaacagcttcaaacatggctggtaaccattcttttaccttgtctaattcttggataatagatagtggtgcaacttaccacatgtgcttcaacaaaaatctatttcactttttttcacattaacattatcctaaatcagttacattacctaataatcacaatacaccagtccttagcattggtaccattaaaatcaactctgccataacattacataatgttctttatgtaccacagttccatattcaccttttttctgtcattgcttacattgataacaccactaattcagttctttttcaacttgaaatttgtgttattcaacagcactctcagaatcgggtgattaggatagctaaaaggcatggcaaactctttctattgccacatgaggctgttgtcatggccaatacaagtcaatctccttcttttttttctttacaaaataatgtagatgaatggcataatcgccttggtcacccttcaatgtacatttccaatgttcttaataaaaagattgactctttcttttctccaaattcaaatcagcat

SEQ ID NO: 41518 - DNA, 1332 bp, Cannabis sativa
  modified_base (507)..(510): a, c, t, g, unknown or other
  modified_base (1296)..(1300): a, c, t, g, unknown or other
taaaattttatgtgatttgaaattgtttatgcttcggttttgattcacatttttgccaaaccgtacaatgcggcgcagtttgcaattttgaataactctgattcaaaccacaccacaccacattatatattacaaagttactatttttacaatatgatttttatttttgttttttcatataagaacaaatatatgtaacatatgtatatattgcattattttttagagacaattcaatataatgacttaataattagtatatatattatgttgttaatatattaataacttttgtttgtattgttaaaactttattagattgtgtttaaatcaagagtagccttgatgatgtagacatcaatgtttgacatgtggcaagaaagataacatctcagaattgagtagttccgagtctattggggttcatgctttgaaaagcctaacatttctgattattaacaaagagttgaacattttgataaatgcttgaatattaaattattaatnnnnattattgaataatttatattaaatatttaaaaattttgtattcatatatgaggttgtggcttgtagttgtacaaagaactaataagaccaataaaacagtcagcaacatattaaagttatggaatctttaatcaatggttgcaggtacagttcactgatgctcgttattcggtgcaagtaatctcggttcagattactaatgtagtaagacatttaattgaaggtactttataaaataaaaattatatatgacaaagatcgatatgaataaagttgtttttattaacatgtcatttattataaagacataattcatatcgtaacgatgatcaatagtagatcggtctaaatcctaagtaatcatgaattcttgttcatgttattagtttctttgattcactcattaaagtttctcagagaagatgattcttacaacttctgtttttggaatctaataatgtagatagctgggaacatgatttacaattatgaaatcctaactttcataacggatcgaatgttagttctctttaagtgttaattctagtattgaaaagttgcgtgcaaattcaaatagaatcttgaattaaacttccacaagtaaattaatggaactaaagggtaaaaaaataattagaagggtaaaacggtattttgaccaaaactaattatgaaccaacacatggagtaattactagaattgataatatcaatgcacactgcaattaaactcaataaatataattctataattactaagagtgcaattctatatttatagtggannnnncatggaattaataaacaaggaattatttggtt

SEQ ID NO: 41519 - DNA, 1864 bp, Cannabis sativa
ggagaataattatgaaatatttttacgaaggttttgaatggagtacatattgattatctttgtaacaagctcattaacatctatgctccagcttgagagtgagtgttaaaatattaactatatattaattgtaaaaattagggttaatagtatacatgattccattcattatttttctataaatataaatgtaataataataaaaaagaaaatataaaatcccatatacaggtaatttctcataattaaattcaaaattaaaaaataattaattaaaatttttaaatagccataaaaaaaaaaattacctcatatattatttttaaatttttttttttttcaaatttacagtttggtttgtaaagtagtttccactaacaatactctatttaaaattagaaaaaaattacatctagatacatatttttataaataattataattataacgtatattttttttctttacatttataccttctatttttcatattcttaaatgattatatcagaaaatagttgttattatcattagtaacgtaataaataaataaaaaaaatagttagatattagtttgtgcttaatttagaattagtttctataaattatacatttccttcaacaaatttattttattttctaaaaatatagaggtataacataaatatgcttttacatataaatatatataacttattctcttatatattttcttattataatataaattatttattttttctacattaattcttttttttttttttgaaatagataactttcaatgtttaattattcattttactaattattatgtgaaatataatattcatttcttattatttttttttacacttttgatattctcatttggtaaatatattaataaatattattaacaaataacaaataattaatactaacagataatatatactaatagatatatatatttgaaattatatatatatactaattagtatatgttaagaatatataatagttactactaataagtaagaagcaattaatattatgtttgaaattgtacataataattagtacatatttaaaattatatagagattaaaaagtaatagatacaattaggtatacatttgaaaatgtacatactaattagtctatatttaaaactgtatatttagaaaaaaccaagtaatagatactattaggtatatgtttgaaatcgaaaatactaattggtatatatttaaaactgaataaattctaatatattataaatattttaaaactatatattaattggtataaatttaaaattgtaaaatattaacaagtaaaagttactatccggcatatattttgaaattgtatatactaattcatatatgtttaaaattttatatatactaacaagtaatagatactattagatggtcaaacataaataaaaaaaatatcaatggacaatcaaatactaggtaaaaataaaattatattaatttttcatgttaaatactaatttattaaatatgtagtaatatcatatatatatccaaacaatataataataataataaatataaattctaagaatgttgttacttattataggcataattatggaatgtaattaaaaataaggtatattgataaatattgtatgtatttgtgttatattatattttatacgtcttttttataattactttgtaaatagtgtatagttatgttaaattcctttaaaattattattagttaacttacctaacactatataccgatatgacgcgcgttactttttttttttttttttgagtgtagcgtaatagtattttacaatcagttaatagcttaatagcttcaaggtcctaggttcgaa

SEQ ID NO: 41520 - DNA, 1760 bp, Cannabis sativa
tatttcaaattttgagccccagagggaaaatctacaaattaaacctgactataaaatcagagggcatacttaatactactactaataattaacacattgcaacattttttttaagatggaacgacccaagggagttaaaaaggaaggggatagaggtcattgccattccaataccaagtgttatctaattctatagccatttgtgccaagttatgcctgcttgaattccctttcctccggatatggttaagggagacagcgggaaaagaagataacacttctcgcactgaatttacaatttctccatagctcgataagatactctcttgagtctgaatatcagagataagattcacgcaatctacttcaacttggtggataccaatatcactgtctttgcaccatcggagtgcttcaagtaaagcccatccttctgtagtttttggtggcatctgtccttggcggctcatagctgtggcagctatcacttgtcccaaagaatttcggactaaataatctcccattcctgtttttctcattttttcctgaaacagcaccatcaacatttagttttaagcatcatatagctggaggggaccatttcgttaccttctcatgactaggcttttgagactgcgtcgtgttatatttttgagattgttggtaaaaagccaagtattcttctgcctcctgttgaatcctgtttgggtttccaaactggttcctaaaaataaaagcattcctgctactccaacacttccaaagaatgcaagtaaaaaggttaaaagattcagatgaaaagtttgtctaaatatataaaagtatatctaatacatgtattcctcgtaactattcagagcatgtttaaagggcgtacctgagcacacctttttcatatccttacgatcaaacaaagcatgctggacagactcaaagtgtatgtgacaacgagaacaaatgggagagtggagacattttctgttataaagattctcagcagtaggaatggtgttgagacaaatgatagatgaaatgttttatcttagggggagtatgaaggccccagagggattttcaccaagatctaagagtgtcagaactggagggggagggctgggtagtgtaagtggaggcttttgcaacatgataactggattttaccgagtaatggcccgagggggtatgctgccagaaaaaagaatcattttggttattgtcaggagggggcagagaaaggatctcattgataatgtcatgtgggaagtatttatggagaagggggatgtttcaatcaccatttggagagaagcagatcagagacatgggtaaggtgacttgggagggaaatggggggaaaacgacaatttgggatccaatggtcatttagaatgttagtgtggccccattaccaattcttttacaaaggccaacttttaggagggattttccccaatgtaagctctgccagacataagaaggcgagtggcctaaagaagcttccaaaaaagtagaccgaggaaagtatttggacttgaaaaggttggcaaggagggaggattgattcgtttgaattctccatgcttgctttgcaagcatggttttgttgaaaggtttaagcgatctaaaccctaatcctcatatgctttttgaattgcaaagggatctcctatttttccaatgaagtttacgttatccatccctagctccccaccaaaaatttgccatttctttctcaacaaagtattggaaattattttacc

SEQ ID NO: 41521 - DNA, 1250 bp, Cannabis sativa
tcatcttcgatatttagaagaattatttagtctatttttttttatagttgtgcacgttacagttatttaagacatcctgcaaaattctaagaaatttggaataattacaatataaaaaataatttttaaataatttatttatatgcgggcatggaacagacaatttaaactttactttcaacgtattaaatttctttaaaaatctcaaaatttataaaattttaaataactacaacaccattataaaaaaaatgtactatacaaattttttcaagtacatggtgcttctacattgtaattttttttatattttttttttcctttttcatttgcttatttttaggaaatagttattttgaatttaaataagtatttttgggagtgacatgacatgataaggaaaaagagaaacaaatattttagagaggacaactcatgctatctaatactcataaattatgttataccctccaccaaaaatcaattgaaagatattattaccaaaaaaagtaatatcatcctaaaaaccatgtaacgtaaaaaatggaatgaaaaaaacgcttttccccaaccttttagattccttccacttcttgtgttctttcttcttctttttttttttttctttcaaaatagagtattagagtaaataagagtataaattaaatggtaaagttttagagttataagtttataaatagtataaattaaatatttattttaaccgtataagtacttaatatttataaaattgtaatttttctttaatttcgttagtacaggttccattttaaacttattaaaaaaatatttgaaagtaactaataatactacatgtttctgtctagacctaataatgtagaatttagactttatatgtgatattttaagacaataatagagtctatactaacgaaattagagataaattataattttataaatattaaatacttatgttgttaaaaataaacattaaatttatgtcacttataaacttaaaactttgagtacttacaataattgacaatgtttacccttcaaaatataaagaattgttgattgaaagagtcctttctaaggtttgtaaaaattaaaaagaaaaaaaatagaaaaaattacaaaagagaacttttacctattagtaatatgttataacaagttataaaaaaatattttatattatttataaataatataatatatctttatatattaaaagtgcctaacgttaacaaataaataaaccc

SEQ ID NO: 41522 - DNA, 1937 bp, Cannabis sativa
  modified_base (73)..(75): a, c, t, g, unknown or other
ggtcccgatccatgtcctaggttagggtctgggtctagggtcaggtcttgggtctcggtcccaattctgatgnnngtgtcccggtccatgtcctaggttaaggtttgagtcccagtttggtttccaatctcggtctacgtaaggatttgggtttgagacatggtccaagtttgagtctgagtcctgtgttcggatctgggtctgggttctgaggaccggtcatggtccgggtcctaggtcctatccatgttcgggtttgggtcctagtcccagttttgatttcgattcagtgtctgagtttgagtttgggtccgggcctggttggggtctgagtcttggtttgattctaggtccgagtctgggttcaggtctgggtctgggttcgggtccaggtccaagttttggtcttaggtgcaggtccaggtctgggtcttggtcagggtttccgtattgatctaggtcccgagtttcgatcccgacctgcgtctgggtctgggttcgagtctaggttcgtatccggatccctatctaggtccgattctaggtcttggatcgggtccctggtctaggtcaaggtccggctctcgctcgcagtctgggtacaggattgtttttgggctcgagtcccaggtctaggtcaaggtccggctctcgctcccagtcctggtcacagtcctagtcttattcaagggtcctggttttgcagttcttgttcaggttccagttccatctcttgattctaggtcagggtccgcgtttgggtcctggtccgagttcgggtcctggtttgcgtccctgatctagtcccggtcacctgtcccggtctagttccggttaaggtcctgggtcccaagtcccagttttggttcgggaccgagactggggtggggttctatgtcccggccacaattttgagtctggttccatgtttaggtctgagttttggtctaggttcagcactgagtctaggtatgagttgggatctaggtttgggtcccgattcgggtctaggtcttggttggagtctggcacctggtccggttacagttttgggtctaggtttaagtccggttaggattctaggtctaagtccaagttctggttacggttccagtcccattctcgggtcccggtctacttccagtttcggttcaaatttttggtcacagggtacggattcgggtccaagtttgggtttgggactagtttttgtccgagtcttagttcgggtcctggtcttgttctagttcgggtcctgggtctcgggatgggtcctaagtttaggattgcgtccgagttcggggttgtgtcctgatggtcaagtccttgtttctgggtttagggttgggtcccgtctctcaagtttggggtcgagttttgggtcttcatcccagtttcggtgcctagtttctagtccatgtcctcaatcatgatccgaatcatttgtcaaaatttgtgtccatgttcgggtttggggcccaagtcccccatctaggtctagatcttaggtcctggtctaggtaaaagttcaggttcgggtttgaatctcatgtttgggtctaagtcttggtccaagtacgggttcaggtgttagtttgggtctgggtccagaatgagtccaagtccctttttgggtccaggccggggtcccaaaccggggcccagtcaaggtctaggtcatgaaccatgttttggtctgggttttggtccgggtttaggtcttgagtttgggtctaggtttgggtctggatctgggtctgggtcctcgtcctgggttccaatctcggtttgggtataggtttgggcccgtgtccaggtttgggtttagggtttagggcttagtatttagggcttagggcttacggtataggggtaagtgtaaagagttttgaatttagggtttaaggtttaggatttagagtttaatggtccgcttc

SEQ ID NO: 41523 - DNA, 1142 bp, Cannabis sativa
  modified_base (693)..(699): a, c, t, g, unknown or other
agttttgatgtaggttccaagccacatgcagagttcctatgaaggttctaagtcataggcagagtttctaaacaaaatctaagagtcgaaaaatgtgagaatcaaaaaatttctaaaagcttgaaacttatcaatggcaggttcaaagaatagatatcgaagaagagaagataaggcatatatgaagagagtagatcaaaggtttaaaagcacatcattcgaagaactcaatagttggccaaacaaggttgctcgatgggggctcctatagtcaagacaagagctaaaaagtccctatccgaatagatatttgaatagagacttggagggcaattgttatcccaaaatttgtccacttgacgtggcatgtcaaaatagtcaggactgaggacatgtggaatacaactcgtcaacaagaagacaaagtgaccttacacgacatgtcaattgtcaagggttctgaagcaattgagcaaaactatcaagcaataagtaagaggagttaagcagaccaccaaggccttaaccaaccatgtttggctggccaagggaagtgtataggctggccagaggaagcttttatggtcggccagggtttgagcacaagctagtcagccaaagagtgactatcaggccgaaaagggtctgttcgactaaggaggtctcacctttgtaaggaaagttgtacaaagnnnnnnntgttaagctatttttagcctaagttttgagtcactttttatagttgttgttcttctttattattatttttggaatagaattacacttgttttctttcattttaggtttcaacacttggaatatataaattggtcaaattttagaaaacgatgatctataaaatagagaaaattttgtaagaaaataaagttaaaacttcaagcctaaagctaactatgttcttatcaaattttgaaaaacattaaaacataaaagttttagatctgttttttatctttccaacgcatcttgaatcaacttatttgaagtttatatgtgaaagttatacacattttactgagagaggtcgaagtagaaaagtgggtccagtggccacaacgaggcttttggtggccgcggcgagggactacagaaagccctttttttcacttttctacagccgc

SEQ ID NO: 41524 - DNA, 919 bp, Cannabis sativa
aataatatttcaatccaaaaaaatagttgtgaaatttagttgaaggtaataaaataaataaaattaaaagaaaataattttcattatattttttttgtttatttgcattttaaagtattgaaatatctttctaaaggaatgctcttttcactattttaatagagtgagtatttcattttaaaattgaatgaaaaatcattctaatattgagaaaaaatttaatgattttttatcaattttattctattttattcattttttattcctattcttatattttccttcctctcaaccaaacgttatcacctgaatattaatcacacaataatctttcaaaattttctttacatctcaagatttgtatatatgatataacattctaattttaaagtctctaaagcatattatcataaggacaagttttaatgggggtgttattgaattagtatgggggtaaggttgaaatgagatggaagagagggttaaaaattcctagttatgctgaccaataatttttatttttttttattaagagaaatatattgattggttactttttttttgggtcctctataacacttttgttttgcttccattaatgatgacctaatattccgccagtagtggtaattagtggggtattttattttaatataaataacttcatgaagataaatatgcaaatgaagcagattcaacttatgtcttgtctattaataagtaataggaatctatggtaaaatacgtaatcatttctttatatttgtttacttactttgttaaaattaagaaaatgaaagcttgattaaataaggaataaaaaaaaatattttaaggaatgtcattatgcttattaataagtaataaaaaaataatagtaaagttgtcatatttctcttatatttatttatttacttta

SEQ ID NO: 41525 - DNA, 1095 bp, Cannabis sativa
  modified_base (1060)..(1060): a, c, t, g, unknown or other
cggaattatcaaatacgcgatctgtatagattaaacccgattgttgtaatattcgtttgtattaaatatgtggaattattagttgttttgtggttttgtgttagttggctcgcaacagatataattgttgcattacagtttcatcacaattgtcttatagttgacttcttctttcccttctggccgtcgaagttgaaattgttttcaggcaaagacaccttcgacttcttcttcactggacgaagaccacctttagctacggggggagcaaaatcgaagtcatcatcgtcgatgactgagcgttttcctttagccttgttagcaactaatttatgacccatttttaagctttttttggctatagagatggagaagcagaatcacaagtaatagccattatatatgcaaaatgaaagatgtataaaaaaaattgataaaggggacagttgggaaaataagatggtgaaggttatggctaggaggttgttttcgtgggttttcaatgtggattttaaaaggataatggctggaaggtagtttggactcacatgaatggattgtgcaagtggtattttgataaataaaagctcattaaaaataaaattgctacccataccttatggaggtatttttgtaaataaagtgtcaatttgtattttttatgtaaaaatttctaaaatttatgtataacatatatatatatactaagttaatattacgtgcaatgcacatatacttatttagcaactcaagtgtcgcaaaaaaaaatatgtgttcttagtttttattttggttatgtatatttttagttgtataattagttttttttttttttttttgctgtgtggatagggatgcacacagggcgggaaattggcagggaatgcttcccccgtttatatccccgttaagaattttaattcccattcccgtttattctccatcgggtataaggcggggaatcccctaataggggcagggtcggggcggggaatctcttaataaaaatttaaagtttacaataaaaattttaatatataaaaatattaaactacataanaattaaaatattacacattaattgttattcaataa

SEQ ID NO: 41526 - DNA, 1107 bp, Cannabis sativa
gcccggttgcccaggagaactacagttgccgttctaacggctgggaagcggacgaactccactctaccctgatctgcgctcatcagttagagatgatcgtgaccgtagctggcattaagccgtccgcgtctggggtctttcatcgcttacctcgggacgaagtgacgcccaatcacaactacgggggttttggagcttggagccagacccatcttatgtccggagccatgcttccccttcatgactactttataaatttccttgtttttgttggccttgcgccttaccaacttattcctcaagcttaccgcctgatctcaggcctgtttattttttatgtagcccgtggctgggcttcacctagcccggctgagattttatatttttatgaacttgtatcagtccccaagaagggggataagtttaaagacagttttttcactctccgggccaatcctactaatgagggtccggtcccttatagtttttagaaaaatgttaaggagtaccgccaccgcttcttcttctcttccaacttccaaaccgttgatcgctcagagcttctcacggagtgggtcaggatccctccgctgcatcgcactgctcctacccagcttttcctccagcatgctaaggttttctccacttatgacaaaaatggtcttaatgtgggggacttggtcacaacggagaactgtcggaaggccaagctcatctcggggagccaatccgtggatgacttcaaactctctaaggtcatgtgccccaacattcggaccccgaacgctgaaaaggcactccgggaggacatcattgcctcgacggaggaccggtatcaaaagtacctctttaggagtaaacaggagttagcctatatcaaggcccaagctgttgctgggaggaccctccagatagaagcggggaaagaacgggcgccatctcggcctaagatgcttctcctggtccccaacactggggctcctgatgccagcacatccgaacctggtaagtctcccttaacggtccatcatgttccttctgctcaagattatttccggtgtaggcctatagaatttgacgaatgtctccttaaatttagaatgcccc

SEQ ID NO: 41527 - DNA, 1181 bp, Cannabis sativa
agatcctggtaaaataattttcaacagacttgttaagggctggtaataagaacactaaatttttccaccaaaaagcttccttaagaaaaaggaacaacatcattagaagtatcactcgagatgatagtaatattattagtaatcataatgacattagtagtagttttgttaatttttatgttgatattttttcttcccatggctctgatgacaatgctactgttgggattcttagtgggattagcatcaagcttagtgctactgttgattgttatcagccattaaatatggatgaatttcaatttgtaaggagatatttttttgagttttatcactaatgctctcaatgaaagtaccaaactgttaatgtatattttcgttaactaaaattgaatagcctttcagtaataaatattctacagaaattaataaataataaaagatataataactctagatatttttacatggttttgtagttaaaatctacatactccacgagtccttcttattaggaatatttttagagtactaaatacaatatctgacattgaataataatgattctttctcaaatttgtcgtcccatttctcttggaatctgcccctatttataggagtataggttgatacttattctttttgggatagatttaagtataatagtaaatgaaacgtggacaatccccacgtttcatttaaatcacacgcgagataatactaaataactactcagccattctttagttttatcctttagatggatattgctgacgtggaaggttacatcttctttgattcgagttatcttccttgtccatcttgacaagaaaaaacactaagtgttgggaaggttttcatctcgctatgtcatctttgtggcttttgtaatgcgaggtgatcttctcgctatatgtaatgcgagacagtttatgttgatatatttattctgctcgggtggatgaatatataacaccctaactagcataggcgtgttagcgtaattttaaacgtactatgcaactcgttgctaatcaacaagattaacgaaaaacgtgattaattaaaagaaatcttaaagtattacatatatatacaatcttgggattccgtttacaaaatactttttaaaagtttgctatacatataacaaaagtttgttgccaagcgactatacaaca

SEQ ID NO: 41528 - DNA, 1807 bp, Cannabis sativa
  modified_base (240)..(240): a, c, t, g, unknown or other
ctatgctcctgtaaagaacatggatcttcaaccaagaaacactggtctggggtatgccattaacccgctgaagcttagcccaagcgtgacaagctacagacccaattgtagagctccttctaatataatgtaagaagttgtcccccaggccatgctaccgtgcaaagcatgtgtgtccttgtgtactgtgcaatacaatcctacggctagggataaggggaattcaaataagagaagccntagaatgacacgcgtccaaagcatcgtcagtacagccaatacaatctgacaccggtaaagaccacatggaaaatatgccacctaccaatccattggtggaggttcatccccatgaagatccatcaagggtagcccatgcgagagggtctgcctataaatacccctgaagacacacaaggcaagggatttagattaagattctgaggcttgacttcactttccatccttcaactcttcaccttagtatcaaaaactaatcctttataaaagcatcctacagtaaccccaatataaacttcagaatattcctactaagcttcccctccttcaagaggacatagtggattggggtaaaagtccatcctttttgtatttgtataaacaaccaccggtcgatgggcctaataaaattgactcatggattaaggataattaacacctgaaccacgtaaaaatctcttgtttgttattttattatttgtacctttattactttcttaagctctaatattatgtggtttctaaatacttggtaaacagaaagaatgaaaaagtttaaaaataagaataactttgactctcacctaaacggaacatcgttggattctaattttaatcaaaattatcctttattttttctcttagcttttttcattgagaaattgcttagatattatatcattggacagaaggttttataaatcatctgcttatgatgtcactctattttcttctatgaaattgaatggcgcagatgactatattccagatattatatcccaaaatgatataaatcattgatcttagagaatctcctacttgtatatacagatgattatattccagatattatatcccaagaaagaataactactcaaggaatatttggtataaattttagtctttgactttaaattttagatttcgaatagaaatttaaatttcagtttccaagaatacattagacactacaatatgagtttcttaagttgttaatatccatcttctaataatggatttgaactgcatgttaatgtatagattatgagttttgtattatgtgatcagaacccacttggactattctaatagggttgagcatcagtcggttcttttctatataaaaatatagaattcagtttttggtctggattggtgcaatctgaaaaccaaccgaccaacatagaacttatcctaaaaccgaccattttgaacctcaatttggtcggcttaaaccgcccaaacccttcttttttcaaaaaaaaaatatgatttaatttattctacaaaattctacattttacaactacaaaccaataaattaattgtaaactaattatcttatttttttaaccttaatattaataaaataataatatatcattatgatatattattagtgactacaatacataaagcaaaaaaaaaacttaataaattaatatatacatgtataacggtcggttttagtttttttggtcagtttattacccaaaaaaaatatatcattcattggcagtttaaaccgttagcggtttttttggtttctgatttttcggtttcgatt

SEQ ID NO: 41529 - DNA, 1399 bp, Cannabis sativa
  modified_base (30)..(38): a, c, t, g, unknown or other
ttttagttacaagtaacattttattgtgannnnnnnnnacatttagtcacaaaaaaaaattatattataactaaaaagttatcattaaaaaatagtaattttttatagtgggaatccttgattttggacatagattaaagtttttaaatcttttttttttttttcatttcatttcataatgttgaaagttgtagttatttagagttacttgtaaattttaaaaaattatgatgtactaaaaataaagtttaagcaatcacttaccacaaaaaataatttcccatggaacataactaaagttttcttgaatgccaaagagataggtaacacttttttataggaatgtagtattgttcagaatgtgaagagtgatgaagaaagtaacatagggtaaatgtgtgggaagatatatgggatttaatctaaaactaataggcaataagaggatgagtatctcatatactagtaatgtgaaattctttaacatttcttgaagatggtgaatattttttcctcaccaatcgcaatcggctttttttggaatactattcatgaatcacaagcgactcttttgactcgggtattagatttagattggatacttgttaaagtagaataagatatgtgtatgttaagatgcacaagtatccatctcaaaactattttttctaacatatttaattacaccaaattaacatttattcgattacaaaaattttatcatgggattatggcttgtaagctactagatgtaatataaatgttataacattactcacacatgataaatatatgacaaagacacattgttaacccaaaattttttcttggtgtcatgaacattaatgtttgacatgtggcatgaaagatgacgtcacgggttgagtagacctgagtcatagtagttaacctaggaggggaccctagccctgtgcccatgttgactctgggagcttcgcgatagaagtttgcactttaataacttgaatccaactcactattttttagtattatgtaccatgaagacatggagcaacataatacaatgtccgggagctaaaattacacgaacctacaactcgaaagccaacctgggaacctaggatttccacctggtgcccacgttaacatcctcaactagagtttcaatttcccaggaccgtcttagtgcaaagtggccaaaacatgcattgggacatcgacttaacataccatgaacatatttgaggattaggagcaagttaatttttgaacactaggggccccagcacccagcacccaagttgacaatctatcaatttgggcgccttccaagcattcgatcaaagatataacttttgcattgcatctatcttcataaaaaataaggaaataggtccttctggaagaaaaacaacaa

SEQ ID NO: 41530 - DNA, 1236 bp, Cannabis sativa
tatatatatattaaaaatatcaatataatttatattctcttaataataatttaaacctaatatttaaaaacacagagtataattaatattaagctagaattattagtattaaattaaaaatagtttttttttttacacttcaaatcaattattttttaaaatttacatagcaactaacggaataacttaactcataactaaaattcacataacaaatcacataaaaaatactgaaacaccgtaaattaaaaaaataatatataaagtaattcctcaattaaaaatttagtcaaaataattaaagttagtaaaaaaaaaagtataatttagtaattcttagaaaaaaaaataaccaaaattgaaatgagagtattataatttttttacaaaatacaaaatttaaattatcataacaaaattaaattttatactataaaattttggaatattttttctattaaaaaatggaatatttatgagcagcataaacttaatgtttatttttagcggcataagtacccagtatttataaaactgtaatttttcttcaattttatcaataaatactctgttttaaatttattaaaaaaacatttgaaagtaactgatactacatgtttctgtcaagacctaatgatctaaaatatgaaccttatacataacctatttaaaaaaaataaatgagtttttatcgataaaatttgagaaaaatacaattttacaaacattaaatatttaaatttataccactcacaaacttaaaatttaatatattattatatatattatgtattatataggcatagaattattaatgtcatttattattaatttatatacatatgtatgtgtagtagtagtaataggggattcagaattcagatcactcagccgtaggccctctatccaaaaaaatcaagcaaaaataaaaatagtagaaataattaaacaattatggcatttctaaattctgatattgaacagagatacagaacacaaccccactcgagaattgagtcattccatcataatgaatgaccaatatggaattaattacactctttcactttctctctctctctctatatttatatatatatatatatgtatatatatatgagagaaaagacctgtttgccggccaggatatggacatagatatgggacctcaaatattttcatttaatacaaacactgctccaaacaagccacactataatttggtatatatatata

SEQ ID NO: 41531 - DNA, 1892 bp, Cannabis sativa
gtgtatactatattgaagaagcaaaagaagatgataagttgctaaatcttcatcttaaattataaattacatataactaatattttaaaaattaaaataataaccttacataaaattttaaaaataattaaccatcttatctaaaaaaatagaacttaaaacttacacatatttattataatattttatgtaaataattaattcaatgaaacttataatatttttattattatatcaattattttaaatagaaaaaataaattcacaattgatatatccatttagtggaacaataaatggtcaaataaatgacaacactaccaacttatataattaatttctcaaaaaaatactaaatatattgaaagtgtttctaaattgttatttaagtgttggatgctataaacttaaattgatcaagggaaaatgaaaattgaaatgtacaagaactttaattcatactctattgaagaatcaaaaagaaagattgctaaattttcttctttgagtataaattaaatataagtaataatttaaaaactataatcaaaacttaacctatgtaattttttaatatgaaaaaaaaattctaagagaaaattacaaaaagaacaaacaacgtgctttgtacgtagttgtcgactagtatatatatatatatatatatagtattctatactctgttgaagttgaagcctaagtcgtagccgccctgctcgctgtcgacggcgatcgaagaagacggaaactccccactcgcagacgatcgaagacagcaaacggcaacaactcagggtaaatcttttactcatttgctcattgatactatcaaagtaaaattaaacaaaaagtaattttacagataaaaattactgaaaaaaaaagaagactgccggagtgaggaaatttctataatggtgagtgtgaccaatttgctaaatgagattgatacataaatgcttaatagaaagggaaaatgcagaatgggagttgggagataatggaatcagaatagattgctactgcaattggcaaaaatcataatcattgttgatacaaattacattctttcttctagaaattcataggctggatcaataaaagtctaatttaattttagtggagatggataattaaattgttacccgtattaattcaaaaatgttatttaaattaatataatggaaggtaatgattcaatcctagttatattactaaggaataacattctaaagctaaacacttaaaataaacaaggtaatgtttcacattatcattcctttgttagtaataacccattccaaacaccccttaatgacaacttttagaacaataatttattttttatgggtgtctattcatatgaccggatgcaatgaacagatgcaatacaattcttttgtattaacagacttctgttaaaatttactttttcattcagaatattctgttaaaagcacaacaacgtgttaaatacacaacaaagtagagttagatagacatttatataatagagagaagatatatatatttgtgaataaatatgtgcatgttatttggtattttaaatactacattgatgtagtgccttatactattgattatcgttaatattatttattaaatcaaaatgtgtgagacttgatattaaaataaacgatttgccaactataatatgtgggaaaattacaattaatatacagaatcaaattaactaaaacttaatcaacaaacatttaattatgacaagattaataagtcacaatcaataattagatattaaaataaggatgaacatagtattaaaattagaaacaattaaagtagtaaaacaataaaatcaacaccaagatatatactagttcaaatcctatcaatcgatgtgatctatg

SEQ ID NO: 41532 - DNA, 1511 bp, Cannabis sativa
aacaaaatcttctttgtgtcctttggaggagcctcatcatcactatcaacataattcatttcttccatgggagcatacatacttgtagaacatcacaaccagcctatcacagtatttctcaacatcgaattcggagggaatatgtttcatgtcaataaagtatttagcaaacgatactacaaaacatctgcaatcactataaaacaacattaaaacaacataaaagcaacaacaaattaacataaaaatatcatacttttgaaaaaatttaaagttgcttaggtgataagaaaaccttgagctcttagataattttgaaggtacttatagacagagcttttgcaacgaataaatttttctgattataaatataatctcaatcttatagcatttaaaataacattaaacaaactataaaataactttctactatgaaatatttttttaaatgaatgaattacaactagagaatatttcaaacaacacaaaataaaaaaataatatgtaaaccttggcaatattattctttggaagcttgaagtcgtcaacaacattagaggtcttaccatgaacatgaaaatattagaatgacaaaaattaataaaataatgaactgctaaaaagacaattaatagttatacaaactataagtatatcatgaactgaacaacataaaaacaacaatataataactaaaaaataatgttattgtaaaaattaataaacatgcaactaaaaaaaactctaattaaaactcaaattcaactgataaatgtaacctaattcaatgatatagttttttcttaaaaaaaaaaaaactcaagaaccctagaataaaaactgtataataactcaatgaaaatcaaaaagtaactaattagaaacagaaaaagtgagagacataaactcaagaactgttattttaaaaaggacaaaaaactcaaaaaaaacgtaacataactaaaacactcaattaaaactcaaatacaaataaaaagcaactgataaatgaaagatctaatacaatgatcaagttttttttttttaaaaaaaaaaatatctcatgaaccctagaataaaagtcgtataataactctatgaaaattaaaaaataactaattaaaaacagaatagtgaaagacataaacccatgaaatatttttttagaaaggacaacaaaaaattaaaaaaaaaaaaaacccaaaataataaccgcataacaactcaatcaatactagaatataactttttttaactgggcattgaaataactaaaatacacacaatagaaaaaaaaaaatacacacacacaacagaagaaaaaaaacacaaaataaataaataaaaaaaaacactcgaaatcttacatacttgacgttctttaaagatttgatcatttttgttgttcgagcctctaccttagatggtatatgcctttttttctaaaattagaaccctctagtacatcacattcaattgactttcctttttttccaatacctttcaacctc

SEQ ID NO: 41533 - DNA, 1644 bp, Cannabis sativa
acatagagttgtaccggatactgatgaacgtatgtttagcttaaatactgattgatgctatcacatcaatgtggctagagtatgactagattattgagcataggttgatattatggtggatagtattatcgtatgaacgttctagactcaatagcgtgtgggacacaaggatagggttatggttgggtgtatggccgcctcattataatctggatgcttactatgttattccttatgcttttcttattgagcttattgactcacaatcgttatttccatgtgtaggtaaaggcgaggctaaggcttagcagccgtgagagcgagcagatggagattgtacatgtcgaggcggttaggcttggagtgtacgatatttgggacatcggggcttattttgtatattcgctaggtgttatacccaaaatttggctggagcacacgtgtcaagataaagggaatgggaatcggtgccatatcttttctaaaataactcattaattgcgtaagtatcagagtatatttgtaacccgctgactgtaagattttaggcgaggaataaaatttttatattagttcaattggaatattatttaattataaatatgaatactgttcttattttattacgtttcttttaaatctaatttataattaaaatttattaaaacttttgctagcatgttatgcctgcttttgccgacaaaaaaaataccaacaaaaataatatttcttgtagtatgatacttgacttaattttatgtgatcgtagaggaaaacataaatcaacaaaacatctcactattaacatgaatctcaatacaaatgttgccataaaaatatcacttgagaaaatagtgtaaaagactaaaagttttccaataaatatctcattacatatttctaacttttccaattttgatggcgtgggatgataataggaatggggtctcgatagtcgacacaggcacaggcagtagtggtctcaataatgaatattgtgttgagtttgattccatcaatcactactacaaaaattacaattctcctcagtttttaagtatcatttaaagaatttgtgtcggtttaaaaaccgacgtatatgccatagttacaaatagttttttattagcgtcgttttttaaatgacacaaaaaataattatcttcatttaaaaatcgacacaaaatagacactcttcttttttatttacttcgtcggtttaaaaatgacgtaaaatcgtttgtggtatttcgaaaccgtcactaaaatcttatagcgtcagttataaaatgacacattgctgaaatattttttttacctattgtgccggttataaaatgaagcataaatataggtaagaaaaaattacaaattttcacgcaattttttccacctcgattatcaaattttagaataattgtaaatacataataaaaaaaaattaaaataatatttataaaacttatataaaatcagtaatcaattctattaacttacaatgtcattttacaccaaaaagtatatatgaacactttttaacaatgttacacaaaaacaaaataatagcgaggcaccggagaagagtaacacataccttagcttacaatgagaaaactaagtgtaaaagtcaaaccggctcacaga

SEQ ID NO: 41534 - DNA, 1446 bp, Cannabis sativa
agatgacaatgatatgtacaaatatagcagcaatgaaacccagaaatacaacataacaaacatgtgagatattgagaagaaaagccagttactgtttgaagttggggtttgggattatgaacagctctgtagtctgcgaatccgtgaatgcagtgaggatctctccgagcgcgtaaagtcgaaacttaagtcagatgaaacttgtagaaaaaaatttaaggacagagatggcatgcaagttttcaagcaaatctagtcctagtctttcaacaaagaagcttaaaaaattctctgaattcctaaaatgaaagaaataatataaaggtggttccttttttctattttatagtcctgggttaacttcgttagatcaaggagatatttgatcttacggacagaatttgaaatagaagtggaaaggatggtcatttaatgttgatgtaattcgaaaccacaaaatcgccaaaatcagaagacatgcattttttcaaaagggattataacaaatacaccctttgtaatcattgaaaagaactttttattaaaaagggctttttaagggacaattgttatacccgaaattcggctagcacatcagaggaggacacgtgacacgtgtcaaactggggagaatatgaatcaagaatcaacgaatgtaatgatatttgaagagggaataactcataaaatgtggaaattgatagagtatatttacaacttgctgactgtatggtcttacgcgagataaatatataaaaactgttgattcgagcatttacaagaaaccatacaacttcaaatgtacaaagcgaggtatcaacctcgctacacattaagagacaaaacataatggccggtaagacacttagtttacaatacacattatactaactaagtataacagtcaagtaaatccaaacaattgatagtgaggcacccatctcactataggaaaggcgcgcccatggtaccttcactaatcagctccaaacatcttccaatagggtttatagctccgtcaagacatctctctcaaatagaagctgacatacaaatgatgttgactgctgaagttcaccttgtcgccaaaaactgcaaccttcagatggagcattatgtcttcaagtgcagcaacgacgagtcttacggaaagagaggggaaaagctctcgcttgctaacaaggttattgttgctatgttcccagcgagacatcccagaacgatacgatttacaacgtatctagtacatgtccatattgacccggtaaaagcgcacatatcacagctgtgtgatttttaaatattaaccacatttattttacgtggtatgtaatcaaattccacggcttcaggggataatggttataaaatatcagtcaactacgtagttaactgccctcctatgttattataaataggggaaagttacactgaaaacgggacgaa

SEQ ID NO: 41535 - DNA, 1362 bp, Cannabis sativa
gttcttagcaactctgaaagagaaagtttttcgggaagggacccttttatccctttcatttctaacctagttgattctagagggttgatcaatctgtgtatacaaggcgataagatgacgtgggataaccacagttcgggaaggcatcatgtgaaatctgcactcgataaagggatagtgaatggagcgtggatccaactgtttcctaaagctgttatttgctcttcccagacgagcaacttggaccatagacctctctttctggatactagtggtcctccccctagcttcaagagatttttcaagtttgaagaaggttggacgagggatgatagaagcaaacttgtagttgccaatgcttggcgctcggtagcacattcttgggctccggcccgagttttcaaaaaggtgggtgctactatgattgcacttctaaaatggaatagaacgcagtatggtaagattgattgggttattaaagaccttgaacagaaactggatagtattcagaggctccctgcgggagcccgggagtggaggaaggaatgtgaaattcagaaatcgctgaatgaaatgttaacccgaaaagcgctttactggaagcaacgagctaggatcacttggctcaaggaaggtgatagatgctcgaaattatttttcctctcggcagtaataagaggaaggagaaatcccattgaaagtattttgaacaagaacaatgtctggatcacttatagagacgttattggccttgaatttaccgattttttcaagagtatctttgagggatcggaccttgaccagagcctggattgtaggaggttgtttcaggggaggctttcccttgaggaccaggaggggactcttctctgcccctctcgggatgaaataaagagtactttgtttgctatgaacagtcataaggctctgggaccggatggaatgtcactacttttcttcaaacattattgggagtcagtgggagacgatttctgtgatgcattttctgatttcttcaggaatggtcatatggataaaggaataaatactacgaatgtagttcttattcctaaggtccagaattcgaagagaccaagtcaatttagacccatttctctttgcaacgttatttataaggtcatatccaaaataattgcaaatagaatcaaaccaatcctgccttctttaatatgccctactcaagctgcattcgttccgggaagaaatattcaagataataatgtaattgttcaagagattatccattcgttcaaacggaagaaaggcagggagggattttttgcaattaaaattgatcttgttaaagcttatgacaggcttagttggaggtttattgaccac

SEQ ID NO: 41536 - DNA, 1259 bp, Cannabis sativa
tttggttctagtttcaagtcacagggtatgggttcaggtcgagtttgggttcgagtctgggttcgggtcttaatttttttctagggcgaggttcaggtctaggttttggtctcagttattgttcgcggttgggtccggtgccgggtttaggtccgagtccaggtcccgatcatattccaagatcccagtccgactccatttcaagttttgattttggatcctgagtatgggtctcggtttggggtcaggtcatggatctccatagttttggtcctagtttgtgggccccattcccaggtctgggtccccaatctatgagtcttaggtcctggtctagttccatgttcgtgttccgattcaagtttgggtctcgagtcccgatctgagtccaggtcccaggtttggttatggtccaaatttgagtcccagttctagtgcgagtctgaggttcgggtccctggtctgagtctggttcttaggtcctgggttcggccccagtttttgggtttgggtctaggtctaggttcgggtcccagtctgggtcaaggtccggttttggtttacgtcctaagtcacaggtcccgggttctggtctgagtttgggtttaggtttgggtcatgttactgtcacaggtctgggttctagtcccaggcttggtttgattccaatttcgtgtccgagatcaggtctggatccccgtttgggtctgggtctaggtcttggtatggatccgggtatgggtcatggattcaaacactgactactggttaggtcgaagcctcaagttcagattcggatctcagtcttgttccaatttgaccctaggtctagcgccgtgtcctaagtttgggtttgggtccgtgtttggggttgtgtccccgtagtcacgtcctgcgttctaggtcgagggtcgggtcctgtgtctcgagtctaggatcgagttttgggtcttagtccctgttccaaggcaaagttttgggtccaagtctcctatcaaggtctgaatccttggtccaggtctgggtctaggttcgggtttggggcccaggtcccccatctaggtctgtatcctaggtctcggtgtaggtccaagttcaggttcaggtttggatcctgagtttgggtctgagtctaggtctcagtacgagttcaggtttgagtttgggtttgggtcggggtcccgacccgggtcccaatcaaggtctaggtcttgaaccaggttctggtctgtgtttggatcctggttcaggtcatgagt

SEQ ID NO: 41537 - DNA, 1279 bp, Cannabis sativa
tcgaaatctaacccgaacaactctagatactgagccgtcatgtcagactctaactcccaagtggcttcctccaccttgttgtttctctagagtacctttaccaacgctatggtcatgtttcaaagaaccttatcctttctgtctaagatatgaactggttgttcttcatatgacaagtctggttgcagctcaagattttcataacttagtacatgagcagggtctgaaaagtacttccgtagcatggaaacatggaatatgttgtgaactgttgaaagagctagaggcaaaactaaacaatatgccacttgtccaaccttcttgagaatctcgaaaggtcttgtaaatctaaggcataatttgcctctttttctaaaacgcttgattcccttcatcggagatacctataggaatacatgatctcctaccttaaactctacatttctgcgtttcggatctgcataactcttttgcatactctgagaggtaagcattctggcgttaattttctctattgtttcattagtctgttgcactgattctggacccaaatattttttctccactgtttcatcccagtgaatgggagatctacactttctgtcatacaacaattcatagggagccatccctattgtactctgataactattattatacgaaaactctgttagtggtaaatacttactccaggagccctcaaaatccataacataggctcgtaacctatcttgtagtatctgaattgtcctttcggactgtccattggtttgaggatggaaagctctattgaacttcagtttggtacccatagcccgctgataggcatgtcaaaaagatccatttagttggagcgagttggagctccaacccgacggatcacctctgatccgaaacatttggatacttattggatcttggatcatattcgctccgccccgcctaattttttttggatcggatctgatccaacccgatttcaatttatttaaaaaaaacttaattcaagactcagatccccggggacctagactcggacccaaactcggacccaaaaccagacccggacccgcgactcgggacccagacccggaccctaaccctgaacccaaactcagaccagacccagacccgaacccggaccctgacacgggactcggacttggacctgggcctaggagcgggactgggactcgaagccaggacccgaacccggacccagacttggacccgaactcggacccagacccgggaccaagactgggacccggacccgaac

SEQ ID NO: 41538 - DNA, 1501 bp, Cannabis sativa
acttgttggttcttttagagctaagtaagcttttggttttcttattccagatttggaacggatctgcatgttatcagagttaacaacagctggggcatcagtggtagtgacagcagtatttccattgtgaactgctacatcagttgtgatctcattgggcacagaagcagtattttcatggttgactgctgtagaagagggtgcatttgtgatctcagcagtgttgggaaaagaatttgagtctataggagcagggataacgttggatacttcagatatgggcaactttgaagtctgagttgctgtagcagttttgtgtgctggtgctgttgtaggaatggcagagatgtcacaggaggttgctggtatcatttgtggtgcctgcacagggttagaaaaactagagacagcatgtgtatgagatgaaatagatgcagtatgttgatgtacaccagatgaggagtgtgtgacagttggaataacagcagagggataaaaggaggccactgtttctggtgttataggagattgctgatgtgaagcatagggaaattgagattcattaaaaatgacatctcttgatatgaacacacggccagaagtgtcaagacacttataacctttgtggttaatgctatatccaataaaagtgcagggtgtagacctaaattgcattttatgcttgttatatggtcttatattgggatagcaagaacaaccaaaggtttttaagctagggtaatctggttggatttgaaataatgtcttaatgggtgatttgtgatttagaacaggtgtgggaagtctattatgaatatagacagctgttctaaaggcctcatcccaaaattttaatggcattgaagcttgggcaagaagagtgagaccattctccacaatatgtctatgtttgcattcagctaaaccattttgctcatgggtagtgggacaaggatgtcaatgaatgataccagcctcttttaatgtattagtaaaggacctatactcaccccccaatcagtttgtagaactttgattttggtgccaagttgtaactcagcttcagctttgaagtgctaaaatgtttttaatgcttcatctttggttttaagcatatatatccaagtgaatctagaatatgcatcaacaaaatgagtataatacatataaccattaagagaaggggtgtgagaaggaccccaaagatcagaaacaaccaattgaagtgggatagtatatgtagtactagaagtcttaggaaaaggaaatttgtgtatttttcccaaacaacatgcttgacaaacagaatctatagttttatttggacaaagtatattacatgagttaagaacagactgtaccactttctcagaagggtggccaagtcgattatgccaaacatcaagaggggaaatacaagcattattattggaaatatgagaactagtacaatgtgaggactgacaaacagtggcagtaagagtgtgtggagagttgacat

SEQ ID NO: 41539 - DNA, 1362 bp, Cannabis sativa
tttacaacaattatcctctgaaatagtggggtttgattacatatcacgtaatataaatgcggttattatttgaatatcacacagttgtgattaatctgcatttatcgggtcaagataatcgtgtattaaacatgttttaaatcacaacgttctaggatgtctcgataggaactcagtaccaatgaccttgatagcaagctgaagctttttctcctatctctccgaggttgataatgtaggcctcgtcgcttcttcgcttgaaggtacaacgcttcattttgacaattgaaattcttaataacaaagagtacttcaacaattaacataatttgaatgtcagcttctgactcgtcaagactataaatctcactaaaagatgtttgaagctgattggtgaaagtaacaggagcgcgcctccctatagcgagataggtgcctcgcttattagttgcttgggttcacccgactattatacttagtttgtatgttgtatattatacactaagtcttttcacagttattatatctcacttacgtctactcgtacgtaacgaggttgaggtcttgccttgtgcatccaatgccgtatggtttctcgttaatacacgaggcaacaatttgtgtatctttatctcgcataagaccttatcgtctgcaagttaaaaatatactttatcacctccgcatttaatgagttattccattacatgtaattaccgttacacacattgatccgtattctctttagtttgacacgtgtcctccaatgaaatggtagccaaattttgggtataacagttgccaagttctttttaataaaaaggactttttaaatgcttacaaagggtttattcgtcacaacccctttcttcaagaccacgcatgccctcaattttaacggctccacagtttcgagggtcattattagtattagtgaatcgctttttcatcttctacctcattctcaaccgttagatatcccaacctttagcttactgttactgggttctaagtataaaatggtggcttagtctagccatattccataaactcctagtttttggtgaatttcatccaagaattggattgtcactctccatatgttcccagaaacttcaaacctcagtttaaattgggaacgaaggattccaagactgaagatcgtccgattaatccaaaccaagtagatacagtcgatcgttacaggcgatccccacaagagatttctgagggtaatcaacatcctttgtgaatggtggtctgatctgaattcgtcgttttttttaccactgttgcttcattaatcttttatctttgtctctacaggaatgaacataaattttgagagcaagttcagaggtc

SEQ ID NO: 41540 - DNA, 918 bp, Cannabis sativa
  modified_base (867)..(885): a, c, t, g, unknown or other
gggggtaaaattgggttttaggaaattgtatcccactttacaaattatgtatagtattacattaggggtccaattttattgtttattaagtatagaatttcaaatttcccttttgtaatatagggtgtgtccaaaaggactttatcgatagaaatttcattcaatgaatataaaagtatcacgtgctttgtcttttgttttgaaaaacatgtgattattttaatattattattttttttataaaacctgcacttcattggataaaacaacaaatataaagccaacaagttacatggaaggtagaggactatccaaaccagctcattatctagttctaatcctaacttagcaactttatgagccaattcatttgactatctacaaacatgaacaatagttagattaggacccaacgataataagcttttaacacaaattaaaatatcatctagtaaactactattccagttacaggatttgagtttatcaacaatagtttacaatcagttctaagaacatccacagggagatgtagcatttgaacccattgaataacatgaaaaattgattttgcttcagccacgacaggacaataggaggaacacttccaacaaagggtttggatatccctgctttaactcggttcaactcatccaaaataataactccaatgctctatttccttgaaaattttcaagcttttctcgatctggagcactctatcaaagcatgctgaatagttttaggactaaatcgtgctttatagaggaaaaaccagtagcctcttaagatcaatctcaaaggtctcctagtcacacccctagccttagccagagtagcatcaatgattgtaacaccctaactagnnnnnnnnnnnnnnnnnnnttttaaacgtactgtgcagctcgatgctaatca

SEQ ID NO: 41541 - DNA, 1371 bp, Cannabis sativa
ccctcacaactccttcctagatgcgagtacgggccattctccatcactaacttggcaaggtattcggtggggtcgtgaactattgatcaaagggctgagatggaaaataggagagggacgctctattagatgcggtttagacccttggctcccgggtcattcctcttttcttccaacttgctataatggatctccacatggtgtagttgcgaactacattacggaagaaagagagtggaacatctccatgttacagcaagacaattgtccacttgatgttgagaaaattcttactattccctcttgagctacttcagcaccaatgataaactagtttggcatcatcataactcatggatatatacagttcaaagtggacatcattttgcatctaagcttggagaagaagaactttgctccagctctaacagttcaatggcatggtggaaatttttttggtccttacaaatccctcaaaaagttaagatctttgcttgatgtttcattcaggatgctcttcccgtggctacttctctagttcgaagaaaagtaattactgattcgacatgctctatttgtaaacaagcttgggagacaatgggacatgctctttttagttgcaaatatgctaaggcagtttggagagcccaaaatctaagttttgattggcgtgcgtgtacatcaatgcgaaatggagactatttgttgcacctctcatcaatctataacaaatatgagatggaacaactcttttgtacactttgggctatttggaatgaacaaaacaaggtggttcatggtagaaaagtaagagctgcgaatgatcttgccattttcgctgctgtttttttgcagaactttcgcaatgctcaacataaacaccctaccgttgctgctactgcaccaacaatctcacaccagcaaaaccattctgtagccgccccctctccgtggtcccctccagcttcaggtgtcctcaaacttaacatcgatgcagcagtccattcctcctccaatactactggtgttggggctgttctcaaagacacaaatggacatgtggtagttgcgttagccatgccaagcatcggcagtttcaaatcacatgaaatggaggccaaagtacttttccatagtctcaattgggctcttcaacaacaattgcaaatcacgcaaattgagacggatgcacttatggtagtgaatgctttgcaagctcccttcaatccaaactcctctttttcagatttaatattagatgttgttagtctattatcctttttccctaatgttattgtttcacatgtaaaacgttctgcaaatgaagcgactcatggcctagctaaatttgctttaggggtggatgagact

SEQ ID NO: 41542 - DNA, 1101 bp, Cannabis sativa
cttatttgttaattatgataaattgatatcaaattaataaattgttatatttaaagtttcaatttacaattattgagaatttaatttaaatttaaatataatatataaaaagcttaattttttattattgattattaattaattaattaattaaaattataataataataataattaaaatatacataaaaagttttaatttttttttatacgtagcttaagttacctaatatatataataattatattatataattaattaataataatataaatttttgtttaaattaaaaagatacaatatgtatatgtttagatctaaggtgatttgaattagatttcgagggacatttaatttcagtcaaaacaatttaacctattattttaattaaataaataatttgacctaaacatattatatgcctatataaagaaagagaagaagatagaaaaccctaatagttcactttctcatctcttcctttaggcaaattttgaaagcactgttgtcaaccccaaaaattagcactgctgacttctgaggttagttaactaattaccaagggaataatgaagctgcattcaataggcttacctcatatgcgagcatatatgtgtgtgtacgtgtgttgtgggcctcgagggcttgcatgcgagcccatgtggggggcttgcatgtgagtcatggtgttgagtgcatgcgtgtgtgcatgtgttgtgagcctcgggggcttgcatgcaagcccatgtaggggggattgcatgtgagccatggtatgcacaagcatgagttgtgttgcatagagtgagtagcaccatgcatgtgttatgaatgtaagatgaaactcatttgagtgcatgttgacaagaatgtcattgaacgaggattcaaaggacaaggcgtgcaaaagacaggcgtaccaccacgccacctgcaaggtctgaggacccgaccgaggatacactacaatcacactcctacaactgaggaccacatgcttacgaccgaggaccacacacatgctattgggattttatgccctaaataaaacctatttgaatataatcttatttgtagtcaatagaagattagaagtcatt

SEQ ID NO: 41543 - DNA, 955 bp, Cannabis sativa
cccctgctgatgactctactatgggaactaacccttctcagggtcagcctgattctactgtccattggaaaggattggcttctgcctctggtgttaatcacccttctttccaaccttaacaagttgtggttggaggttctgtgaggtcccaacttaaacgtgctcgctctggtgaaagggaagatgagtcttcccttttgctgatttggaacaggcgggtgatgctttgcacacccgcccaaaaaaatgagtattttgagttggaatgcacgtgggttgaggagtacacgtgcatttaggaggctctcccttttggttaaagagcactacccagatgtgatttttttgatggaagcccttttgccaatgaaggctgttgataaggttagagttgctttgggttatgataatggtgtagaagtccctagaaagtattttggtgggggactttttcttttgtggaaagccactgtttatgtaaatattttatctttttctagtaatcatatcgattgtaatataaactttaaagataatgaaatgtttcattttactggcttttatggatctccctcttcttctaaacattctgttacctagaacctacttgaattttttttctataatgctcctgatctcccttggtttattatgggagacttcaatagttttctttcttttgatgacaaaatcggtagtacatattacaatcacaaagatatgaatcaatttgcccagttcttagataaattttgtctctcgcccctcaattttgagggagataaatacacttggataatagctcagtgtgtgagcgtcttgactgggaaatcggttatgagtcttcactacaagaaaaaggctttttgccggcgcattgttgcgccggcaaaagtacactgaatgcgccggtaaagctttgccggcgcagttgtgcgccggcaaagcttatctg

SEQ ID NO: 41544 - DNA, 1205 bp, Cannabis sativa
ttttgacatatattaaattatattccttaagtttttttagttattaaaaaattttcttaaactattgagattgttgcatttaagaatatttgtctagttttattaaatttaactaattttgtgattgatcatgtactaaatcatgctctctagactttgagatgatccaaatcatatctctcaaattttgagatgtaccaaatcaaattatttgaactttcatctgtgttaaacttttcatattaaaatataaaaaaaaattaaaaaataagtccttaaatccaacaattctaataatttagagagatttttaatagtcttaataatttaagagatataatttaatatatgttaaaattcacaaaacaaaaaatcttaattaactttttcttttttacgaaagtaactattatctttaaatacttatttaaacaaagtagaacaatattagtgaaaaattatgaatacaaattaatgctataaattttaattaagcaagggaataatcagaatatatactttcttgctgaataataataatttataaaccaaacaaaaatctataataaatttctttagaataattgactaattctatggtcatttcatcattagtaaagtaatttgaaaaaagcactttccgtataataagtgatgtgtggaataaaatttgtgttcatattccacgaatttaatgatggaattatggttccaaaccactttgcatagttagaaaaaggtcagaacataaatttatacatataattaggtgaatgttaagtaatattaagtaataatattaaatgtagtattatttttttaaatgtaatatatgtatattaattttttttaattagataatgtatttttattttttaatttttaaaataaaaataaaaattttgatttttgagaattttttttaattattgtggctacattgggtgctcttagatgtaattatatatatacgtattttatatgtataataaaagaataaattttattgttatacttattttatattgatcttcatataaaaagattatattagaaaatattttgatacaatttgagtttgattaaaaaattaattatttttaattttatatattatgtccaaacatatatttaagaaaataataataatgatagatacatttttataatttgtaagtaacagagtatagttataataaagtgta

SEQ ID NO: 41545 - DNA, 2205 bp, Cannabis sativa
  modified_base (1551)..(1555): a, c, t, g, unknown or other
  modified_base (2147)..(2147): a, c, t, g, unknown or other
aaccaagattcggttagttagttagtctttaactaacttaactatcaaaaagaaaaacttgcatattgaatcccttggccaatatgaagttgacgactcatctcattgcaaaagagtgaagtcaaacacaagaagaagaaagtagagagacataatacagtagagagagaagttagagtgagaaatggagagagatatctaagaaagagagagctaggattaggaaattgtattgagcaacattgttgattatgttggctcgggttagtgagttaatgagtgttgagggattacactatggatgacttgctgtgactatttctttgtagctcctgagattgatatcttttattctcattataaataaagattggtggaaatactttcaaactggagtatgaccaagttcacattgaacttaggatcggaatcggtataaatctctgtgttattgtgtgtgacagccatttagatttatctgtgttatatttttttggtttaatgtgtttgttggttttttgttcttgatttgtttattttgatttaacttttgtttgtttaagtgtgatcttgaatctggaattacagaggttaattcctatgtataagagctaaatttcatacaaatcagagcttggttcttcgatcatcaagggagattcaaagatcacttgcttccgcaccaagaactcatcaagaattcatcaaggaattctacaagaacacatattgaaggagaatgtcgatggcaaggtttgaactagagaagttcaatggattaatggatttcgcactatggcaagaaagtttgaagggtatacttgtgtaccaaaaggtggcaaaggtacttggagatgaaaagttgttggctgagaagaaactagaggaaatggcagagatggaggagatggcatactacaccatcatcatgtacctgtccaatggagttagaagaaagctaatccaagaaaagactgcaaaaggattgtggaacaaactagagtagctgtacatggcaccatcaatatcaagcaagattaatcttattgaaagattatataggtttagaatgaactcttctctttccttagatgataatattgataaatttaatgaaataattattggtttagctaacattgatcgtaaggtagatgaagaaagtcaagcaatcatattgctcagatcattgccaatggcatatcaagaagttaaagcagcaatcaagtatggaagggatgtgatctcgttggacggtgttaatgcgacattaaaatcaaaggactttgaattgcaactcgagaaggagactaggaaagaagaagcctatcttgcaagaggaagaagtccaaaaagaggatcatcaagtaacaaccagtcaccatcaagattaaagttgaatattaaagacaatcgacaatgatatcaatgtggaaagattggccacattaaaagattatgcagtcaattaaagacgcaatctggtttagatcaaactaggatgataaaggatgcaacaaaaaccagaaccagtactcaaaatctaatgannnnngaaatcaaagaaaagactctacagttgtggctgagagtagtggaaatggaagttcagatggggaattattttctatttcgaaaaataataagagtaaagagtggatccttgattcaggatgcacttatcatatgtgtctcaacttaaaatctttctttgattattaggaaactaataatggtggtagagtactaatgggtaatgatgtttcttgcaggttgttggaatttgtaaggtggctataaggcaattcaatggtgcagtgaagattttgtataatgtgaggcacattcaagaattaaggaggaatctgatatcacttgaaatcttggaagatgaaggttatgactataagtctgttatacccgaaattcaactagcacatcagaggaaaacatgtgtcaagctgggaagaatacaaaccaaggcacgtaattataattacatttaaggtggaataactcgttaaaagcataattgacagagtatatttacaactcggctgactgaatagtcttatgcgagataaagatatacaaacagttgccttgcacttcaacgggaaaccatgtaacttcaggtgtataagacnaggcactaacctcgattacgtggatgagatatagtgactgtgaagacacttagcgtat

SEQ ID NO: 41546 - DNA, 1043 bp, Cannabis sativa
  modified_base (1008)..(1010): a, c, t, g, unknown or other
tggttgtatcttttgatgacttcagtttagttacatcaaagagagagatttttacgtggttggggcattaataagccttagtccatgaatctgtgtatttatgatagtatttattacggagaatgttcttggtgaatttttcctcctttagttcttatgaaacccagaattctcgacccctgctttaatgagtttggggggtatttatagtatttttgtggggtgatccctagaaccctagaattgaggtacatgtatttctataattatcaataaagccacacattcccaatgaatatatcataggaaatgcatgtctaatccctaggctttgtaggggttttatggatgtagtcctttatcctttttgactgatgtgagtcctcataaagtagtcgtcattaggctcattaatcatagcatagtagctgtagagagggagttgtgctgtcagactttaagacatatggcagttctaatacgccttctcccatgcggcattaaatgcaaaatgactgtttagataggatctgacacctcctggagatgctttgtggtggctttgctctccgggagcatgtgagacttgcatgccttctccgggaggcgtgtttaaggctgatccctgtggtaagagacttagatgatttatttaaacgctaaaccctttccatctacgtgtcatcatccggtcggtccacctattttgggcaaaattaggggcaacaacttctaaattaaatttatttataaaataatttaagttgataggttattttgatgattttttatttttagtttacaattttgcaataattatttagaataataatctttgtattatattaattttaaaattatttttatattttaatttttatacacttaaccctcttaacttcacttttatttacaaatttaagatgccagttaaattttactgtaaaatattaactgggattgtcaatgtgtacacctacatacacatgtgttatagtgagatttctnnnacctagaaactcgagaccagactcttatttaga

SEQ ID NO: 41547 - DNA, 1938 bp, Cannabis sativa
cgagatttaggtttgggtctgggtctcggtcccagtctgggtacacgaccgtgtctagacccaagtttcggtctcggtttcgatctagggctaggtccaagttcaattctaggtttgggtctgggtctttgtcacggtcctagtcttgttccagggtcctggtccggcagttcttgttcaggttctagtttcaagtcccaggtgtaggtctaggtctcggtctgggtttgggtccctgtctaggttagggtcctagtttgagtcccagatttagacactgactacgggtcttttccaagccccatttctcgaatcccgagtatagatctggatccttgtcacgtgtcccggtctggttcttgatcattgtcacggaacccgggttcaagtttaggtcttggtccatgtcctagtcctagtctggttcctgttctagttgcgattttgagttcgggtttgggttcgagttagggttggggtttgagtcctggtctgtgtttgggttcgggtcctgatttttgtctaggtctggatcaggctcttggtgtgggttcgggtcctggtccgggtctgagtcccaagttctaatcccgatctgagtccgggtttagtttcaggtccgagtcccaggtttcgatctcaatttgagtttgggtttagtttcgggtctaagtcctgaggttctgatcccggtctaggttcgagttcgggtccaggtccaagtctaggtttgggtctgattcttggattaggtctgagttcgggtctgattttgggttctagtccgggtccgggttttggtttggtcctggtccgtgttaaagttcctgttctggtttgggtttggggcaagtttcgagtccaggtctaggtctgactttggattcttgagtccaggtcagggtctggtttgggttcgagtcttggaatcagatttgggtctgggttctgaggcctaggtacctagtctaggtcccccatccaagtccggttgctaggtcctggtctgggtctaggtttgagtgtgggtcctgagtcttagtttgagtccaggtcccagtccaggtctcggtcccaatcttggtctgggttggagttcgggtgcccatcagggtctggatccgggtcagggtttaggaccaggtgcaagtccaggttcggttcccaggtcacaggtcccagtcctagtcaatgtctacgtccaggttctggacagagtttgtgctatggttaaggtttgttcccggtctcacgtccgggtcctagtgatagttctagttctaattttgggtcagggtttggtttcaagtcttggtctgggtgtagatttgggtcgaggtctgagtcttagtccgagttcggtacgagtttttcagatctggggctgggtcgaagtctgagttcgggtcccaggttcaggtctaggtctttgtcttcgtttgggtccgagtcctggtctcatgtttcgatctcgatcggggtctaactcgatattttgttccaaatctaggttcatgtccatgtccaggtccgaatccctgtctcagttaggggcttggtataggtccgggatccagtcctgagttcgggcttaggttcaggttcgagtctcagttcgtcttggcctaggattgggtccgggactgggtccgacctcgagtttcagggcttggttatggtctagttctttgtgccattccaggtccaagtcctggtcacagtgttcgtcctgttccagggtcttgggcacgttgtggtttaagttttgattttgggtccaatgtttgggtctgggtccaggtcctggtccagcttcgggtccttgtctgagtcccagatggagactatgggtcttgtccaagcccagttcttggatcctaggataagatctggatcccaatcacgggtcccagtcttgtttccttcatgtcccaagtc

SEQ ID NO: 41548 - DNA, 1671 bp, Cannabis sativa
agctcctgtgagggagctggtctgtcacttgatgcctgtttgagtgttggagtctcaatttgcttaggttctaacttggccttcttattgatgagctgcactaccacgtggtgctaattttatcgacataagcatgccacgttaggttgacaaaaatcaggattacatttgccccaaagtccttgtctaaatgtctgtatgaatagggactttaccaactgttttggtgcagttaggacagttgtaacatttgctgaataacagttgatgcatttttagccttttaaaacactttttcttgattgtctgatctcattgctgtagaaaaataattgccttagttgcctttttgatatggtggtgaagtaagtaaagaaagggtcccacatgcattacataagtgcttgttagaggcaaaacctttttcacttctcactttttacttttcactttctttgactagaaatttgcattacaaaaagctcctccttctctgtagagggccgaacccacaagcatcatcctcttgcgacttttacgctgtttcgacaatccaagcttcccaccctcttcttcaataatatcttgtaccaggtaagctttctattcctgcttttttcacttgatttggttgatttttccattgatgcatgaacgttattccttgatttgaaaatgctttgattcttacattagattgttttcctttcgatattcagatccacatgatagccttaggatacataatgtgtgatttctagacaaaaaagatctgaatctgaccttcattgtgattcttggctctttgagtcacgaagaacacaaagaacatgtttgagtcttgaaaaaacatgagttttgatccatgcagatcttggccgaccaagcgaggttatcatggggtttagccggccaaggtgttgtaccccctagccttactagcctatgcctagaattagggttcctcaccggccactagacttggtcttgggtctggccgaccactaaggcttggaacccttgtcggtcaaggccaaggatccaagtgggcaaccagtttttctccctcttttgacctcagccggggtctcatgacggccttggaggcttatacagttgtggccttatgcatggtttcttttggaaactctatataagtctaggtagtgagtccattatagtgaattatacaacttaggacttaatatctttcttagtaagtacatttaagaccgtatgttgtcgattattgaccttgtacattatgttttccctataaggtacctttgggtactcttgacttgaatgtgcttgtagctttttcatgttgctcacctccccttatttcttccatgtaggtatcaccgggtattgaataggggaggtgacagctgtgtaggtcccttatatactttgcttttgtggcaagaacaaaacaaaccctctgtacaacgcctccatatgactctcacgtggccagggtggccacaagtggtcaagttaagatggtggaggagaccgcttagccccgtgctgatgttgagccagagattgactaagaggcttggagttctgatactgaatctagtctagagatggtcccttgggtcgctatgacgccaatggtaacccacataattggcttggttggcccttagagcttggactaga

SEQ ID NO: 41549 - DNA, 1375 bp, Cannabis sativa
tctatgtaaataaattaatcaaatgtggaatgtaataatctctaataaaattaaataactaagacaccaattaaatttcctattttatatgcttatataacagaaatatttattacatctttatatattttgctacctggaaaaaaaaataataaaaatcaatatatttattgcatttttaactttatatataaaatgtagttatctaacgtattttattagtttaacggttaactttaagaggcattaactaacaaatttctcgaatcttgctttagttatggttatggtggcgtagaaatcttgataatatccgcttggctctcttacaagcggttcttgattgtcgtttgagttattgaccacaatgtccacatcactccctcccaagcagtgcttaattgtcttagagatttcccattgttgctaatatccttcttattcttccttttaaattcaaaaacaaagtgattaactattctctatcgaaatcttcacctccaagatagtgtctcaaagatggtaagacgaagagcaagagttaaaaaaaagttgcaaggagttttggtattgcattctcatgcgacctttggatatttggaagcctttgtacatggtgaaaattgagcaacctagagaaatcaatgagtggagattgtgtagcaaatttaaatatgttttgcctgttatgggcttcctctatttaatagtcaacttatacgtaattaccacactaggaggttcaaatattttctcttctcggttaaaagtgaaaatttagttatgtactcatattagtatgatattgtctgctttgggcctaagtcctcacgattttgtttcatgggcaccttcccaaaatgcctcatactaatggagtaggtggagcacttatattcaaggcaactcttgtctattcttctaatgtaggacttaggttgatactccaacaatcctccccttaaacgaaagaccacatactcgtggccctcccctctagtgaaactaccttatgtcgccgctatcaccaacgaaactcgccgcctggccatcacctttgttaggaggactttcgacacatgtcttaacaccgatctccaacttgtaccgccgtaatcatcaacaggatacgccacctgaatacctcaatatcaagaacactttcgatacaatgcgccatatagatcttcaatcgcgaggtcatcacattgagggcttctcctacacattgcaaatgcaacccactatcccaaacactcctaaacctttggcttggctttgataccacttgttgggccccgttcttctaccttgtcgggctactatctcatcttaactcccacattagtaagatattgtttgctttaagcctaag

SEQ ID NO: 41550 - DNA, 1709 bp, Cannabis sativa
tggttagactcggccaaacattgccagagtgggcaattttccaattcaaccaacggtacatacctagtgggatcataggcaccctcactcctaggtacataaccaccagcattagttttgtttcctcattcctagtttcagggttttgatcatgaccaccttggcttcatcttgaacaggttgttcctgaggtaggtggcctctgtgaacccatttgttctttcccaggacgacgattagtctcttcaggacaactgttatcgttttcatcatgatcagccatggagaattttttttcttttggttaggagggatttttatgagtttgtatcacgtaggctgtcaatgaaagtacgaaactgttaactaattaaaaagccttcatcgtaaaaaaattaaacacaaattatataagaaatttgagaagaagaaaaatagcaataatgacaccaggttttttacgtggctttgtagttaactctgcatagtccacgagtcaatcttattaaaacatttctagatatagaattatggttttacaatcagtgatcttttttctctccaagattttccgtccctttttctgtataatctaccccaatttataggaatataggttggtagttatttacatttaaatttgaaatacataactattttaatgaaacgtggactttgaccacgtcccattttaacacctgtatagctaagaattcgcataactgcttgttattcttatctttgaagtagttggcacggacgtgggatagaagcacctcgctagaggcatctcgctttgtacatagatgaatgacttggtttatatgtattccagcaatggcatgagtactagtgtactatgcaaacttaacaaatgctctttcaccataaggccttacaaattggacaatcatgtcctctatgttctcaagctattgcacttagtcattataacgtgaactatatggtaagtgttccaacagtcaattcgccttgtcgatacttccatatatgtagcgaggtggatgtctcgctatacattgtctgtggctccctcgggattatgctttctgaggcaagatggtttctcgtcaatacatgaattgatagttagtgtatcctcgccttgcctacgactgtacgtcagcaagttatgaatatactttattaattccatatttaatgagttattgcattttgtatttaatgatataattgttattatatctgttagttcacattcaacgagattgacgcgtgtcactttctgaagtacagctaaatttcgggtataacaaataatatttaatttaattcttgtgaaataagagattaatgagagttaatcaattattatttatcgatagaataaataataaatcttatttatggaaaaattgagaaatcaattttggaccttaaaatatggcctacacatgtatgcccattctacacgtgtaaggtgatatataaaggcccatgataaatttggttcaattattttattagttaaaataattaagttaataatcttttaattattaattaaaaatattattagataattatttaattaaaagaataattattcaaataaaagatctattaatgtcttgatattcagttattagatatttatatttgaatttgaattctaaatttaaatcaaatcagatattttaaataataattaaaaaaattatttataa

SEQ ID NO: 41551 - DNA, 2027 bp, Cannabis sativa
  modified_base (378)..(383): a, c, t, g, unknown or other
agagattgacactttaacaatccaaagaggttgatagtccttcatagttgaggtaaagttggcaccggtagaaaaaataactcggttggtgagagattcgcactttaacaatctggtgaggttgatagtccttggaagaaaactattatgagagatttgagaaaactcttggtgaaagttccgtggttgtaagggttagtcaagcccattaaattggctcgataaagctaggtccatagcgaagaccgaggacgtaggtggattagtattaccaaaccttgtaaaaatcaagagtttgcaatttctatccctaaactctttacgtttcaagtttgttattttttatacttgtaattatctttgttattgcattaagcnnnnnnatttgcatgaattgtctttggggtttttatatttttgaaattagtttaaatttttaattcactctccctcttggaaacatatcttgggctgataaaaataactttgcggggtccaaacacttattttggagttcctgtatgaagtcaacctgggcgcagagttaaggacctctccctggtcgactactatgactcgaggctactcaaccctgtaaatattttttttttatcacatgtcaaacaaacttttgtttctgggtaaacaaaatatagtaaaaatatatatatttcatataataattattttgactcttaagaatatatatttttaatcaacataacatgaaataaatttgttacttttaacatatttaatatcaattttaataattatatcaaatatgttttaagaaaaagtaaaagataattactataaatgtatatataaatatatgtataataaataaagtgcaattttaaagtattactattatatatatttttaaatattatcattattaatatttatttttagtaaaggtagttaggagttttcgttactaatatttagcattatttgaagttaatagtatattagagatatgctaagaaacatttaaggtggtaagtaccttaaggtatagtaaattattattggtacaatttaatatggggttatatactttctaatttaataaataatataagaaactaatggctgctcacaacgtgctacataagtacatagatttagtgttagacaaatactaactattcacaacacttaataacaatataacaatgttcaatgcctaaatatgtagaagcctatttttgtgacaaataccaactaattaataattattgttagtatttgttggtctttgttacaaaaataaaataggcttctacattattgggggcaaaaaaatttagttggagagtaaatgtaaaaatgaagacgtaataaaaattaattgtaaaaaaaataaaataaacatatatagaaaaaatattcaaaaagaaagaaagaaaaggtgtaaataataaaaaatacttacaaaattaaagtataatttttttttaaaaaaagaactaatttataaataataaaaaaacttaaatattaaaaatttagggatgtccaccctaatcttatgctggtccgccacggatagtcagagatgggagagaatatttatttcttaaaaagtatttttctttgtagctatttcttaaaaaatgagcaatcttgcactatgtaatctctttatatataaaaagtggctatctaactatttttgttggttcaaaaaaataactttaaaaataaaagaatattccattaaatttaacagattttgttagagtattgtttgttttataaatttataaacattaatattatttttatttaagttttcttcaatttgtctttaccatacgaattatataaaactaatattttaatttgattttattatacataactaaatagatgtagtttggagttcttacttgctctttaataaacattatttgattttaattaattcaaatatatattttttaaaaaatttagttaaaataatttttttttgagttgacattattaaaactaatttagttaaaagttggagattt

SEQ ID NO: 41552 - DNA, 907 bp, Cannabis sativa
  modified_base (846)..(850): a, c, t, g, unknown or other
aaatataaaaatattttgaataaaagaaaatactataaagtttcaagtaaaaaaaatataatagtcttttaatagaaaaattagaaaaaaaaaaaaaaacataatagttattagtttttcacattcttcattcattctagatagtcaatgttcatttcttttagagagatttatagtgttattgcttcattttgtcaaaaagatggttgagtgctgattaagtctccaatttgtacagtttaagctttaattatgcatataaaattaatataaattaaatattttataattttaatgataaatttatttttattggaaatatttaatttactttaattttatgttatttttcaaggaaaatggtaaaaagaaaatgcaaaaacccaatttcaaaaggcccataagtgacaatgcaatctcatcaatctcatctttttcaggaaaagtgttttaagtgttttgcaaaagttattaattggacattttattttgttaaataataaaatagattttgtattttttaaaatagtacaaatagaaccatgaatcaattttttgtcaaaataaaatttaaatataatccgatctaaatgtgttatgacaaaactgtttacattttcagcatctgtttgtgttagaaattatcttcacgctagttatattaaaaaaagaagttgtcgaaaaagttaaaaaaatttaatacaattaaaaatataaattaaaaattaataaaatgtctattaaaaaaaaaattaataaaataagtatctatttttaggtgtaaataaaatttatccagaatgaaatcccctctcactgtcgtctatatatctttatatattaaannnnnctatctaacggcatttcttgttttcttggtttaacagaatataccttaaaaataaaa

SEQ ID NO: 41553 - DNA, 1210 bp, Cannabis sativa
ttaaaataaattaattaaaattgatatcaatttaaaatacagatttttaaaataatgagctttagttttaaggatatttgatctccattgttagtcttacatgattattgtttcaatgggtcctcaagacgctagacttcgtcccccttatggatagttatccattgaaccattaacaccataagatcttagaagataggtattttgtaaattttcttttctattagactcatctctactgtgactacttagaattaactttataaatatgaaacaatggtatgagataagaataaccttgactctagcctaccataacgacgttcgattcttattttgatcgaataaaaggttgctaaaatggtttctattttagatgagctggcaactctattaaactaatgatgtctttgactctcgcctaccgggacactgtatgtcatttagttgaaaaaccttagaaattattcagtatgttgttttgtattttcacatatccttgctacttgctaaatgtttactaatttctgaatatatgtatgattttgtattgaatcttatttaatttctatttgttgatatttgtagtacccaacgtgaccatgaacaaccctattacatcattgttgactgacaacgagctctttggagccaactttgtcaaatggaaagagaacattaatattgctctcataggtaaaaattcactgtttgtcttaaccgaagaagctcctgagcaaccaggtaagaatgcaaccaaggtagtaaaggaaaagtttgagcgtacgtagaatgctagtaataaagctcgttactttatgttgtctagcatggttgataccttgaagacaaggtttgcaaacactctcacagctgcagagatcatgaacaagttaaataaactatttaggaaggcgtctgatcaagctcgttttgaagcgagcaagaacttcataaatgcacggattaaacctcatcagaatgtgtgtgattacctactctaatggctagttatttccaagaagctgagaattatggagctatcattgatcaagaaactcaagtgagtttgatcatgaatagtttaactccagcttttctgccctttactttaaattatatcatgaacaatttgacttttgactttcacgatttaatatacaacctttagacatttgaaaatttgattggaggaccacaaaaaggagga

SEQ ID NO: 41554 - DNA, 1440 bp, Cannabis sativa
  modified_base (226)..(232): a, c, t, g, unknown or other
gacctgaactcggactcggaccctggacccgaaaccagactcgggacccagacccgtacccgtacccggactcagacccggacccggacccaaacctctactcgaaccccgacctcgacccggacgccaaaaaataattatacaacaaaatagtaaaaagtccctacaaaataattatacaacaaaatagtaaaaagtccccacaaaataattataattttaatgnnnnnnnaataataaatatttttataataattaagctcccacacataaaaaatcttgggtcggtaacaaaatttccactttgggttaaatgattgaaatttatttaaaagccagtttttcttagaagtgttaaaataattttataacatattttaaaattacatgaaatatgttttttgtttcttctataagtttgataaacatggaattttctattttgtgcattctttttataaatttttttaacattttttgggatctttttccatctattttttgaattaatgattactatcacatcgactttaagaataattgtttatcacatcaaacgattattgttaccaacttttattttattagtaatacaatagtaagtagtcatcaccatattaattaatttgcaaaataactaattccacattaatattatatgttgaaatttttttaggtgagagcaatattttatattatttttgctctcacatgtaaaaatattagtttagatgttttattggttgaattaagtggttgtacgtgaggtcggctttgagattggatgggccttaaaaaaaataaaattattggatcttttatttcaaaaatattattcatatattttaaaggaaaaatatttttttgggctctgaactaggccctaggcgcaggcctaccctaccttaacccaggtctgattttaattatatagtattaacatgtgttgttaagtaaagtagtatttggtatacatttttttaaagaagattatattttgatttcaaatatatatatatatatttatattgtgattttacttttattatcctcaaactcttttcttttgtttctttattattttaaaaatatgttgttttttctactcatgaaatatatgagattttttttttatcttttgcttaactatgaagagtattagacttacttctcaatttttgaaatctctattattattattattgtttatcattcataaatatataatattaagcttaaatatttttaggctttgctaagcaactacatcttcttttatgggctagtttggcacagctgtattataggaaaaaacagttgtagttgtgctgtgagaaaaaataattgcagcagaactgtaaaaaaaaactaagctaaaagtttggtaaattataaattttaaagaactgtgagttattaagatctactataatgataatg

SEQ ID NO: 41555 - DNA, 1858 bp, Cannabis sativa
  modified_base (210)..(222): a, c, t, g, unknown or other
  modified_base (1179)..(1180): a, c, t, g, unknown or other
aattctagatctacttattggaagatttgttatataggcctaggtccacacactagttgagatgatactgcttgtaacactcaattaatttattttaattaatcaataataattctaaaattaaactatgttttatttatgaattttcactaaacaagggcttaactgtgaagaaaagagagtttttaagatttatttattaattaagannnnnnnnnnnnnctaattaataaataaattaaataaaaattttatttgataattaactttaattaataaataaatagttttgacatttaaatgactaaaattgaaaaatatggaatttatgaaagaaaggataaattattgaataaaatggcaaaattgtaactgacattaaaatattaataaaacttaaagataatctagttagagtttcaaaatgttaaccgtataagtttttaaaaaatttaaattataagattagaaaaatgttagttttgatattttatcttattggatatttatcttaattaaaaatttatattttaggtcacaataacatgaaattttttgaaaattgttaatttcggtttgaatggatattttagggttttcttatcataaaattttctaatttgggatattttattttatttattttatttaaataaaattgatactatcataaccatcaaaatatcctattttcaaattgtttattttgttaaatttaaattattaaattataagatttgaaatataatattagaaatattcaatttttttaataaagatattatgttatattatcttatgagatatttaattaatttaaattatttaaataaactgaatatttgaaaattagttggatatttaaattttaaatttgaatttaagatattttagggtttgtatgattttaaatattttttaaatattttctaacaacttaaatttaaattctagttaagatattttttaaatattttattttaaaatagaaatatcttaacatactttccagatattgttacatgtttgaatgtttgcttaattatttattcattttttttacaaacatattatttatttgatctaaattattatgattaacttgtagacatatccaatgatcggattttaatcatagtttaattgtcaataatacatataaataatttgtaacaggtnnattttgtaatttctttcatttgtaataaacctagtaacatgatagggaccatccaaatcatttaacatgtgtcagcttacatgtttacttttgagcttagatgcatataggaagcccatttatgttttttttttcctttaaatggactaggttgctaaaataaaaatatcaccttgatagttttatttaggcccaattagtattgggcatattcaatgaataacaagtatttaattaatggctacatttctctcttttgggccttgtgtgaaagttagggggccatagtagtcggtacgacaaactgaactcagtcttcccatatatgaatcaccccaactgtgaaggcccatttgccttattgaaataaatgtattagattaattatattagtttaacctaattaaaattaattagcaacataattaattttaaaacaaatgaaattaattttttcattagattagtttaaattaatttagaaatacacacttagtttaatgaaataaattctagattgttatttctagtaactaaattatattttctaatatttaattaattagaaaaattaattttagttaaaaattaatttttattaattttatatcaaattaaattagaatatttttttagatattaaattagaattaataattaagttgattttattcaaga

SEQ ID NO: 41556 - DNA, 1987 bp, Cannabis sativa
  modified_base (353)..(358): a, c, t, g, unknown or other
agcatgttgttataaattatacttcgattgagctagaaaatttgacacttatttttttatttacttttagtcacttttattattttattagtatagttatagtattaaattatatgtgtttttgttttagggaaaatttaattacaccctattttaatttatatctttaattatattaatttttttaaaattttttttattttaattcatattcttagaaaatatacctattaaataaaactaaattatattttaaatattataataaaaaaattaaaataaaaaattatatgaaattttttttaaaaaaaataaaaaatatatataatgaattagaaaaaattatgaaaatnnnnnnaaaataaggattgaaattaacatacgagaaaaaaataaaaaaaaaataaaagtaatttttaaaaattatttaagtttgtattttttttttttaataatgagatatattttattattttataaggtgcaaataaaactctcataaaataataataaaactaatgaattttaattttaattttaatacaaatattaattaaacattaaattttataattatcaaaaattaatgcaaaatatatcataaaattattttcttactctaaattagttccaaagaaggcatagaggttttttcaaaaaaattaatatgtatatatatatatatacgtacttgttagtagctggaccattccaagatatccaacatcccatgatgaacaacattagtccatggatgaatgttgtggatggatcatcaggcaatgcgagtagcaaaatcgctgctaaaggaatggtcgaactcgagcttatctgagcaagaacaattcttccacaattaggaaatcgttttgccataacatctcccattttaccaccaaaaagggcccctaaagaacaagaaacaatgtagatagtccaaagcaaagccgttttctcatgggaaaatccaatgagttctaaccacattgtggcgaacgacatagctgtccaaggaaatgaaccaggaataccttgagccacaattattagaaaagatgggattcttattactgatttcgtttgttttatgagttctttcatctccgaaacaaatgatttttcggacataatgtaagggtaagtgttggaaaatcttggatcatttgcatacaagcgtaccaatacaccaactatgacactaacgagtgcaaccacatgaaaagccattctccaaccatctattcccatgaatgattttgaggccattaagactgcgcaaaggccgccgatgatggaaccgagatttcctgttagggttagccatccaaatgccacaccgcgattgttgtcgtcggttgagtctgcaacaagagattgaattgctggtattacaatggcgagtccaatcccattaaggcctcttgaaattgccacctaatacataacattttatttttgttacttcttttaaccaacttctcttatcctatatgttcttttcattcaatgttgtacaaaaataaataaataaatctaccgataatgtggtctaaatttaatacatgctaataattatatcaaatttaacacaaaatttaatacaactcaaattttacagcataataaatgttacttttttatttactcttttaacactcattattgtaactactaagttttaaaaatttttatttatatatttaaatactttcaataaaaatgtaatattaatgttgactttttttacataggtctattaaaataaaattaattttactcttagtgtattaaaacataagtataaaatttggtcaaaatataatattaatttattttttgaactaaatttaatacaaaatttacagtatttattcattaacaaaatccattcaaacatgatgataggtaaatttgaacctaagatacttaattgaaacaatgtagtcaaacttgcttactatacataccgataacaaaaagtcaaagg

SEQ ID NO: 41557 - DNA, 1301 bp, Cannabis sativa
  modified_base (394)..(402): a, c, t, g, unknown or other
  modified_base (437)..(437): a, c, t, g, unknown or other
cttagaaaagatataatggtaagtttatgatatcttttccactgtcaatattggtctagtccgatgtatacccaatacaaccaatactagtatattttgctaatgccctggaaagaatatttcacacatcattgtgtaagtaaactttatcgccgattatgatgtcagtgtaaattcagtgcactgataaatcatgggactaaatactttgaagcatatatcatgattatttttcactgtatagacaacactataatcatgaatacctatatattcaagacttaatagaatttatgcattaaacatataatcatgtaagtaatcatgtgaaccatgcaacataaaataatttctaatcttttattaatttgtaaatctgattatatttaaatgnnnnnnnnntagggcataaaatctcaacaaactcccacttgcantaatataaaactaaaagtacttttcaattaatctcaacatcttcatgtccaagtcaaatgtagtatgcagtattatcattttaatagtatctgacatgttgtattcaataccaaccttcttcactattacatctctttagtcacaaaatccttaatattttgaaattcctttatatatgtttactcctcttagggtattggattctttactgtttggaaactatatttgtgttatgacaaagtaacactagtagataatccatgactagaataatgctaaaaactatatagaacttaccataggctaaatacttatctactagcctgttgggcctttttaacattcaatctcactggtggagttaggaactccgaataggtttttatacttctctaaaaatcaatgttttacccagagagtaatcaccatcccagatttaaactttctagcattaatgcaaatctagaaatctgagtcaatgcagcataaaaggttttgaaaacatcacccttataaactaacatataggtcctcctcaatcttaagatttatttgatttccttccaatgaacttttcctagattaaactgatatctactcataactctcacttaacagcaggtgtctggtctaatgcataccagagcatacatgagatccctctcactgtcgatacttaaggaattctttccttggcatttatcttttctagaatagttaaaaatattccttagataaataaactctatgactagaagccaaaagacttcctttggagttagtcattagaaaaatgctctagcatcttactaaagtaagttacttgtactagagtaagttaattacaaggtataccataagcc

SEQ ID NO: 41558 - DNA, 1128 bp, Cannabis sativa
  modified_base (989)..(999): a, c, t, g, unknown or other
aattctcagcaaaatgcaatcacccattatggaaagatgtaatttaagtctttaacattttttgtctgtaataataaggtttgtaatgttttctgtttgttgagggcctatatatatggcctctcatttctgttaagggtattaagttttcgaaaaataaaaattttatctatctttctaaatatgtctttctaaatctcttctctggactatttctttactaagataaatcataagaatattatcattagctcaaaaattactaaccagaagatatataaaagcaaagtttatataataggtgtcattatcaaaaacataacttacaaaagtaaagagaaaaagtcaacgttaaaaaaaactaaacttaagtttaattctgactatatgaattagggttatatctctttctataactcatatctattaaataaaaaagacttttgtttggtaaagtatggctctgtaataatcttaatgtgtcttaagttttttctttgtatttatttgacgaattttattgcagctctccccccttaattaggcaagaatttagtggcataattacctgaatttagttattatggcataataaaaaaaacccactaacaataaaaaaacaatttattagaaaacgttacgtgcaaatattacgtaacacagtctgttttatttttcatataaaatctctcgagtctcgagttctttaaattaaataatattatagtaatctctccattacaacaacctacgcttttttattaattatgaagagagatttgactatattttatttatttattttattgttgcgattgtctataaagtacttccttaaaagtaatatactgatgcagaaaatttttttagtctatttttttatgtacgttatagttatttaagatatcttataaaattttaagaaattcggaataatttacaatatagaaaacaatgttcaaatagtttattttacacgcgtataaaannnnnnnnnnncgcgtgcaacacactgtttgaacataatttttggcatgtgaaaccttttcgaattttttaaaattttacaaaatgtattaaataactataatttacactaccattaaaaaaaatttcactaaaaaatta

SEQ ID NO: 41559 - DNA, 1229 bp, Cannabis sativa
  modified_base (232)..(236): a, c, t, g, unknown or other
  modified_base (999)..(1000): a, c, t, g, unknown or other
  modified_base (1064)..(1065): a, c, t, g, unknown or other
acaatgtactttaatggtgaaatccctatacaattataaaatatactttaattataatctatagattatacttaaatggttatacatacatattttacaaaataattttttttatatattgaatctcatatataatgtaattaaatagtcatctagacttatacaatgtactttaatggtgaatcactatacaattataaaatatactttaattataatctatagattatannnnnatggttatacatacatattttataaaataatttgatttatatattgaatctcatatacataatgtaattaaatagtcacatagacttatacaattatataatatactttaattataatttataaattatactaaatagttatacacatacatactttatgaaataacttagaaaatatagttaaataatttattgtcatctatatagtgtattaaatgattatattgaaaaatactatgatcgcacatagtcgcacatggccacacatagtcgcatagactaatattacgatatattttgaaatatactacgtttgcacatagtcgcatgatcgcacatggtcgcatagaccaatattagagtatattttgaaatatactatggtcgcatatagtcgcacatggtcgcatatgatcgcatagaccaatatcaggatataatttgaaatatactatggtcacatatagtcgcacatggtcacatagaccaatatcagaataaagttttaaatatactatagtcgcacatggtcgcacagggtcacacagaccaatattagaataccgttttaaatatactatggtcgcacatggtcgcacagaccaatattagaatacagttttaaatatactatggtcgtacatagtcacacagggtcacaaaaacacatattaggatatactttgaaatatacttggtcgcacatggtcgtacagagtcacacaagatccataataagtactttaattagcataaattttannaataaatataaataaaagtttgcatatatcaaacacaagaaacattaaatatataatttagagnnctaaataataataaatcacacatgagttgtgcttatctgatggcacttgtggacatgtttgcgaattatgtcctaactgtccacatgttcaacaattatattgtttcttaagaaattcacctttggaagctatgcgattggttcttggtcttcctttagtcttg

SEQ ID NO: 41560 - DNA, 1336 bp, Cannabis sativa
catcagattcttccaccaaaggagcacataccctctctggcttcttatgatttttcacacgttccaaaccaagatctttattgtctaaaataagcttcagtttctcaactgtctcttctacttcaggttttatggtcttatcaaaagatgttaaaggagttgatgagatcaatctcatgagtgcctgacaagtattatgcaataactattagcggtgtacaatttttttcacaaacactccgcgctctctaaataaattgcctaaaccaaaccgaaaaactaaccaataaaacctaaaccattcaattaataaaatgaatggattgaaatataagttgaataaaccgatttactatttcttttaaaatatatatataatatactacataaattacatttaatattattattttttaatcgtaaaggtaataaatttattattaccttactagtacaagtacagctgctatgagattcataaggaccaccaccttctagtttgtttcgcgatgcctcagtgtcgatcttgtaaaccaagtcgtctgcatcatagatggcgtccttgagatcatcaagccacttccggactctcgggtctttgatgagcttctcctcagcatcaatgagcagcagatcagcagaggacagcaaagttttcaactccttcaccagtttaagaatggcatcttttcctttgaagaagtccttgacctcagaagctaacttttccaccaacggatcaaggaaagcagagagaagcgctcctccaaccaattcagcagccatcagatcttggaaaaatcagaaaggattaaaagaaagacagaatgatgaacacaaaacaaattcaaactagtaaactgagctgaatgagtgagtgtagtagcatatatggtatagtttacaataaaattttggatacacactgctaagtgctataaaagaatagcacgggctccattgaacattgtttattatttctgagtttgttaattttaattttggtaaactgtggtagctgcatggtttacataaatctaaaataaagaaatataatagtaccgccttcacgtgtgtgaaacgacaaagcaacaggctgtgaaaataaagagaaactttgaaatctgagcattttattatataataatttagaggttcccttatttatattaacagaaacaatagaagatcaattcaattactgaaataacaagtttagttagttaaaattgattatttggtataactaacgtctacagctctcaaattgtaagtgaatccaatccatcaaaaagtaagatatatgttgatctgaaaccttgcaaatgaacaagtt

SEQ ID NO: 41561 - DNA, 1642 bp, Cannabis sativa
atggatataagcagaaagatcgtgggattaatgctgagtacaaagatcgtgagattgaggcagaatacactgatcgtgggatcgtgtgtatggcatatccctacaatctgattcccaagttatagggatttcgttgatgactcacaatgcaaaagctgaatttgctaactgttggttgccctgcacggatttctgattgctttgctcaaggcatgtcagcgaggcatccttctcggaccgttccctccgagcagatactccaagtggattccacgtgtcaccattatgcgatgccacgtaaaagtgcaaaaattgggataacaaaatgtataataaattataaacaaatttttattgacatataatgtaattaagtaaagtacataaagttgtaaattgcccaataattaattgcattcctaatgacataaattgggattcaaaatactatttaaaaccttgcttgaaatagtgttgtttcaacaaaaccctccattgaatttgaaatcaatattactggtcttttaaaatgtttacaaaaatatggcaacattaagattggccattttttatagcatattttagtttttaagcttttttatagtattaattatgccataaatatgtatgtaaagttaatttcaaagctcatatttaatgtttaaataaatcattcaaaccctacctgctttacacttcaacagctccacgcctccaccttcccaacttcattcactagctccggcgacccgcacaaagtgatttgtctcacccaaaagctgacgctattagccaccaccactgaagtcgctgtcttcctccaaggcgagcatcaatggagttgaaattaggcacataatctcagccactcttctcacgttcgttcaatccaagctccaggtgtatatatagatgaattgtatattgcctaaaaattttgtttcttccacaacagccacaccattgaaactggtagttttgttggtcggcattggcggcggtataaatataataaccatcgaagagcttaaaaaattatttgaactgttcgatcagttcttcctagtggcaggtagaattcgaaggtcaaatgctaaaaatctgtacatcaacaatgatgctagtgtacagattaacaaagctaactatgaggagcttatggtgaaagagtgcttggatatggtggaaactattagagttagtcctatattgctaatgtgtggaaataaattgtgatatataagataaatgggctactcttctcattgccaattggttttgagatggaaccccattcaccttattccccaaattctaacttggtatcagagccacttgtgatccattgtgagccctaattgccaccggtccaaaaagccgattgtaatctgttgtgagccaaagtgccaccggtacaaaaagatacttctactgtctcccttttaacctccatttgggacctttgacatgtttcaaaatccacaaatttcccgacgtgtacacccacaaatttcccgatatttggccttgtgggattctttcaaatgtcacgtttgaccctctggtttcttaaaggtcattcgttatacccacactttccaggcccaaacgtgaggagggtgtattagagttagtctcacat

SEQ ID NO: 41562 - DNA, 964 bp, Cannabis sativa
tatgaagccttgattgctggcttaaagattgccgaagcgttgaaagtcaaaaacctcatctgccatagtgattcaccattgattgtgaactaggtcctcggggaataccaggccaaaggcttaaaaatggcgaagtacttagggaaggttcagaagaacttggaaagattcgattactttaaaattgagcaaattctgagagaacaaaactctaacaccgatgccttagcaaaactggcctcgcagaatgacttggatgaattgaacttcgtctcggtggagatgcttagcaagccaagtatatgtgaaacggaagaggtagagatgatagacaactctcctacatggatgtctcctattatcaattacttactcgacggacaacttccaaatgataaaaacgagatgcgaaaactattgtactcagtgcctcgctacacaataattgaaggcaaactatatagaagagggtattcgatgcctctacttcgatgtgttctccctacagaagtgaacaaaatcatcagagaatttcatgaaggcttttggggggatcatgcaggttggcaaagtctacccaaaaaggtcattagacaaggatattactggccaacgatcaataaggacacccatgagtttgtcaggaaatgtgataagtgtcagaggttttcacatatacctcgcgtgacgccaataaagctaagaatgatgacctcgccctacccatttgctatatgggaaattgacttaattggagcattacccactgggcgaggaggagctaagtatgcgatagtatcggtcgatttcttcacaaaatggacaaaggctgaacctctcgtttccataacctacaagaaagccctcaactttgttttcaagaacattgtctgtaggtttggaattccaatgaagatagtatccgataatggaacccaataggaacaaaattatcaagagcttc

SEQ ID NO: 41563 - DNA, 1422 bp, Cannabis sativa
tatgagaatttctcttttgtacagcccaactgttgttaattaaattattttatttggcatgaatttctctaaggaaattttagcatctatgattaaaaatatcctttaatttatacaattgatgaacattagaaaattatgctcataaatttataattggacaaaaaagcttgtcatttcttcacttcttattttccctctaatttctcctctctaccgaccatcgatccctctcccatccgagcccctttcttcgatcacccacaatcaccctaagaacgtcgactgacccagaggaacaaccgccgtcagtcaccgtcgccgtgctgcacgagcacggaaccactgtgaaggtcatcactttcccactgtccaacaccattggaaattggcatacgaggttagtaattggtttaatttttgtttcggtcaaatatatgttctgtaaattcaaataatgtgatgtatagtgtaggtgtaaataattgtcttgggtgtttgtagaagtttaaacttgaattaaatttttaaaactgatgagttcagatttttctgctctcttgatgggaaaattgggtatttgcttaattttaatgctaattcattatgcatggtttctatactagattgatgctctatgctttattgaatttaggctttattttcgatgtggtcactcgattgaattatgctcttacttggttggatttagactttatttttctatgcttacataatattttgaatgtgtgtgtgagtgttaggtaaatatacattcatgttttgatgaaaaaagtttgtcaagtagattttatcaaattgggatccactttcttccaagtaaattaaaagatttacacagatcaaattttcagattgaaaaataaaaaatcacaaatttgtttggtaaatattaattttagaactatttagtgcatgattatattttagaagtgtgcatggtcatgatttttgaatcatgttatattttgaaaatattttcacacctatcattaaattcagtagtttaatacatttattttttctattcttttcggtgttgacaaagtctaatagtactattaattgtcctttttattattgttttgttttttttttttgaaaaatcctttttattattgttgttttcaactaattaaaataagaaaatgtacaagtcaaataaagttggatagctagtatggttgattgaagatagaaaacaaatggaagttggaaaactctgccttgatgtgagattgccacttgcagtattgcgtgttgttgggtgatttgggtcaagaaatgagaccaaattatatgaaagttgagtgttgcataggtggtgtttggttggagataatgaaatggaatggaatagaaaggaaacaatttttattctatttctttgtttgattgcat

SEQ ID NO: 41564 - DNA, 746 bp, Cannabis sativa
ttaaattatacacgtggtgctaatatggcaattgactaagcagatatatcatcattttgtttgtcacttgtgacaaaacttgacaaaaaagcaaattacaatactgtaaataattcagggaccatttgtaatgggctgaaaagttcagggggtgcaataatgtatatgtcatagttcggggagtgggacaaaaattctaaaatagccttctttaaataagggccaaaaaatttgatgtctttagttttttcttttgaataattagattgtttgaaaaagaagaagtaaaagaatttagtttttattttcttaaataatgttattatttatttatttatttttgaaaaaagataggctttattcaaacggagtcggccaaaacaatgtcaagcagtaatgccggagcattactagccgaaataggacaacctgataaagaacgagagttgcgagtaatgaaacgggcagctctgttcgcagatcgtcgtacaaaagaacaaaaaacatttattagagaatttaaaagacacttgcaatcctccacaattaagccaaacggagatggtaattgacccgaaccataaagtgcctggattgaagtcaagctatctgtctctgcaacaacattgctccaacgcttgtttgccacccaacttaaagcttccttgatgctcaaaatttcggcaagggttggttgaggagaaccaatcttataaaaagcaaagccttcgagaaggaaaccacca

SEQ ID NO: 41565 - DNA, 914 bp, Cannabis sativa
ttctctttctctttctctcttcatcttcttcttctttcttttcatttactttatattattttatattattttctaacatatgttgttttatgtatttctatgaatttagaaacttttgcttgtaatgtatcaattggtctacgtatcaaaattgataacatttgagattatgttgggttatacacaaatgatcctttttgatctctctttagccctctatctcttatttttaggaggtcttttttcactagcaagttttttttagaatactttatttattctggtgatgacagacttatatttcttagtttcaataagaataataagaatactaacccctaaagtactagattccaccaattcaaactaaaaaatttacttttcttatcattttatagcttaaaatgcttattatagaaaatgttttctaaaatatgtgttaatatttattgtaattataggttaggattaggtagttactaggaactactataaattattatgttattttctattatctattaccaattaaattactaaaaaatcctttagttttgccataggtaacattaatatgcaaagcatttttttttttttgaagtggagatttttattttacgagaacgttcatccattacaatagatattaaatcagaagaagcattaagctcgctaaagatacaatctgactaaaaacaagactgtctcgcaacacaataagcaaccctatttacagatcgtttaacaaaagaaattaacacattgttcagaagagataccatcatacgacaatcttgtactaacattccaaattgtgatggcatatgactctcctcattaataacttgaacaactgtaaagtccttttttggcaagttaggtgacaaaataatttttcctttttatggtaagat

SEQ ID NO: 41566 - DNA, 1183 bp, Cannabis sativa
acacatagaagggcatagaagggtgctataagcaccactggtgccctttagcatttctccctagaccagtaatcccaaattaattagttgtcactttttgtttgttactaacaataacaattcattgttgcatacaagtgtgatggtgctcaagatcatcttcaagatcattagctagttatagcttttcttttttttattattattattattatcgtaattatatatatactaattaatttgtgaaattgaatttgctttcatttgaattgcatggaacgtcttaggtgccaataatacaaaagcgaacacatcattgtttcttgtgtattagtgtaattagccacggatagctgaatagggctttgcatgaaaattaattaattttttaatgtacataattatgattaccccactttgaagcttcaacatatatggctcccttcaagattttgtttcatcgactttgtggtaggtagatctataaatgcaattatatattacatgtatatatatatatataaataagtaaatgaacatatattcttattagacagtgttgtttagtaatattaaattatatatgacctgatatttaattagactaatatcaatataacacctaaaaaagtgttaatcatcactgatgtctttctgtatttctatatctattttaaataaattatatatggaattcttagtttaatgaatcgattttttatgttaaatttaacagaatatactattacttaacaaaatattttttattaattttataatattatgatgtatattaaaaacaaaaattatgtaaatattttatataagaaaattttaattttaatttaaaatacttaaaatattttagatatttttaattacattttttactttattggtttaacttcgagttaaaataagaaataattctactagatcaggcacacaatgattcactacgatatctcacttgattttttttttttacatataaaatacgtatatatataatacaaatgcaaatgacaaactaatatagcttgcaatcagtgacggacacacatacaaagttgtgagggctatagccccagtaaaaaaaattgcattaagaaaattaaatatttttctttttatttgaaaattatagcacaaaaaattgaaaaaaacctcacaaaaataaata

SEQ ID NO: 41567 - DNA, 1011 bp, Cannabis sativa
  modified_base (947)..(952): a, c, t, g, unknown or other
ttttgaggcttattaacttcttttagcttcatagtgaaaccgaacctacatataaaccaacagtggtgggtgaagaaaggtattggattctttacgcggtggaggatagctaacttttattttttattttgtctttattgttaagttgctttattcttgattgactttatacgatagagctagcttccactaacagggtcggcacaaatcattaccccgccgtttcatgctgcgtaaaaagctttgtatattattggtttataaatcaatttcggtgaaaaatggtatatgaactttagcaaaagaaaataggctacaatcaccaatgtaaggctttgttaaaggttcacaataggtggaagaacagacaccgtcaaaggatctttctgagaattattatcagaatattatatgatatccatgattctaaattttgtacggacgtggtttatttatggcaatttgggaaagagagagatgagaggctcatcaactcacctttggtcccaattgaagggttcaatttcttcaattatctatcccacatatataatctccatgaaaggaatgatgagagacataattactctaaatcagctcttttaaggctcgggttaagcagattttgtgattagtagcaacggacaatatatcagttgctctagtaggaaaataaagagagtatgagtaaccacaaaaatctagtgatgtgctacgttggaaaaccacttaaattttataatttgtaacattcaacctcataaatttatttttgatgtaagtgctacagtgaataacttatgagtacacaaatatacacgaagttgttatagtgccaatttttcacttgaataatacgagagcaaactcatataagattgacacgtggatcagttcccgatggtaaatgtgtgttatttgataactattgtggacattgtcccacnnnnnntaaatggtagagaattgagtcatatataagaacatgggctactctactcattgccaatt

SEQ ID NO: 41568 - DNA, 2607 bp, Cannabis sativa
attgtattaacttaattaagaagaacataaacatattaaaatattgctcacaaatgtgttacgaaaaatttataaacatgttacacttattacaaatatattaattaatgagtttataacttaactataaataagcatgaatttctacataaataggttaaactaactagttcagttcaattattctttgtaaataagtcagatttgaattttaattttcgacatgaataataaataggttgagttagtttgagttttagttttcaacacaattaataaataggtcaaatttaagtacgactctaagaatttccacttaactactaagtgtatatatatacaaggggtatcatcttatatactatgttttatttttacagtttgggttgcttcgatagttactctggtggttgctatgtggatttggattatgatttaagttgttatattagttgctatgtgaattttcgtaaaaatattttaaaaaaatattgtttcgaaatgtaaatatatatataaaaaatattatatatataattgttgcttatttgaagtttaggaaaaaagtgttattttcactttttttggcagagatttttttttattattattatgtttagtatataaaaaattataattttttatgtaatttatttatattgtaattatattagacttatattatcaatttttaaaaattttagaataatttattatatatgtttaaattaatgttcaaacgatctatttaagtaacgtattatgagatacacgagaatgatccttaaagagtaatctgagtaagtcgtcatctattcggcgatcatcttcctaaaaatcagtggagctcatttacaaaaagaaaatgataaagaggtaagacataatacagcttggaaacgcccttcaaagaagaacatctccaacactctatctccaacactctgactaaggaaagatttaatcaaaataagaagatttcatcttcttgataaaattttgaatagataaaaggtttagggttttcaacaaacaaacaaaaaaaaatctaaaagttcctaaagtgactttattaaaccaacaaaaaagcctccaagagactaagtgcatcaaaggaccgagtccaagatactccctagaattcgacattataatattatggtcaagtaaatgaaaattcaataatcaaagaacgaagaacatttaagcattttcgcataacacaatttaaatttatacaaaaatttatgcaaagagaaatttagaggacttactcactgtttggcataaagattgaagataaaattaccaaagaaatggtccgtacaatgcttgattgaagaagaaaactcaataatttagaagttctttctcgcttcttgctctgaaaactcacaaagtgtaaagtttcaaatggagtttgatggaggaatttgtaggcaaagtggaagtgaaatgaaaggttttggaaatttaattttgaaatgattaattttgttcaaaaaaaatccaacaaaattaattctcattaagactgcatgggggcatgtaactatccgacatgatccccaagatacagttcttaagaaaaaagtaatcatgaaaaagatttaaaaggatgggctggaaatttgcttcagctcaacagaataccttggaagacagctcatgaagaggtggacatctgtcacatgcccgagcaaagtatgaagctgtaaagtccccatatgaccaagagttcccacgcggacttaggggaaaatattattctaaaaattaccctagtgacgtgacatggaataatgtgacacgtggcgagaatagaagtcattagatggacaaggaattcttaaatactcttctcgaaatatactaggcggaggtccttttagtagccttcaggtgctggacaaaacatatgtcgagctctgccaagcaaccaaggagttatcatgcaggataaatgtctgatcagtgactctcacaaaagaaagtatccaaattcattccttcaaccgaattcctcatgaataagtcaatcaacccgcttataattgcgaaattgcaagaatcagggatatatgaagaattcatgagattgacttaatcaatattaattattcattatgtaacaaaatgtaatattagcgatatcatttttcttataaatagtggatccaaatcactatttggagaggggctaggctttcataagagctgccacgctgtcaaaatcactgtaatagttaggcactaataagaaattcactggaccaggttcatgtgatcttgcttgtttctaaaaaaatacaactaaaaggggagtaagctatcgatttttgggagaaacttctataatctctatgtgtcatttatattttttgctatttttttattccaaatatttgtaattgttgtctatttgatttcgcgtagttaattaaaacaaagtcaataataattatttttaagaattattatttttaattatcatttgcaagactcctgatgtaaagtactactaatattaggaatgtttattagactacatttaatatttttaaacctatctagatctgatctacttatatattggatattatatag

SEQ ID NO: 41569 - DNA, 1383 bp, Cannabis sativa
  modified_base (43)..(44): a, c, t, g, unknown or other
ttaacggcaaaaaaagttcaaggggcacgatttagtacatgtnnaagttcgggaggaaaaattactaattagcctaaataaaatgatatttctaatctcatttaatctaatctaaatccaatcattttattattaatagtgaagatcatgcaaccaaaaaagtgaaaggatagaaaaatttacgtacacacacaactcaagcgtgttgtgtttttatatacataatatttatataaatgataatgatattggtatatttataatttatttgagcattgttatttaagtactagtggtgtttaacaccttctcgacatgtcgtattgcgattgactagcgatactccctaagagttattgtattaaattatatgagacctgatacttaattaaacaaatagcaatattaacacataggaaagtactagacaccacggtacgttttagtatttctcttataatttcttatattataatggctaagagctgcatgtttgccacatgtcacccaaagaaaggaccatatattatgtatgaagagtagcttccaccaccgcccggccaccacttgtgtgaagagacctttatttatttatttattttaatttaatttaatttaatttataattatctttattagtttaaaattgagggttctcaatcacaactaaacttttttgtttggttggtagggaaggcaaggattgattaacataagcttttttttattattaacttatattattatatgcttttatgaggtggtaatggggctgtgctgctgtcgtgtcacaaattggacaacatttttcacatatttttttatccattaattaattatcaactattaaaataagaaaaatgacaatcaagcttttttcttctatcaaacgacatcgtgtggacaaagtctccaccaccaaacggctttaaaagcttacctaaaccaacatgtttaaagttggttttccaattccaaatggtgcaaattaatgcaaaaccagataataatatagccttttaaaatattgtaattaataacacatattaagaacatgattggtagtggtgcctagcatatataatggttttttataaatagttaataatattttataataattattaaattaaattatataatttttttttaaaaaaaaaattatataaaatttaatatttaattacactaataacatcaatataataccaagtggtacattttaaacatttctcatccataaatgcttaccctaaacaatttagaatttttacatgaatcgacactacaaaaaatcttacttttagtcacaaccaaacttgtgactaaaagtaaaaatattgtgactaattataaattattatttctatattgtgactaaaa

SEQ ID NO: 41570 - DNA, 1857 bp, Cannabis sativa
tcttccattgttataaaatctctaacaatatatacatatatattttctttatattgaaaaataagttaaatatttatgattttgtgaaaggatataatattttctttcgaatctattatttattttgtattttatcattactttactcatcaaaagaaattcattgacacaattattttaaagttaaaatataattattacatagtctaaatatgtgtcaaaagaaaaatacatagtccaaatattaagaatacaacacctagatttttaaataccattttaattatatttaatttaatttaatttatataattaaaattgcataaattttagaaagttaggttatttaattacttttaaatacaactttattacattacaatttatctcaatataaataggaaggaaattgcatgaaaacataacattaataatactaaattaatatatgtatacatattttttatttattgatttttttttttaaaataaaattcattcatgattttaggggacgactgacccacctcgcctctatgtgggtccgcccctgtacataacactagctttgaataacaaagcttgattgtccagtccagcaaccgtgtcataccatatcagtgaatttaatgtaaaattgaaaataaaatattatttgcaacatatgaagggccttggcccctccctgccaaataatttttttagttttaatttagttttctttttttaatttttaaggccttaaaataattttttttacactttggctctcgcataattactttctgtcttcatctctaattgtgaagttaacgagacatttttaacaacactaataatttaagaaacatgatcttatcggtgacaaaattcagggaacaaattaaatacatatttattgtactaattactattatcaaatattgagtactatttacatgaaagtcatccatgtcggtcttaaccctaaaagggtcacatttttatatttgatataattttgacttgtacaaacaatttaagtcttaactaatgttattttcaaaagaaaaagaaatacaacttttctttcaatgaactaaaatattattatattaaaatgtgaataaatagaatgaaagacttttccatattttgaattaaattaaccaaaccataaccccaaacaccgacatttcatcttttatatatttaagataaaatagactaaaattaacaattaatattaatttaattaatgtgattaacacatactcaaggagtcaatggtacttatatgtacattatatttagattctagtgtaattaattacctttatatttcttaatcaatgatgacatgttattttcaatcacaaaattattaatttctcatttttcataattgcaagtttatttgacaaaaaaatgataaatttgcatgtactactatattgccaattttgtctatttatttgtacagaaatattagaaaagcatatacaaaatattaatttaaaagcatgaataatattggacaaagatgaggcaataaaaattaactattcttaattgtcacataaatatattttattttccttccataaaaataaagctatctttttatatatattgacattttgataatgtcgacaatgtctagatcaatcatagaatttaagagacacacattttgaaatttgtcaaaattaaattagattgaatttatttgacttaatttttaaatataattagtagtcaaaaagttttgtagcaatcaccacattggaaaaaattatttccaaaaggaatttaatgttattttatactcttttttttaatttatattttaataatttatgcaattttattaatagt

SEQ ID NO: 41571 - DNA, 3372 bp, Cannabis sativa
tttatatacaaagctaggagactaggaaataggaaactaccaacaaaataggaaactactaaatacaagttaccctaattcttttacacctaatatacagctaattctctaacacatagattaaaatttttaacctaagccagttgctataacctacaagctacagctgttatctcttaaacatgcaggccttctatagtgaatgacatcaacacaatagggtagctcagatagtcaaagtaggtgatttgctaccacaaggccctaagtcttttaggtgcttacatatcaattcgtataattttctggttcccaaacattgtaggattagttggggatcctagattcaaaaagtaaagtgaatgataagtatgcaattttctttgatatgttaccaaatgtaatgttaataaataggaatcagataaatcattcacttgacaaacaatatataatacctcaaatagtcttttcctgctttgagcgtcccatccaataacataaccctcattatcaccagtataaaaagcactgtccatactataacaccaacaaaaacaatagaaaaaaattattaagtaatcataaattagtgctcataaactcacgatagaactccacgtacagtgtattaaatacaatgtcattcactgacactagatgaagtctcttttctgttgactttggatgacaccgaaacatgtatctgcaatatagtaccaaatattttcttgaattccagcaatttgaacaaggcctttatctggtaaaaaaaacaataaaagctcgcgttgacaattgacattaaacagctatataaaacttcacctgatgtcatttgaatctgatgaagaagacatctccaatgctacacgtccatctactgagccaacagcaaatcctgcaatggtaagttttacttcaaattcaaagactttctttttgggggggaaaatcaaattcaaagacttcaatcagacataattgaacagtctaatggttgtcagttgtaacaaaaaaacaaacatagatttggtgcccttgaaaatctgaaaatcaataggaaaaataaatgcaaatccattactgcatgtgcatgcaagctataacaaaatgaattctaatttctacaccatttaatatctactaatattaacagtagctatcaagagagctattatttgtctcaaaaccgatgacagctgagtaaacatttatcttgatatacctctagaatgaggaactgaactgatgcactttatattaacatccatatcagatttttttgatggaatcgattttgctaagttacgcaagtcatacacatacactgatcttccaactgctaccatcatttcaaatcctgaaagtgacaatgactgcacttctgatcctacatttaccaaacacaaaagttccttctccatacgtgtgtcccaggctaatatcttattgtccaaaccaacactgattacttggcctattgtaaagggagaaaaattccatgtattaacttcttatgttgagacatgtaaaaatcacaatataagtactagttctagaacaagcaaaaattgaacacaagttaaataagtggaagcaaaacagggagcagaaaaaacaaggatcaatgactacactacatctataattaagaatgaaactaaacgatgatagaggctggtggtaagtttgcttacatgtttcattagaatatccaacgcaaattgaaagatcgtcatgatttccaaccacctcactagttccggaatgaaaatcatacctgtaccaattacagcgaaaaggtcagagcaattagctagcaccaatgaacataaagccccctttcaaaatttgacaagaacatacaagcaaatacaatttttagatcaaagatggaatgcattgcagtagaaaaataaaatattctagcaaagttgtactcttgtcattttttcttttcatacaaagataaatacactaacataccaattattaaagatcatatcaagagaataagaatattatccaccacagaagaaaaaaaatagaaaatttctgtagtacacaccctaaaggggtgttctcgtagactccccatatgttttagtatcctgaaaagtttttgagtctaatttttttttataatcacgtgcgttgtaactttttaagactccctataaaatttcagaaaattctgaatagtttacaataccgaaaggttcaacgaattacttactacatgtataagaaaaactaattgtgcgtgcaacagaatatttaaaccttatttttgacattgtaaactacttaaaatcttctaaaaatttacaagggtcttaaataactataacgaacacgatcatgacaaaaaaatggactaaaaaaccttactggatgtcgaaacagatcatttagagggtgtactatagacataccctaaaaaaaatatacatcactacaataccaatgcaacacaaaacaaagtcagtgcaaaaaccaagtagaactagaaaatatctacctgcattggtaatttattaagcccaatttcattaataaccatgatatgacatgaactacattcacatcaaagttaacttgcaatgatattcataaatctgatacattcaagccaacatgacttgcaaaacagcaacccattacaaaatatgatagaacccacattggttatttcaggtttctaagataaagaaaaagacgaaccttctaatggaaccatcagaaccagcactaaaaccaacgagctcgttctggaaacagcagtcgagaagcgaagcttccgaagaagcttctaacctaagcaccgagccatccacatcgtacaaccgcaaacactaaagcataattttgccaaatttaaatgcagaaaaagaaaataatatatcaaattgtggattgaaaaatgagaagaaaaagaagaagactcacagaatcccaagaagagatgagaaggttgtttgattgcggcgcaaactgaatgctagaaatggcgtcttgaatcggagagtcaaataccaaaggaactccggtcattttgacccaaatatattgtaactgaaattgtcaaagaaaaagtttgcagttgttgttagaagcattttctgtggaaagttgaaggtgtgtagaagagtagtgttagcttcatctttatcttacagtaaatatgaatcagaaagagacggcaacattgggcaggagagatgggttctaatgggggtagagatagagaagaagagtccagagtaaggttcgtacttggtacttggtagagcccagaggatggtgctgaggagttttacttgagaaattaaatgatatgtgaacaaatttacatatgccaaataatta

SEQ ID NO: 41572 - DNA, 1219 bp, Cannabis sativa
aattattcaagaaaaagttttatagggtttgataaattattcaagatcaatgtacgatgataatggtattcaaaagatcatatatatatagacatgtatagaagattgcttactactaaaagcgattccagaggaggcaacaacgcaagtttggataacagtattttcttggcgagtgaagggttgtttcaagagacggaatttttgaaggagagtggtgtaggccttaacgacgacgaaacccaacaatccggcggtgatgttgagagagggaatgactccggtggtaaggttgagtttacagacgacaaagttaaagaggacgctgagtatgaaggctgtggccatagctctgtacgtgatctggttgttccatgagggaacctctgtgttcgtgaaagcctcctccaccgaagagagtacgttgttctccctctgatcatcaaactcattactgttattgtttctttcttctgattcttcttcttcgaatcttgccctcctactactactttccccgcggtttctttccatgatttctttcttgagatgagaaatattaacgtagacttagctaacttaagcttatctctctctcactgtggggtttttccttttttatatggaaatggatatatgtgtgtgtaagtatttatagagtagaaaaacgaaaatgtgtataaagataatcctaactaacttaacggtcagtctttatgacagttagttatctctctaggtgacgatccagttgagaatttagatgaaaacagtgtgaggtaatgagggatgtgcagaattatgcacgtgtctaactgcatgtgagaccattttgttttggagaagagaaatcctattactttcatcaaatctcatgtctttagtaatttaatattgaattttacttattttattttaataaattatcttgtaatggtaccaaacactatagtacctaataataatactcttttgtttgagcattcttggtgatttttgttttataatctgagttcaataaagtatagcctcaaagtaccttccctgaattaatgagccaggatttctcttgtgcaggaactttatttaacgttttaacattgtttttagcatacaattgtgttttgtttttggtttgattggtgttctgaaaccacaagcagatttagtaggtcatagaaaaaaaatattttgagataaattgagaaatacttttttt

SEQ ID NO: 41573 - DNA, 1650 bp, Cannabis sativa
attgtagacctaaccagacaaactccacccattatctctggcatgtgccttttttcacgtgataaaaatgtgaagtttggagacttaaaaggtaccaatttaaagttgggacttgcttaagggatacaattttggagactaaagaagaaatagtgttctaaggaaggtgaagtaactataaatggaggaaagtatagtcttgattctaaatgatttcaggaaagattctttgcaagttatttggttgtgccttgtattgtacccttttcccactaacaaaacaaaataagaaaaagctcaggcttcagtggattaatccatttccttcctctagaacaatatcagataaaacatttaaatttctctttgcttgaacaaattaagatccaatataagagtcgatgttgaagcattatcattctttctgggaaaaaacaaccaagcataactttttacagaaacaaggagccaagtacaagggacataatagctcacttacatgtagcacattatacataagcacattcaaccagtttcttgcttgatgtctttgccttctgattcctatgcattgtcggaaccatcttcgtccacatttcaaccagtttcttgctcgaattcttcgccttccgattcctctgcattgtcagcatcatcatcgtccgcatcattatcatagtcttctttatcgttgtcgtttgttgttttcccaatcaccaccaggttgttattaatctttccgatttcattcagctgcaaaaatattcatatcaaagcaaaacagctcaaatacttttgaagaggaagatagaatcagtggacgaagtcaaagaatattcactccaccaggttgttattgaataattgagcagcttcaaacagtaagtattgacagaaccagatagctttgtttcttattttatacttattccctactgaacttttcaacgttagtcagagaaactcaaccaaattacttagttacaaactacaacgaggtgaccactggatgatataacagctttcatcatatcgtagcaattagattataatatgaactatacaaaaggaggctccccaagaagaatttgtgtccataacaattaccctattgatgctatgcacttaaaagcaattttccaaaaaaaaaaaaaaaattgtggagaaaagaaaaaggagtagattccacactaagctgttgactaattaatttggcacagtaattgactgaaatcaaatattaccaaagttgtaatgaacaaattatgaatagtatgagtactaatatactcaattatagtaagtagtttttttccaaacaagttatagtggtagtttaatgttgagaatcatttgagttttaataaaggtttcatttttgtaaggaaatctcaaagctttaacaaggccactctcacaaaagaacacaatccatcatcagcaatatttcaagtcctagatattctgaagtcattttcaactaatatttaaaagacttcaagtaaatgagaaataatagaactcttcttctttttcatttccctacaatcataggaaggcgaatgaacccatggaaattagaagaaaaaacaccaaaatgaatgaatgactactaacaaacagttctgttatagttgttagagtttgttc

SEQ ID NO: 41574 - DNA, 5472 bp, Cannabis sativa
  modified_base (5390)..(5392): a, c, t, g, unknown or other
ccttacataaggattcagaaaataccggatctccgcctacacaagcaaattgttgataaaactccaaaatggcattttcttttgacttaattttttttttctccttatcattaaggaaaagacaagaaaatttcagggtaacaaacattctctagaatttctcttagatttgagcccatagccgatgatagaactagaatatacaaaataataaattgtgtagctatcacagaatttacttgtgattctcttgaatctattgctccctatttgaaataataaactgtatttcctttcctcactattgattttgatttgctccttttttatggcaaagttgatcttttgttaataagaataatcattgagtttttataaaaaatttaatgtattatttttagttcttttgtgtttttagtggaattctttgttctctatttagtatttttaagtggttatgaattgtaccgctaacaattatccttgctttcagatcaagctcagaggttttctgtctcatattcagcaactacgtattggctactggggaatgacttctaccaaggctcagtccatgtctcatgggttagcatccccacgctcttctgcagatgagaatcagcaacctgctgaggcgtctggagttggaaggagctgggttcagagcatgttcagcagggacacagcatctagaaccaattcttttagtcgtgttcgtagatggacatctgatgctggctcatcaggtcaatatctagtttttcatatgcacattcttctactttattttactaatcaccctgataaaccctcatggaatttttcaataattctcagcaccaaatgagaatgggactcctcgcaagcaagatttatcaacttctggccaaaagaaaactcaaactagtgttcgcatacttaggggtcacagtggtgctgtcactgctttacactgtgtcacaagaagagaagtttgggatcttgtgggtgatcgtgaagatgcaggtttttttatcagtggaagcacagactgcacagtaagccaacacccataatttattgattaatgtcatttgccattggccatgtatgagttcatgctatgagatgcattttcaccagttttaacattatctcaggttaaaatttgggaccctagtcttcgtggttctgaacttcgggcaactttgaaaggacataccaggtctttttaacagcatattaattgaactgtaaattgtggcatttgttggaagtgatttctccagtactctatttgcttcctcgtaaatctcattgattaaattgtttaatttgccttggttgatgttttcttcacattttcttgtttggcatatgcagaactgtccgggcaataagttctgatagaggaaaggtggtttcaggatctgatgatctgtctattttagtgtgggacaaacaaactacccagcttcttgaggagctgaaaggccatgatgcgcaggttttctgtctgcacttttacttagagaagctttcctgatttttttttatcctccaacttcttaccatgcactaccctttcatatttttaatgtttctcccctcaattaatgtgaaatcaatgaagacattcaaagacatgtggcgagataactggaacttttctgaatataaattatgtttgtccacccttgtaggttagctgtgtgcgcatgctatcaggtgaacgtgtccttactgctgctcatgatggtactgtaaagatgtgggatgtcagaacagacacttgtgtggcaactgttggtcgttgcactagtgcagttttatgcatggaatatgatgactccacaggaatcttggctgctgccggcagggatgcgtatgttgaaagtcgaattatgatgcttaaattatagtagttaaaaacagcgtttacctaatattttatagcaatgttcactttgtatggctcaatataatatagtggataattatgttatcagtgtggcaaacatttgggacattcgtgctggcaggcagatgcacaagctcttagggcacacaaaatggattaggtgagctaaaacaacagcacatctgttttatgtactactagatagatttgactaacccttttcaattttcccttttgtaatatacgtgtgtatatgcaggtcaattagaatggttggggacacagttattactggcagtgatgattggacagcaagaatgtggtctgtttctcgaggaacatgtgatgccgttctagcatgtcatgcaggtccgatattatgtgtggagtactctgcattggataaaggaataattacaggtattcattttttttttatgttacgattttctttgttatcttattattgttgggcccatctaatgatttttgcttctaatttggttcacctttgcatctgtgatgttctttttaggttcaactgatgggttgcttcgattctgggaaaatgaagagggtaagaattttatttatcttggttattttagccatctttgctcctggagattttatcacttggtttcctcgtgctgggtttatttaccatgacacattgataggaatagtacattgggtaataatacaaattgccttggtaacacatctttagatctgaagaacatttatcagagccattatatatactaggtttgttgggacatattggaaatgtttttcgtcttcagtggaaatacactagaagttacttagcatcttaaaacttactcaaaaccgtacgtgcatgcaacatgaaaaaagggttacaaatttgtcaggattctgttaatggtatatcctggggtatgtggaatttgaaaacatatttcagttctgccacttatttttagtccgagtcatgctaaacctgagttgctaattatactaaattttttttcacaatatgctgatcaacacacccttcacacctataagttctcacacacaatcatgtgttcttattgattccgtctaacttttattgacataatccgcttactggtagaatagatctgggtttgtgcaaaaaagctgcttattgttattattatttttattttttttactgtgatgaaaattgaatttatggccttcaataaaaacctgaaatgaaatggataaccaaatattcagagaacacctaaaaatgtgggattgtgcactgccagtaacattgagtttggccatatttgcagaaggcataagatgtgttaaaaacgttaccattcatactggtgcaatattatccatcaatgctggagaacactggttagggatcggagcagctgacaactcaatgtctctctatcatcggcctcaagagagacttggtagcttctcaagcacaggatcaaaaatggctggctggcagctctaccgaacacctcagaggacagttgcagtggtatgcattttcttattagttccaatgcacatttctgattgcatgcaattcttcatcatatatttgaccctgagaaaggaattaaattgatttgctgtcaagatgatgagacccctgtaaaacttttggctttcgcatgtttagttttaaataaaaaggtttgatgcttgaaatccgtattgacaatgtactgcaggtaaggtgtgtggcgtcagatcttgagagaaaaaggatatgtagtggtggtcgtaatggacttcttagactctgggaagccaccattaacatttgagttttccagcctttcggtttgaatttttttacacggaaatgcttgcctctatgttgttggacttatctctttgtttggtttttcaatcctcaaggttgtatagttttgtaaattttataagatgtataatttcctttttttctttgaaacatgggtataaatgtatggaaatcattgctacaggttaagattttatattgtttttttcggtaattatacgaaaccttaatgaaaataaggattttttcaatttgattttttcggtatttagaaatactagatgccacatcaatgaaaaaaagggaaaaagaaaagaaagtcactctccctgaaatcttttattttttttttattcaaatggaattcatatgttatcttaattttcacctatgtaatgtaatgtagcatatctacataggtaagattaatgctacgtagaatataacgtaggtaagattaatgctacgtagaatataacgtgtcactaggtaagcaaacaaccttagacaacaaatctagtgatgagggattcaaatatacagtcatgatgaagttacaataaaatggctacttaggagggtttagcctgaccacaccttagctgaccaagggtagtcatgtgttggccagtctcgggcaaagggagggttggctagcataggtgaagagctttaagaaggcccagtcaaatggtgggtccacagttatcctcctgcacggatcaacacacgagttcacccatgagatagctccaaactatataaaggagcattagactaaatggaaaaagacctaagtttaaagtcccgaaagcgttagagcacttttactttctctctcacacgccaccttcagttcattggacatttaagtttgtgtctcatctcacttgtttagaatctgttatacatcattctcaccattgaaacattcatagagggccatacgagaaattataaggtgaaagcctgtgtggtgttatctctcgaatcaatacaactaaaaggggagtagatcattacccgcgaaataagggggccgaactcctttaaattgttgtgtcaattttttttttttatttacttatattatttacacgtgattatcaatcataaataaggttctgctgtcagttgatcaaatcaacattttggtgctttcactgagagtattatttatcatttcgactaatcatcatggctgtaactaggagaacgactacctccacttccttgggccttccttaagaccccatgatggttgatcctaatgtccaagttcctccctcccaccacgacaggcctcactaatcaggcacatactgtcaactcggtgaatcttccagatccacccaatactactaatcccattaatcctactaacacggtgaatcctagtgatccacctttgacgcccagagcagatccaccgacagaacctcgaacaaaaggtcttgtcaacacggaacaacctatacggagcgaaactaggtttggtccccgatattatccaggcgaaacaaagtcagggattggcgagccagctattggtgagcctcatgtggacctgggagagaacatcaagcatccactgttggcaactggaagatgtcaaagcaactggatctctagcccttgattcatccacagacatgaatcaagggctagagatctgannngaaggagtcatattattccactgccaacactgtaaggatttcttaatctcttatgagtttatttattgtttttaggaatt

SEQ ID NO: 41575 - DNA, 1195 bp, Cannabis sativa
  modified_base (671)..(672): a, c, t, g, unknown or other
  modified_base (1165)..(1169): a, c, t, g, unknown or other
gtatcagttttgacatggccagcaggccttgtcatcatgctgactcacaatgcattatttcttcaaattgaaacagttttagtcccatttttctttttctaatttggtcatgcctagtaggacttgcacatctaatggcaatgaataaaaaagacataatcttgaccacagaccaagagccactagtttaagcatctcatacttcagtattattatgtctcttatactttttttttgttttggttctctccacaacaaaaatttgatgaaagccactcttatgttatgtcaccattgagattatatgccatggtggaacaagattttcttatatgtgtgttggtgaaatgtaaccataccaatcaaacctacctttcacaaaaagaacctatttttcacttgtcagcagtagtaggagtagctagttagtgctaggcttagaaatgaataaatgggtatctaagctagttaggtttgatatgggatgaaggagccaattcaatggtagattggttttgtacataaattattcaagcccgctttagctttggatttctatggacactggaatgtttttcttatttgaaaataattgctttgctatttatggtgttgaattttaaaggtttttccactttgtgcagattgagagtgaagttgaggtacaaganntgcttgataatcttggacttagagataagtaaacgatttgtaagttttcttagaatcttgctataggatgtaatacatactgaagaggcaaatcatatgtttgttgatctagttcacagtcattttgcttaacacatttttaatcttctctgccacgactttgaattattaaaggaatacactataaccctccttacagaagagtttgaatatcttatatattcatctatagtgaagtaagttctgagaaaatttgtgtgctgcggtgatataaggatgaaaacttgtgtattgttttattgattatagttgaaattaacaaatggttaaggttaataaaatagggaaaatgctgtccaatttcttatagatttattttttctgcattagtttttatataattgagaatatgatgttaaatgtaggttatatgtctagccaaatgcattccagttttgggagtgttgaatatgttactgttgggttttatgcnnnnnataaaactctttacaatctgattagt

SEQ ID NO: 41576 - DNA, 2579 bp, Cannabis sativa
taatcttataaaatatagagcaaaaatgactagactatcggaaaagaacaaaatgcacctgtaaacgagcctttctctcttctttccgctgagcaacagccacatacagaggctttcggcctagcatctttccattcatctcattcaactgagaaaacaaatagccatgttaattaaagcaaaataattgagtgcagaaaatgagtattgaattttttatagtagaaaatgaacatcccaactcctacaaggacaaaatgcttacagctttagtagcttcctcaggagtggaaaaggcaacaaagccagagcccttgcttatcccttgtgaatcaatcatcacctttagataaaaaagaagaagagatatgtaagtatcaatgcatcactacttaaaatcatgaaactcaattaagaaccaacaaacaaaattaaactcaaaactaatatttgactgggaataaatgataccttgcatgatgttatcgttccaaactcagagaaaagctccctcagtttttcatcagtcatattgtcttcaaggtttttaagataaagattagcaccttgaagcttttcaaatctactaattctttcttgttcaaatttagctcttaactcagcttctctctcagatttcctttgagccctcccaacaaaccagactttgtcatcatgaaccttaccattcagcttctcaactgcaacagcagcagcatccgagctctgaaagttaacaaaaccgaagcctctagagttgccattggcatctctcataacaacagcactagtgatggttccaaaagcgccaaaaacttcctcaaggatctcatcactaactgaatcagcaatgtttttgacaaatacattagtaaacttgggggatccattcgatcgacccctttcctgttttcgaacaaatagtccaacgtaaacttgcttgtcattaatcagcattccattcagctctttgattgctttctgggcagattcctccttgtcatattgtacaaagccataaccttttgactgaccattgttatcaacagcaaccttacaggaaagtacagttccaaaagcagcaaaagtgtcaagcaaattcttgttatcgagtgatgtgtccaagttcttaataaacacattggcatatccactcttccttatgctaggatctcgatgagaatacataattctcattggtttcccattaacaggagtgaaattcaaatgctccaaggcattagcagctgcaattttacataaagatcacagttaggtccatacactcataaaaataactgaccagtaaacagtgatcactacaataaaaagtaaacataaaaacacatatgcccttttcaataaactcaaaagttagctacattctaaatcttgatccaaacatttagggttgttaaatgaaaaggagaaacacatgttacaaaaacattactttatcatttttattttaaaataaacaatgcaatcataagatcttccactgctgcagcatataaaatccaaaaaaattattttcttttctcccttccattattcaaaaatataattattttattccaatgataacaaaaataataataaaaaataatcagataaaaattgcatagtgaaagaaaaataaaaaatcaaaagcgatgaaacagtacggaccatcttgaggattagcatagttgacataagcatagccaagagattgcctccgatgctgatccctgcaaaccctaatggagacaacctgagccacttggttaaaaatctcaaaaagctgtccttcatccacgctaggctccagatccccaacgtaaagcgacgcattaccaaatcccgccgccgtaaccggacccgtcactgccacagcagaggactgtgccacctgtccagaaacaaccgtcgctgaagccgccgccgccgccattgccgtttcaaaaataaattttaatagtaattaaaaaaaatggatagaaggtgtcgaaaactagggttttcgatcgatgaaattcttagataataaacgagatcaatcaataccaaatcactagggtttgtttctctgaaaggaaggttttcaatttttttttttttttggttttttgaattttttttattttttattttcttttctctgaaaaaaagacagagagaaaggaaagcaataaaagagagggaaggaaaagtgagtgaagattgggtttatatataggcaagggagaatcaaaacggtgcgttttggggattcgtagctttcgaggtaggttgatgacgtggcattacgtcaacgtgccacgtgggatttgtcgcgtgtttttagtttaaggacgttggaaacaaggttggtctggtcttgttgttgttgttggcttttattgtttttcacttgatatgttccaatacggtgtcgttttctataatgtaattatgatattttattttattagataaatgacaaatcttttaggaaaattctagtacctaaaataattttttagtcaaattttttttcatggtcatgtacgttatagttatttaacacatcttgaaaaattttaagaaatttggaa

SEQ ID NO: 41577 - DNA, 973 bp, Cannabis sativa
gtcattatcgatttgacaaagcttttatcactcccaaggcttccacaaatccaccttgatcttacttgactgaagttcaaggagatcatgatcctcaagcatgctcatctttaacaaagcctgattttatagaagatttcatgtggtatgccaacacaggtactacaaatcacattgcttgtggtatgaaaactcttgataatgttgttctttacactagctctgaatcccttgatgtacataatggtaagaagttagttatctctcatattggtcatgctattcttccctctcttccaattctactttacaattaaattctgtctcaaaagtccctactatcacaatgaatttggttagtgtatctaagctaatttatgataataatgtgtttcttgagtttcacaagtcttgttatattgtcaaggaaaaacaatcagggagggtcctgctaaaagggaaatgtaaaaatagcctttatatgcttggagatgattctcagtccacttctttcactggtttgtaatgtcatcttgccacttattatgagtctctctcaaattcccttcaatcatttggttccttgacatcctcttgtaaccaatcctataatatttcaagtagtaaatgttcaatgacaagtgtttgtaataaaactcagattaataaaagtttactttttgaaatttcttgtgatccttaattttttctgcatctattactaatgatgttaatgtatggcattgtaaacttggtcacccttcacttaaattttaagtaaactaatgcccgaaattcctaactaagtatcaatcaaagacttacaattttttaaagtgtgtcaaaaaggaaaaaaatcataaaacttccctttgttaggaatactgtaaactctgaatatagccctaattaattcaagagaatcaaacaatagaatatagattaaggaatagcggaagcgtaccggagtcca

SEQ ID NO: 41578 - DNA, 1090 bp, Cannabis sativa
aattagttcagagtcttcagagtcttatttgtgtcttatttgtaaaattttagaaatattttagaaattatttagaaattacagggtccattttatcatttaacaaaatacagagtccaattaataacttttacaaaaatagtatttactctagaagcattattataattattattattatttggatgagaagaatatatttttttaagagaaattccaatcaaattatattctaatttttatacatttaccttcttatttatttattattattatttgagatgttgtaaaactctcattttttactctacagatgtatatttttaatagtctaaattatattaattattaaaatattataaaaatttctgttggtggtttgtgagatgttggtggaggtcaatttgatgatgggtgggtgtgagatgttgatgagttaaagattttgggttaaatttcctgctttggggatggcaagtggccataatgatgatgtgggaaaggtttaggatcgactgttattatctgatactatattggaacgtataaattgattaatgatggcataacattttcattgatatcatcgggaggagatatataaatatattggagaagagaatcaatttcctattaatctaaaacagaataactacactactaaagaatgggattaaatatattatttgaattctctattattcttaatattgtgccacatacatccagcagataaggctgactcttggttgtgggatgaggagcctattgatttgggggtcaagaaacaagaatgcataactagaagtaagctgcccaccttctctgtgtgatgattcaatagaatacaatacactatgcattttgggggatggggctgctgttgttcctatctttaattagggaaaatggttcaatcatcatgtcctcacattaaaaatcgattacccaaacctgtcccattcattccggaactgcaacctctagacttcgctgctcaagaacatcattttcaatctatgaaaagtattgttttagcttagcctttaggatgatcgaaattagagtctccatcgttagaataaaataa

SEQ ID NO: 41579 - DNA, 1170 bp, Cannabis sativa
ttactttacctgagaaccgacgattgtaagtaagcagaaggcgctattcgacatctgagtctcaagctatcagcatcaaaaacaccaaccgcaccatcacagaaggaaacgtacaccagcaatccgtcacacgagtatattgcactcgagatgggagccgcaagtgcttcttttggataccactacagaaagaattttatcaatttattgtcggtaacttgcaattttttaactagaaaaaaggatcaagtgagcggaacttactgaacgtatacattcgagcttgctatcataaatgccgatctgagtttcatgggtaaccaacagatgggtttgatcattatgaaactgaactttagtttctccagatgacgggggttgacgaccaacttgcgcttgtatggatcttactttcttcttttcccatccatcaatgctccacatacacaactgtaggtcaatcaaattaaaataaattcaactcttctaagaaaaagaacattttacagcaaatctttctggtcaaagccactatagtgaaattaccaagaatccatgaactcattaacaatgaagaaaatcgtaacaacaattcaaattcatttcaagaagaaagaaaatgtggaactggaatgaaataatgttagactcgttgccatgttatttgcttattttaatatccagaaattcaccaacttgggcccgaatttgaaaatgaggcttcccgctaaccctacttacatgtagagcacagaaactacaacaattccaatataagtatccgaaatgaacttatatttacaatcactcgatataattattaggatttattcaatttcgcgaaactaatttttttccagatggaaattattagaattagttttctgattgtattttgtttcatatttgtgttcaattgcctatctacgtcatagccaagtttatttaagaatgaattatctcaattattctctccctctattgattctcttcaatctctctaaattcctaatccctgtctctgtttttctttattctttcatgtagtgaggaaggacaccaaggggctctaccgataaatatcatcgtaaatttatataaattcagtgagccactaacctgagcatcagctcctgaagaaaccaacacattaagggtttgagaaaatgc

SEQ ID NO: 41580 - DNA, 1095 bp, Cannabis sativa
tattaatcaaactattgatcacacaattttaacatattatattaattatgttagaataatatcgatttggtacacttcatatttggaaaatatgatcacttgaattggcaatgtggaactctaccaaggcaaaaaaataaaaaattataagactaattaatatttgttaattaagtttttctgatatgtaggaacctcacaaattgacacgtagaacataaaatataatatatgtttatgcttaaaagtccatttttgacttctaaaatgaccaaattcataggcttattattatgacattttattttagtggcctcattactaagaatgtagatatcatcattaataatcctttttttctagatataatgataattaaacatactaataattataatgtcaacattctttgaaccaaaccaactaaaaagtctcacccatcttctctaataattattagatattgatcatattcatatttattattacataaaagtttttagatgattatatgtaaaaatgatcaaatggatcatcaaaaattaattttcatgccaccaaccttaactttagaatggaattagtttttagatgattatttttagtatttttttaacacttgacaaatttttattgaaaaagatcaactgggtacatcataaataaaagatggaaaattttccatctaaatcagctcaccattcactttaagtgtgtgtagttaattcatgcataatcatatcgactaaataatttgcatgaataagagatgaccgagagatctagtatctttttcatatatatatatatatctacgcttattttcaaaaaaaaaaaaaaaagagatgcctaagaaaaattggacaataaactaaaaaaatcatctaaaaagaagcctaaatcaatgcaaaaagaatatctcttgaaaaatgcagagatcaaagctaaacaattagactcaaaaaataaagagaaaatccaattccaacagccaaatcaatgacacccttagctttttttcatcattattttctacattcatcttagtctccttctttcatacccaacaaaatcaaaataaattaagagtttttt

SEQ ID NO: 41581 - DNA, 1464 bp, Cannabis sativa
tttttttttttttttgtttcagtatataaaaattaaaataagacaatttttggtcactactattgtttattgggacacatggctttaacaaaataataattcattaaacaaaaagagaattaaatgttaatcagtttacaatgacattacattctttcagcccttcttcccttcgagtcatcaccatttgactgccaagaaaacaatttcaaagtgatgtaagtaaagattatacagcttcaaattttaaacacttaattactggtaatatatagaaaagaaaaagattacctatgcattgagaaaaatcctctctgagacagcactaacacatttccaaatgatattcagtacagttattgaatgttagaaaactttatattgcagcataaacaaaataaaactatatgtattaaacatgatttgattttttcatggaactgaaataaaatagatttgattgtaaaatgtgtattttctgactctgaatagatccaattatagcaacgtcttgcgaccagtcccatgcacacattctatgttgctgcaatccagttgcaatttctctataaatagatgtagaaattaatatcaacattgactaagccagattaattcacaaatactaagatgaaaaaattgaatagagttcttaactgcaaatttgtaccagagttcaaattcaggtcattgagttctgggcagtttagatacaaaacttgaaattggattctgaaacataagatccaaaagcacaaagaaacagaagactcaatttattgtaagaatataaaagattacatttataatatttgtggtacaattacatgagtgtaatcggtggtgcgaacctataaaggagacgttgaggaacagaggggtagagagaggagcaaggaaacgatgaggagattatatatggtggtgtagcagtagcagaagagacgatatgaagagatgatggttagctgggaagagaatacggtacaatgcaataaacatttaagaccattaaaatcaattgatgggttttaaaaaatagaatcaaatctaaataaatcaaaaaaattagaaaaaaagagataagaaaataatgataattaagctgccacatcaactctcctaaaactctcctttattttctattgtaactgtagaggagttacatattctcttataactgaactatttagaattattattattatatgtaataaaataataagaaaaagttagattaaaccacaaattagaaaaatttaaatactaaaagattagactgccacatcattgtgcttaacaacacaattatataaagttatctaaaaaagttaccccatcaatttctaattataataatgattatattacagtcttttcttttgacatggtgtgttaatcgttttttctggaattagtttgtattattggtttgtgtttactccagtattatggcgtccggaa

SEQ ID NO: 41582 - DNA, 1948 bp, Cannabis sativa
  modified_base (492)..(495): a, c, t, g, unknown or other
  modified_base (997)..(1000): a, c, t, g, unknown or other
  modified_base (1055)..(1071): a, c, t, g, unknown or other
  modified_base (1180)..(1189): a, c, t, g, unknown or other
  modified_base (1251)..(1251): a, c, t, g, unknown or other
  modified_base (1434)..(1434): a, c, t, g, unknown or other
tactacagctggctaggaaggcacaaacatcctagttaatttgaacaatcggccactggctccaagggaggaccctccactaacgccttccacgaaaagaaggaccctttgggaaaagcccccaggaacaacaactagatctcgtctccagtacaatgatggagagataggaccaagaattggcaagcctgctatttccaaaccacatgtagacttgggataagatcctaagttagccagacctagagagactgtcagccaagcgcccctaactgaagaaccacacactacagattgtgatgtattcactcattagagacgggaattcttaagatggacggatgaccaagagtacctcctttgatctcaccaagcgaagctagattgtgttgggaatattatactaggatctagatttactaacaagtatattgaatttacatcctaaatgttaatatctctaaaataattaaattaaacacataagagttnnnnaaaccttacattgattgtagcaaaataaaatgactccttttgctcagatctctaacccttgttcctttctgtcgcatagtattatcaagatctgagcatggatctctttctctccttcgggttggttaccactgtctttcgcactatgatcgagtacttcactttctatgtgtgggaatgaaactctatcactatggaccgaataggttgaagaacaatgaaggagggtttgaattagtatagaaggtgtctctcttctactagttgtctgacagagaaaattaggtttgatttggttgaaggcaatagttggatgagatgagagtatcatgttccttttttagtatttcaattactactttatttataccagttattcttctttcaataaaaccatattttaaatttcaatcctataaatatcaaaactatttattcaaaaattataattaattttcaaataaaattaccatttaaattatttattaattagaccatacannnnctcttaattaataaatagaccctacaatctgttttcttcacaattaagcccttgnnnnnnnnnnnnnnnnnaataagacatagtttaattttagaattataattgattagttaaaatcaattaactgagtttgcaagtagtattatatatcctagtgagtggaccatgggcctatataannnnnnnnnnaataagtagatctaaaatttaccatgtaaattccctaacttattaattcctccttgcgccantatagattcgaaattgaagtgcactctcaattatatagaacactctatatgtaataagataaagatacattatgattatccattgttacaatcctgatagtcaaagatcctcaataccttgatatccagatcatgtgtagtatgtagtattctctttgtggatctgacaagttgtattcaatncaaactttctccaccattacatatccttaattacaaaatccttgatattgtgaaattcctctttacatgtctactcctcttgggacactgaattctttactttttggcaactacatctgtgtagttagaaagtaacactagtagttaataaattatttgtacaacgctaaaactgtatagaactttccaaagactgaataagtatctttcctacaactttaacattcagactcactggtagagttagagacttcatataggttcttacacttctccaaaatcattgctccacccccaggttccagtagcatttcggtgagtgtgtaaacttgaaaaatcatattttccccctaataaaccagtcaaccagtttgtaaaccggtcaaccagttctggccaacccgttcaccgtttcgggcagcctcgggaacttagaaatcatatttttaccataacttttcacatgggtgtcccttttagacgttctacttaccgttttgaagcttgcaacgag

SEQ ID NO: 41583 - DNA, 3267 bp, Cannabis sativa
  modified_base (585)..(594): a, c, t, g, unknown or other
tgtatgtattaattttttttatttagttagaaatgcaataataataattaaataataataaaaatgataattaataataaagaatgagattgacaacaccttttcaaaaattgccaatccatttttgttaatcacaaattagtgtgagatcacatatttcattgtcattttttttaacaaaagtggagaagtaaacaaaataataaaaccttctttcataaaaccttttatcctcaaatcttttaatctcataagaaaacccactactattggtcaaagataggaatgagaaatgagtattaatatgtataatacaagttactagtgagaatttaagtgtgagacggctaatttgtctttatgtctttaaatttgttactttgctaagagaaagaaaaccatcacaaccgacatatatgtccccaaaatgtcaaatatttgtttccttgctgtaggggcaacttccagtattatattataggttggatttagtaaaatattttgtttctaaatttttttatcataaaaaaaagtaaatttttatttttgaaataaaaatttattttataactatttttatttttnnnnnnnnnnaataaaaaataaaaaataatttttatttttatttgttgattttatataagtcggtccaggatcgaggctagggtccgggtttaggggccgagtttggttccaggttcagagctggggccaaaattcgggtccaagtcctagtccaagtatggggtttggggctgtggccatggtctggggccatgctgggtctgggttcagatctggatcggggttcgggtccgaaagttcaggttagggtcagaatccaaaatattgattaagaaaaaaaattgatttgaaatttttttgagagtgacttttttttttcaaaatttttattctcaattaaaaaattaaaagttaaaataattttataaaatataattttgaaaaatattttcttttatagttcaaaataaaaaaaaaatgttaccgagtgcacttatacttttttttttgaataaataatgaaaacatgacactacaaaaaatcttacttttagttacaacaaaatttataactaaaagtaaaaaaatttgtgagtaactataaattatcatttatatgttgtgacaaaaaggtccgtgcctaaaagtattagtcacaaaaattacattttattgtgactaaatgtatttttagtaacaatactacttgttgtgactaaaattaaattagcgataacttgtatctaaatactatgttttagtcccaagtaattttttattgtgactaaaagtaatattttgtcacaaaaaaattatgttgtatataactaaaaaattatcactaaaaatagctatttttttgtagtaaaataagaataaaaaaagttagagacataaactgtatctattatatacaaaatgtggttatgtaacgaaatttttgattttttatgttagctttagcgaaatatatatactataacttataaaatattctttattaaatttataatattattatatatctaaaaataaaaattatgtagatattttatataaaaaaatttttattttaaatttaaaatacttgaaatattgtagatatttttaactttgttggtttaactttaaattaaaataagagacaattctacttaatcgggcacataacgattcactataatagatttattgtacataaaaatacatactatatataattacatttaaagagtacactaatattgtaaccgcaatatatagttaaaaaaaatcttcaaaaattaaaatttcaaacctcatttcaaaaaaaaaaaaaatattatttaattaaaaaaatattacacttaatataaacctaatgtattgcagccaagattaatgtatgctaacttgtggtataattaaatcctctgacgttaaagataagattttgagctcatcactcaccattacgaatttatattttctaaaaagagctatacatcataataaattgtctcaacatatttattttatttttttcgaacaaaacatatttattaactaaacacaattacttctttcacttctttcagcaaaaaataaataaataaataaaaataatacacgaatacttcaattccccaataatttattttctttctcaattataatggtggatgttggatttatatattatgcacagaccaaatatttactgtaagttaaattaataataaaggaaagaaaataagttagggtccaattaatttctgcccaacaatttttttattgtgtaatattactatccaagctgtatagctagctacaatctgaaaattcaccaaactctagtgtttggtggctagtaagtaagtgacagtggtccaagaattaaaagtagggctttggttggtggtgaacaactaagagtgagttactcgtgacttttgatagagaagaaaataaattgaaattcgaagttagaaccaaagccaatataatgttatatatacatatatatatatacatatatttatgttgcttggttggctgtaagcctgtaagtaagtactcttgtgagtaacatggcaccaaatgcgccggttaacagggatgtgtgagctggattttctttgtaactttgtgtggatttgcaccaagaaattaaaaaaaagtgtcaacgtgacagccacgtgcactattcttctacttcatttttccaagctttgcctctgctcttttcacattttcttccatttattctttattattatcattttcaaaagagctcttctttatatattaagacttttggaacatgatgaaagatgtatttaactttcttgttatatattatatttttcattttcctatctatcgatgaatcttttgaccctttcggggctcaaaaatatacatctgtttttattttaaatgaaaatctttcacttttatactaattaaaaactatattacatatattgtgtatattagtacagctagctgtgaggggccaatatacaatattattaggctattatagtaggtgtacgtacacgtaatatcatttatagaggttagaaataatataagttatgttgaaattaaatgcatgtcagcatagacatcaactatggattcgaggctatcccttgattggtttttagtttttacatatatagtttcatgaatgaaaataattcaactgtaaaatagaagcatacgtacggatgactaggaatatatatgagcatgcat

SEQ ID NO: 41584 - DNA, 8935 bp, Cannabis sativa
  modified_base (6558)..(6562): a, c, t, g, unknown or other
  modified_base (8612)..(8637): a, c, t, g, unknown or other
tatgtttattatttatttatttttattatacatcatttgaagaagatatttatagagggctggatctgttgaataaaattagtatgtttccagactttcagtggtattattcctaattgggtgcgaagaaccaaactttcaaagatgctaagcaaaatgctggtgaatcatcttgggcttacattgactaaagaagatctgcaaaatgtggttgatctaatggaaccatatggtcagataagcaatggaatagaatttctcagcccccctattgatgtaagatactattattttcctcaggatcatagtatatgctccttgttctagattaattctttttttttttttttaaattattatggtttcataatgacagtggacgagagaagccaaatttccgcatgctgtttgggctgctgggcgcagcctaattactgttctacttccaaactttgatgttgtagataatctatggcttgagccattgtcttgggaggtttgtcatttttgcaacttcatatgattaaatcatttaagtatatttattgtgtgtgctatagaaatttaacttttatatctaaaagatcttctctatttgctattggtgatacgagctgtatgcttgtagtgcatttccgtaccttgaggtgattaatcgttaaattaggctccttaagattagattctgttgctaggggtgtagtgtatctccgtgcctttgttgtattattatttggttatcttattcaacattatgttcaatagctgattttctctatatatacttagaaaaaacgtgaagagttagcatgtaaattacgcctagaggaacgctaatactctaacctgcagggaattgggtgtacaaagatcactaaagcaagaaatgaaggctccaccaatgggaattctgagtcacggtcatacctagaaaagaaacttgtattttgttttggttcccatattgcatctcaaatgctgcttccttttggagaggagaactttctgtcttcctcagaacttcaacaagcacaggaggttgacaacatctatgctttatgttaattttttgtaacacaagaaacctggatggctcttataaaatgctacaactttatttcgtccttactccttttggccatttgaaacagatagctacgagaatggttattcaatatggatggggacctgatgatagccctgcaatatactatcatactaatgcggtattctcctttctttatcccctagagtttcattcggttatgaataggaacaggtagggtagagagagagagagagaggaaatatggtgataataataataaaaaaagtgaagcatgtggtgtcctgtattcatcaacttacatttcaagtcctcaccttcctgggcctcaaactgtgttgtagaattcttaaaacattccttattcaagttaagaaggcatgtattcttgggagtgaaaataagctaggaagcattcatatgaaaagggaagcttctgtacagcaaaagaagaatatataatcactcatttaaataaccatcttttctggtttgattgctatggcagtctaaactggcaaagtggaaacttttttcttccaataaccatgaatcttaggttgggagattgatgattttgctgcttaattgacagattgtattttgtgtttggcgcaggaaacagcactaagtatgggaaacaaccatgagtacgaaatggcaacaaaaattgaaaaggtactaacctgtagccaccttgcatgttacttttctttcccacactaacattaatagatactgttataagttctgtcctggctctaataatatgttcctgtcggggttttgtatacatatttttcagatgtattattcagcattttacaaggcaaaagaaatgcttcagaaaaaccgtcaggttcttgagaagattgttgaagagttaatggaatttgaaatcttgactgggaaggtacatataagtcatctagtactgtttgatttattataatttgcttcatctttcaacaataatttgttccattccttttttttaaatcatcacattctgtgcaatgacccgtgaaacactggaattggaaattccaaaagagaaaacctttatgtttaagagatatgtttgtatccacaggatttgcaaacaatacttgaagataacggtgggattagagagaaagaaccatttttcctttctaaagttcaggaagtagaggtaatttataatcgaatgaattaaactttatacacttccttgtaagattcataacatttttgtccatttctttttccagccatcatctagcaactttcttgatgaaggaactaagttggctacagcgcttctaagtgaagcatcttaagtctagagaagcaaagcggcctttgaaataagctccacatctttgattgaaaatagttgtgttttctgaagagtcaaagagacaatgtaaatcggctttcgttgagaagaggcgaaaattttccttctcaagcatttacgtaagagcttccattatcttttctgaatttttatttttgtaattaaaattatttatagtaaaataaaaatcattggtagaagaggtgtttatgatattcttcatcaattagagatcatcaaaatctgaaataaccaaagccaaatccaaacttaggattttggatattctgtattaacactttcattgccccacatacaaaaatatattgctagagtagagtctggtcttaaatctataactgacttattacgatcaagaactgtagatgtaaaagatttacatagaaaaaagagagaaaaaaaaaagaatatagactaaaatatcaaagcttcagcttggagaaatgatgaccccacaggagggctactagtgttactactagtagtgttactggtaggtgatggggcagtaaagatagtcttatcttttgatgtcacatcttgacatatgctttttctccttggcttagcctcaccaagcatggttattatatccctcattgatggtctatctttgggaagttttgctgtgcaaagaagagcaattctgagtacaagtagcatctcttcttggatatgcttgcattgtccagaaatgtaagggtccaaagcttcttctatggttcttttgtttcgtatcttactcctaacccattccactatatcgactgactccccaaaggaagggtctaacggtgtctttccacttagaagctctaatagaacaactccatagctatatatatcaatcttctcatcaactttcattgtgtaaccatattctgccacataacaaaagaaaaagtaaagaatgaactattagattttatttatgaattactttttctttcatacctaaactattacaaaatcttcaaagaattatgttacacctggcatcatttttttactacatagttttaaagagtaatatatgtgcatgattttaaagagtatatcatattttgtgcacgttattactactcaatttcaaatagtgaaattgttataaatgatataatttacgaaatattaattttaatttgtattttcgaaaaccactttatagtgtaagtaattatattaatctgctactaagttagttaaaatgacgtgtgataacactagtattttgtactattaatttatattatggcaagcattagaaaagaaaaaaaaaggaaattaactagaaaggaataacggtaaataacgaacctggagcaatgtatccataagaaccagcgaccatggaaacggtctcattcttatgagtcatcatcctggccaacccgaaatctgcaactctggcctccaaatttgcatcaagcagtatattattggacttgatatcacggtggatcaccgaagggtggcaatcatggtggagataatgcaagccttgggccaccccaacagctatattgtagcgcgatacccagtccaccaacaatttcccagcttggtttccatggagggccgtggcaaggttcccattcggcatgaactcgtagatcatcatcacctctgtctgattgtggagataacccagtagccgtacgatgtttctgtgtcgaagcctgcccagaagatttacttcgcccagtaggtcatcgccgctttccatgtccgaactcgacctccatagcttctttacagccacagctgaattgggtctgtggctttcggccttgtaaaccaccccagtacctcccattcctattatgtttgactcctttatgcttgataagatgtcgcaactactgaagttcactctttggaaagctacaagtctccatggccattcatcgtttcccttgtagaaaaagtctcccaagaaactgttatagagataccattttctgtacacgtatctccctgtaaagaaggtcaggaagagagaacaaatcactgatattccgacaatgaatccaatgacgacgtggttgatgtgaacagttttcgcttgccccttttttgttgcagaacttcttgggcaaggtggaagtatggcaccacaaagcccttggttgcctataaggtcgttggggttgatggtcattagtatgccattggtgggtactgagcctgcgaggttgttgtaagacaagttgagcatttccaaggctggtgagcttccaaagtcctctggtattccaccggaaagagaatttctggagaggtcaagaatggataatgtgggcattgtggctattggtttcgggatttctccagtgaaagagttgttatgtaggttcaaattgacgagcttctcacaagaagctaaactctctggaatttttccggagaaacggttgtttgaaagatcaaggactgagagagaagggcaatcttgaaactggtctgggattttgccttccaggttgttgttggaggccataaaagtttggagatttgggagggagagaatactagaaggaagatatgatacaaggtggttccaagagacatcgatgaaagaaagcgatgtagacatagcaatatctgaaggaatatggccagtgagattgtttttggccaattctagccgctcgagaattggtaggcttccaaagccagccgggatagtccctgaaatgagattatgttgtattcgaacccgaaccaaggacaaacaagttgaaagacctaacgggattaaactcgaaaatgaattgttgaagaggatgagtttagtgagattaccggagtcacacaaacctggtggaatctcacctgataatgaatttgatgacacgtctaaccattttaaaggtgagttctttccaaggttcataggcaaaggacctgttaaattattcttccacagctcaagaatctctaacttagttaactcctccagcttgtgaggaaccaaaccagataaataattgcacatcaagttcaacagccgcaaattcttcaactctgcaagctctcctggtatctcgcctgaaatctgattatcggaaaggtccaaaaacacaagcgatgctatgttgccaatctctggtgggatccttccttgaaacttatttctgtataaaaaaactgtggtaagtttctgcagcttacccatctcaggtggtatttgaccactgagattgcccactgccaagtcaagatactgaagatttgtaaggtttccaagctcagctgggatttcaccttgaaaatcattgtatccaagaataatggtctctaatgatgagagttccccaagctctcgtgggattgttccagtcagattattacctgaaaggcctagaaacttcaacttctgcagattcctgtatgagattggaatagaaccttcaaagaaacttcctctaaaatcaaggatttcgagagctgttgcattgccgagatcctctggaagaaggccggagaagttattgctcgacgcattaacataagtcaatccggcagacgttccaagacctgttggaaacttgccaacaaaagagttttgactcacatcaatggtcttcaatgaggtgagattgtacagagatttcggcaaatgagaagcaaactcattgcaggaaatgttaagagaatacaggctgttcaagctttgaatgtgatccgataaatggccactgaggctcatgttggacagatcaagcttttccacaaagcctttggagctgcaccaaactccagtccagttgcaatgaagtgaactgttcttgctcaccggcttcttccagtcgttaaggcaatccattggatcaaccaaaactgattttatggacaacaagactgacaattcttcattaggcagagtctgagcctccagaacaaagacaagagagagaccaatgaaacaatagaagaacaacagggactttggcattgtgttgttcttctggctctgctcttttcagatgtgtagtagcatgtctgggctatcttctgtggtagtggcaagagggtgtctttgtatgatgactaataaaaagaggaagagagtgagataacagttttatgtattttggctggggaataaataataataataataatnnnnntaataataataacaataataaatggggataaacttattgtacttttgtagatacgtgtgttcttgggatctgaaccagctaattatctgcacttaatcactgtgaagctttggacttattgaaaatctcccagacagcaaaacatggagagaatgtgttttcagtgactgatttattattcttatgttttacctgtataatttatcaatggtcaacccatatgggtattgggtattaaccaaatggatgctttttacataattatgcggaaagggtaatttgtactgtacgtctctctcacacacacaacttatttccattttaaatagcacagaacaaagttcttgggtacactgaaaaaggaattagacttatttggttatgacacattataggagggttgccttttaacatttctccttaattaattcatttcttccataaaaactcttttcaagaaattagtaactcaatggaggctttttgtgtataaaactggctgtgaaacaaccatcaagacatttttttgggtaaagaattttggtttaagttgtttattgggttgatttatactgatctaaataattaaattgcaaaacaagaatctctccatgttagaagaggataataaaaagattagaaacaagagacaacttggaactttcacaagagaaaggagagataggtaatgcaacaatcattgtctcggccaaaaataactcccattccatctcccataaaaaacaattgcaccccatttctaagccttcattttcacatgcacacacctgtctttatgcaattatttataaacttacaaattatttaatgtagatacattatattagatgccctactaaagggtaataattcaaagcaataaaagaggaagaaaagggctggaggccatgtgagaggactcaaaatttcccattattgtaacactatcacattgacataagaagatctgacttaaaaaaaggggaaaaaaaaagtttccattggattattttggatttggatggtccttaatactatacatatgtatctttcccatacttttgtgcccttttgagagaatccatttaggatgttagatataggattaggtgcccccacatggctttatactaaagccacctccacccttccataattttttgttcatcatttgagattttggaatcgaaatgtgggcagtctatgaagttcattattttagtgatgaagaaggtagtaaggttcacattagtttgatttaccatttgaaaattttaatgacaactgactaaaataattagcaacaactgcttcatttagtacaaatctaggtcataatgacattctagtctccaattttattaagtgtatacatatacatatttaatttattttaagagaagattttgtgaatacacattataaaaattgtgagtactaacatctgatgtttctttacttccaactttttttatttatttatttttaatgaaattttgcgtaagatcatcaaagcctagttcttgaggtgggtcagtgttgtttttcttcatacttgaagattaagtttccttatgtataacaattatctatatcacatgaccaattattagtgatataataatattgtactcagatcagataaaaaaatatatattgttgtgaaaacttatccccaaaaatatttcattcctttcatgtgtcaggctttcattttttagcttttacaagatccatgagccctttttacacttggtgacttgaggatactacaacttagaaaggtaatgattggaagactaataataattagtataatgaagtgatatttgatttatttctgtcaaatttttattttgtttgattgagcttgagaatataatgatacaagtgttgtaagatatagagcccatagatacctaatatcctcaataacaaggctaagcatagagtttaaagggtcctttagtaggctgtataagtcttattatattaaataagatagtatttgttgaaaaaaaaaattaataatgataataataataataannnnnnnnnnnnnnnnnnnnnnnnnnataataataataaataaaaaaataggaatatgtcagtaaaaaaggagagcaaattaagaagatattttttccacctccaccacttttacgttaagttgggttttatataaaaaaaaaaataatattaaaaaaaagggctataaagagatagagggttgaacagttaatttttttttgaaaaatctttggcaagaaattaatcgtaagagtaaaacagagggaaaaaagaatcaaaaaaaaaaaaaaaactgcacattcaaagtctaccttcaaactttataagggtaagggaaaattc

SEQ ID NO: 41585 - DNA, 790 bp, Cannabis sativa
gactgaaaaattcttctggatgccgaaacaagtcaagagtgtatcagtatatcccttttaaggggtacattgtagaatcacccaataattttttatatatatatatatatatatgatatcgatgtatataattaagtgtgtgagaatggttgaatggagctttcggccatcactatccatgttggaattaaaggcttgtatctaataaccactactaacttaaatattagaggactgctaattataatttattattacaatttttatgtctaaaatcatatatatcttagaatatatttttttaattttttttcataataataatattcgttatagttacaatattatttctgtgaatttttgaaaaattccgaataatttacagtattaaaaatcgaattttctagatattccagtctaaatctacgtatgcatgcatgttcaattcaagcttatttttagtactgtaaattatttgaaattttttaaattaaaatttataaaaatattattgtaactataacgaataccgcgcgcaataaatttttttaaaaaaagaaatattccgcatgtatttttacacatgagtattgactaaaaattgtaataagaaattgaccatatcattattaaaatttatcttatatataataattaattatgtgtgcgaccaggagaaagatgttgggatttggaagtgatctccgatattttcaatgatcgggataaggagttaattttgaagaccaacattgttcaggagtctacaattgatacgtggtattggtct

SEQ ID NO: 41586 - DNA, 594 bp, Cannabis sativa
ttgaagaaaattgaaaacaaagaagatttcaggtaccatgatagatgtaaaagcttggaacttaatcatctttgttttgccgatgatgtcctcatgttttttcatggtgactttaagtcaatctatgttatgcttcgaggactgaagttattttcggagtcgttgcggcatggagaagaacaaagagtattgaatgcctcaggttattcgagatggccagtctcccattcacatacttaggtattccgatttgctcaaaaagattgtcaaagctagattgtgagatcctgattgataagatggtcaagagaattcgtctatggagttctcagaatctttcttttgctggtatgaccacattgattaactcagtcttggttgcgatgcatacgtattcggcccaaatcatgaatctaccaaagagaattctacaaaaaaaaatgctttatgaaggagttttttgtggaaaggaatagaagagtctaatgatatagggaaagttgcttggagtaagctttgcactccaaagttgatgggtggattatcattacattattacttggaatattgttacaattgggaaatttgtgtggg

SEQ ID NO: 41587 - DNA, 943 bp, Cannabis sativa
ctttaatcccagtaaagatagttggtcgactgatgggaatactaatagcagtacttgccctttttagtcttttcttagcaagcaagattttagtattcaaaacatgaagtcttggtgtaaggataaaaattattttaaaaatcgaatcaagaacttgcaatctgtcattgataaaatttactctaactgttccctcactcggaatgaagttagacatgccaataatcttcaatcctctcttgatgctctattgcttaaggaggaagtcaataggaaacaaaggtctagggtcaactggcttaaagctggtgacaagaatactaattattttcacaataaaacttagaagaggaaataatattattaaggcgatcactctagatgataattctattattaataatcatattgatattattaatagttttgtacaattctacaatgatctcattacttctagtggcaaagcacatccctcacatccaagggatgtgctgcgattttttatttttttttatttttttatttttaattttgataataaaaaattgttgttaatgtaatttaaaataaataatattcattatatctacaattattaaataaattaaattttattttaaaataaattaattaactaaaatctctaacaaatagtgctacgtatataattttattgaatttcaaattgtaataatttattttaatttaataataccataaattttggattgaaattaaattatatgaaagtaataatatttaattaatttgaatatttatatatgtataacaatatctaaaatgtgaatgccctaaaataattttcaaataccagacatttgtagtgttcggataatattgatataacgattgtaattgtgctaattgtaataaacgaatataagtaattaaagtagtaatttattgaattgttttcatt

SEQ ID NO: 41588 - DNA, 741 bp, Cannabis sativa
aaatctctaaattgctgtaattctgatttcagtaataaaaatacatgtttgtctcctgttttgccttctgtttttactacttacaaacacaatgatgttaacaattggcaccaaaaactaggacatccatctaaagctattcttagcaaattgttatccaaagtctctcacaatggcaccattcaaaacttacatttttgcaatgcgtgtcaattagggaaaagtcacactttgccctttcctatgtctaatggtcgtgccaatcaaccccttgctttgatccatacggatctatggggaccatctcacatagcatcaaaagaagggttcaaatattacattatttttgtggatgatttcagtagattctcatggatatatcctctaaaagttaaatctcaagcctttgatatgttcattagatttaaaagcatggtggaaaaacaatttgagttgcctattaaagctgtgcaagctgatggaggtggtgagtataaaccttttgccaagtttttgacagatcaaggaatcttgtttagccatccttgccctcatactcatgagcaaaatggacgagttgaaagaaagcatagacatgtgactgaaacaggtcttactttacttgctcatgcgggacttgatctcacatattggtggcatgctttctcttgtgccacttttaccataaacaggttgccaacaactgttcttggccacattagtccttttcaatgtctattt

SEQ ID NO: 41589 - DNA, 995 bp, Cannabis sativa
attgtttataatgtgattgcaagtaaataaatgatgtaatggatataaattcatttaaattaaatatggtacttaattaccgtaggcatttccaatcttggtagtggttctgaaacttatagtaacagcaacacaagcgagcataaggagatagttggcctcaggaacaaaaacttgaccaacgtacttagtggaagtatgaacgatcttaacacgtgggaaacaacccaaggaaagtgattgttggattatggagaaagtccctgaaatcatggcttgactggctatgatggctgcacatacggccaccacaaacattggccaatacagtggcttcggaatagatttatagaaagtatcactcacaacatcattgtgcttacgaagaaacgaggcttgtccagcgtaggccattattagagccgggtacgttattgagcacatgcttatttgaatggactttaccgtgaagtgccccacgtccgcgaacaacgcctccgttcctattacatacacaatttttattttcttaattagaaaactcaaaaatagttattctaacaccgaacgatacagaaattgtaactattgttgttataagatttagatcgaattattattaatttttattttgataaaaaatataggtatttttacaaaaataaaagtttacaattttactaccacacgaaattttttacaaaaatattatctttttataaaacaaccgtaaaataacaaaatagaacaactaaaacaacatttgagcaacttaacagagtataaaaaaatactcagtattttgtaaaaaaaatatagtatttttgaaaaaaaattgtgccccatagtaaaaaagaaaaaaaattagaaataaatcccaaaaatatacccaaggtactattttatactatttgaaaaaaaaaaaaaaaaaagtctaattttcatttaacaaaacatagaatcaataataacttttacaaaatacaaagtctaaa

SEQ ID NO: 41590 - DNA, 2290 bp, Cannabis sativa
aaaaaaaaaaaaaacatactaaatattttgttattataaaataaatatttattatctattttattatgacttattataaattaaacaaaatgataaagtataaaagtaaaaattataaagagtaatatatataaacttcgtaactttatttaaataatctttgaaatttttactattattaaaaattatgttaaaaatatgttttaatgaaaaaattaaataatatgaaactgaaattgtaacaccataaaatctgaaattttttaaatatttttttattataatataaatgtttatgatctatttagtatgatttattataaatttttgtttattttataatttatttattataaaaataagttgtttttctttttaaataaataaatatgttttaaaataaaattaaataaataataaacagtataattatactagaacatattattttttattatagtataaatatttattatccactttagtataatttattataaatatatgtttattgtaataaatatttaattgaaataataaataataatgtattaataatttatatgtacttaattaatgcaacgtaatcagtattattaatcaattacggcttaataatgtaatgtttaagtagaattattaaggaccttttcaagtgtgaacactcattttgttgaattctctaaacttgctaaggattataatgatgatgatagagtcatgtgttctatatttgtcataagggaatggtgacctatgcttcctaatctataatccacacgcctccattctcctcacgaaaacctcaaaaatccacacatggttttgcctttgtatagatgtaactttcctaaacacattttttagaatatactttttttctgtgttgttagtatgtgttaggtacgggtgttgtatctgctctagactagttagtcttagagggtgttgatctaatgtggactcatttcatgataacccaaaagaatggtaaattaaacataaaaataaaaatgaacttaaggcatttcaacaataataataggccagcggctttgatgggtattgaataggtatttttcatgcgaaagtgattagtgttagctcagtcaactacaaactgcaaagctaattagtgagttcgtagtcaactgaattggcatggagtagatgagtcatgactcatcacataaaggcagagcaaaactgttgtgccatgcattttcatatgcagagacaattttttggttctctctctctactacaaatccataccctataaagaaccttacccttctcgtaaatttcacccactttccactttccactttccaatttctttatttagttttgagattggaaattttcatcagagacaaatgaaatataaaaacatcagtcgagtgctctctttggccagctcaagaaaggatttgacaccatcaacatattctttactctgcctatcttgtagatacatccaatttttatccatcttttgcttcctataacccattactcaatataaaaatagacataacacaaactaaattcacaatgaaatactgtagatcgacaacattcttgaaaaaataaataaaactaaaatgataatgctgtttggtcataaaataagcctacaattaataaacaatttatcttaaaacaacttttctgtttcccgaatcattatgataaaagaatcaactcgtgtatataactaaaagatcaacaagaaaacaagttaattatacaaaaatatccaaacactatcatttttatggaaacacaaatcaaaacccatacgtaacacaatgaaattattaatttttgtatagccacacaaaacaaagttgcaaacaatacaaagaaaaagaaaactcctaaccttgaaaagcgaaaaaaaaaaatcaatttgatcaagcaggtagaatccaatgatgcaaacaccaacacaaaatagaaacccaaataataacaagaatgaaaacagagaaaccttcctaaaatagaatagagaataataaggaaaataaggtgtagcgtaataccttgatggggcttctgaagcaggagaactaagaagtgaaatagtagaatttggcgttgcgaaaagaggtagcagcatgggtgctcaggaatggagcagaagaaaaggagattaaaaataaagtaagagatttgggcaacccatttttagtttcagcctttctcctccgttattcatgaacaaccgacgtggttgaggttctgctacactctcccactttctttctttcttttctttctt

SEQ ID NO: 41591 - DNA, 5212 bp, Cannabis sativa
  modified_base (1505)..(1507): a, c, t, g, unknown or other
tgtaaatactttctttaaacatccgaggacctgaaacaaaagaatcaagcataaaatagccctaaaactagaaacaaagagtgaaaactacccaaaaatacgacctgaaactcatactaaaattaacctaacagaatcgaccgcctattctgtactacaacaaccaccggcagaagttactttttgggcattagcaaattttagttctgttgcatgcgaggtaatttttcaaaagcttagttaaattcacaaccaagacactactgcaaaattgggctttagaggtagtttttaaggccttttagcgttggtttttgcaaaattcactaccgacattgttttaggcgacgctgtaggtgttaaaaaataatagacggcatagggaccctatggagtcgattattcagttattatgaaataaccaactccatagggtccatgtggcgtcggtttatgaaataacgatattgtacggacactatgaagtcggttattatgatataaccgacgccatagggacttcctatgatttttttgtcaactttaaaattttgtgttataacataatttttttattaaaaatctaatttatttttcattatgtatatatattatttttttattaatataattaaattaagtataaattatatataataagaataaataagaattaaatttaaaaattaaataagtacacatttatattactctaactgtttgtatattagttattttttattaatattttatattttataatatgtatttattttttattttagtatcatttttataattttttaagttatattttgtataataattagtatattaaataataaataatacgtaatatgttaatttttatgcaatttaatatttttatatatttaaattttataatatgggtttttatttttctagtatattagtattatttgtataattctttaagttaagttctgtataataattagtattttgaataattaataatatgtaatatttttatttattttcttagttaaaataaattaatagaatttttatattaagtattagaattaatatttaggatgtatttgtcaattcttataaaagtaggttaaagaaagcatacttaattctacggaaatttcaacatcataacgactataacagaacgttcctaaaaatttaaagctattaataacaacaaaatacaactcaaaattatataaaataatcataacaacatttagcaatacaaaaatttactacccatctgaccgcagtacatacattcacagaatctactccactacggatgagtatttaagatatttaaactcatctaacatgcatattattccacccatcgacctgaccgcagtacaatatatcacagatgctactaaattactagttagtaactaattatagtatactatatataatttgtaactaacttctaaattattaactatataataattgacgctcctcacgcatccatgatttannnataacaaaaattaacaaaaaaatcctaataaccaagtttaagagaaacttataccaaataattttatcctaattctactgaaattccaaccacataacagctataattgaacactcttaaaagttttaaagatattaataacaataaaaaataatctaaaataagataaaacaagtgatgatgacttagataatttccaatcatcattgcatttgtcattaatattttaatttgagttttatgagtcaagtgtgttctaagataatagaatttaggtttctagttctagaaacgtaattatctttactttagtttaagttttatgatacatctttggtatgtttaaatgttatgtaatattttattcatctttaggtgttctaaaatgttatttcaatataatttatgaggcttacgtatcaaatacctcgaggcttatgaaattaataattagtaattaattatagtatactaaattactaattagtaactatttttaactttaccgaaatttcggcagtataacgactaaaattgaatgttcaaaaaaaaaatttaaaattagtaataacaacaaaatacaatccaaaataatataaaacaatcataataacatttcacaatacaaaatttaccacccatccgatcacaatatatgtattcgtagaacctacttcaccacaaataaatatttaagatattcaaactcatctaacatgtatattattctacccatccgaccgtcatacaatatatcgtagaacctacttcgctacggatgaatatttaagatattcaaactctactaagcattcataattaattaataataaaagttagtaaatgtatacctcgagctagctagattctaatcaacactaaataagttggatccttacatattaacctcacaacccacaatataaagaaatactacaaaattaaaaatttctttatttaactagttattagttatataatttatgagtaactagttactagctagctaatttattactaactagttactaatgagtaattagctagtaataaaaatatatcaataagaataaaaattagtaacttgttaagtagttataactaactatttactacctactaaaaaaataaaaacacatgaataaaattggaaaaaaaaatgataaaaaatagaattaatttctaaactaatttttagaaattaatttctaaactttattttaatgcactcctatctcattctcattcacaatatttaaaaaaattattagtttaaaatattcaatatatatacaatgcataaaaaccatacaatataattacaatatttgtatacatacatatacaatgcaatacatatatacaattacaagatatgtatacatacaatacatattcaataaaatataaaatacatatatatatacattagtaaagtttagattcttataattaaaaaagaaaaaactctctctgcttaggattccacaattccgattaccatcggggccatggcaggtcatgggcgaccaagacaagggacaactcaggggttaagtgagagaagactgttcaggcaaaactcaagtcgacggcgaagaaaaagaagaaaagaggaccatattcaagcttagatgctcgagttatgaagataatggacgaagtcttaggagttgagccaatcgacttctcagatgaggaatcaaatgcagacctattttaagctccaatgtctcctcgtgagtctttgaaatccatacaacagcaagaggacatcagtagggatttcactttcttcttgaattctaatcgccaatgctctcaggcagttctaaagggtagctctccatttcctcctgtgttaaggtctgatcttgtgaagaaaaacctagctagtgcttttaatttgaatgaacaagggagtaaggtgaaaatacatatggaggacattgaggaggaagtttcctcctggactccatcaattgtgtgttatgtacttggggctaacccacctttatcaattttggatggctttgttagaagaatttggggagacaaggttcataaggtagggatgctagcttatggcattttcttaatccgatttcagtcaattgaattcagggatgaagtcttgtctggtggctacattttctttaatagctatcatcaatgaaggcatggaatccaatgtgaattttaagaaggaggatataagtatagtgccaatttgggtttagttagaagatcttgaactcaagtactggggtgataaatctttgcttaaaatcataggacatgtggggaatttagtgatggtggattcaatcacaaaattaagggaaaacttgcttttcctagggtgctaattgaagtattgctcgtgcaagatttccttgaagaaatctggtttgaaaatgaatttggagtgaatataccagtttctgtcaagtatgaatggaagccaattaagtgtgagcactattttggcttgggacataacacaatagaatgcagaaagaaaactggtaaggaggttgaatgggcagttaaagatagtaaagctataggtttgaacattgagatagggggaaaagccaaccattattgatgtagatggatttaaaccagctggtaaagtatggaaggttaaaggcaaaggacctgagcctaaaacttccattgcaaacgctttctaggtgctaacagagacctcgacaacaggtaatacaagtaatagtggtgatggtcaagatgaaatacttgatgctgtagttccagttcagcaaagcgaattgacagcaaaaatgcttcttgaaaatggtgaatactggaggagggggaggacctactctatccaatggataaaattgttagttggaacgtctgagggattaataaccagcagaaacaagcactggttaagcaatttattgctcatcaaaaagttagtttagttggtctcctcgagatgagagttaaggctcctaaattaggggccttgtatacaagattttttgatggatggtgttttaccacgaatattgcttggcatctagggggaggattgttttagcatggaatccaactagctacaatgtcaagttatggaattcgaaggctgagaatgtagatagagttgttaatgcagttaaagagtcggttaaacaaagatcaaattttgtttggccaaaaaaagttaaagtagaagatatagagtggtttttaactttgtaagcgttgttaatactgtatagattacagtctgaggtcctaatatgtgggatgctctttgcttgtaaattggtatattggagtaatgaaactaactgattcataaaagaaaagtttagattcttatcttattattgaaactcggccatcaatactgaccaaaatccagccactatgcacaaccacaagaacacaatcttaacaatatgggaaaactctaaaagaattttcaaaataaaaaataaagtaatttacaaaattattagatattagatttataccttaatggacgttgagattcaccaatttgtccaccaaaagtggcagtcggagctacaaccaccacctttaagctcagtttaccttaaaaaaatcaaacaaaagacaatcatactttagggatatatttttgggtgtgaaaaatataatattttataaattaaaggtaaaaatgggtgaaaatgaagaaat

SEQ ID NO: 41592 - DNA, 825 bp, Cannabis sativa
attttcatgtgtgagagcatgtgtccaagttacaacaccaaaagagacacccaacacatcatctaacgatcataattggagagtctagaagaatctggttgtgcttatttccaaagggaccagacttttgaagaaaaataaggtcgtgccaaatttttaacgtaacaaacagaaagtggggaactaggcatcttaaactaccctttttattttgtaataatatatgaaattgcatctgcaagaatgggaatgaaacacagatggcagaaaagaaaggaatagtacccgatctgcaaataaactttcttttttgttagtcttgaacaatgcaagttgaaattcctcctgaaacacaaactatcaagatgagaaagaaaataataatagagtcaatgggagtaggcaagaagcacaacaatccttgaagggtacaaagtgaggaaaggtaaaccaaccccccctccctcaaaaaaacaaacagattaaatagcaaaagtatagatattcctcttaccttattaatcaacccatcatcaattactgcactactaatttttttgaacagctcgtacaaagcttctatttcactgacactaactgcatttcaaattaaggaagatttaagcccggcaataagaaatagttataatgatggtaacaacaacatatatccagacagaaatatctacaaatattgtaattgacaactcatgctgaaacacgataactagcagtaacaccggataatactaacatgtatcctttggctaagaaattgacaatttatatcttcaccattcttatcaacacgattaggggtcggtt

SEQ ID NO: 41593 - DNA, 1721 bp, Cannabis sativa
gattgaatgaacgttatattacttatgaaattagtctctgtaactgacggggggtaaaaatacatgttgtagggatgtaagaattgagtgttatatgaagcccttagtctctttgtcaagaaggagccaagataaagattctgccgccaaaataaaaagggtcggagataggggatcaccttgtctcaatcctctctctggcttgaatttccctacgatggatccatttaaaagcaactttatctcctagaccgtgatacatgccttcacccaatccgtaaaaagaggggaaagtccaaggtgggagaaaaccatgataataaagtctcaatccatcttgtcataggcattttccatgtccaattttatcatcatgaatcccctagaccctcttttctttttaattgaatggactatttctctatcaatcatggtgttctccgcaatacttctgcctctaacaaaagctgcttggtttggcgagataattttttgtagaaggtcccggagtctaaaggcaattaccttggaagtaactttgcaagccacattacaaagttttataggtctgtagtcttttatataggcaggaatatctttcttgggaaccaaaacaatggttgtgtcgttgttatagtgtggccattccacttgatggaagaagtgagtcaccatctcaataagatcaacctttacggtctctgagtggtgacaataaaagctacggtctcaataagatcagcagggaggcctgttaggttcgtgtcagtatttttgaataattctttgtaattttggaggaagcagcttgcaatgtcatcccaagatttttgtttttagtggatttcctctctgagtaaagcttcatttagctcatgcttcgtcatgtgaatggggctccaatcctctgggtttcttctctcggtttcctccaatatagcagaagctgtgatgacttgctgtcgtattttcttgaagtttgctacccctttcatccaacataaacccaagccccccgagagacccaccgaagggatgtaatgaagtccctcaaatcttaatctgtgacaaattctagtaaatttacttttctgcaaatgcacttctaatagtagtaacatctcgggttgatgttggtgaattagcgccgccaattgtcgaaccgtcatggaactcccgagaccacgacagtttcaggcaaggatttttatggcgaatttggagacttttctaggaaagtctccatggccctaaaccgaaaatcctcattgtgagttttctcatggctctcacgagaagtcaagtattgttcatctatttccgtaatgtggcatcctaatttctgttttgaaattttttcaataactacgaagtgattattgagatctacctttaagtcaaagactttcccttcccattggtgatgaattgtagctgcaactccatctttagccttggcaggatttctccacttgaatggcttcagagaagctgaaagcgatgcatccttctttgatggacgtcccctcctcttctaaccatggcttgctatattgtcgacaggggtcttccctcgtggtcttcccttacgtttgggggaacttgttgttcatggcagccagaagcaaatgtcgtggggttcaagtctaatggggcttccacaatgttgggggtactatccgactgcttactgtcgggtgttcccatggttggatagtttc

SEQ ID NO: 41594 - DNA, 720 bp, Cannabis sativa
ataatatttgttgagggtggagcaaggacggagtgaggtttgaacgatgtaaaaaatggaaggggaagggcggatgaaaccgaagagaaggggaagagaggggaaaataattctgaaggatgaataggaggttttatataggtttaataccggttagggtctgttggtagtagtttttcccaccactattaataaaacggtcaaagaatcttttgtattagtagcgggtctctgctagtaataacccatcgctaatactctttgaaataataagttggaatttttctgcatttattgggttaataattacaagcgggttgtctgccgacattaaatcttcctgttgctaatactcattttttattatttttaatttttttattcaaacactaatacatgtggtcaccataagtctgctggtaacattttttttggaaccaagaaaaaatcattcattcaataacttttaacaagtacaatagatttaagagcagaagaagcattaagctcattaaagatacaatctgacataaaacaaatgtgccagtaacattaattcttatagtgttaaaaatataaattatcctattacttaattagaaactgaattttgtaaatcaaaatcaataatatgtaatgtaaaaatgtaaaaggaaaaaaattacaatttaaaataataatagttttcatcaataatttaatttagaatttatattttta

SEQ ID NO: 41595 - DNA, 1013 bp, Cannabis sativa
tttgtcatttaacaaaacaaagggtctaattagtaatttttgcaaaatacatggtctaaaatggtatttacccaaaaacttattgtgatcgaaattttttttactaaaagtaactgtttttttgtagtgatccttcaacttctccaataactttttgtctacttttatatctttttgtaattatttatatcaatttatgctataatgggcttataatctcacacttcagcccagcataatagcgtgacccaaattttctccatcaataaagtttggccaaatttatttctttattttcctaagcaactttgtctactacacatcataggtgaagttaaatagaagactatgttttgcaaaagttattaattgaattttttatattattaaataacaaaatgaatcttatattttctaaaattgtacaaataggatcatgaattaattttttgtcaaaataaaacttaataataatctgatctagagatgttatgacaaaactgattatattttttaattctgtttgtgttaaaaattatatcttaaagttagttatatgaaaaaataaaattattaaaaattgagccagtgtcttatttttttatcattttggaaaatatagaatctattttgtcatttaacaaaatagagggtttaattggtaatttaaaatagtatttatcccatacatatataaaattcatgtaatataaaaacacatcggattttttttctgagaaaaagatatcagattttgatagaagcaaaataatagttcatttattttttatttaatttttagttaatttggcttatttttatatataataaaaagaaaatatataaattgtaatgcggaagagagaacagaaaaaaaaaagatttattgatctgaaagttatatttacaatgagaacaggggacacatatatagtcgagcataatgactaacagtatttaacaaccactgacttagacaataacgaacaactgacatgtaactaatattctaa

SEQ ID NO: 41596 - DNA, 2333 bp, Cannabis sativa
aaccaatgcttttgttcgtttacaaggaggctcttttaaacactaaccaacttgattcttcgttgcctagtgttgttcgtttacaaggaggctcttttggtatgatactataccaggtaaaagacttgtggctaaagaaaataagttgtctaagtcgttgccttaataacaaccttagaattcaagaaatataaaagattcaaaatttaatatacgtgcaaacatgtatgtatttatacttaacaaacatattaagaatattgaataggtatttaagtaaccatataaagaatttttggtatgcaactaataaatagactataaaagaatttaaggagaacattacacattttgctaaaatatttgaaaagtgatttagctaataaaagttttcattatagtcattttgctaaataaatcttgaaaaaaaaagggtaaaagtgaaattttttgaaagagagggtataaattaataaaacttaaaagatatatatgatctaatttcctcatacctataatgtagcatctctctaaccaaaccgagtagtaaatctataactatgtaggaagtagttagttccttttcaaccaaaataatcataacattaaaattaatatggagcctagtgcataaacaaccccttacaattcaatgggaaatacaaaattttctaaagcaaccttcgatagttttcatcctctatacaatcaacataattgtcgcggtcccaaaatgccaaaccttaataaactatccaaagtgtggtactggcacctgagatattcacaatgctggagaaaccagagtcattatagttttctttttcttttttttttttacatttacaagtgaacaacaagcattagtcacataattatttctctattggtatgaatagctgaggcctgagaggtccaatgcctccaggaagaaacttttgggaactgaagtcttcacttatgtacagaaagtggattggaaggacttgattctacttcttttggaaggttaccatacaaaagaatgcaacaaaacgactaattagtcctgtaaggttgagcaagaccaaacaacgataccagtgattcagatcatagccgcttgccatgagtgaaccacatcttgttaccagccagactcctgaatacctgtatataaatatgtatatatatttgtagcttaaaacaaaaatgggaaagaaaacacagaatatagaacaagtaggttgggatgattatgtcaaaccttttagcattggcaatcacaaaagcttccaaagcccattttgtgtagcacaagttagatagtccatcgacaaatttgttgtgattagtattggttgctataagagtcaagaccacaggaagaagcactgaccactgcagaagacaaagttaccctgagttgaaggacaattttccccataatttcatgaagccaatcatttgacattgtaaagcatgaaatgctcaccagttgggctggtccaggatcaagaaatatggccaaggcgtacgctataccagtcacacagtaaaccagacagaccaacactatgtaattatctgtgaaagatgatctaggattgttaaagaaatagaacatggaaagatatactagaggcttgattagtgtattgaaatgatcaacggtatctttggaaaggaagtaagccaagctactcatgccagaagcgctttctctccaatagtgcagcttatccaatgagaacgatctcaatgctgaaatcttgcataaaagagctgaagtggggacaaaaacaacttacaggtgagaagtgagaaacatgaagaaacacttcacatgacaaattcaaataataatttcaaaatttaatacacaattagcggaaggctagtggcagcattatttttactttatttactggagtggggagttttctgttgcacacatgcaacagctcaattcagaacaaccattgaacaaagaaacttacatactgctatgacggtataagtataaccaagtgacccaaaggtttcatcgctcactttagcaagtgttcctaagcagattccagcgagcaaaagaatcagaaaatctacagcttgtggcctagcttctcgtaatcgctgcttaccaaccctgcacaaaagaacaggtacaaaagatcaagcgattacaaaaaagaaagaacggcaatctgaatgacactttgatattggccatacatgtgtggcacttggtttgcatctaagctgagaacaattaatttaagctaaaccaaatagtatctgtatctttctctattttacctctgcaaaagttatttatacaactcttgccaaag

SEQ ID NO: 41597 - DNA, 1220 bp, Cannabis sativa
ttttttttggatgaattgcaggattccaagtatgtcattcgttggggggtggaacggggtcaggaatgggaactcttcttatctcaaagatcagagaagagtacccagatcggatgatgttgacattctctgttttcccttctcccaaagtatctgatacagttgttgaaccatataacgccactctttcagtgcatcagcttgttgaaaacgccgatgagtgtatggttttagacaatgaagctctctatgacatttgcttccgaacactcaagcttgccactcccacttgtaagtatatctcaaaccttaaaatattaatttcatctgacgcatgttaattctgatctttgtcaatgtatagttggtgatctcaaccatctaatctctggcaccatgagtggcgtcacatgttgtctaaggtttcccggacagcttaactcggaccttcgaaagcttgcggttaacctcattcctttccctcggctacacttctttatggtcggattcgcaccactaacagccagaggatcccagcagtatagtgccctctctgtacccgagttaactcagcaaatgtgggatgccaagaacatgatgtgcgctgctgatcctcgccacggtcggtacctcaccgcttcggccatgtttcgtgggaagatgagcacaaaggaagtggatgagcagatgatcaatatccagaacaagaactcttcatacttcgttgaatggataccaaacaatgtcaagtccagcgtttgtgatattccaccaaagggtttgaggatgtcatctactttcgttggaaactctacatcgattcaggagatgtttaggagagtgagtgagcagttcacggctatgttcaggcgcaaggcgtttttgcattggtacactggtgaaggaatggatgagatggagttcactgaggctgagagcaacatgaatgatcttgtggctgagtatcagcagtatcaggatgcaactattgatgaggaggagtatgaaaactatgaggaggaagagggggaaggagaagaagcggaagaggttcatgaatgatatggttcatctgtattgtagctctaattcagttccccattgtattgttcttgacttactttaagttttactatgtcatatgttgcttgttgtctttcaatctcatcagattttaacatatcaatcacatatcatgtgaatgtataattgtgaaccaa

SEQ ID NO: 41598 - DNA, 833 bp, Cannabis sativa
  modified_base (802)..(807): a, c, t, g, unknown or other
aaaggttctgatgctctattaattaaataaatcaaagatgtatatagctctccctttgtaatttttgtctcaatgatcaatcaattatgagttagctaggttatatatatacataatatgtatatttatatatgttagtgtacataactacatatgttaccactggaatagcatgtgggcaagtcaatatatgctcacgtgacacccacccaactccaataaattaacttgtatatgtgcttgaaattttgttttattatagtttattaattttttttttaggtagctatagctgttattgttgaatattgttatgcattatatatcacacattctttcaaattgatttgcttagagaatacctagtttaagtgtgaatttaatttattgtttaattaactatgtaaaattgatgacttatcaaaaaaatttaaattcatattgatagcgcatgaaaaatatacgtatatatacatacatataggttattaatttgtcactagaataatgtattgcttttgaaatgaatgtgaatataaatggttaatataattgtaacatctccgcttcaagtttttattgggccttttacacacccaccaaacgatgacttttatacacgggtacattacttttggctgcttcatagagtgatgactggccctacaaactaacacgaatgtttctagcatgctttttcttcactcgcacgctttttgagaaaactttcgaggagttcacctatcgtgaaattaccccataactatatgaatttctttcgtgatgggctactgaaaaacannnnnnaccttgttgatataggtagtaccaat

SEQ ID NO: 41599 - DNA, 1514 bp, Cannabis sativa
  modified_base (32)..(61): a, c, t, g, unknown or other
  modified_base (1469)..(1486): a, c, t, g, unknown or other
tttagaaagttcttatttaggatgttaataannnnnnnnnnnnnnnnnnnnnnnnnnnnnntaaaataatttccaacagagtaatcaccgaacctcctaaggaaatacgaaaaacctttattttcttttcttttctccttctcaaagattagatgagaaaggatctctgccgctaaaataaataaagcaaaagataagaaatctcattttctcagcccccgagaagggataacatttccaaatggaggcccattaataagaattcaaaactccattactgagatacataaccaaacccagttaacaaatttctcatggaagccaagacacaagtgaacccctgataaagttctaagacatacggtcatacactttctctatatgaaggtttataagcatatttccaaccttacttttcctcttacccatagaatgaaggatctgtttagtgatcatggaattgtctcgaatgatctattctgaacaaaggtcaattgggtgggaggcatcactttactaaaaatggttctaagtgcaaaacaatgattttcaaaattataggacacattacacaaagagatcgcgcagaagtcattgactgtagttggtccttcctttttaaaaatgagcacaacattagttctgttgaggacctttggtaactcaaaaaattgaaaaaaatgtatgatcatccctactaaattgtacttcataatattccaatgatgtagatagaatgagagtggaaatttgtctggcctagataccttatttgcatccatcatatgaatacatttaatgatttcttcttttcttggtatttcagcgagcatgtcattggtgggctcattaacttgcgggggatgcaatgttatatcctgataagtctaatggtaaataattagggtgtatatttatattatggttaatcaggtaataagtgagattatataagtgagtaaataagcgtaatttataaattatagagatttatatagcatgtgtgaatgtactatgagctatatgtggaataaaaatatttttcaagttcggcgaccctgaagactcaataagtggataaataagcgtaatttgttaattatgaagatttatttgaaatacgtaggtataatatgagttatttgtgaaataaaaatattttcaggttcagcgaccctagagacccgattggaggctaaaaatgtgacaatagttttagttagaaatattgatgggattattgggataagttgattttagaaatactgaggtattttggggtattcagagttgaccaaataccctagaactataggtttcttagtggctaagaaataataagataactatcaataataaagtttttattaataatattattgggctaattaagattttttccccctaaattttaacatgtaccagatcatgaacttttttggcagttaaaaattccccctaaactattnnnnnnnnnnnnnnnnnngacttttgtctaatttcattcactttta

SEQ ID NO: 41600 - DNA, 3238 bp, Cannabis sativa
  modified_base (2841)..(2850): a, c, t, g, unknown or other
ttctttattgatatttaaagaataaagattatattgaaatggagttttatttagggcataaaacccagcacctcgttcatgcaatttctccatttagttcgaacacgagttttgagtagcatgttcgaaatcattcggcaagaggttaattggagatattttatcaacaccagcagtgttagacttctccgtactagagtcatgagtaggaagagcaacatcaacaattctacccctcttcctgaccttcttctttgaagcggaagaggtagcaggaatgtcgtaaaccacttcccttactggaggcttagtctccgttggtgtaagatgcttcctcttcaagtttaaataagatgccatggcatccaagaagatcatattgtctgcagaaagtaaagatcagaggttagtacaactaacagaaacaagccaacaagttaagatcacaacatggagtgtcagcaacttgctaattttccatccttctctggaacagtcccaacaaaggtaactacttcatcatcctagtctaagaatatgtatattctccctaaatattcggtgtcatttccaacaaaagttatctatggatataaaccatggatgcaaggataagtaagcacctgcattcatgtggaatctcgagcatgcattacaacaagtattttgggagcccttaggagcaccatgtcgaggcttctgaacgacaatttcaagaacacagtaatcatcctgaattgtttgagcttgaggctcaataagggtaatagacacaagaggcctaaccttaaaggctctatctctcaaatcatcattaaacaacaactttgagatgcttagttgccatcactgttccaccgcgtgccttgtctaatttcttagacttaggaactgccagctcatatgtaatgagctgagcaacatgggtatcatattcatcatgtaaccttttgcttctcttaatcctagccatctcaagttcaacaatttaagctacttacaacaaaaggaaagtcaatcttggttgaaaaagtcaaagtagcctagaagaatttttgtaaggtagaagcagagtgttttggatcattggaaggttcaaaaaaattagttcaagggttatttgaagttcaagattgttgggataatatcaacaaagaaagagaagaagaagaaattaaaaaacattggcgtcaaagggaaaaaagaaagaaaaaatgtttttctaccttgaagtgaagaaggcttagagacttgatgaagatgaaatcttgttggtgttctcaaagtgctataggcatgtgaaataaagtgagaagtgtgaaaaatggtcctcaactcacttatttatagttgagtctaatttctttatcctaaagctaattggagtcttttaaatttagagcttcctaaggaagaggtaaatgacaagtaaaacatataattatatcttttcccttctcctaaagataaataataagtaaaaggctaaaagtcttttctcttcttcctttctctttctagtttcgaatggcatctccaacaaggatttagattccaatccaattcatcctaatggcataactaaaaataagaaaatatctaatttttaaagaaagagataaaagataagattgtgtcctcttttactttgttaatgaattttcaaaatttccaaggactaataaaaagtgttcaaagtcctaattcagttgggaatgcttgaagaatcgatacaagtgcctaagaatgtcaaaattgattcgtatttggtagtttcgagcgcaatagtcttcgttcacatcatcacgtgaaatccacacaagtgtgaaattgacttggagggaaaatgttaaacccgaagactttctctgatgacacggacatcaatgtttagcacctgaaatgaaggatgacataacaaagtttaatagcctcatagcagtcaacctgggaggggaccctacccctgcgccctggttgactctaggatctctgagatggaagtttggactttaataacttgaattcaactcactatcttttagtattctgcaccatgaacacatggataaacctaatccaagatgcaagagctgaattacacgaacttgcaacccaaaagcaacccttggcacctagggtttctaccaaacgcttaggttgacatcctcatcctcaactagggtttcaatttttgagaccatctttgtagaaagtggccaaaacatgcattacgacatcagttcgacataccacgaaaatatgtgaggcattagaatctgattcagagcaagttgatttttgagcacctaaggccctatggccctgaggacccaacgcctatgttgaaaatctatcaattttggcaccttccaagtgtccaatcgaagatccgacctttctattgaaactatcttcatcaattataggtgttatcccaattttcttcctcctattgtggcatgcttacatggacaaaattagtgccacgtggcagtataactcaccaatagaaaggccacgtcaacacctaaacaaacggagaccccaacactcaaacaggcatcaagtgatagaccagctccctaccaagagcttgctggccagccttgggactataccatggccagccagcctgccctccacaggtgcctggatgaccaagaagtgttctgcaggatttcttctacactttcacacgtggacagttactcttgggctacaaattgggccctgaaagcccaacaaaatggctgaataatatcttgattcaatgccattttagtcttttgtaattatttaataaaatatacaaatatctagggtttaggcctcctatannnnnnnnnnaactctaacctagaaacctaagttgaatctaagtctgaaacctacctccatgctctaaatctaagtctgacaaattctctcttcttcacttcctcactctcatgcacatacaagcatcatccctacacttggattttgccattcttgattcatacattatattcctaagggtgctatagcatatcccacctatagtgatatagatagtattaaccctcgatattaatacaactaaaaggggagtagctcattacccattatcacaaggggacaaaatctctataaaaaatattgtgtttattactttttattcttgtttgtgcaaacacgtggcaagcattagatctgtacgacctcgctgtcggttgatccctttttgaggtcaaca

SEQ ID NO: 41601 - DNA, 659 bp, Cannabis sativa
ccacgttaatttttattttttaatgtaatttattatcgttttatatatttaaagttttgttatataaaaatttatttgttggcggaggagattctcagctttattacaatattacttgcattgtcactggcaggggacggggacaggagacgggcatggaaggaccaccccatttagggataatttctcaataagcactcttattttggacactctagacgtgttgtgttatctttgcaactggttactcatacaatacatacgggtactttttagtatttctctattctgcatattggtgtctagcactacctgttaatagtgtcttgttggttaacaatattctctaaaaataattaaattaaattataagtgactcgatagttaaaaaagtaaatactattggtacaaggacctacccattaatattaatgctttataaaaattatatgtaaatttttttaatttaataattatagactaaaatagcataaaagtccccacaaaattaaataatctataagagagattgtaatgtaggtataatttttttttttacaagaaataagtccttacaaagtaaaaaatctgggttctaactgggtgcaattatgtatcgagtctcacataatttattattgcaataattttgatggagt

SEQ ID NO: 41602 - DNA, 846 bp, Cannabis sativa
aaattaattagttgttttattttaatttaggtaaaattgtaaaactaatgcaggggaaaaaaatggaggaaaatacagaatctgtatttttttctttttttttttttgttttacatttccaacggtttaaaactgtcgcctataacagggtataggcgacggttttaaaccatgtcgtataccataggcgacggtttaaaaccgacaggaatactttaaacgaatatttaaaaacgtcggaaaaattcatttttgtagtagtgtgtatacaaattttgtatcctgatatatctaattttttaacttctttatgtagtagtgtgtatacaagctcagcctctagttagttttctgttatgtttccttaacttcttttgaaaatgtaaagggtataataaatatcccattctttcactactctaatgtgagattgaaaattttagttttagagggttgtacattgagctcaagtgtatctgatcttgagtctcactatgaggcttaacttgtattttgatagttgtttagagctgtgctcatgtgctgtactcaaattcacaatcatcatcaataaagattcaaccatcatgattcaattctcaaaccagtaatttcattttctttttttttttttcttttcattttaatccaattattgttgcattattattttgatcttctacatgagtgtgcatcttttcacaaaatattagttatcaattctctttttcttgggcatcaaaaaataaataataaaaaaatctaatttttttttaacttaattcttgtttgagcaaaagtcactaggagtatgagaccgacagtgctttggaataaatttgagca

SEQ ID NO: 41603 - DNA, 1531 bp, Cannabis sativa
ccgcctgtgtgtaaaccatttcctttgtttcttcgtaagccgagcccgatagtttggaaatctcgtttaaaatctcgcgctctatacgcgggtttttcgagatgagatagaagaaccaggtgagtgcggcggaggttgtgtctcgtccagcgagaatgaagcttatcacgatatcagttacgaatttctcgtctgagtgacctgtgcttaaaaatctcgagagaagatcgactgattcgagcgacgatttctcagcgagttctttgtttttctctttaattacagtcatggcgaaatttctcacttctgaaacaaacacagctagatctcgctgagatccgattccgataaaccgcttaatcttccaaagtaaaggaatcaaagccacagatcgttctccgctgatcttcgtcgcttcatcgaaagccaccgcgaacttcgattccggcagagaaggtaacaaatacgccggatcgtaaccaaaagcgattttacatatattatcgaaagcgaaacgctggagtagatcttgaaggtcgagaatcttaccgtttccggagcccccgtctgcggcggcggagagaataggtaagaggcggtcattgagttcggagtcgactacggtttcaacgaacttacgtaacgacttgttgttgaattcgtagcttgagatctggcgctggaacttccaactctttccatcggcgcagaagattccgtcgccgagaaaatcggtgaggttgacgcggatggattcgcctttttggtaattggagaagtttgagctgagaatgtggcggacgacgtcgggattggcggtgatgatctggcgagggccgatgaggtggttgattacgaaggtagcggtgggtgagttctggagtagctcagtgaaccattcgaggcggcggtgtttgttagctgaggcggcgaagtatgttccgaagattgggtaggatttggggagttgagttgaagaagaagaaggtttaatggagtttttggatttatggcggagaatgaagattagggtaatgaggatgacgaagattaaaggtagtatttgagaaaccgccattttcattttcagttaattcagttgactactctcactctgttcactctgctctctctctctctcgtttcgttttatatatatccatgcgaaaagcgtgttctgtggttgtggatgtgccacgttgcattttttaattggatgaaagatattttagagctgacgtgttaagttttaagaaagaaatgatgtgtatttttttaattttattttatataggagccaaatcttctgtcctttttttctaaagagaaacaaaagcaaaaaaaacagaaataaagaatggacaaaattgtgaacagaagggagtagtgtaatttagcaagagaaactaacacgttaaatgcattgttgtcattttacttttaggtgaggtgtcaaaatttgagtggagagacaataattgcgacagtaaaaggacagacgatttagctccgtgtctatgtgcactcgcag

SEQ ID NO: 41604 - DNA, 1190 bp, Cannabis sativa
tttgggacctcgccgtgttggtaaagcttcgctagcccaaaatcaccgagccggccacgcatctctgagtcgagcaatatgttgctcgacttaatgtctctgtgaaccacaacttgatcccagccatggtggaggtagtttaggccctcggcaacatctgctaacacccgccgccgttgttcccagcccagaagcttcttgggcttgtcgaaaatccattggttaaggctaccattgggcatgaaatcatatacgagcatgagttggttcccttttctacaccatcctcgcattttgactaagttcttgtgttgaagccttcccatgcttgaaatttcagccatgaattctctcaacccttgttttgaatcgtggttcacgcatttaactgcgatttgggtttcgtttggtaaagttcctttgtaaactttcccgaacccgcctgcgcccagaagttgattgtcggaaaagctttcggtggcttcatcaagctcttcgtatgtgaatcggtgaggccaatactcgagttcccaatcttctatatcgtcatcttcttctttgtctttcagcttgctcttccgccaataccagaaaaccccgattgaacaaatcgatacaaaagcagcacaaccgattacaatcccagaaattttcccgggagaaagcgacgaagaagactccggtacaagaaagaccggcaaattcgtcgtgttgatctctctcaaaactcctgtgtcgctaaagctccaagctaaaatcctctgcgcttcgatccattgcgttatcgaagccgaaaacccaataaacatttcatcggagatgaaattcgctatgttcctgtctctgtaagtgagtgtaggtttaaccggacgaggaactccaatgggagcaacagtgacgttgatttcgaaattggtgccatcgaattcgatccaagctctgatgtttctcccatctcgcattggaactgggacgaaggatccagttgagttgtaatatccggcggggttccacgtctctgattcaatactgttgagattgattccgatgtggttcccatccaggtcaccgaattccgggttccgacccgtatcgaacttaatggctaacaggggagctggtgttctcaccgtagcgttggtgaatagaccgaagtactgactggcgatggcgccgggaggtgaggtgta

SEQ ID NO: 41605 - DNA, 3288 bp, Cannabis sativa
actcacgttacttccaaacacatcctaaatattaatttgtaggtgtgttacaattgagattatttatatttgacatcctaaaaactaaaaacgaggttaaataaagtgactaacccccagcaactttttcaaaaacattaacccagattcaatattgaatttagatttaaccaaaaaaccataatctgagtctacttttttctgtttggggttgaacttgttagaagtattattaggtggaaaacttaaaaaaaaaaaaaagaaaaaaaaaactgaaatttaaattaatttttacaaaaatactgtcacacaaaaattttttttaaaaatattatatttttataaaataacagtaaaacacaaaacaggacaactaaagacaactaaaaataaggacagcataactaaaaactaacaatataacatcaatcaaaatataactacacagttataaaacttacaaaaaaaaaagttcactaaattgaaattttgagtggtgtaattatctcaatgttggcgtgtgtggcccaaagcagaatcacatgggtgtttatgtaacgcgaacatgcctcttcttcaacagctgtcaccacgtgacacttgttcataaaacaaaaaccacatttctttttacttttccttcacccaacccaagaagggaataggaaccaaaccgattaactaaaatgttttttctttatttaaatttcttataaaatagttaaatattcttaggaaaacaaattaaacagaaaaagactatactacagcttttaaaatgagtgttttggtaaaattttatttagttcagtatttaaaaaaaaattaattaattttaatttttaaaaaaatttacagtaataaaaataaatttaaatatttactcggaaaataaatttaaatatttaattaaatgtattactgatttttttattattaaaaaagtttcttcacttttgttagaaatttttaaaactttacaaatacttaaataatgtcttcctcattttttttaagtataattcgatcacataagcctccacacacccttacttgagctaacttcaagtagtggtggtttggtcttaaataatgtcgaaacaaataaattatatttactgttactgaaacacaattgtagtagtcttaaataatgccaatagataaaaaatactaaaagatattagtatatacttattacaattaaatataatattttatataatttaatataaaaacatttaaaaaatattactaaccaatcacaaaataccaatttaaaatatatcggcacaagctcattaaaaattaaactgaaacacacgtgtaggaatactacagatttttccaaaaatataataggcttaacaactaacaaagaataactactcacaccaccacctttgttctacttactttggctttcgatttctttgcctcttttgaagggtaataataattattatttaattgattattatatatggttatttaatattatattgtaaataaatattacattaacgaacaaattataaggaaaaacatatgacttaattctattattaataataattaatcatcacctaatcacaaatgataactgtattaattctcctccaaaatatcatactaatctagagattttatactaaaaattaaaaaaactacgactctgctaagtttcgaaaacgatcgaaaaaacttagaatctgcatctcaggaggcggaacagcgaaaaactcacaccatcagattcgaaactgatatagctaagatgatcgcggctacaaatccagcaccagagattctgctgtgactattagatggtgaaggagggagcggtgcctcagacggagggtttccgatggaagaactgggggaaactgcggctgaaggaccagaagtcggtggagctggtggagagctggttggagatgaggtcggtggtgtggagattgatggagccgatgcaggggacgaggctggctgagacgccgtgggagccggagacggagacggagacgggactgaagttttggatggaggagtagctagaggcggtgatgaaacagtcggcggagacttggtaggcgaaccggtcggcgccgataatggagattgagcgaaaacagatgaagatccaattgcgaaagtgatgaagaacacaaggaaggtagagcgagccatctttttttttttgttagtggttttagagagagaaggtggatgaatagagatatgtgagaaagacagtggtatatatacacatattatgtagaggtcggttgacggtgtaatctgtaaagggaaatattagagtacatttggaaacaccggacatattatgaactgtcttctaatttgtgacaactgtacacgcgtaatccttagagcatctccaatagtagtattttgtagaatgtttgatgagatgaaaaatttagattgatattcttgaaatttacattgatttcacacaatgacattaatgctatatttttttaataaaaaattaaaagaattattacatggaaaatataaattaatactttatttgcaaagatatttccaaaaagtgttgacaatatttatacattttatgtgcttttaattaccaaaatacctcttacactatcacttacatcatcagacgaagattgttgggtggttggccgaatgttgcatcagacaaaggtctcaatcaagcgaaagttgttgggtggttgaccgaaggttacatcagacgaaggtttcaatcctaggaagcatggatcgtggattgatgttgaaactgtaatgcaacagttatatctgttgcgagccaactaacgtgcaacttaattgcaactaaaaaatgtaaaatgtaaatgtgtatatgtaagatactattagtcagtatttttttgtcactgatcgataattacttgtaccttaatagtaatatgtggagaaataactgttatcaaaatatttatgcaattgttatgaaacattaaaaatcaaaacagtgtttccacgtacgtaattctatctacatgtctcttcgtgatttaatattaataaatttaccattagaaatttgaaaaataacaaaaatacaccaggataaacattttacgatagtatgtaatattttagattatacttgagttggattatttggagactccagtttagatttttgagatctgcatttcatggatctgaaaattaaagtcagggtattagttttatgcgaattaaactagagttttggttgaattttagtttcgtagtagtttatct

SEQ ID NO: 41606 - DNA, 1894 bp, Cannabis sativa
aactagttccacaataaaatagtttataatacataatacctcataaaattggttataatttttttttaaaaaaaaatgtggggatcaaatgtctcggatatataacactctcataaactcaattaattgaagtaaccagtggtagtctaaatggatgagtgagaaagagaaactgtatgatccaattggtcaaatttgtctttgaaacctcaaacaattttataaacatgacttacacttgcaattttctagaattgtatgataagagtgtttgttggtatatatttgttgtactatgagtttatctgtactttgaattaggggtgttcatcaaaccgctcaaactgcttaaaccgcccgcaccgcaccacaccgtaaaaaaaatgcagtttgaaattctttgcggtgcggtcacggtttgaatttttcctaaaccgcgcggtgcggtgcggcttgcagttttaaattgttaatatgcggttcaaaccgcaccgcaccgcacattataaaaatacgaatttttatatttatttaggtccaatatgtgaatgttcaactcaaagtccactaattattatattgttgacacttattttttttttatatatatttattttcaagccttatggtattttgacaagttttgctcaaaatttgttgtatttgtgataatttaattatttagtgatagtccaaaccgcataaaccacaaaaaccgcaccgcaccgcagtattttttgcggtgcggtttttgcgggtttttagttttgcggtgcgggtgcggtttgggaatttggaaaaaccgcacgtgcgggttggtttgaaaaatggtcaaaaaccgcaccacccgcaccgcgaacacccctactttaaatgaataccgcatacaaactttgaacaagaattttgtaattgtgttttagtgtcatctatataacatagacagatgagtaaaaaaattgtaatgaaaaatagagtcacaaacacaaaactttacattgagatattaatcttttattatgtacttggtcacagaactttacattgagatataaatctttaataaacaaataaagtgaatcattacattaccaccatttttaatcaactcaaagtctgtatttggattaaacttcacctcctctcctaatagaaaccaaactcttgacatagaaacaacccaaaaaagcaaatatgtttctatctagttctaaaacataaacaagttctcttacattcctctacgaaggttgcaagacaccaactgtggttcaaccctacaatctttccaaactttgattagaatatcatcatttttcgaaaatggtaacactcgaaaacaattctctaatggtaccttaacaactttggtaccatccatggtggagatatgaagaatgttgccattgaatctccaacacattacaactgaatctttccatactgacaggtgaggcaaataatcaggaaccaaaggttcatcaaaacttggcaaagctatgagctcaacttcctcatcactcatattaaaagtcagaatgttttcacatgcatcataagagtaagaccacacaaaccaataacaaacacctctccaacatattccatcattaagttaggtaccaataagagagtatattatgtcttgataaatgttgagctctctccatgaatcagaaccaactgtgtatgcctcaactgtgcaatcttgtccatcgagccagatggcaacacatttgaaatcattgtttatagaatcaatttcaaatcctatcttgggataaggccctttgattgtagtgttatttggttctgggagaatcatggattctttcaaacaaggattgcataacaccattttcccaagactatttacttgcaaaatgagtccatc

SEQ ID NO: 41607 - DNA, 939 bp, Cannabis sativa
atataaccaaaacctctcaacaggattgagttcaggtgagtatggtggtaggtatataatttcgatatttttaacgctaattctggattaaaaagagaatagaaaagtcaggagagtagggtaaactcaacaaatagaaaaaaatagatgaggttacccatggaagatataacaaaactgttttgtctggtcgatgatttttgcagagatatagagaaaaattttgcagataaactactgccaaacggtaaaaacccacaagagtgccagaaattacacattcggaaattatcacaataatcctcctgtatcagcaatctccctgtgaaaattttaaggctttctacctgcattacctaacattgctctacaaatcagagttttcgaagttgccttcatacactaggtttgttgctctaaagcccagggttttgtggcatttagccatgctattacagtgcctttgcggatggtcagaacttactggaatctcatacatagatacaactcctattgcagtttgccatgcaaaaagaatatcaagaaataaggtttttgctggaattgcaaaattaagcaagagtacatatggctggtttttcggctttaaactacatttgataattaacgagaaaggtgaaattcaagcttttacgcttacaagaggtaatgttgacgatagagagcctgtagcaaacctaactaagaaattaaccggtcttttgtttggtgataaaggctatattaaaaaagagcttttccaagagttgtttaaccgcggtttgaaacttgttaccaaggtgaaaaaggggatgaaaaacgcattaatttcactacatgaaaagattttgctgagaaaaaggtcgatcattgagacgatttttggctacctcaaaaatagacttgaaattgaacatactcgccatagatctcccgtta

SEQ ID NO: 41608 - DNA, 3340 bp, Cannabis sativa
cttattttagtatgagtgaatttattttcttgaagattttaagagtatattgtatatctcttatatcaattatattagtatttatttatattatatttttataataagtcattaagtaatcaaaaaactcaattctaatctagacaactatgaaaccttccgagagtaagaatggtcaggaccctggtattacttttttttttgtcttcttatttatctagataaatgttctgtaatgatactttgatttcttaactcatgatttatttatatttatattttatttattaatattattctaagaattttgactgtcttcacacattttagggcatgataaataaaaaataatatttgaaatgtagggcatagcatttcctttgcacaaaaaatgcgtgatacccaattcttgttcctctaaaaaattgtggagaaattatcagccaaaaaatgaagaatctagctgtgtgcagatctaaaacgaacgatgaatttaaagtacaattaatttactattcaaagtgttgacacacagtttacttatataaaacaaatcctttaaataatcatattactttaattaccaaaatcttaaaaaaaaaattaaaactttaaataaaacttatatttacgtggctcggcacgtaacatccaactagtatataaaaaataagtttaaaaacatatatatttgaagacatatttacataaaaaccatacaattggtcattaaattatattatgcattaaggagtaaatttactataaataaatttttattaatatatatagtactatccttaattcaataagaatttttataattgtcatacaatttagtgacattcaaatcaatttcttacataaggaaaaataaaatctataatagcattaatctcaattaaacctagaattaacattatgttaataaaatattatatttataataatatcattaataatatttaaattattattatttatatttataatataataatgtagtatgtttattataataatgtttagaaattttattagaaaaaaaaaaataaacagtattacgcattaataaacatactaaataattttttttatataatataaatgtttatgatttattataaatttatgtttattttataaaatatttattgtaaaatatatgatttattataaatataagttgtttttctaaaataaataaacatgttttaaaatacaattaaataaataataaacagtttaaacagaatatactattttatattatagtataaatgtttattattcagaaggaaaaaataaacagctttacacaataaatatagtaaatattttttttattataatataaatatttatgattgattataaatttatgtttattttataatatatttattataaatataagctaattttttaaaaatgaataaacatgttttaaaataaaataaaataaataataaatagtttaatataataaaacatactattattttttattatattaattataaatattttttatctactttagtatgatttattataaatatatatttattttaacaaatatttaataaacataataaacaatagtatattaataaattatatatgtatttaattaaaaataagaagaaaaataaacgtacgaataattttactaattataaacatgttttatatctataattaatctatatatattttttatcaatatatatctttattatttataatattacatgtctattaaaaaaatataaaataaacaatctcataaaattaattaaatagttagaataattttgtataaaactaaacataataaatatttttttgatgaaaataaatgtttattattcattttattataatttattataaaaaagtttatgtgtaactttatttaaaataaataaagtaaaaaataaattattaatttttgttgtcacaataatatcataaaagcttaatataatagttttagtcaaaaattaatataagttatactcatattttgagcagtaatatgacgctgacacgtgtaacatagttagaatacaaaccaactcaaattatgcatcaaataaatacatgcaaatgactcgcctcgagaaatagagttgataaaaatactcaaactcgccatcatgtaggcaatatcgaggcacgagtcatacctaccgactaatgagaccagtgagatgaataagtcaatctcgagataaacagaatatattatagaattatttagaattggtagataatgagttttgtagctcgtttacccacatacctgtgagtatgtcaaaagagtaaaaacaactactttaacatgattcatctcgcatttgtcacaatgtaataagaatctcccatatacctcactcaatattaatagaagaatacgagatgtattgcaaccataaactttgacattattccacggagatgtttaagaaaagtgttagtttgaatggcgagaacaacaaagcacagtcaacataaccgtctatatataaggacaaagagtagtaatgcagttatttataattatctcatgtacatacatatgaaacttgggcaatgctcacgtttcatgaacggtcacaaatgattagatcttaagggaatatttatcatcttagactcctataaataaggacaaaacccagagaacaagggaccaccaacctttaggaaaatagagaatattgtatctattgttcatttatgaaaaacaataattgtattttgtatacaatttatcaatccaaaataaaatatacacgtggagtggactatgaagatttaattttaaaactacatgaaaattcttcttgtaatttattgctattattattatataattaattctaaagatcatttattacagaaaaggctaatttatttgttaacaaaaatttgcattaacagtttgttgctttcattgggagccttgtaataaaaagaaactcagaaaaaacaccctctttgaaaacaagttcgaatcattcactcatggaagacgataccccgcgaaatgaagaggatcagccaggagaggagcatcagacttcacacagggcaaataccgttgaaacccaacatcctggaaaggatcatcaagtgccatcatgcacatgtttgctacttcatttttctcctcattttcggagtcctgctcatcactattgagccaatcttccaacattgcccttcctttgtatttgttcttctttctcattggacaatctattttcatgtgatcgggcttcttgcattcaaagcaaattggtgaatcatctttactttttttttttttttt

SEQ ID NO: 41609 - DNA, 871 bp, Cannabis sativa
tactattataattatacttaatacaattttgttaaatcatattttttttcatacaatttttctatttataccaaataatgagtattaaataattaatcgttaattttataacatagctcataaacaaaatttatatctatatatgtttaaacaatacaaatatatatgtaattgataaatataataactaaattaactcatattttcaaagaagaccaaagtcaaataaattaactaattatatagttgagttgcgaaagtgtaatatgtaagtgtatagtaaggtgtatgagttaaatctcaaaatccattaataataaaaagagagaataaattcatgtattttatatatgtatattatatttttttatataataatgatattatgtaaattttagtagtgggtcagtttatgtgatgctatagcgatttgataaacagtacttctatatatattaaacaaataataaatatagaagaaacaaaaaaaaaagaaattacatagttattcaataattaattctatttagtccacaaattaattatttttattaagcatttttctatagggtgagattattttaatagtgtaagtaattggacacaaatatttttcctgtcaaaaagggatgagctacaagatatattaattcacttgtgaatacaaaatgaaatgttagttttatagttttttttattctttattgaaaacacaaaactaaatcaaattaggaaaagtcatttctcttagttaaagcatgagctacacagttatgggcaggcacggagggactttagcccatatgtgggctaaagccctcactcaaatataaacatcaaattttttatatgtagatatatacatatatta

SEQ ID NO: 41610 - DNA, 1412 bp, Cannabis sativa
taactgcaatggaaaacaaaaaaatagactatataagataaatacactccgagataataagaccaagaggtgacggaatctgcttgttgctttgaatgacttgaaccaacatgagacaatcagtctccataaccatagcagcaggaatatcacccataggagtaaccacccctccccaattacttttcacccaacttagagcctccttcaacgacattgcttcagtaacaaggggatcgagttgcccactcttttttacagcagcaactgcaataaaactaccatcatcgtgatttcgagcaatccaccccatatcgtggctcttctcttttgcaaaaagagcaacatcgcaattaacctttaactccccaatagacggtttagaccagtgctcaataccggtcaaattttgaccagaagatatcgggacatcaactctattaacctgagcaaccttccagagatcaaggtaagtaattgcagcagaaaccactctttccacatatacattcttcttgttccaaagcatgtcatttcgagccccccaaataccccaaagaatcgtagccctagagtacctatatagtttatgtagcatttaatatttatatgtttaatgcctcctatgtatttaaatttataacgagagtagaaaatttacatataggttgacatttatatgtcctagtccgaatataattttttttagtaaatctactatcacatgaaaattagaatttgagaattaaattatgttaaactatatatatataaagtatatgtaatcgaaattaatcaccctaaattttattcattgttaatttcatcttaattatttattttctttgttttttagtagaaagtaaacatcttttcttatttttattgttaccaaatagaattagtaatttagttgtctggtaattaactacaatctttgcggcatcgacctcactcttgtgagtctattacttgtaaacgatacgtatacttgtgtgttggataatctgtaataaatagacacttgttaactcgtgatcttattgacaaattcatcactatagactcttctctctatcgtgtctgtgaaacagtttcaaaaacccataagcatttatttttcgactgcattttccttagaaaaatcttacaagttgttgtcaagtggtttagtttgacaacatggctgaaccatttggctgattgggttaatgattgtatcatcagctccttgaaaggcattactgtgaaggttatctcagctgctttggcagcatttgtttattttctttggtacaaaataggtgccttttggaggcctcttgtataattctgtcttaataattactcaataggtaattaagataaacttaaaaattagagcccagcttattaatgttgctagacttaat

SEQ ID NO: 41611 - DNA, 1365 bp, Cannabis sativa
agagatgatacacatgctaattttttctttgattgtggttattctctaagggtcatgcaacatatcagatcttatatagctgacttcaagtatttggcttgagaagtttattgcatttggtggaataaaaatttatgtatctttgaacaaaaagctatgttaattactcatgtagatagttgataaaaactctctgaaatatagaatgttatttgtcaagggtgggaactataccagtagagatttatccattaaagagatcatttgtataatgtagttgagagagggctatggctttggcctgggtgatgtttagcaggttttgtgtaaactttgatggtttttagtaatgatatccttttcttgataaaaaaaagtgagtattgctaattttttattgatattatcagtgatacaaacatgagttgaaccttatctaactgctcttttatttatccgtgatgtctctctttttagagttagattagatttctccaattataataggttgtttggttcataaaagaattagatgatttagattgtaaaatttaattatatatttatatgtatttaatttttattttatttaattgattattttgtctttttaattcgttaattgatttaaaaattatttgatgtagccaaataattatttagcagtcgaacaaaaaaaaaaataccatttcaaaacaaaagaaaatattataataatatgagatgtataattatacatatcacactcgtgtaacgcacgtttaaaaactagtatatattgaaatatgacaatgaagagctgacaatgataaaagaggacagttttgaaatattaatattctaataataaaacattgaccattgtcttgcattcataatagttttttttctttttttttttgaaggaaagtactcaggaataggtctttggcccatgacaattgggctttattcgggtcattgacctgatccggcccggcccaataatagttgtgtcggtcattattagacaattatgtttttttttgggtaaaggagatatatgtagcctttaatatttttttaaaaaaatatatgcacaacattaggacaatatcgatttcaaagaaatgtctcgatgtattatgaaaaataaaatttatagagatatttaaaattaaaaattttaccattcaaaaaaaaaaaaaaaaagaaggggtcgcgcttgactcgccaggctgaaagaaatggtcgctttgggccagatcgtgccaaaaagatatcgtgtcgggctgggtcaatgtcgagttgtgccagacccgtcctgattgaaattcctatatatatatatatatatagatatatattttactctttataattatt

SEQ ID NO: 41612 - DNA, 1491 bp, Cannabis sativa
taataacatcagtaacgaaattaccaaaaaggacataacttgatgatcctctgtttgcagccctacggtcctagcatgctcccgactctgagcctcaatggcgacttgatcctcgccgaacgggtctcgacccggttgggatcggtggatcgcggtgatatcgtgctggtgagatcacctcttcacccaactgttgtggtcaccaaacggttgattggattggaaggtgactctgtttcgtatgtggttgagcctggaaaaagtgatcggacggacaccactgtggtatgagtgttgaatcaaatttagattatttttagttttaagctattgggttttgattattgagtataatgtaaagagaatgtgttttgattttgatgaaattgtttgatatttttttttatgttttttgtttgtgtcttccaagtgtttgatgttatgcctcttttaaatttaacttgttgttttgtaatattttttgagtttttgaattatgggaatgatttgaatttgtgattagctctgttgtgtttgattttggagtttagaaatgtataaataggatttttgactccaaactattgacactacttgatcgtactcccgaaattttcatgttttcttaaatttgttcgagaggcatgatttggtatttggtaatagttcggaacacaactcaacaagtccaacataattcagatacataactctgtgatgccgatacttgcaggatagttcgggaggcaaaaatcttatttattggttaaaaattactgaaaagaatactatttgatttagtttattgtttctgtctttttctaaggttccaaagggacatgtttgggtagagggagacaatatatatgcttcaagggattcaagaaattttgggccagtcccttatggtctccttgaaggaaaattcatctggagggtatatttcttctttcttctcttaactgtttacttttaatatggttttaacaaaggtacaatactctgaaaaaagtcatctatgtcttgatttttctcccaattttgttttcttgtacaatagatatggcctcccaaagattttgggtcacttggaccaaacaaaacagagccaatctcagataaggtatcaagaacatatatatatttttaatactaattcatagcaaactatgctaataagttttcataaattcaggatctgtcttcaactgaagccatttaaacaatcacagaccttccttccttggtcattgtacagaggatgatcaattcaatcaaagttgcagcaaaagcttgcgaagttcggctgtcgccaccatttgtttcgagttgtttttcaattgggttttagattgcaactctctttcacttctttcttgacagttttattatgttttggtacattggtttgaggcaagagattttctggcttaccaaacaaaaaatgtcaagcttcattattaatgaaattgaaaattctgctaaatattg

SEQ ID NO: 41613 - DNA, 2057 bp, Cannabis sativa
gtatttttgtaattttttttccttttttgtatttttttgtttttttcccttttaaatattaacccaaaaaaattaaaattaaattaaatataaaatcttattagagtaaaaataaacaaaatatatatatactattagacaaaaaattaaaacaatgattaaaattaacataaaaatgtaataaaaaaatattaataataaatttctaaaattattattattattattttaatgttacagtacaattataattttataaattgtaaaataaacttaaaagtatgtcatttattaatttcaaataagtataaggttttttttttaaatagatataaagtatgttaataaatttttttataaaattattttacttataaaaaaattcataaaggctattttgcatactatttttgtttttaaattctagacttgaaattaggaagggtaatgttgtagttcagagacattaggaagggcattttcgtaaaataacagaaacaaatatataaaatgaagttcatataatatcttcaaacactgctcatgaaagcacttcttccattttcagagtttagagagagaatctagagagagaaaattgaacaccgtccatggctaaaaaaggagtcggtggtggtggtggtggtggaggcggtggtggcggtggagatgaggaagatgaggagaacggtagctcaggtaagagaatcaaattggcaaaggctgaagaaccacaacaacaaagtcacaacaaagtcttgattttggagagaactatgatgatgatgatgatgatgaagatgatgaggatgagtttcgtagcgagcttccattaagagcagagatcttgttctatccaatgacgacgcctacttcgttcgttgtctccgatgctctagagcccgatttccccattatttacgttaataaggtttttgagatcttcaccggttaccgcgccgacgaggtcctaggtcgaaactggtaataattctttctcttgctttattgttcttttcctgtttgatttaagagaaaattgaattcttgtttgtttgcgacctagaaagtgttttttttgctgttaatacttttaatgattgcaactctgttatagatcttagtaccattttgggactgaaaagaatgcctttacttgggattaatctaaatctcgtttgctatgattttaaatgtttttgagatttttggtttctgtttggttaaaacaatgtaagttatgaatttggataatgttacattaagaaaattagcattttctctaaataatggtattagttatttgttagtatttttcttagcctaccataaaatttatgtgaagtcatttaggactaaaggttatgaaagaaatgaatgagaaatagaattttcctagtgaagagttcataacggtatttagagaatatgctatttttcttagtgtaagagataagctagtgtatttggttctccaacatgtggagaagaaaaggtttaggggtcttgaagatatggctaagggggaggaaaagaaataaactaaaaaaattaagaagaagacaaaattggtgtcgtgaagctaagaaattaaaagtttccatttttatctacttttgaacttttgtatgtacatttgtattaatggggcaattccttaagtttcgtttctctgtgaaaagggagtaagagtttgagaagtttccgttgccatcacccatcagacattcgaaaatgatcagtgaaattgtttgaaggtcagaaaaggtgccatataaacctgtaacttactaactagctattcttttattttcacaatttttcaacagagaaccttgtgaagaaaaagaagcagtctgtttttttctttgtttgttttgaattggacaaaaacttttgttttaatttgaattggacaaaatacctttagttttagtttaacttgttggagatgaccatgataacagttttataatctaatgaaatgcttttcacttctgtactctgaggaatcctattgccgtacgtatcaaaccaatactctctctctctctctc

SEQ ID NO: 41614 - DNA, 2093 bp, Cannabis sativa
tatttatatacagagttaggagactaaatatctactaaatatctactaaatatctactaaatatctaactctcttacagctaatatacatctaatatctaacaaggcataaggctacacaataagaataaacagttcacaaaacatcatataacaacacataattccatatcaaagtcataaaatataagtcttaaaatcatagctagtataaggttcaaaataaaaattcttgagaaagatggaaggactgccttaaggagatggactggttgtgtgtgattaaagagaagagagaggatgagacctagttgtgttgctacatgtgtgactgaagaggaggaaagcttgctgtattgttgtgtgtgtgtgcagagaagaaaaggggagagatgatgtgctgctatgtgcgtgaagagaaggggagagaggaagagactattgtgaaagagatagggaaaatgaggagtctttttagggtttttcctcatttagtattatgctttcaacactgttaaaattaaacttaaaatagccccaaaaaattgaaaaaagggccactcaaactctcaaaaacaggcccaaaatactctagctgaggtgtaagcttcaaacgcctcaaaggcttaagcctcaaggcctgcgcctcatgactccgaggcgtaagcctcacgaacagtgactgaggtcagaggctttttttgagcacctcgaggtgtaaacctcaaacgccttttaaaacacgggtaacatgattattactactaattacattcgatttcaattgtaatatagctttccaacgcaacttaagtatacattggaccaaccatttagtatacaatggacaaactttagtataaattaaacttgatcagttatcgctcttttaaatcattgagttaacaaaagtcaccaagtatttatcgattaggacacaaatatttatctatgaagtaattataaggttttatcgacaatttatcagtcttttttgtcaacatggagcatttatgaatatctggcaaagcactactaaacatatacctaatatttgtaacataaaagtcacttgaacaatctcctacaaaatataatagattatacatatgcatgcatgatatgtatattttgcagaaaatgccgattgacaaaagttggatgaatgggaagaatcgtctatcaagagagtatagaacaggggtcaaagagtttgttgaacatgcaaagcctcatgtcaatcatgaaggacagatgagatgtccatgcatgaaatgcctcaatcaaaaatttcagattccaagagcagttgaaatgcatttatttcagaatggtatccaatcgtcctacacagtgtggtcatttcacggagagtcattccataatcctcttgttgattattcaggagatgaagatgacaacaatgaggatgatgagatggctggtatgttgatagatttagctaggcatggtggacacaatcaaggatcatgtggagataatcgtggatcgggtggcgataattgtggatcaggtggagaccagagtaccactaggaagaggaaaaccagagcagagtccagaagtgtggttgttgagaagatgcttcggaagcaaaagactgacaagttgatagtcaagtttgatcctcacacagggaagagtttggaaaagagtgggaagacattcaacaatatgattgcccaattagttagaagcacattttcaccacggtttacacgctgggaagatgtacctaaaactgatattgagacagtatattctcggctggatgtaagttttcccaatactttttatttttattcattttaatatagctaatatatcaacttactgtacacatattttaatctatatttttttatagctaaagtttgtttatccacacgacgataaaattgtcatggatgaaatcgagaggttgcaaatgaaggcttttcgagaatggaggtatgagatgaaatgtttttggaaaaagttaggaggagaggagaatgctgaagccccaaagagcactccatacaagcgaattgctcctgaagattggaacattctctgcgatttttttagttc

SEQ ID NO: 41615 - DNA, 1912 bp, Cannabis sativa
  modified_base (1855)..(1872): a, c, t, g, unknown or other
gagttagtagcgtccttagcatcatgaggctttagcacctttttctttcctttgtcagctcctaatccgcacttgttatttttcaaacaggcttcgacaggttccagtcttccctgttcaaaacaataaagatattagttagatttgatagtctgtgcaaccttgtccatgaaacaatcagtccaactgcccctcttcataagctcaagcctgccagcttagggtctatggtactctaggctgtttttatgtgacaaggcaaataaattgaagtttattaagaggactttggaaaatggcttgaatccatcaattttttgtttttatgtggctataatttgtccatattttattctcattattgatgactttgtgccataaatagtagtttcagtccactcaaattacttcaatatgtaatttaatgacttatcatgttgtgaatttgcttatgacagatacagattcactttcctatacaatcaatgcaagtacaacagtgttcaaaatataaaaaggatggagagtagtacagggaatgaagaaaaagagagaaacagaataaaaaattacaataaataatcagcatttaaaggacatagttctaatcatatttccttattatagtaattttgttccgttttggcaattacatgtcagttttggggattttttagttcatagtgtataaaatgatttaaacccagataaaattgagaagaacaacagcctatttgtgcggttatgccaagatgtttacaccacaaataactaaacaacattaaaagaaaaatttgaaagaaaaaaactaattgtatgaatgcaggtaaaaagaaaatcatgataagatttctcctacaacatcatacaaacaagagagaagaattaagaaatgatatatcgctcacctgctcagaaatcccaagaccagttccttctttccagccatgtttctttaaaagctacaaaatattagaacccataactaagcgaaagataaaatcaaaatagacagaaaattcaacaagtcaaatttaacaaaatttagtgggaaaaaagataccttaaaaccaatattggagggatcaattgcccctgatgaaccactactgtaagcctccgagtctttaatcatggtacctcctaaccagaataagatcataattatttccaatgaaaaattgtaaaacaaaacaattcaattttgcaaatatgaaccctccctccctccccttccttttacgaacactcaattaggttcttctcaagcagcttgactacataatttggactagtttcaaatcatgcataaacataacgtgaaagaaatcaattaatcctgaatttcaaaacaagaaaaacaaaataattcataaacttggaagcgaatatatacttttctacagccaatgaattttaattttattacaaagtttgcgaaaacaaagataatctttgatatttatttgacaaatgaactctgtcaataaaaaaaaaatgcgaaaagtgaacatagatttcaaattcacttacaacaatttaggctcagaattacagttctaaaatttatagtcaaagtgtgggtgtttgtattaacatagcatacctgatagggatgaaccgcaaagtgcgtaggctggaggttccaattgttgcggcggaagagatagaatttagggcttctgagtgaatttgagaaagaaaagaaaagctttgccggcggaggcactgcctgtattatggtttacgtgatcatggaattggaatcggtaatgaaactccttcaacttatacatttaacctttttttttttttaacaaaaagtttaccatttttttttggtaaataccatttnnnnnnnnnnnnnnnnnnaaagttactaattggaccctgtgttttgttaaatgaaaaa

SEQ ID NO: 41616 - DNA, 1244 bp, Cannabis sativa
cgactcccagaaccttcaaatggacgaatactgctaagtcaaagaaaagcgtaggaaccgtgatcacaagcctgcgggaaggaaactccttcgatcttaaagtgaacctggataatcactttgttgttatagaaaaagactctatagttaacaaaggatgtagaatcacggaaatcctggaggaaaaaccaagtggtcaacaatcccaacaggggcttgatggaatggatttttgctttggggctatggagacttgccctcaaaagtctctacagtctccatgaagattttggcctggaactgttgtggactcgggaaccccacgacagttcggcaattggcggcacttgtttgtcaataccaacccgagatgcttcttttattagaagcccgcataaccgcaaccagatttcaagcagttagtaagcgtttgaaattcgaaaataatcactacgtctcgcccgtagggctctctgggggaatcgggctttgttggatgaaatgggttctatgcaacatcactaatgcaaacaaatttgtcattgaaggggacataacctcagaccccccaggtgtcaaatgacattttcaaggaatgtatggcccccctcatggaagagatgaggaagatcattggctaagcataggggaaacgattactgcctctcaaattccaacgctgatcctaggagacttgaatggcactctgtgtgactcggaataccgcaactactcaaaaaaaaaggcagttattctcgttacgcttttgatctcagcagaatggtaagtcgtgtaggagtggtggacctggggtaccacgaccctcctttcacttggacaaaaagtaatattcaatcccaacaggggaggcttataaaagaggctcgattggaccgtagcttagccactaccgattggcgtattttgttccctagtgcagtggttaatcatctatctgccacggtatcggatcataggccgatcttgcttgacactgctgttggagttaactgcaagggtcgcctatttaaatacgaaaacatgtgggcaagagaccaacgctgcttctgggtggtgagagaagcgtgggctaaaagactacatcaaaattcgatgaccaatttccatagaaaggtgaagcaaacatgcaggaaactgagttggtggaacaaaacacaatttaagaaactgagccttcaagttgcagaagccacttcagtcctggaacaagtggaaaccaacca

SEQ ID NO: 41617 - DNA, 5421 bp, Cannabis sativa
gaaacattcagataataacagtgatcagaaaaatatatttaaatatctagggttctatttgaggtaaatgttagagcaaatcattacagcaagtatttaacagtaactaatttactttcatcaaatgcagaatcatgcaaaattacccatctgatagtgccataattttttaataaacctgagaaactaaaatgttccacagagatgaaaaagataaacatcgcagatgcatttgctataggcagaaacagattaattatttaaactgtaattacattgttctttaatctgtacctgttgaagagcagtgaaatgatttccatccttgaatcgagggtgaaaaacatcaccatagttgttattagccatcataggagatgcagatgaagattgtatatagtgtccaggatcattgttagacaccccgtaagctccataggcgtcaggaggagcacctgcaggaaatctgttccctgatgctccatgatctggaaggctgtacttcagatcagccagagattgctggaactcatcaccacctccgtatgcagatcggaaagttgaaggcaaatgcgacgaataactctgaggtaagccagaatagcccattaagttgttggagggttgttccacgggaaggtaatttggcacccgttgttgaggtagtacagaagatagcacagatgatggaatggtgttgctcagtggattcctatactgttatatcaacatataataactcaatccaaaagatcacaaaataaacttgcataaatctatcattggaaggggaaaaatcactgaaggacatcacatttaatatatgtcagtgagaccaccacacaacatgtaaaatcaaaatcataattataagaaaatttaaatcttgttagacattccaaaaaaaataacaagtacgtatgaatgtggtcgtgtaacatattaatccttaataatctgaaaaatgaaataagtaaatattgagtaactaaaactagagcattggttaagaataatgatccaagttttttccaattgcaagctatagacactgttctttatggcttaccaactaatatatgtaccaatttggtaaatacttcttgagcatgaaactacataaatcacttcacatcatagtcaatcacaaaataccactcctaactcacctctgaaaaggggatgtttggattgcctatggatgggactacattgctgtgcctggaaggtaaagattgtgttgcatggaactgcccttggagattatcaggagcttgtaataattgcaactgttgcactaggtcatctagtgtgcttttcggcattgtctgcttaaaaaataaaatccaataaaggtttcaagatactattaaaatgttcaaatcacagtaccaaaaaaaaagccacttgactacttgagtatgtcataacatatataaaacacgttcacctacattagattatatagtgatgaaaacatgattatctttaatatgagtatatgggtaaaacaaaaacaaatcattatcactggcaaaaaagggaaattattaaaagaagaaaagtacacaatgcactcaagatacaaatcaacaaacagctgttcgtatcaaatctagtaatacaaaagagatctttaattcaaattgttttggtaaatgcattcaatcttgtatggcaaaggcaaccacttatcaataagttaagacgaaccattaatgattagcaaatgcaaattgtaaagcatactcacagaaatatttctagcatttgcattaactccaagagacaactcaggagttgattgtttaatggcattgtaatctttcaaagaagggtagatgaattcagtttcacttccacgggttgattgtttaatggcattgtaatctttcaaagaagggtagatgaattcagtttcacttccatgggttgctctagagacatctcgcttcgtcagttctgactgtaaatcacaacttataacatctgcaatttctctatgcttattatacaaggatccaattgagtcattagcattatattctgtatccctgtgtaatgaacaaaaggaaaaaaaatcagaaaaaaaaaattaactgatgaagaaatatatattaaaagcaaataaaatccctcatactttgtctctaagtgaccagcgggtaaaccatccaacattgtagaggcttcttggagatcaccatttaactcattagatggtaataacccagtcgatgaagaacattttcctgatttaaatgtaccaaaactcaaatgtgagcaatcagccgagaacgctttcaaatgactggggaggatcaaattattttctgagtcctcctttcctaaactgaggtgttgaaacttcgcaacatcattatcagccaaagcatcagatgatgactttgaactgctgcctatttctgtcaattcagaatgagaaactccagcagaagactcaacatctttctgcctactggaagcgttagcagacacaatgtcgtctgaattgagatcagcatcatgttcctctgatgctaggatattttctaagccactgctcctagatagttcagactcattaccatataagttggattgagtaaaatacttgtcagaatctgggacagcagacgaatctaattttgataacaaactaggagctgttgattgctcttctagaaaagcattctggctaccagtagtgcgtgaattgttgatcataacattcgaagaattttgaggatgcagatcatggtgcaattctgtttgggtttttgttgacgcttgggagggtttttcatagtaatgatctaagtttgttgtagctgcatcctgatgtgtgtaagaggtactctcaaatggaacatgtgaatgttttgaggaaggtctacccagcctgacaacatcagccatagaaagatgtagagcacttgtccctgaccacgcaggctgttgtgcaggagtgggttccagagtgtgggagatgccatcacctgttcctattgactgtcctctactatcagtatttaaagaatcactgcagcagatattaaaaaattactcaaacatagaaactttgccaattagagagcaatcaaataaacatacatatattaagaggtgctttgttacttctaaaaaaataatattaaaaataattacttttagtacaacatattatctagtaccacagtcttgaaaagaaaaaaaatagcatgcagtggtcaagtgaagacttatgaagatgtggttctgttgctcaaagttaatatcctttcgatttatcttaaataaaaccatgtgccatactcaaagcaatagtgttattcatcctacttatctatacctacacttccacagtgagtccataaaataactgatcagtgtattgtacttttgctaaatgaatgaaccaccattgaaatattcctagttccatcattatccacttgaaccacaagtaaaaacaaaaaatctaagacactttctcaacacattgctcagtatacattgtgacttcaaaataaaggaaccatagacaagaatttcattgaagaacgttgcaaccaacctgttaaatgaaggttgatggtttacagtttctcctttcgcattaggagtcaaataagacgatgatggagcaactgacacattatctcctttgagtgcaacactaccttctaacaaataaaattccacaaagaaaattaagaattatataaggagatagaataagtaagaatatgtataactgtgatattaagcaatgtgctaaagataccctcataattggcttgtgatgatccactccatccgctacgttcgttagcagttctagtaccacgagttgaacctaaatacgcaaatcgtggccttaaatcttgtgtctccttcatctaaaaatatttaacacagagaaaaacaaaatcatcagtataaacattacaagtaataagatgtacactctatattaaaccaattatcaatctaattcagccagaactaggaatacttcccaaagaaaaaccagtgtagcactttataagtccaaacatgataaagaaaagaagaaaaagaaaactgaactaaacgtgttttcatattgtacctcttttcttctttcacgtttgctcttcacttcgtgaaaagtatctacacaattgaagttactagttcaattgaaaataaaattcaaacacttcaagaatgactagagtatgaaaaatcttcaagaatccttaatacattgttttaacaatacacaaaattcaagacaaataaaatcaaagaacttatcaatatatccttgcctacttttggttatagcctcaaaaacaaaacaacattcaattattgagaacaaacaaaaatctcaactcaaccatttccccctaaaaaaactatctttaagtgtaaacaaaccctcacctctaaaagtataacattttataaactatacttatagaattaaaaaaaatataaaaaataaaaatcccaccacattcaatattttctcttatcttcttcaactttttccattcaaccaaacacagataagaaggaaacccttaaacaaaagataagcatgaaaaagacagcaaagataacaaagaaaccttgagaaagtaatcgctgaaccgtgtcatccgggtccatattacaatctagaagaacggcgtagatctctgcttcggaaatgttagtgacaatctccttaagattcttaataatcttctttatggccggcgacacctcgcctaatccggttccgttcttgctctcactgtcactacccatccccaactctttctctttactacttctcttcttcttccccttctactcaaaattcaaagaaagcaaagaaatgtttttccctcactttctcgctccggaaaacactccaacactctttgcggctctcactccaaattttcccgatcaaccaaacaccacagaaaaccctttcgttctatgctgctctttctctttttttctctctctataaatatatatatatatttatttataaatttagaacacgataattaattgtaataaccccttttttctctctgtctgtctctctctccagatctttatttttaattatttaaatataattataataataaaaattattttcccgaatttttttattaaattgtaaagtcatagatgcctgctaatcttactgccagtcatgtaattctaccacagctaacttaatcgtgtgccacgtgtaataaggatttcaagttgtcaatttgacggtttgatatgggtcgatcgtggatgcgagattcgcccgtgaggttaggacaataatcgtggtctatttgggttgagtgagtgggtctcgtttagttatagtttttaatcagatagttaattagctaggtttaaatttaaggg

SEQ ID NO: 41618 - DNA, 1609 bp, Cannabis sativa
aggaatgacattggttttaacaagataaatgagaaagttgggaggaattatgttgaagatgacagtaaggagattatgccaaagcatggtaaacaaactaagagaactaatgattttggtaaaaaagtagatgacaataatttgagtatggaaagagctgcgttcaggaatcttgatgaatttggtgacatcatggaaaatccccgacttccacgaaatgtaatggaggagaggattcagaagctggcaaattcgtaagaaaatttaaaccttctttgccctttaatgtaaatattggaacaattgttttttgatagcttatgtatctttgcatgtctttctagtaacagcctaaaataaaatgataaacaataaaaaaagagcatccaaaagcctactgtactagaaaattgaagtactgatacgaaatggtctctattcaaattttatggattcagtagcagttcgaaaggttatttggtcttactcttcacttgcagaaaaaatcccaagaccaacctttttggttgaatgagagctatgttgtttaattaaggaactgaaaatcatttgctaaatgcaacaatggttatgttgaaatttttatgtttattttacgcattgttgttagtccaatacatatgtacatgtaaagtatgcaggacttagaaatcccctcaacattgaagaatacatcaccataatctttagaaatttctgcattaaaaatgagtgacattgagattacaaaattaggatatccttttagtgttctaatagagaacattagttctttttatgtttattcgtagccacccttctcttcctaggaaagcaccaatgataacccattcaataggtacccagaaggaaacacacggtttgttattttgtgaataaattttgcatctacgaagatgttttcagaaggatgttatgaaatttatatggtatttcctcacttagaactacttgggaatatttgtttgcataaatgatttgtctaagatatttcttggctagcttcttgtcgtgatttaattcttttatctttgtcatctcttcatttttagcactttattttatcaggctgaatggtgcagacgttgacatgcccgaatggatgttttcgaagatgatgcgtagtgcaaggattagattcacagatcattctatcttaagggttattcagatcttgggaaagtttggaaattggagacgagtgctacaagtcattgagtggcttcaaattcgtgaacgcttcaaatctcataaaacaaggtatttctttccctactattggtctctgattttaatgaacttcacagcaaaattagaaatgtaacattggaaattttacaaatgccaaacaaatttgagtttcagttagattatttggcaacccatctgattttctttaggagttgattagtttgttcttccctggtaaaagtctcataaaccagaagaatcattaatatatataagggattgccttcaaaccttcaaattgtaactagcagcctcaggttgtgaagatgggacacagttacacttgacctgtactgaacattgatattatccctaattataagcagcaaaataatgg

SEQ ID NO: 41619 - DNA, 1845 bp, Cannabis sativa
aagactgttttttaatgaaataaagtaaaataaaaataaaaataacaataataaaaataatatactattaattagaagttgaagaagaagaagaatgagagaagtcatatggtatagtccaaaaaaacattcatcaatgagtttgtcattatagtgtttgtgcatgttttactaattttctcactgtcaataggttattttataaccacacatatgagtggtcggcaatacttgtttataatcataactcaaagtgaagtagagtgagagagaagaactgaagagattgtccccttttttcttttttctttttttcttttttcttttaggggggcttggctatgctgagacaagaataaattggaagaaaattaaaagttatggcctctaatcaacctagggtgacaaatatcaacttcataataataagaataataatattaataatttgtagtaatgaatgtttgtattttaattaatcacatattaacgtgtcaactttgtactcatagataataattaatatatgtatatccatatagttttacatgacaaaactaatagtaatatgattataataatgacctctagaaaaaaaaaattatgtttctatattttgtagtgttggaaattgaagagtgatgatcacactagtgataaaagagtaatagtgttgatatgtgtacggattttcaagtttgtcatgtgagttgggtatgacttgtaaggctaactagggaaagattaaaagaaagaagaagaagtgatgttagcctgttaggtttatctaatatctgccaattgctatcgcttcccttttacttcaccaatattttttgtctttgacttacctatcaacctcttctaattaagtcctaacaaaaacaagagagatatccaattatggtacacaaccaatgcttctaagactgaattttcactatcgaatttctattctttttttttaatttttgaaaacagtttagccaaactcaccactaaacaaaccacaaagaatatattcttgcaccctttttttttagttttaaatttcaagtaaagaaaaagagtatcttctcttccatagccgttaaagagaagggtatcaatcaacaaataaaaaaaataaagccttggaagcataatattttttctttatgagatttgaataggtatacgggtactacggctctgccttaatatattctctatttgtttatttatttaggtatctgcagtttctgcatggtatgaagtaaaacattctatcttttctaatggggtatgtatgactactaattaattcctcaagttactaatcatagcacaaaacaaagcatgttccgatgcagcactgtcctcctaatcattttgtttatcctactctactctaatacaagtgaaataaatgcttgtgaagtaaagtttgggcatatactttattgcatgcatctaatcacttttcatttatcatatataataataataataagataatatgtttttttaaaaataaaataaattcttctttaccaaagatatctaatcactagatatgattagaacttgtatttattacttgaacaaagtaggaaaagaaaaaatctctactatgttttgttttctctttttgctgccattattccaacctaacgtatttaactaatacatggaaaagatctcagatacattatccaaaatcagtggccctagaaagttccaacctttccgaaatgaatgcattcaacctatcaaataagaataatatattgcacggtgatacaattcccacaacttcatacaaatcaaagcaccaccagatcagacattttaggtaaatcttaa

SEQ ID NO: 41620 - DNA, 1936 bp, Cannabis sativa
atataggcaaagaggaaacctttatcctttcaaagcccacattttgataatcaacttcttcattctccgagcccactatttgggcgtggcgaacttgatcaaacacatgagagcttggataagttgatccaatcttgtaagccaatagaaagctttcttgagttcaagaacccttcccagcaacctctatcgggttctatggaaagtgcaaatgcagtggatgattatgaagctccagaaatagacgataaaggagatgataacgatattagctctttagaacagtattttgttcctttaaatttgatagagagatggggaagtgctatgggtatccttattcttctttatgatggataatactttgtagtgctaattttcaatgaatacttctgtgcaagacctctttatacacgcatacagtatgttgcgaaattcttaactatgattagatattgtctatcctgattcgcagcgctgttgttgctttacaaaaagttattatcggtatgttaaaggtactggctcccttttagcaactgtcctggtaagatttcattccagtcaattaatagaattatgtctgaatttccacagttcagtaattcatcttttactaactcatacttactgaattcatgtcattgtttacattttccattcatttacatgataatggttttgcagcctgagaaaaaaggtaaaacatctccattgaaggaacaaggtctaagatattttacccctagggaggtatattcatacatagaatctctcaccttttcagattcatttgtttgtctcttgttttcttttcaatcaagttttggtcaaaccattctctgtttctttcccggacatatcaggttgctaatttgcattcttttcctgaagatttccactttccgcaacacataagccttagacaacggtttgtcctttataactaattgctccttcatccaaacattttttgtttgtttcagtaatcaaaacatatactaatttgttgttctccatgtttcagttatgcattgcttggtaacggtttaagcatagcagtggtgtctcctctactgcaatatttatttgctgaatcgtcatgattatcggttacatgcctttcgccttttagtgggcttaaaccgaatctcagcttctctaccatggcgtgagtcttctctcgattgaaatcaaagagccaaagggcatctaacttgtactcaaggtcaattttcgatggatttattgaggtgcaaggcactatactcctatcacccgaaaactgtagctgtggaacagagatgaacttgagatgttttgtgggactctctaacagtagtgaaataagtagccagatgtaatttagaagcagcttaagcagagagatttcactctggcctccaagttgcattttgttgctctattagcctttcttttataggagtgaaagactttgcattttaagtataaaacttctcctacatcttttacatttttcagcaagttgtgcttgtctcacatctatatattctaacaagttgtctatgtcccaggtataccaagttgaatgctatatttgtaattagtatttagtacataaaaaagaagaggaaaatccaaaatttatggctttttatataatattttttgggaaaattgaggaaaaagtaaaaaaaaaaaaatatgagaaaatcagataacagtaatcaggtatcataagagggtaaccagattactttatgtgtttttatgtgttttttttttttttcatattttttaatttttttaaaaatttttctcatagaataatttttgtttgtaaactatacttcaaaaaccatataaatgaaaattccctaaaaagaatactttacagtttacacaaaatatctaaaatcatttttttttagaaagtcggccctctaatcttact

SEQ ID NO: 41621 - DNA, 1632 bp, Cannabis sativa
taagtaatttatggtagcagttaattagatgacactttaaatttgctaacagttcggtaatttaaaaaattttactatcaaaatttgagctttggagaattaagtacaagtaaaacaatacttagtaagatttaaccacaaaaacttttttttcttatatatttttaaatgtcttttcatagtagattaggataacacatgatgtggggttagaagtaccatttctctttttaactcattgccacttttgttttcttctttattgtaaggaatgttgcaccttcataagtttctagaaactattttattatttttatcaaaaaagaaaagaaactattttattattattattactactacaactcattgatacgtgtggaaattggtatatagtgtactacttcatcttcatctacccttttatttatttttttaatttttccttgatttttctatgagtagtgtgtttgttttttaggtggccatgaacatacccaatttatataaatatatatagaaaagtaattatattttttgtcacaaacatatgttgagtgggagtttcactagttattaatgtgttaaactttatgtagtttatttagaaggaaaaacaataataataattatagatatgatactataattagtatgattacatgatctacatcttatgctatggtatctcagtacaagatttgcttcccatcaaagctaattatatatgtacatatatttatatttatatatatttaaaaaatgggattcatatcaacttgctctaaaggccctactattcaccactaatcttgatcatcatcaatttaatcaatcaaactcaatatatatatatatatatatatatataaacccatcatatgcacctttgtcccttttgtacttgaaaaatataaaataaaaattaatcttgttattaattaattcttaattatcattattatcacacataccctttggtaaataattagtgcaacagaatcttacaaattaatattttaatcagcctccacatgagtgcagatttttttaccaattaattaatgtatttatagttcacgctcttaagcactatctaatctatctattgagctatgcaagttaagtaaacatatataggtagtactttgttctatgctataaatgtagttaattattgttattgtgtatcagtggtgtctagtacttctagacatgttgtcttgcaattgactagcaatacttcttaaaaattattacattaaattatataagatctgatacttaattggaccaatagcgatattaacacctaaaaaaatgctaaatactactaataccttttagcattttttattagctaaggtgtcgtttggtaacacttttatttttaattttttaatcacataatgaaagtaaaatttttgtttttaaaaattttgttcttgaaaaataaaaatacgttctgtaaccacttttgtttttcaattttaataaaaacagaaaataaaaatgtgttttattttgacaaagcatgcccttcgattagacgatgagttatccatgttcaaagaggttcttgcgctgtttgcaggtgtttgcatcgaatatttatgaatttctgatcactatgtc

SEQ ID NO: 41622 - DNA, 1114 bp, Cannabis sativa
atgagtgattttaatcactttgtcaaaaaaaaaaaaaaaaacttcttacttcatttcatttgtcttcttattcaaattgttgctaaaacaccttcatttttccaaatatggattcctcatatcaattatttttccccaatgaactaatgcaagtgatacatggtaataattgtttcaccaatatggcacgtagaagtacccagaaaagactcgaacctcgctcttcgtgggagcaaaacaaaaccacatgtctgattgtttgagctactcctttcagtctcaaatcaggattgcttttgtctagatattcgggtcgcagcaagctcgaattaaagcattgtgaaaacatcaggcttaagacccttagcctgaagttcttcataaacactcactgtttcatccaccattcccgcgatcccgagattgagtattagtttgttatatgtacaaagatcaggaaaaatttctctactctgcatttcaagtgcctcaatcaatagttcataacaaaccgactcaacatacacattaaatcatcaaagtctaaattaaccttatcattcaatcaaacaatacaccatcatgagacataaccgattgtgtacatttcacattcaaattcttagggaaacttacaaaaatactggaatttgagttaacttttacaaaaatactgtcacacggaaatgttttcaaaaatactgtgtttttataaaacactagtagaacacagaacagaacaactcaaaacaacagtagaacaactgtaaaacactagtagaacactagtgaaaacttaacacaatatactgcaatatgaaagttataaaaaaaacacagtaaaaaagtaaaaaataccacctggcagtatttttgtaaaaaaatggcaaaagttagtatatcatgtaaatttcccaattcttataattaactacaaccgatatttcaatcaatttgtggacttggccttctttcattaaaccaacaagtaatgtgttgagggaatgagtttcatacctctcaatctgtaaatcatccctcttcttccactttcttcaatacacagaaagcctcatcaatttccccaccccttccaagagctctaatgcatatg

SEQ ID NO: 41623 - DNA, 1384 bp, Cannabis sativa
  modified_base (57)..(61): a, c, t, g, unknown or other
ttattccattccattcctattcatattcccatttccattcctattcctatattttcnnnnntcccaaccaaacgcctcctaaaagaaattagacattgagagaaaaaattggcagtagtatcacaaacaacaacaccacagagataacattttccaacctcattaccaaaaatgatgctcaacctgaactcgaaaggaaggcagtctctgcaaatcttccaaaggaagagtttcaatctttcatgtaagggggagttccagagataagtgaaagttttagagttggaaaaagcaggacgaagaagatccatataggcagctttaagtgaaaaggttcctgaagaggtggatttccacaccaaagagtcattctcatgcagctcaaatagattgcattccatcatagttttgacagtggcaggcttgaacaatctatcaatctgttcaccatcccaggactcaccaatgcctgatctgaggtgttacatgcaagggtactgggactaattagtaattattagtattgtctagttagtataaatatgtaatactattacacaaatgggtagaaataaaaaaacaactaaaaacaagcacaaatataaaagataaaaactaattagagcccaaatattcttttaatattcagcccatttctttctaatttcctactaaattctcagcccaagtccaagcccaagattcatagggcaaagagagtctcatgtcactaatgatgcactgctcttctacttctccttcgtcttcttcttctgtgtttttttttttttttgaaaacaacaaccactatttttggagtcgtgacctccatgtattctcagcaaattgaagcttcatccacactctaaaccatatatatttgcagaacttaacccattaaagatgtatatatgtatatatatatatcttttgcaaaccagtgatattgaaggccaagtcaatgccctttgctccgatggttctctgcgatccgacgtgaccaagcttcttgttgtctgccagtgaccttttcgctccgttcatctacgtcaaagttcgttcgtcgtcttcgatccaagatccattgacgtccccgatcaaagatcctcctccgatctttcagcggcgtgtgaatcaattcccatggtgaatcacctttaacaccaaacacaatctcacgtagctccattttacgatccgcaaacactccactagcatcaccttcttctatgtacacgcaagatgatcggattgcccgagcaagagctggcgaaattcttgaatccccaatctccattcgagcagagagcttttcctctacctccggcgaactgcgattcaactttggttgtgctttgctgccatctcggatgagatccatatc

SEQ ID NO: 41624 - DNA, 733 bp, Cannabis sativa
gctatttataaacataactatacaactgaaccaagagcaagattagttacaacagtttcttgtaacagacttaactaactgtcaaagttagttaaaggagattaagctagctgtaagcaagttttggaggatcaacatccacattacttttaataagtgagatctatcttaaataaagataattagtaaaaattgtttgttataattaagttcatgcattttaatagtgtgtatcattttctattttttattttttttataaaggttttgtttaaaaagagtgaagacatagaaagaaaaatggatgggttcatagaaatatattttataaatgggtaaatagtggcataagtacccaacgttttatgtttgtaagcggcataaacccaatgtttgcaaaactgtaatttttctctaattttgtcagtacagactttgatattgtcttaaacagggcacatataaggcctaaattttttatcatcgggtctagatagaaatatatagtcagttacttccgaatgttcttttaataaattcaaagcagggtctgtacggacaaaactggaagaaaattatagtttaacaaatattaggtatttatgccgctaaaaataaacataaggtttatgctgcttagagcatcaccaaggaggcatcaaatttggtgatgcagtagaataagccctccaacgtagctgcaaatatgacactaaattgctgtgtgtgctac

SEQ ID NO: 41625 - DNA, 1358 bp, Cannabis sativa
gacaaaaatttaataaacaaagaatcattccaaagtagcagttagcccccacccagaccaacacgattaacatagtgaaaattagaaaaattcaaccttcttgcagcacaagaagcctgtttcaggttgagcttattagtttcgatcgaaaacactaaattcggattgtattgaacaacatgaaacttgagagtattgaatgtctaggaatcaggaccggccttgaggataggcaagctaggcgtgcgccttgggcccccaaacgctcaaggccccaaaattgtagaaaaaaaaacattattaatatataaataaaaaaatatataacaaatattattttgtgtaatggtaaaggatcttatttaagccaagaggtcaagggatcaatccttaacttctacttttttatttttttttaaaaaaatatttaatgtgcagctataaaggattgaagctttgatctctaagagttcttaataactttaccattacactaaagcatttgaactatgattttgataataattaaactatatagggcccaaaatttgattttgccttgagtctcatataatttaggactagccctgctagaaactccccattccctagacattctagcttagaataatcattattcttggtgactttacatcgcaaagctcttcgctttatcaatttcagacgaaaaagagtcgagaatgacctttactttctaaatcttgaaaattcaattccttaattttaaaattaatttaagaaatattataaaataaaataaatatccaaaatcccaaaattatggtaacaaatattataaaattttaacaattaattttctctccatacattgattcaattttacttgtagtaccaaacaacatttaaaaaaaaaaggttataaacttttcattcatcctattctatctcgtttctacaaaacatatccttaattactattacatttactctgtttctttctaatacaaaaaattgtttcttttgactatggtcaaaagtcatccttattagatttttatttctcaaaacaacaatgtgataagcatattgaaaaacttattctagtttttttaacatacatcatcaacacataacatcaagttgaaatggccgagttggtctaaggcgccagattaaggttctggtccgaaagggcgtgggttcaaatcccactttcaacacatttcttttcttttttttatttccattcgcgcctttttttttttctttttttcttttttcctttcaatagaataaatttgcagaggaatggagaagaagcttgcaaaacaagactataaaatggctcaagcggcgaggctcaacctccgaatgca

SEQ ID NO: 41626 - DNA, 4096 bp, Cannabis sativa
ctaataccccccctcaagttacactcgggcattgaagtgttaacttgtccctaaaatacacaaactggtttgcagccaaaggttttgtaaggacatctgctatctgataattggtgtcaacatatcgcacttccagcttattctctagtactttgtcacgaacaaaatgaaggtctatctctatatgcttcgtacgagcgtgatagaccgggttggaagcaagagagccagctccaaggttgtcacaccagagtataggacattgagggactgtgatggagagttcatgcagaagggattggatccatatgatttctgatgtagcaagagcaaaggctctatattcggatttcgtgcttgatcgtgcaaccacggtttgctttttagagcaccaactgatcagatttgatcccaagtacacacaatatcccaaagtagactttctatcatcataggaacctgcccagtcagcatcggtgtaagcttgaagatcgagttgagaagcaggggaaaaacagaggcctagatgtgttgtaccagcaaggtatcgcaacacacgtttgcaagctccccaatgatctgaagtaggtgctttaaggaattgacttagtttattgacagcaaaggagatgtcgggtcttgtcatggtgaggtattgcaaagctccgatgacacttcgatattgttgaggattatcaagcagttttccagaattgatggacaattttgtcgtggcacacataggtgtggattgtggttttgcttccaacatgttggttcttgtaagaagatcccttgtgtacttgtgttgagtgagatagtaggtactgccctgtttaaatgcctcaaaaccgagaaaatagtgaatagaccccagctgttttaagtcaaatttctgatgtagttgatgtatgatgtattgaacctgttctttgttagcccctgtaattagaatgtcatcaacgtacacaagaatgagtataagatgtccattagtattgctgaaaaatagactagtatcagcctttgagttgcaaaaaccaagttgctgcagaaatgttttgagttgatcgaaccaggcccgaggagcttgtttgaggccatagatggccttgttgagtttgcaaacatagtttggcttatcttcgtcaataaatccttgaggttgggccatgtagacatcttccgtaagctggccattgagaaatgcattatttatatccacttgttgtatgtcccaattgtgttgagctgcaagtgtgaacacaatccgtatggtgcatggttttacaacagggctgtaagtctcaaagaaatccacaccaggagtttgttgaaatccacgagcaaccagtcgggcttttaatttgttgacagaaccatcagcgttgtacttaatccgaaacagccagttgttggtgatgatggtcatgtcaggatttggaggaactagaacccaagtcttctttcttttcaaagcagcaaattcattattcatcgccctgttccatttggggttggccaaagcttgtttaaccgatgtcggttctttgtcagtttgaagatctgccaggtacacttttggtttaacaattcccactttagaccttgttaccataggatgagtattgagaatggtagggagtaatgggggttaagatgttggtaaatggtgagagttgatactgggagagtttggggaaggtggtgtttgagatggaacaaacatggtattattgttgtgtgtagagtgaggattttgacttgtatgttcataagtggtgggatctgtagtgggaagtgggttgggaatttggtagtcattgtattgaatgacagtacctgtatgatgttgttgtggtgatgactttggaaaaagactcttgtaaggaaattcttcttcattgaatgtgacacttctagccacatagattctcccactaggatgaagacacctataccctttgtgtgtcatgctataccctataaataaacatttggatgatctaaaagagaccttgtgattttgatagggtcttagcaatggaaaacaagcacaaccaaatattttcatgaggttgtaatcgggggcagtgttaaataatttttcaaagggtgagaggtaatgatttactggtgttggaagccgatttattagataggaagctgaaacaaaggcttcccaccaaaattcaagaggcatctcagcttgagcaaggagagtgaggccaacatcaacaacatgtcgatgtttcctctcaacccgaccttgctgttggtgtgtgtggggacaggaatttctgagcattaaaccattagccaacaagtaatctttgaggggagaaaattctttacctaaatcagtttgtatggttttgattttggtggtgaattgtctctcaacaaaggcagaaaattgcttgaatattaatgaggattcagctttggttttcataggaaatatccaaacaaatttgctaaaatcatcaacaagacttaggtaatatttatatccatccatggaaacatgaaatgagggaccccacacatcaagatgaaccaattgaaagggtgctgtagttttattagctgtaggtttgaaagtaaactgatgcattttacctacttgacaagcatcacaaaaatttacatgtttacattgaacattaggagttacatgggctaaaactttggctaaaattggtttggatggatgtccaagcctacaatgccagatagaaacagacttggatttatctgcaacagggttgcttgtggttgaacagttgaatacagcaggggcattactgttcggattgggacttgactgaataggattttgaggcaggggagaggactttgagggctgcacttgtagcttgtaaaggccattattgagagtacccttgagaagtacttgcctcgttgtcttgtccttgataagacaacaaacatcattaaactcaagaatgacatgattatcttttgtgaattgggaaatgctaagcaaatttttggtaagacttgggacatgtaagatatcttttaaaatcaaaaattgattaggaatatttgaggatatggaattggaaccaatttgagaaatgggcatagaattaccatttccaacaacaactttggcctttcctttgtactccatttgattctgcaggttttgagagtcggttgtcatgtgatgtgtggcccccgtgtcaagaaaccaagctccagagatgtcacttgtagtgggagtttcagcaagatttgcttggggattgtctgaagtggattcattgttcgagttgcctgctggtgtggtgcctgtgaatgttatatcgaacctgtgataacatttttgtgctgtatgtccagcccttccacacagctgacaaatgggtctattgcctctgccccctctgttgcttgaatatcctcggccacctcttgaattggatctgtgaccacgaccattgtagccgcctctggtgttgtgattaaccgacatatttgcaagattggcttgcacattggagagagtttcagaggtgtgttgattgattcgaagttcatgactatgcagcataaattggacttcaggcagagtgagggggttttctcgagatgtcagatttacaatgacagcctcatattcttgacccaagcctcccaatatgtacaagatcagatcatcatctgttagttgttgtccagcagcagctaaggcatcagcatagcctttcatcttcaagaagtactcttcaatggatgatgatcctttcttggtagcttgaagaaggccacggatttgcagaattctggcacgggatcttgatgcaaagagttgagcaaatgtggtccatatctcagatgaagattgacagtgtatgatatggccaagcatttgttcagacacagaattcatcaaccaatgcatcaagaattgatcaaatctttgccattgaatgaattctggattagggagattaccttcgaggtgctggggaggaggagggatgtttccaaggatatatccttcaagattgtaagctctgactgctgctagaaccagagacctccagaaggtatagttggatct

SEQ ID NO: 41627 - DNA, 1462 bp, Cannabis sativa
aggtcttgggccaagtttggggtttggacttggttcgtgtttgggtcttggtttgaggtttaggttttagttcgacatctagtctaggttcaaagtccaaggctaggtctagttccgagacgggggttcgggttgaggtctggctgtttagggcttgcgtccaagttttgggttaggatttgggttcggagtttaggtttgtgtttggggccagagtctgagtttgggtctggaccgagggtcgagatctgggttggggttgaggtttagtttaggttcggggtttggggttgaggttcgaggtccggggttcaggttggggtttgaatttagggtttgaggtctaaggtctaggtttgggtgtggcgccaaatctaagtctagggtcgaaggtcttgggccaagtttggggttcgggtcctggttcgtgtctggggccagggtttgggtccctagggttggggtccgaaatacgacgctaagtccaagtccaagatccaaggccaagcctggtttcgagaatggggttcgagtctaggtccgatcgtttggggcctgggtttgggtcaaggttctatgtcgggttttgggtccggagtctgggttcagggtttgggttcgtgtttggggccaaggttaggattcggggttggggtctggactggggctgtggttcggtctagattcagaattcgggtctccggatcgggtgagggtctgagtctgaggtcgggttagggttcgaggtcgtggtccaggttcaaaggtctaggttggggtcagaatccaaaatactgattagaaaaaaaaaaaatattaaaagtgacctttttttttgtttcaaaaatttaaaattttgattatcaattaaaaaattgaaaagtgaaaacaactttatagaatatgatttctaaaaatattttcactttcgtaatttttaaaataaacaactgattaaaaaaatattaccaaacataacttaaaatactggtatattttagggttagaactttaaaaaaaattacctctctaatagtatgttaaatttgggatatgttaagatatagtattgtgccaaatttatgacaataagtaattaatgatgagctttaatccatgttttttaattacagtcttgccattaacaatttctttcaatgttttactattgatgatcattaattatattttactgtttgtcatattttgcattttaaaatacttttgtcgcaaatataattttactttatttttgaaatctagcacaatatttaaggttttcattggagatggtgttttatggttaaggattagggctgaacattagtcggtttggtcgattttttctatataaaaattaagaattcagtttttggtctgaattggtgcaattcgaaaatcgaccgaccaatccagaacctatattaaaactgttttgaaccacggtttggtcggtttaaac

SEQ ID NO: 41628 - DNA, 775 bp, Cannabis sativa
acatatttttgaaaaatattttcacttttccactttttaaaatagaaaactgattaaaaaagtgttactaaacgccacctgttttttgtttttttttttagaaacacttatgtgcccaaattatttttctgactgttaatatatctaaattattacatttataccacactaaaatatataagtaattctttatgtacttaagtatactcgtgtagtatcaaatctacttgtaatttagatacttttgctgtaaaaaataataatgtaaatatattttatttttgatagaataatgtaaatatttgagtgttacacatctaataaatttcagactttttcaaaaaaaagtgatgccaatttaataattttaatatttttgtcacttaaaaataatttgagtaattgacataatttaacttgaataatgataaaatcctaatatcaaattggtggcccaagaagtaattactatgtcggagctagggccaccaaacatttatagctaattggcattatatgaactttctccactcggccaacatttgcatattgtcctatcaagtatcaacttgcatggactttgggaccggagttgtactagtattgtttggcgttttgccttacaaaaatactcacttttagacaaatatttacaattttattgtcacacggcaaaaattatttttatattgtcttaagcttcttttttttcttttatactgtagacactgaatattaagaataatgcttccatcttccatacacacgcacagaa

SEQ ID NO: 41629 - DNA, 3910 bp, Cannabis sativa
ttatcaatcttcatttgcatactataaaaatgtccatcctcagaattctccttatatgctataaagattactccagataaaaagcaaataaaatggcatggactgaccatcacaatatgattaggttttctattcaaactacaataattccaacaattgaatgacaatgaaccaaataaaattgcctctatctttttctgacacaagcacaaaggaaacaaagccactgcctcctttttgcaacacatcataaggtgaaaggaggagcttgtgatcaacgtcatactagagatcatgtatgaatggaaaaatgtgaatgatcatcatcatcaccatccatgtagttcgttaatggtatgcggttataatttgagtactataatgacccaataaaactgcatgcaacaagtgaaatcataagcaattcttaccttttctaaacgctgaagaagtgcagttttaaattgacgaacaccacggccactagatttgggatctagtctatgagctttctcaaaggcatagaaccgacctgatttcaacatgccattatggactgatttaaaattccttcgaagtaaatttagtaatgaataacacattagaaccatcaactacagtttttaagtaacaaaatgataccatcatattgtaaccaccaatccactgaacaattaaacaagctcaatattcaaatagtgatgctagctaatcaaagagagatcagaataatattcattgcattgtcctactaaataatgcatggtaagaaactatgtcaagttctacacaagttacatcagtgtttttcggaactatgactgctaatcaaaaactgtagtttcaaattgaaacaatgcaacaactacaaaaacttacagagataagcaactcttgggtttttagcctcaacttcattagcaacccgaagaattggtgcaatatccaccagtgaagaaggcaccacttcactgtccagcattggctccagtacattcctggctgtctgagcccgctgaagtctctgtgtgggctgatcagaccgcctattgtatgccatttttacagctaaatctctgtaatattcagcttaaattgctcccttctctaactgtcaacgccaaaaagaataattcattagaataagtggacttacagaaactttccttgacaaaatcatatatttggaagctaacaagcatcaaacattaaggctatgcttggaatttagattttaggaagaaactttcatggattttggtttttcttttcttatttatttgtttattttaaacaaaacacaaaggaattattttataggaaaccctctgagtttaatttgatgtaataattaatttttttcgtaagcatatattatataagagaattttgcataagaaactttttatcaaacattttttttattatcactttttatcaaacattagtaaagcattttctttccttttcttcctagtcttttctctctcataattgttctttagaaaattacaaactccaaaatatttgaggacttttaaattccatgaatctatagacaacaccactaaaactcactttaactgactctggttcaaagttcacagtcccatggaacagtagtatttaaacattaaagcaacagaacaagatgtaaactgctcaataattgaatagtgtgaaacattattattttccaaatactacaaaattaacttacttacaaagccaattataattccccatattttcccagaagtccttttggtaccccagcaactttaattgaaaggtagtcaacccaaaagaataaaaagtaaaataaaataaaaacaaagcttaagcttaagcttaagcttaaattgatcatggatgattgttacccagaaatcagaaaaaagaacacaccttataagtgaaccatactctctttctgagcccagaagatatctacaaccaaccataagtcaagaacatccaattatattatcatatatcacaaaacaaaaccttctctctaagaaaccaaacgaaaagggggacttttatatatcaaatgggcacatttcattaattgacacaaataactgaaaagcatactaatatggacacagcacaaaaaacatactataaatatacaaaagaaagattattaggtgaactatgaaagagacgtgttataatatatataaagcttctaaaaaagaaagtaatgtttgaaagacttactttggtaatcgattaaaataatctcaaaaaagaagaccagcttaaacttaggctgcaagcataaaaatgaaaagactatagtaacaaaacaaacaaaacagagagagaagaagcagaaaagtttagttgagtggattcatacatgcataggactgctttggagtcagtcaatgtttaagttgactcttttggtcttttgttttataatccaatcaaaacgtgccagctcatcactctcagtttcctaacagcttcctgtttttgtcttcacttctctttcactgacagaatttgcatttaacacttcgaaagcaaatactgtagtaagtagatattaaaggactgaataaagaaaaacaacaagctactttcaaaaaaaaaaaaaaacagaacaaaaaacagtaagctgaactatggttgggtcatcattgtccaggtctgacattataagaaaggaaggagttggtatccagtgcggtgccgtcagcttgtagtacagtgggtgtgggtcctacattgaacactacatgtaactaccatgttgattggtcaatgtgatgatattgagtggtgtattatctacgacaaataacactaattatttgatgagagaaacccaatagagatatctccttatattttataattatttttttttgataaattatatttatatttataattgaataagactgagacgacacgactccaaaaagacataattaagaattgaattcacgaaaacgactcagatttatttttttttatttttttctaagttgataagattaagagcatttgaagttctgtccaaatgactttttctttttgtggtgaacaaaatcactcctaaattaactatttagtaatctataatgcctgaaacttttttaaattaagatagtttatcatctaattaaagggtctttgccaaactatgaactacataattcttatgaagagccacatagaactaagattgccctaaaaatttaaataataaaactataacatcttcaaataccttttctttgttaataattatcactaaaatttcagcttctaatactgaaatactactttaaaacaaaaaaaaaaaaacaataccaaaaaataacatgtattagaaaaggctatctttgaattaaaattaataaaaaacaaattagatttaaacacataactgaatttaaataaaaacagctacattaaaaagagaacgaaatctcaacaaaaaaaaaaaaatagaaactaagaacgcaaaacaaagcacgaaattcaatgaagtaaaaacttctgtggtattattccttaaatctccaattaagattcggctagttcgttagttagtgtttattaactaacttaactgtcaaataggacagcttgcatattgagtcctatggcctatataaaaaggaatgctcatctcatttcgaaaagagaatagaaagtagagaaaaaaaagtagagcaatgacaagagagacacaacacagtagagagagaagttagaagtgagaaattgagagagagagctgagattggaaaattatattgagaaacattgtcgattatgttagctcgggctagtgagttaatgagtgttgaggaattacaccatggatgacttactatgattatttccttgtagctcctgaaattgatatctctaattctca

SEQ ID NO: 41630 - DNA, 887 bp, Cannabis sativa
aaatcataaatgacaagttcattacggaaactactctatagagaaaggttaagctgcattaggagttatagcaaaaggtggagaaaggtgagaaaaaggctatccaaagggctgaggaggctgacactaaattggattcatttgggaaagcctatgaagagtcccaaaaggaggtcatccagttagagggagacaaattaggcctaaagggacaacaccagtaggtaatcctagaaaagcaagagcaggaagcccagacctccaatgatctgaaactggcccttgtctactcgatgtacaatatctggcgacacgacaaatgtgtaatagacctcttggatgctgaagatagggatgatctaatgcctcagatctcggcactgaaggaagcagacaaggctaaggaagcaactcagactacaaaatggtcgatcctagaactaccattactgtaggtgacatcttggatgactctactctttgagcctctgatgttcctctctcaaccaactctacaattttggatctcttatctgatgctcaaactgaagataaccaactgccaaaggatccagtgtagccttaaccattcttgccttttttcaacaactttatcacatatttttttgtcttttaggggacaagggtcccacctttcatgtgtgtagagacaatattttatacccttgccgtggggttttcaagtacgtagtactatttaataaactccttagatattttcattttaatctatagaatttgctaagtttaatgcttccagccttatgagtttctggttccaaaggcctgaacctatagatttgaaatgcttagacttacatattttttttcaaaaaatcatttgcattctttagaatgtgattcca

SEQ ID NO: 41631 - DNA, 1100 bp, Cannabis sativa
ctcaacccccaaatttttgaaatctcattcgttatccaaaaaatttccatttttactcataattcccctggatttttatggttattatttgatattttgaggctgaagatccaatgctacttccaatttggtaacttaatttcttcaaattattctttgttaagtttatgtcattagtaatctgtaacactagtttactttagtttagctcttgtgtttggatcttttgatagttgagtagttagttgtaaaatctgatggttttgatgaattatagaaatacctatttgatcaatttttgatctttttccaattctcgtcggtgctggtgaagatttggtggttttagcttctgggtattcgttttttttgtgatttgtttctatgtctagggttttggttatagacattgttgatttctgtgttgtgagtggaatttaaactctgttttgtaatggagtacggacgggaaagcgtggttcaggtgattggtactgagaattggtcaggagaccaagctatttgggctactgaagacgattatagagcttggaacaacaacagtgatacatctggagatacattttcgaactcgaattatgagcagagacaatcccagtctcgatcaggtagcgaaccacccaacaagaaatcgaagaattcgcaagatgtaacttcatcaaacaggtctaaagctattggaaaaatgtttttcaagaccaaactttgctgtaaattcagagctgggacttgtccttatatctcaaactgtaactttgctcatagtattgaagagcttagaaggccaccacctaattggcaagagattgtagctgctcatgaggaagaaaagggtgtatcttcagaaccaagggaagagtttcagattccttcagttgggtcttcaacttttgttgttgagacaccaaggtcttataaaggaagacattgtaagaagttttatactgaagaagggtgtccttatggtgatagttgcacatttcttcatgatgagcagtccaagaatagggagagtgtggctataagtttggggcctggagggtatggtggtgcgccgagtggaacgaacaacgctacga

SEQ ID NO: 41632 - DNA, 2759 bp, Cannabis sativa
tcccacatcaacatccttcattaaaaccattcatattaatatccaaaactaagaatttcaaacagtactcagttatactggaaattatttccacaccctttagtcataatcatttaccacattcaaatagtatttgagaaaagagaaataatgagaaaatatataatggacctatttagtagtaattaagctgatttacttaatatatacacacactaatatttacttaataattatatatattacgtaacaatacttacaagctgccgttgtcgtctccaaccttgcacccattgccacctctgactctcctgaaaatcaaaaaggaagaaaaagaaacccatttaaggaaacagctaattaagcttagtaaaaagtagagagagaaagggagacatagaaagagataaggagggaaagagacatacgggcgaggacggatggtccagaagacagagtaagtccactctgtgttgagacagacggttctaagggcctcatgaagggccatcatcccaacagcttctttgcttctatctgatgctcctgagcccaccatttctctttctctctcaagacaattaaagcttttatagttaatctctctcacttattctatcaactttctttataaaatttaaagactttttcttattatcccagaaagaaacactacaattccgaactcagagtctcgacttggtttagcaacactacaacactgcttaaccaccacaagaagaggaagacctattctttctacttctctctctctctttgttggtttctcttttaagcatatatatttaattaattaaggtttttgggttttgcaacctctctgttgtctactattgtttttgtatttgctggtcccaagtaataagctttggtaatgttgagagagaaagatgaagatgaaggagtaggaaggaggggttgtagtaaaagtaagaaaagaaaggatgatgatacatggtttttggacgtatctttaagctttttacaacatggaaacaactttcttaaaacaaataaaagaaagggggccatggaaagactcaaacaaaacacacagaaattaaatcagcggtggggacagcttaagtcctttgctaaaaccacattaattaatatattattattatagtaatactaataccaatgtatattgtgtagactttactatccatgatcaaaatcaccattttacccttttactagtgttgcgttgttacctgccttaattcgtagtacccacacttttacaatctgcattgactccataaggctctgcttagcaggagactttcgaagtcattttcaagactgttgtagtatatttttaaagtactttatttgtttgttgtgtagtaaagacttttgtggaaaatttgcttgcatctataaagaagttttgattaataaagaaaaaggaggagaaaactcagaaaagttaattagagcttttaatcaaatgcttgtattttacactgtatactacttttatgcaatttctaatagtgccctttctattctaataccataaataaatggcaaaaaatgagaagatctcttctttggttttattattattatttgttgatggataggatccaaactactgtaaccatgtggaattgtttgtgtttttattatagtatttagatgacttgattgataaaaaaacaacatcacaataagttaaccaatgaattgatctaacaacccaagacctaatctaaccacgtaacacattgacatatatccacaaaataaagctttattaacttttgtactcttcataaatataatttgtgaaaaataatattttgtaaggagtccggaacaacaaacaaacatggcacaaaattaagtagaaaaatgtgattctgtttctgttgttggcttgaaacttgtgggaaatgttttgatttcagtacaaaatggatttattaaatgtagtgtaccaatgaagaaagctggctgatctgatcactatcacaggtaccaaagtgagtgcatgttttttttaatattatcaaacaattcggaaggcatagaatctttaccaaaaaaaaaaaatgctagggtagactcaatattattagatctgaattctactttgaaaaatcctatttatatgatattattattttgttgtcagttttatcttttattataaaaaggcgtaacttatagaaaaatatttaaagtatgtacggatgaaagtatatttttcatatttaggtcacttatatcttgttcttatttggttaaactatctagctatttgaaatggtttatcttcttaaaaagagcaaccactattaccataattgtaacttcctaaacgaaagtaggtagggaactgggaacctatgtgtcttatgtgagctatgtaggattaaggattctaaatcaaattaaaagaggaaaggaaagattattgatatgttataagctacaagtgcacacattataggtgcaatttatttatttatttatttttttttatttggagaaggtgtactctcttagaaaaagagagattcaatttgcatatataaaacaagtaaataactcactcgcacttcgggacggttgtttttaaattttctcttacattttttttttttttttatattttctcttaatatttttgaataattaattaattagaaaaatatttttttaaaaaaaattatagaatattctttgtacggtttattatgataggctttttttttttttttttt

SEQ ID NO: 41633 - DNA, 881 bp, Cannabis sativa
attattccatgcacgtggtactcgttctccattgaggcaggcaagctcatacactctcagcctaatggctgcttcaacttgatatgggcatttccagttaggactaaggactccaattgttggatcacgtgttgctaggaacactcttcttaatacaaggtcgtgcatcatgaactctctattacagacacgcgagtcatagtacatctttactcgttgttggtgagcggtattgcataacaaagactcctctcttctttcatcaagcatgtctaatgcttcttctaagagtaagtggttacaatattgctcgtagtagtgaacttggtgtgaggtgacttgagtttcaatagagaccatcacctcactcccataagtcagtgagaagggagtgtgtcccgaaagagtttggtgtgaggtcctataaaaccaaagcacctgagggaattcctctggccatatttaaaaaattacataaacaaaaaatatatataaatacatgtatacacttgaaaaaaaattggctcctcctaataagttcacttaattctgtcattgtctagcccgatatattatatactccatttatttatttttacttttttttaaaagtgttaaaagagaaagagaaaaaaaaatagtgataaaaaaactccaatattacagaaaataggttatatgcatcaaaaaataatatgatattttcattttcattttttcttagaaaaaaaatatttctaaaattggtatctttattcatgtattttttttttactattttataactaaatcttcaaaatatttatcacaccaataagtattggtacattggtacttatgaagggatgtgagaattttttaagtaaaattaggaaaattta

SEQ ID NO: 41634 - DNA, 1137 bp, Cannabis sativa
tgttaaggattaaggataatgcagaggaattagtgttaatgcagaggaggcattttgtgttaactttgtggtccctgactgtgccagttgtcaaccactggtgcaaaccgaatattgaggaatctcatgaagattataccgttagaattccccatgattgtaatcattgtaaaagcagatttcctttttattgttatgattttcctgacagctgtaatagggtaataaaccctctctttgtaacttgcctaaaatggctctgtctataaatacacatcagtaactcagcattcattgagctgagatttacaaaatcaattttacctaaaattctactgtcttgattcgttggaagggtctacctttgcttgaggctacttaggagaagtttgatgtcatttgagagcaattcctaacattcaaccctgaggacaaggttaaaaattattgggaggggggtaatgatagagcctaatataagatttacgtatactagaagggggccaaccaaacacatgggtcaagggtagtattgatcattggtggttgagctgaaggagttggttaagggtagtttgggtattatttaggccatatagtgccttgagaagctattgttggattatgcaagaattagagtaaattctctatttcatggagagctccttctccctttgtatgagactttgtctccaattctgattcaataaagcttctgtgattacttccatttttgctactgttccattggttttcttgttcttcttttctgttattgcttaatattattgctgctattaaattcttatttcagagcttatcaagatcccactcttggtaaaagcaaaagtggattagtgatacttctgatgagcacatctatacgagtacactaatggcttgtcaatttagcaaagaaatcaaatatgtgctaataattacgctgtttatagactgtattatactgagtaacaaaagttaatatatttattttacatgttctttcatttggttggaggttactttgttattagcaaaagcacattaaacttgtaagtagtacagtgtacatagctaattaattctaatttatttatctatgtcttgacacattggtaacaaataaatgcacgtata

SEQ ID NO: 41635 - DNA, 5447 bp, Cannabis sativa
caactgacttaatttacataaaacacaacaaaatcttgacccaagaaaaatgcaaaaattctaatttcaaaggagcatttctcaagggtaggaggtacaccgctacagcattagtcctacttgtaataattgtaacagatttagtaagtattttgtggattaaatctctgctgccgcctgtaatatggagtctcatctattgtcctcctaacatattccatgaaaggctgtggtgttttaggagactgatcaatcaaaccagtaggagtgctgctgcgatctggtgtgaccggaggtacaaaatttgaaggagggggaggatgagtggcctgagatctaccaggcttatctaagaaacagatgaaaatggccaatgttaatactagtacagctacacatccaagtatgcttgcccagagggatatatttatggagcgtttcaaaggtcctcctctttctccaggttcatagctcacatcaacttccactttctggcctgcattagaaagacacaaacacgtgacaagtttgtcctaaaacaatttagagattaacgccctctctcccacaatgagtctcatcagtgccatagcaataaaaagtactaggctcaccatttgcaggaaggctgatggtgattttatctttaaacttcttgcttactagcactttgacctgaaaaacaaggcaaaggaaaaggagatccccagataaagtaaaaatctgtacttggaaggtggactgctatgtccaccaagaataatattgcagttttagttgaatgatgcatatagtacttccaaaaacaagtgcataataacggcactgacctcatactgagcacggctcccagatccaaaatcttctttatggatgagactgatgagtaataaatcccgctcacgccaataaatgtcaacacctgcaattagaagacagtcatatcagactcagaacaaggtgttttatatacaagggtcaccttacaagcacatgatacatcatgatggtagcaagaaaaggcttgggaaaagaaaacatttcccatccctcttcttgcccatatactatcgtgagcacatgcacggctatcattgtcaaaacaattgttccaactagcacactgatgaactgttgtgttttggggctgggacatggatgttcacagtaaagagagacaaagtagaagattgtaaaaaaaaaaaaaaaagtggactggattcctcagtccacgatttctattactgaaccaaatgtgaggtacatgaactgcagagaaatagtgagctactcagcaaaagaaaagtcacctgtattccccaagacggttattacagtcttgttagaatccgctgtcagctttaactgcattgcattgcaaaatgttagttcatatcagaggaaatgaacatcctaatatggagctaaaactactttgttcattgacaagcactcgcatttcgtagagtataattcttagccaatcttattgctatatatttcaaataaccattggtcaaaaaaattagatttaagacgaaagaaatgagagcttaatactgtcatgtaagacatttaaccttgtccgtccccaacatggagaagcctccaacaaaaagagcagatgcagatccttgaatatgatcagcttctctcaatgaggcataaatggagataggtatttttggcttcatggcatttgtcttaggcatcaaatgagccaaatgctctggcgagtagggaaaaaacaggcaatatgaattaccagtgctaagatccaaccacggctttgcataccttcagtacatgaagcaaagaataccaaaagagttcagactttttctctataagcagccaaacatgccaaaaaaggacaaggaacatacccaagaaaagaagggtttactctgcagtcatatgcaattgcatcaatatctccatgagttatagcccttttgctgtttgaattacttttgtttgccaaaatacaaaaggagaaaaaagtaatgagcaaaatgcagtctgaaatcagaaataaactaacaagacaacacttttcatccaatgtatcttcacatcatatgaaacataatgatgacgcagatgatagttttaagataatcttgtagcatatttaatcaacagaatggactttggactaatgagcattccatcaaagtggaaaaattctactagactgttcaacactggttaagagatcaaggtggtgatgtaaaacaagcctgcagcaagaaatttcaataggacaaaatacattttcattatcgatttattacgtcaaaggaactagttactttacgaaaattatcctgctcattgtttttctgcatgtacacactaaccgtaacagtaaattacaggcaaaagaaaatgagttgtccaacccggcaaccatacccacaaagccatgtgtacaaacctgaacttcacaagaaagctatatccgtttgtaggtgaaggaacgtttgttagcaactctttcggagcatccacagaaacatcccttgatagcactgtcactgttgttcgcagattcaaacttgaagcttcgaaatacactgtttgcacatagcaaatcaaaactattaactatcaatataggaaaggataggggatactgatatatgtgcaaaaccagttcagtgcagtgaaggatacttaagctatctttcgcccattaccttgggttgtaccctccccaactgcctcagatattcctgacagcatctcgacagatattacacttgaattggcagttacccagtgaccaggaacatgatcatttatccctagcatattaaaataatcaatgtgagcttatctgaccagaagcatgcagaacaaatatcttaactgtgtgctcattgtaaatgcatggttaacttatgatcattcaacgaacacaatctgttgctatttttccttattgaactatccaaaaattacaagtcactgatcaaagtaaatcttagacaaagtccaccttctatactgaagttaacacgacttcctttgggaagaactggattttgaggataaatgtgggctccaactgcaatctgaaaggaaaaaaagaaaattatggaccagtaaaccttaagagtaaataatacagtaacaggcactaatcccagaagaggagaatccattatagtagaagacggatccataattcaagtagaagcaaaaacaattgtttaaaagtgccttctatatttaagacaaaattttctgagggatacacattaacagagagaaaaatataaatgatatacatatatgtaaaaaaactaggagttagcttatcctaatccatcacgaaagttttttaatcacaacaccactttggcacatgcacccaaattatgattgcaaaagaaattgtgagtaagctctcaataagagctagataacataaaagaaaaagcattatgtaatttgttcttgtgcataaaattattaacaattatcaaaggtaagaagaagaacaagatgcttggacatacatatacatctatatctatttgtctataaatatatatatatatatatgaatatcttaaataagttaaatagctaaaagcaaaaggcagcatcatggcccactaaacccataaatgcagttaaacaagataccagcacgtagtccgatttctgtagaatattatcaattgatattcgcagaagagctctaccatgtcgtatagcctacaaacagatatcgaaagaatcagtcataccagaaatgtaaataacatggaaaacattttttactttacgcattatggtgaagcaaataaaatccatttcatcaacctgatggctgcttaagttcaatccttttcgaatgaaattttgaagattcataaatttcaaacgaccaccataccttaatataaatatttccactgccatcatgtgtcttgtttatgaacacaacatcagggtagttagttacaacctcaaagagaacagcgtcatgtgcctcataaaaagggtttcctggtttagtacaaaagtaaagactaatcagaatatgaatcatatccactgtcaacagtagtggcagttaatgcatatccactgtcaacagtagtggcagttaatgctactgatgatagatacctagagagtctctgtaggttactggaagagaaatttcagaaccaacagcaagattgattacatgaaaaggaaagtcctcatttgcagctctaatttgagccacctgctcagataatccataataactaattaatgatcttgaatagataacaaacaacacacatttacgcaaatattacaaaggcaaattaccccttaagctccttctattggagtccaccaatttaaccaacgagtttaaaaaatgaaccctcaattttctttataatcataaattcctaacttcaagtatattaatttcactttttttatgtaatggtttgataatatttttttttttaagaaatagttttggattttatttttttaatttatgtttatcagttagatttataaactatttacaaaatattataaatatattaatgcacaaaaaaatggcaaatataggctatagcttttcaatttgctttcactttatctaatatttaagttgtttaatcaaatcctataaattatatacataaaacacaaggttaaacttggtaacatgtttgaacggagaagacctaagtggatttctcttttacaaaagtaaactctactgattaaaggccctaggatgaaatgagatattggcattggtcaatgctaaaaatgactgcagctcaacaagcatatcaacactctcatatagttgtagcaaatttaccattggcaaacttatgataaattaaatgaaaggaaatcattttaaaatgtatactaagaagaatccatctaagaaaaattattggtcttggacataagacaaaatatccatacctcagtaactttgacacaagcagcaacctcagttctaccagtggtacgatctttagcctgaatgcaagcaatattgttactttctgctgtccttattctatctccatcaatggaaatagcatcctttggcacagcttcgcccttttcataaaaagtcctcaataaagaatataatatagttcctttgcgactttgactgtcccattgactatatgaatctgatgatgacagcagcagactttttgtagtataatggggaggaagaacccatgttattggaactccaagagcgagagggagctcgggtaccaccagcactgacactgatgcattataattcttcgtttgcaacttagatttagaagatttaaattcacatgagaaggagattgtaatttttgtcctccctgcagatctagaatatgggataatattatgtataaatatatagatttaactaaataatacattttaat

SEQ ID NO: 41636 - DNA, 4932 bp, Cannabis sativa
acttagttccaatggcatttgcatctcaacccttttttttaactctggttgttgctttattgaaatttcctaattttgagtgatgattttgttacttatagaaaataagttttagtttaaggaatctgattgtgtattcttgttgaccacacactaaattttgggtatgagttgatattgctagccattgtttttaattttgaatctcgggtactcaaacttaatgatacaagtgttcaaaaaaaaaaaaaaaaaaaaaacttaatgatacaataattttagctgatgtagcacgctagtttttctaataattttagtaagaattttattgtaaattagttgataattctgtatattagtaaatatttcccttacatatagattttttttttttttatacatttttactgatattatttgtattggattttttttgtatgttattattcaattattcaagtagatattatatatggagagtttccattcatgcatataagtcttcatcttattttgttgtctgaatatttaactttgatttttgttttaatgaataggatgttcaatatttttaagagtttattatataaaaactaataaaatcaatgtaccaaaaattatcaagattttttttttttttttttcaataatgattataaacattataagagagttctaaacaaaaaaatataagataatttttttttaaatagaaacataccctacattgtaattttgtcctttttttttctttgttttgttttgtttttttttttaaattcaaatttaatcaagtgcggtgagtcgtatggaactaaagaaagacctacgaatacaggccgtaggtttaaataaggagtagcggggaacgttgaataagtggattaagacaaaaataaacgtagtcttccctccttgacctcaccatccaaagacaccctctgaaaatacaaaattacacacccataaaaagatcttacaaatggtttagctcagcccctctttccccaacttaaccattcaactttcgcggcaataagctattttctactttctctcttctttcatcctctctctctctctaaaacacactctctctctctctctctctctcctctgctcaaagttgcttcaacaagaatcgctctctcaacattatcatttttgttttttttttgcttttctcctctgtaatttgttcaaatttagattctgataaaccctatcactgctaatgcccttcgatctatgactttagggtttggaaaggtacagacatttgaattttgtgatagtgcttttaaattttatttctgtcttctttattcatttatttatatatatatttttttttaaatatttttttagttgcattgaatttcttaaagttttgttttttaaattttctggtttggctttggttttttctttgatgttgcttgtttcgatagtcaaattgctgatgaagatttttggtgattttcttgcataagtttttcagcatttttttcggcatttcgtaaaatatatatatattttcaaaaaagtatattaaaatgaaattttattttcatttcaaatttgaaaattcgtttgttagttttttttagtcgtaattgagtgaatacgaaattactgctttccttcaacttctttttgaattaatggaaaatgtgaaactgtgtgaaactgaaaaaaaaaaaaaagaaaaaaagagaaggtttttctcagacgattcactgaggtttatgtcctgacctgttatgccaaattcatcttgcgtttaacttttatttcttgtggaattgagttttttaattttttttcttgggtaagaattaggggattttatatggtatatattttgtctattattttttctcttcaagtgaaatttaggtaatatagagtgtgagtattttgttttgagtttcgtaaacttgttgatgatcataatggaacaattttcagatttggtgtagcgcttaatggctccaaccaagaaatctcgggtgaacaagcggtatggaagtgcaatttcttattctccggagaaagaggtaggaaattcggctaagaacaagcaacgcggttcaatttccttttctcctgatggcgggaactccaacaaaagccttcaaagagtaattattattttttttttatttttctattatttgatttgtggaaattatggaagtgtaattttggtcgatttcttgcttgcaatctttgtgtacagaagaaaaaactatcagataagttggggtctcagtggagcaagggagagcttgagcgtttttatgatgcttatcggaagtatggaaaagactggaggaaggtgtgccatatcttattttttgaaacagttccctcattcggaattattttcttttttattttgataaattagaggagataaactagagcttgttctctctgatatgaaatctttgtatgcttggcaaagatatatcgaggcatttcgactgtctttcttcttacgcacattagagggtgttctccacctgttttgaactattagattctacgcactctgttttccttttttgaatttagattattgatttctgtggattctaggttgctgctgcagtgcgcaacagaactgtcgaaatggttgaggctctttacagtatgaatcgggtacatgttttctaatagtgccatgatttcattattttctttgttaagtaatttattaattctgatttgtgcggttttggtttttaaggcatacttgtcgctgccagaaggaacagcttctgttgttggccttatagcaatgatgacagatcactataatgttctggtaaagctagattaagttgcatctgatttttcggggtaatgctatcgtcatttttctttgctgagaattcacatttgactttggcttctcttttcatactcaaattgataggaagggagcgatagtgaccaagagagcaatgatggttcaggaatttctcgaaaacttccaaaccgcaagcgtggcagagataattttaacacctcaaaggatcttttccaatctcactcagttgcttctactgatggatgcttatcattactcaaaaggaaacgcagtgatggtaaaattacatgctgttttatataatttatgaagatcattttgtttgcatttatctatattaagtttgtttcttctaatctgttgtgattcgtttgtaaattaatgacactgaggttaaagtgtgtagcgatgttgatggtgtacggaattatgcagggataagactaaaaaaaaaagtaacagttgtatgttggatcttaatatttgccttgtttgttataactatttgtgaagtgagggaattgggtaaaaatggaatatttttatcaattaaagacaggacaaaataataacaaatgaatatgtgtactgaaacaactaggtgttgtctcagattcatatcaaaagtctttctctatgctattattttttgtaaaataacgcaaatcatgtagaaatggaacaatctttgaagactttgaagaagtttttgataagttgttagatagagttaaaatttgggtggatttttaattagattcaaaattgttatagagagatttgtaaaatatgtaagagacttaatttctgtacaatatttgacagaagatagtttaatctcatgacaattctgcatcattaaagttcattagtttttgatatctactctaaagtgaaacatgagtttaaatgtgctttaacattatatcaggtagccagcctcgtgtagttggaaagcggacaccacgctttccagtttcatactctcataagagagattatagagaaaatcaaatgtcacccaataggaagggcaaaaaggctgagaatgataatgatgatgcacatgtagcagcattggcattgactgaggcttctcaaagagtaggttcccctcaagtttctacaccatacaagcatatcagctcttctcctgctcaaagctgggaaagattagcactagtatgtagtgaagttcttatgttatggcagtgcatctatttctttgtatgtgaaaataactgttttttttttctttctattttaacatagagctcacaaagactccgtgatacttctgtggatgacgattggtttgaaggtagtgttggaagcaggggagctgaaaatggagattatgggaaggatactagctccttgatggctatggaaggcgttggtacagttgaggttcatcaaaaggggaagaagttttatggaaaaaaagagaaagttgaggatgatgatggtggggaagcatgtagtggcacagaagaagggaaaagtatcagcggtttgaagggaaaaattggtgttgaattttcaaatgcgaaagttgagcgagtttctccgcaaagtcaacggaagaaaagcaaaaagttattttttggaggtatttttttcactttttcaaaagtttatatctggttctttgttgtacttttctaaaacaaaatataagaatacacacatattttttctaattgtaagcacacatttatccttgagtgaacagaacaaaatatacaactgcgtaccttttaaatcaacatggtattttactctcaaatacacccactattctataattataaatgaatgaatcataaaatgagagctgcattttgatgttgaatatgacaacaaattaggttattagaatgatgagtgaatattagttaaaagattatgaatggaattaaattgatatgtgtattaaaagaaaaaaagaaattatatatggaaataaaattcttgtaaaatatccgttagtaatcatataaatatatttatatataatgatattggaagagataggatttgaacttgaggcttcctctttgtgaagaaaagtgtgaaaccactaggctatg

SEQ ID NO: 41637 - DNA, 1268 bp, Cannabis sativa
gaaagagaagttaaagtaatatattgaaaaaataaaaggtataaaaggattttagcggctaaaccacctaaattacacatttaggtacacttaatcccacaaatctaatttttaattagcggtaaaactttgaacccacattctgttttgctttctactattttgttacctctcattcgtttgattgtcaaatcctcctacgttgtaacccaaatatgtatccatatcagctgttaagagccatgtggacggtaatatgtacaaaaacttacatatgtgaaacttttaacagtgcacataagattaattatttaaatataaaaaatttacgaaataaaaaaataattaaaaatataaacaaataaattataataaattttaaaatattatttcctttttttctttcactttttcctttcttctttcacttctcactaaagtctaaaacttctttctcagtactcccattctcttctgcaaatcacctaaaaaaaaatagtacacaataccaaccaccaccatcaccacttcaaccctaaagtcaaaaaaaaaaaaaaaaaaaccaaaatcaccacaaccaccaccactactatcaaaaatgacaatctaatgttttcctcttcaccacaacagatcaacactaccaccaccaaaaacataaagaagaataaaataaaataaaaattcaaaaaaaaatgagtctttacaatcagaaatacccttacatttatccaaaaaattttacatgaaaaaaattcatttcttccaatcttatataatgaatacccatataaaagtttcaaaatttttaacaaaaaaaaaaaaaaaaaaaacaaaaaagaaagagtccttataatctgaaatacaacatgtgagaaagtgacaaacaatggaaatgggagtaaagaatgagagtgtgagagcaagcagatctgaagaatgtgagagagcatatttgagatggtgaacgatgcatacgatggcgatggcactagaaaatgacgatgggatctcaaagcattggcgatgtcaacgatggtgggtctcaacaggtctcaggattcttggtgatggcaaggacactgggatgatctcggtgtttttagtgtttggggtctatgtcattagcgttggtacgagttgggcaatctcgaaagtaggcttagagggaggctgagagggaagaagaaggagaagaaggaataaaggtgggggtgtaattttttttttttttttttttgggggggggggggggttttttttttttt

SEQ ID NO: 41638 - DNA, 4533 bp, Cannabis sativa
ctcagtagccttaaaattcagattgctcctgttctcttcagacaagtttgaaactgcagagctgtcaaccgaagaacaatccgacaatcccaggtaattccgttcttttagtcctgacccattttgggatctacagtcaataggggaagaggaagacaccagggtgctgtgtccttcctcttcaccacccagcagtggtggagacatattacgactttttagtaatcaatactggctactgccaactgttttggaaaaataacaaagaattaagagcacaaaattacataaataagtaaaaaaaaaaaaaggaaaacatctaaactgctcaataaatatacataagtttacatacatcaatcataacaattaacatggcattgtattcatctaaataagtgccgtatatatgaaatagtaaattaataaagagaataaccccacagacaattggcaaaaaatgaaaacatattcttttggcattaaaatttggacaaagcaatacagcacaaccaacaaataggctacaagagattattactataagcttcttcttcaaattcttctttttcttaaaaaaaaatgaaatttataagaaaaatcttaaaaataatatagacggctactaatctttggtgggtttgtgcatggggtacaatattcaaatggaaataaattagaataaatgaccaaatttgttcttgttaaacccgcaatggaaaagtcaactctacatttcatattcatttgcattaccttagctttaaatggtcaagtacgacaactaataacttcatcaatacccttttttccccatctcctaaaattttcccggaagccaaacaggccaaatgagagagagagaaaaaaaagaaaaataaccagctgaaaaaagatctcatccaacactctaaactaaatcaccacttcccaaaaccccaaaaatagttacaactcgctacacgaacgaaacctcactacttccacctcataaaaacctaagactccaaactaacagcatcacaaaacacaaagagtcaagaccgagcatactccgatttcaaccaaagctcaaaacgaaaaacacacactgtaaacaaatttaaacaaataaaaaataataataataaaaaggaatattcaaaagaagtacctgaaagctcaaatgaatcacggagagagaaagagaaagagaacgccgacttaagctttttcgaaaattctcagctgcaaatgcatcaaagcgaaggagagagagagagagagtaagagagagaaagctcaaggcccttccattaagcagaaagcaacaaaagcttttttaggctgtgctcgccgaggaactcgtactcttacaaatagaaaaacaaaaataataataataataataataatagtttattttattttattttatttatcaataaaatataataataataattaaataccaactaaaaaggcaccaggggcaaaacccgtaatatgcacacccacgaaataaatattgtcgtatttttcactttaacttttgcttcataatgacattttcatttttttaattattattattcattaataacctcactcctctgacccacaaatttttgtttaattaaaatataagaatttaacataatctacatttttaaaagccaaaaaaattattttaacactttttttattttgttatttgatatatttattagtataaaaaactgtgaaaacattcatgtaacgttgatacaaataaaagattgaagaaaacaattttgattgtaagaaaaataatcttgttagttgttagtataagagttctatcaaaaaaagtattagagttcatgttaataaacctttaaatatcatatgacatttgtttgattcaaatgattttttttgtaaggtacatgagttattgatttaacttaattttatacgggcttttattatttttctaaaactatatttatatatgagaggcaaacaattatttattttaaagttttttttttttttttgtatcttggtatgtttttattaaagttgagtgattgattagtgagtaaatgagtaatagtgaatcgtgactgactgaggcgaaaagtttagtcaaagaggctgtgcttgttgggggctattggctaaattgcgcaggtctttttggcaaaagagcatactgcttccaactaaaatgcgctggtttcaaacagaaatgccgatcatgccccctcaaatgttcgattgacaattttacccttcgtgcttctgtcatttaagaatgattagtagaaactatttgtaactggcacccatattaaacttgcttgtaataaataaaacattaaaaaaaaaaacttgtcatatttgagtgcaccatacttatctttaaaaacatagtttttaatatttatattcttatgtcttattaaatgctatatatgaacattttagggtggtgaatcaaacaatgaatactttttaagaaacggaaacataaaaggttcaactgtttatggaatggaacaagttttgcaattaataacagtcccatataagttaatgcatttaaaaagagttataattttgtggttaatcctaatctttctcccttttgagtgtagacattgatgagctttttttattatatttaaaaaataaaaacagaaaaaagagagatcagtgaaagtatgatgagaaattatagtacgtattcatttatgtttcccagcgagttggccaggtatggaggtataatttaactccttttttcttttcttactttattgtccagaatatgagtaactttagcatagtgacaaataataataataataataataagtaagtagtactaaaatttgacatttctctaataagaataatatttacaaagttgagcagacacatgtcactttgtttagccaaaagatactgtgtttcaaccactctttgtccctccgaatcctcaaaaatctttttatttttttttctctctaaaataaataaatacattaattaatttagaatcaaatatataacagttgtaataatgatgaatatggggagagtagtgtttgggaggcgagaaaatgaaagaaagggcaaaatgggaaagaaagaaaagggtataataggaaagttaagaggagcattaaatagagggagagtgggaaggggacagaggaaaacaggggaagcaaatgtgattgggggacaagaaagcggcatttgaagtcgctttgccggcttctgaccgagacatctaacccttctcctctccttcaaatcatcttctttatatttcattttttccattattacccttctctctctctcctacttatttattttatttaaacaaagaaaaaaggtgttaaatgctaaagaaattaaattaaaccctttttttaagtgtgttttagtagtaataaaagaaaaaattggaatatgattgagagggaagtggagtagagtggagtgagtagtagtattaagatgcacgcttggggggacagaagcattgatggggtctatgcatgccgcattaccacatcatatcatatcaactcatatcaaactcttcttcttatatttcatttccatcaacctcattttctattaatgctcccttcttcatgatcaatcatcaatgatcctattcctattcttctataactattttctccctttcattttcgtgaaattaataccaaatatatgcatgtatttattgcagctgcaggagctgtttctcctgtacaatatttgatcattagtgtataacagaaaaaataataatattaataattgttacaaattttaacttaaaactatttagagtatgtgcaactttttttttttttttttggtgaggtagtagagtatagcacattggttatattattgttgatctcgatttttgatcatagtcaataaaatgataaataagttttttgataaattataattactaagaacaataaatgacagagatttatataagtttctaaattttactcttacaaataccaagatcacaagattctgaacaagtgagttttttgataattcttttgtgaagattataagtagtttttaacagcgtaatggctctcacatgaaaataatccactatcagagccaaccctatagctgtgcaagctagctactgcaaagggtccaaaaaataaggatctaatatatctttaatttaatgctttttttgtgaacccaatttatagtgaattttgattatttatgcatagtaatagaggaaattaattctctaaacttatgtatttcaaaattttaaaaaataagtccactttacattaaactcaaaaatacccctctcatttttcaaactcccagttctctatacacctttgttctctctctcggtctcttcgttcaaactcctaacccacggcgcaccccatagacccacggcatacccatggcacacccccaccgacccacgacgtaccccaaccgacccacggcgcactcccaccgacccacgacgcacccaga

SEQ ID NO: 41639 - DNA, 3309 bp, Cannabis sativa
atgtaataagacataattatttagtttaattcaactcgtatattgtaatagcagttttaactgagcgaagggaattaataataaattaataaaaatgtaatagtcccacaaaggattatttcttaaacatttaagagttacacatcaacaagaccattcagttgacaagaacattagtaacgatacaatacaattttttttggttttttttttttttttttgttttgttttgttttccatctccaatatctgaaaatgatattcacaaaaaagatatccaagttccttgccgatttcaactgaagaaagagataaaagaaaagaagaaaaacagaaaatgaaaatacacttccaatatttcctcttccttaaacacctaaaaaggagatggaaaccatgatgcatttgtgggtcttctacaaatgctgagacttctttcaccttgaatcatcatcccattgcatacttctgtgtccagctgcgagctgtggcttcgtacttggctctgtcagtcttgtacatgtgagcgatttcaggcacaagagggtcgtctgggttggggtcagtcaacagagagcatattgagaggagcacctacaaaaatgcacaaagttaatatatacagaaaagtaggtcataattacattagttattgcaacaaactaccaaccttcatccattttattttattggagacttatttatgttcaaaaccaacaatttatgaaggatggtctaacaaaccttggaaatagttaatgcaggactccattgctctttgagaatatctaaacatatgcttccattgctgttgatgtttggatggaatacctttgtcctgaatgcaacctgaaaattcatatttatcagcctctaaaacttaagataacacaagctactagattcatataggaaggaataaataacatgggagaaatcaaacttgcaaaaagaaatttacaagagttcaaagaaatccttcaatgagcaaatatagatacccaatactacatcaactaaacagataatggtatcaaaggaagttctcaatctcaatacagatatataatgcaacggcaaaatatatttatttatttatttgacgattgtcctccctatgaagccattttggaagcaggaaacttatatcaaatttctggttgaaggtgcccgtgaggaatcaaaccaacgaaatgaacacaccaatgaaaatgtgtttcaatttatccaccttattagatggtagtgtttattaacacatcaaaacgaaatgaccaaaatggataaaacagttatataataatccacatcaggaacaatagatataattctcaaacgcatttccagaagattaagaaacaggcaacagctgagagctaataccttcataacagaaaaaactgaaaaccgccatgttttactgacacaacaaaacaactgatagccgaagataaacacagagaacaaagtaggagagaaaaacctttggaggcttgaacggataatccggaggaaaatgaattgaaacaaggaatacacctccggcatatggactatcggctggccccataattgttgcttgccaatggaacatgtcctcagccacaggacctataataattaaggcaaaaacttcaaacttggctcaattcaacataatgatttttaaaaccagcttaaacatccatgaacaagtagaactaaagaaaatcaaggatatctactacatccccaagtctctcttataaagcactcatgattaaaaccttcaaaaacattaaattaagcgatgaacactaaaaatttctctttttttttaaaatttttttcctgaaaataaaataaaatacaagtcaaccgtctatatgccaatattgacagaaaaagtattaaaatataatcatcggatgagatcgttttgtgctgatgtaccagacccatttctacaactacaaaatgaaaaattaatacatacgcataatataaataaatagatatgtattatataaacacacagaaagataaagctttccgttcaccggattaacaatataagctacgcatataaaagagaacaatactaaggtaacgaaatataccggcgctgcaagaggtaggaggatctttctgcaaatccttgagctccttcaagatccgtttcgacgccattattacacagacgcagctacaaaaacgcacaaacgacacaaatcagcaccagatcgcaaacaaaaacagtcaaacgacacaaaaatcgcaactcaaatcccctaaactgataaaaagaaaaaaaacccaagagtgaaatacacggatccttacagatcagaaccagaagaaacagatcaaaaagaaaaataaatttcaagacagaaatctagacaaacctgagtcttaaggaaacgcaaagctgtgggagaaatttccttggtttgagataatcgaagcttgaaaaatgggtaatgacagagacgaccctctcaagaaaatatcaaacggcagaagacccacagcttctagaattttctgcctttatacaacaacttggcgtagcaataacgcagtttcaattttcattttcttttttttctttaatcgatataataaatatttattgttgaggggtataactgcaataaaatagaagggcataaatgttttcaaagcaatccaccaagaagttaaaatttacttaatgaccaagaattcttaccccttttccccaaattcgggttgggtttagattctctggttactatgtccccacaatgtcctcatgattttagcatcgtgtcgtttaatctttacctctctaatttttttctttttcttattatcatttttctttttgaggattcctcaaattatttattattctttcattattggatttgtatgattcttgtatgatttgaaattttgtatagtgcagttgtgatttgtatttttatcaaactgggtttgcaattttgaatttaataattgtagtttaaatcatattgcattatatattacaaagttatcaatttttataatatgatttttatttttattttacatataaaaaaaatatatgtattattacattatttttagagataatttaatataataatttcatgattatgattagtatatatgttatgaagttaaaattttaataagatttattttattattaaaacttgattagattgatttttaaaattttattataatatttgataatgatcatagtgtaaattatttaaattgcactgtagtacactatatttttgtggtgtgatttttgcgattttaagatctcgc

SEQ ID NO: 41640 - DNA, 836 bp, Cannabis sativa
ctatattattagcagatcatataaacactttgttacaattgattatgtgtttacaatatttggtcttaatttaaacttctaacttagccatatatattacatacactcctctaataagtgatcttcttaaaaataattttacatacatatttagtatggtcacatatatacatgtcattcatcacttgagtttgttcgaatattactccaaaaaaaaaaagtctttttatttatgtttatatattttaaaatctaagtttagtaagtttaggatttatgaagtcattgcttgttgatgaatgtataattattttgttatatgttctagattaagtgatgtattttccacctagaattctcactactcattagtttatattgtttgacttactcattaattctttcactattgttcttaatatgtttattattttttcaggtttagtaatcttttaggagtgtctcgattgtatgtaatttatgatattgttgtcgctcactagttaaaaaacttaatggttaaatgtgcaagtttagattgcatataattaaatcagaacaaaataatagagattcgtatttagtctatacattgtgaaattcgtaatcaacctcaaaaacaaaataaccattcactgtatttatgattatacttttccttgtggtttagtttgttgtaatggtagtacatattctattcaattttattgagtattactttttttagtcactgctctacagttcttagcttatctaatgagaatttttatatttatcgaatctgctatgaatttaattgtgtgtttattagatacatcatcatgcatttgcctttt

SEQ ID NO: 41641 - DNA, 2345 bp, Cannabis sativa
actactgcatatctgatcaaaggggagaaaacggaaaaaaggtactctggtcaggggattttagggaaatgtaaaggatcttgaaataaatgtctagccataacaacctcttttgtgctgcattttccattgtgcgtgcctgtgttcttgtcagaagattgctctactgctggtttaatccacctaactacttctcaaacatgaagaattggttattaatagtgataattatttgagaaaaataaagagcaaagaacaaaaggatgaagagaaaaataaagatgttaggttttgttttgttttttgaacaaaaagatggtagattcaattgcaaagttaaataatgatatagattataaatgattattcttttcgatggaaataacgcttgatcctaaataattatttaacaaattgtattattccttttgtcttcttttaccaaccgttccatttgaatattttcattttcatcaataagtagccaatgagatcataattccaagcaacgctcatacatatggtattatatttgttggaattttaataaaatcaattaagagaaaaatcaaaatgttaagtgtttttttttaacaaaaagatggtagattcaattgcaaagttaaataatgatatagattaaaataattttaaataattatttttttcaatagaaacaacagcttgatcctaaataattatataacaaattgtattattcgttttgtcttcttttaccagttccatttggatattttcgtttcggttaattaagatttttttctcctgaactttgacatctaccaaattatgctcccgaacttttaaggtcgttaaaaatactccctaaactattgagattgttgaatttaaggatttttgtctaattttaattaaaaaaattctaacatagatcaaagtttaggcgtatgatttaatacatatcaaagttcgaggtgcatgatttagtagatatcaaagtctgggaagtatggtttagcacataaacaatcaaaattgaatgaaattaaacaaaagtccttaagtctaaccatctcaataatttaggagaaattttttaacggcaaaaaaagtttaagggcatgatttagtaaatattaaatggaaaaaaaatcctaattacccttttattttcatcaatacctaagcaatgagatcataattccaaataacacctttttattttcatattcactaaacattattttcaaaagttaaataaatttgctaaatgtagttttattttaaaattgaatgagtacttttgctcatagattatgagaactcttttggaacatcaaccaattattagatttggagctcatacaagttaataccagaattacaaaaatagtatttttctaaattttaccattattgtacgtccacaataaaatattcacaattgcaatttatttcaggtccaatatcaaagtcaaaattacactcaatacccttttatattgccctcttttattttatcctcttttttaaagtctatcatttttacttttttttttaaatattgtaccaattttgcccttgtcacttcaagatactctcttatgttaggatattttaggttgattaagaaaaaagttatttttcaacttacccaaaaaaatattgtctcacccaattgcaatttactctctttctttgtaaatgattttgtcttactcttgtaagttgtagttgtaattagtgggtaaaattgtaatttcgaaaccaatgaataatactatgatgcttaggctatataaaggaaactgtttcaacaatatttttataccttaaaaaagtgggattctaacatatagtgataacctaaatcagaccctttttttagtgtaaacttcagcaaatctagcagcaaaatagatttgctaaaatcaacttcgtttaatattattttcagcattacaactaactcataggtcaatctttaatgctatcttacgagcaacgagaataacttttccttcctaattctttagaataaaaaatgaagagtcttgacagcatgcaatgcacaaagtgatgagtcacatttgcttaagttaattaagaaaggtaaactaatactacttatgagaacactaaaataaaaagttaaataaaattacacaatcttctggtaataagaaaaggcaaatgattactgttcagtatgaaagaaagaggagacaatattcatattcatacaataacctataaagggatcacttcatggcgatggaagaacaagccagttgtaccggcattaggaagcaaagctaagcacactacgctttgagcaacttcttcaactgtcagcaccccag

SEQ ID NO: 41642 - DNA, 1322 bp, Cannabis sativa
ttcttctattctaaattaatatgtctgaatttgctacgatgaacatgagtagctaaacagtttattagggtttagatggatattgtttgacattgattcatggttttgatgtgatttaattttctccaatttctatgtattttatttcattcgtacttaattacatttattgcatgatcaccaattaaatgtttatgattttaatgcaaaatctaagaagtgagtgtcaattatgctatagtaaaatagaacaaaatttcgatataggacgagagtacttatatggtttggatagcttatagggtttctgtatttaatgccttttatttacatgtttaatttatcacgggagtaaaaaatttacatataattgagatttatatatctgagaagactataaattacttaagtgaacctactattgcataaaatttggtaatataaattgaatcatattaaaccatagtcgataaatacaattaaaattgaaaactctaacttttgatcatcattaattaacctattaatttacatgcttcatgtttttattgttttctttctagttttaaattttttcttaaatttgatatagccaaatagaagtaagaatttaattttaaagtatttgactaaaatcttcatgagaacgatctcactctttgtgaattcattatttatttacgatacgtttacttacgtattaaaaaaatcataacaaatacacaacttttttaacactccaatggagaatgctctggtttgaaggaagatcaataaatatcaataaaagcaacatcttaaaaggccaataatagaagaggagagattagttaaattatattttagccatacaatttaaattatgaaaattattggagctcaaattaaatatgtgagtgagattaattaaccaaggaataagaagcgattaatatttaaaacatgtttatgcctctttgtgtgttattttttttaaaggtaatgcacacatggtagaattagtcaaagccacatgtaaaattaatttgttatgtttctttttcttgtctatgataaattatagagaattgaattagtacctaacaaaaaaatattgtagtaattaaaagtagttgagccatcaattggttatatgagtcataataatttattgtagagtgattttatcatactagtggtgcttaatactgtgatattatgaatgagcttattataataattaataaattaaaattatgtgagactctattctaatacttaatatattaaggaaaatttatacaaaatattattttacatctttacaattttttttttttttt

SEQ ID NO: 41643 - DNA, 2911 bp, Cannabis sativa
cctatcaatgactatttttgaatataaagctaatatccataaatgtatttcccaaaatgaatttggtaaatgtatttatggagtttcttattctacttaccaatatttttctatcttaccgtagtatcccaaaatgtttgggacaccaattgggcccatagtgccatacccccaccacattgccgattgtgacaagtaaatttcactagacctttaatttcacaatgattatatcaatattatatgtatgtatatatgaacactcattggctaattgtttgtctagcttgtttattattgcacttggtattattaccatagttacttgtcacaataattaaaatatataatgtatattgaaaaaaaaaaaaaaaaagaaagaatattttgtttcctctcgtggtttgtaaacgtacataatgtaaaacaataaaaccccatcaaattatattcattaggaagtgactataaaataatcttaaagaagatatacatgtaaataaatattgtatttaatgaccataataaatttatggaaattaatatctcatgcccttaaatgatttttgtatgccagctacaaccaaaaatgaaaattaatttcccgtgtgttttttcccattaatgtaatcactaatgtcaaccataaatatatctatttttaatcaagacctaaagaaaattaatctaagcaatgtaaaatctttatctttacatatgaattgacataaaacaaagcaagttcatcccgtgaatatatatatgaatgaataccaaatcaataatcataattatgagaatgctagggttgtggtgaaccgatatttaagccactaattaggataaatcaatcataataaaaagtttctctttttttttagttatttaccatgatcatattatgggcccctggggtcaataatttttctttcattgtaacaaaaagaatctgtaataatcggtttttattagtgaaaatgttcagataatgaaaccgggttatgttgacaacccgaccaacaacccgtgatgattcactggctataaccggtcaatgcaatgaactcaccggctgcaacaggtcaacgtatgactttagaggctgtcttgaccttttagtccgataggctaacattatagcttaaaatagagagagaaaattaagggtggagagagagagagagaatctactatggtatggtgccagctatgaagttgaaggatcaaagctttctctgaggtcaaagctggcaatttcattatttcctatttttatttaattttaaacattgttctcctcaccaccttttcctcttatttacacactttgaaaatctatctaattagattcttattagaaaaagaaaagccaaaccaacatttctctccccctatcccccattttctctcttcttctatatagttctctatatttatttctacagaaataaatgtccgtgatttggagagagagatagagattagggatttgatgttgaagactttagatagttgattttccggggagccaaaggaagaagaagaagaaaaaaaaaataaaaagcttaaccagagaacaacaatggctgtcagtacttctccttgcctcaccggtaatgagaaaaaacactggtggcttagtaaccgaaaggtaagaacaacatcaagaaaaaaaaaaaaaaaaaaaagataatgggtttcttccaaaatcctatttttatatctgggtcatactcacaattgatcatactcaaatgggtattaatcactttttaattgatttctttctctctttcttttgtttttcttttcagattgtggataaatatttgaaagacgcaaggaacctcattgctacacaagaacacaatgagatcgtttcagctttgactctcctcgacgcggctctggctctctcgccgcggtttgagcaagcactagagctcaaagctaggtctctgttatatctccggcggttcaaggacgtggcggacatgcttcaggactatattccaagccttaaaatgacttacgatgactctggctctgagaactcatctcagcacctctccagagaacgagtcaagcttctatcttcttcctcctccgactcatcggacgatcgtgatccttctttcaagtgcttctccgtctcagacttgaagaagaaggttatggccggactctgtaaaagttgtgaacaagaagggcaatggaggtaataattcaaactttttcattactcttctgtttcattgattttctaaacctttattttatatttaatataaatttaaaatctttttttacgtttcctcataaattgttgtatatagtaggttcttcttttcatgactctaatttaatattctgaattcggatcagagtacttttttttttcctctgtatggctttgagtaaatgcactgccaccaattttgaaagactcaaaaaaaaaaaaaaaaagattaacctaaaaaagacttttcacaagatttgtttttgaagctttggcaatgcttgggctttgttttgctattttgggtccgaaaacttctcgagatcacatctttttttaatcacttgtcttgtcatttgtactgagctgactcggttgagctaactcggttatttctcaattgaattaaatcacagatatttggtattaggccaagcttgttgtcacctcggtctaatggaagacgccatggctcttctccaaaccggaaaacgactcgccagcgccgcattccgccgcgaaagcatatgttggtcggaagacagcttctttctctccaacttccctctctcaggggaagtctcatccgccaccaaccgacctgcctcgcctcctcaatccctctcagaatcagaaaacgtaaacaacctactcagccacataaagctcctc

SEQ ID NO: 41644 - DNA, 4421 bp, Cannabis sativa
acgcagtccgattggactacgatccatgctatgttagtctcttggattatgaacaccattgatccagagattaaaagcaccctctcaaaatatcgcgatgcgaaacgcttgtgggatacgttgaagtcccgctttgcattggtgaatggtccacgtatacaacaattaaaaacttccatagccaaatgtcaacaaacaaagttgatgactgttgccacttactttggcaaactgacatctttatgggaggaattgtatcaacatgaacctttgatttattgtaattgttgtactgcctgtactgcaggaaatgagcatgagaaacgtcgtaataataatatgctccatgagtttcttatgggcttatattctgagtattatggtcagcttcgtactaatattttgtcacaggatcctttgcccactcttgatagagcttaccaattgatgattcaagaggaaagggttcgacttgtcgaaactatacccgataaacaacctgatgttgttggttttgcagttcgcacatcgtctgccaaaggccgtggttcaggtcgtgtagagaagcaagacaaatcacatctttcatgtgcccactgtaagaaatcaggccatgagattgcctcttgcttcgaactaatcgggtaccctgaatggtggcctaatcaagcaaaggtggagggtggaaattctggtcgaagcaagccgttacagtcaggggagcggggtcgagggtctgttcgtgccaatgctactactacctcatcttcaagctcgattggttatgccgctgctacaccgcctgctcctacctcccagttgttctctcctgagcaatggaaagttcttgctggcctacttggtaacactacaattcctgatgaaagattgaatggtacgtttgataaccaattgtggattattgacacgggtgctactcgtcatgttacttgtaacgcttcgtggttatttgatactcatgatgttgaccattgtcctgtgggccttccaaatggtgaatctgttgctgccaccaaagagggttctgttcgtttatcgaataaaatcactcttactaatgtgcttttcgttcctcaattaagctgtaatttaatttcggtttcacagttaaatgatcatatgggttgtattattcactttaactcatatatgtgtgctatacaggaccaatggaggcagcagattggaacgggtgttaggcgggatggactatactactttggggatcaagaatctgtgcaacaagtttctgtggctgaatcttcttcaactctggatttgtggcataaacgtatgggtcatccatctgaaaaggttgtcaagttgcttcctccggttggtaattgcaaaagtcgtttaaataaagcttgtgagatttgttttcgtgccaagcattctagagatagttttcctctgagtgaaacaaagacatttcgaatttttgaaaaaattcattgtgacttatgggggccatataagcatcattcttcttgtggtgcccgctattttttgactttggtggatgatttttcacgtgctatctgggtctatttgcttattgataaaactgaagtcactcgaatgtttatgtcctttattgctatggttgaacgacaattttctcaaaatattaagattgttcaaagtgataatggcacggaatttaattgtttaagagattattttcatgcatctggtatattatttcaaacctcttgtgtgggtactcctcaacaaaatgggcgagttgaacggaagcacaaacacattcttaatgtagctagggctttgctattccaggctaaattaccaacttatttttggggggaaagcattttagctgcaacacatttgattaatcgaacaccgtcttctgtcttacataataaaactccttacgagattctatttgccacacaaccatcttataatgccattcgtacttttggttgcttatgctatgcacataatcaaaagacaaaaggagataaatttgctagtagaagtcgaaaatgtgtgttcgtcggatacccttttggtaaaaagggttggaggctctttgatcttgatacaaaggagtttttcgtttctcgtgatgtgaaatttgttgaggatgtttttccgttttatgatacggattttgttaatacggtgccagaaaatattcttcaatcaaacctcgaagtagatccagattttgatataacacttgaatattcaactttgcccacaccaaatgaacccaccacgtctttctcagcccatcctcaaacacatgagcccatttcaccaatacctcagctcgagcccacattttcccctcaacccaatctctccaatcaaccccagtccatttattccgaggcccaatctggccagcccacctcttcctctacattggacccgtccactgggcctcctgctacttcaattcaacaagatgcgttgggtcgtggaatgagggaaaagttcccctccgtgttgctccgggattatgtcactcatacaatttctactaatagtccacccccccacacttcgtctccatcggcttcctcaggtactccctatcctatagcacactatataaactgtgataatttttctgtgaattaccgaaattttctttcagctattacttctggcaaagaacctcgttcctttaaagaagccatgcaggatcccgaatggagaaaatctatgaaagaggagatcgacgctcttgaaaagaatggtacatggaccatggagtacctcccaccaggcaaaagagctttaggcagtcaatgggtatacaaaatcaaatatcactctaacggtcgtattgagcgcctaaaatctaggctggttgtgtttggcaatcatcaaacagaaggtattgattatgctgagacatttgctcctgtagcaaaaatggttaccgttcgggcttttcttgctgttgctgcttctaaaaattgggaacttcatcaaatggatgttcacaatgcctttttacatggagatcttgaggaagaagtctacatgcggcttcctcctggttttgaatcttctagtcctaatatggtgtgccgcctgcgcaaatctttatatggtctcaaacaggcaccacggtgctggtttgccaaacttgtgtcttctttgaaaggctatggatttttacagtcttactcagattattccctatttacctatactagtggtaatgttcaaatgaatgttctggtttatgtagatgatcttatcatttctgggaatgattccgctgcattgagaatttttaaagcatatcttagcaattgttttcacatgaaggatttgggacctctcaaatattttttgggcattgaagtggcccgcagttcttcggggttgtttctttgtcaacgaaagtatactcttgacatcatctctgaaacagggctactaggggcaaaaccagctgcttttcccattgaacagaatcataaactttctcttgcaaacggtgaactgtatcctgatcatgcggcttatcgacgactagtgggtcgtcttatctacttaaccgtcactcgtcctgatctatcttactcagttcatattctctcacagtttatgcaggaacctcgtgtggatcattgggaggcggccttaagggtggttcgttatttaaaaggaacacctggtcaaggtattcttttaactgctaatagtgagttgtcattacagggttggtgtgactcagactgggccgcttgtccaattactcgtaaatcactaacaggttggcttgtgtttcttggcaactctcctatctcttggaagaccaagaaacaaaacactgtgtctcgttcgtcagcagaggcagaatatagatctatggcagctgttacttgtgaactaaaatggttaaaagggctattgttaagcttgggtgtccatcatcccaaggcgataaaacttttctgtgatagtcaatctgctcttcacattgctaagaatcccgtgtttcatgagcgtaccaaacatatcgaaattgattgtcattttgtgcgtgatgccattaccgaaggtcttcttgatccttcttatgttcctacaacgactcaattggctgacatctttactaaggcacttggaaaagctcagttcgatgctttacttagcaagttgggcatcttcgaaccttatgctccaacttgagggggggtgtcaggatattttgggattgtttcctaatctttagggattcatccttgctccattttaggagtcaatcttgggatattatcttggtgatctttaggatattatctttaggaatcattttgtgttaatgttgggatattatgtttttgtatatatatatgaaatgaataataaagaagggacacgataaacaccaaaagctttctaca

SEQ ID NO: 41645 - DNA, 1560 bp, Cannabis sativa
ttagtcaaagacataattaagaagcttgaaacttctacaccacaaaagtggttaagctcctactaaaagttacttttgtattcgtcacttttatgctgtttacgtttatgctaggtcaatagaagattgacatcaaataatttttttattattaactggctttggtaacatatttgttaggttgtctctagtatggattttctacatatccacacaccccttcctccaccttcttgagaacaaaatgatatttgacgcgaatgctttgtcttcgaatgaaatgccaaattctttactaaatgcaaagcgctttgactgtcacagaagagaaaattttctcttgtttgtgctcgagctcctccaataacatttgcaatcagattgcctcctttctagcttctgtagttgcccgtattttgtctcccgattgacatagtcacggtagactacagtttcaaaacccagcttataactccttcaacaagagtaaacacatatcccaaggtggacttaagtaaggatcacctaaataattcgaataaacatagcctctaacagtaaagtctgaccctcccaataacataatgcaaagtattccaatgctctctactaggattcgtcatgtattgactgaccgctcccactgcttgtgcaatttctagtcatgtacatacactttatactaccccactgctgatgcataactcgagaaatttccatcctccttgcttcactgctaaggctcatctttgaggttaacttgcaattaataaggagtggggtagatattggcttacaatcttgcatgttgaagcactgcaagattttcttaatgtaattcttttggaaaagacaaatctttctattatttttgtctcgacgaatttgtttccctaaaatcttgtttgctggtcccaagtccttcatttcaaacccctagtcaactgagcattcaactttataatacgatcattgttgggcctactaccaacatgtcatcaacatataaaaacaaaataataaaatcaccattactaaatctcttgtggaatgcacaaggatctaaaccaaggctgttgtatcccatgctaactatgaagggatcaaatctcttataccagcatcttggtgcttgtttaagaccatatagagatttgttcaacttgtaaaacaagtcctcttttcctttttttttttttttcaaatcctcctagttggagcacataaatctcttcttcaaattcaccatgaagaaatacagttttcaaatctaactactctaagtacaagtcaaatatagcacaaatcgccaggaccactcacactgttgtaaataagcagtaggagaaaatatcttattttagtcaataccttctttctgagcaaatcttttcaccaccaatctagcatgatacaactctacttggtcattgccatctcgcatgatcttatggacctatttgttgttaatagccttttatccttgtggtaagggaacaagatcccaagttctattcttatggagagcttcaatttcttctttcattgccgccaactata

SEQ ID NO: 41646 - DNA, 8919 bp, Cannabis sativa
ttagtttaataaataatataaaaaatactaacaacatttatagtgttatgcacttaaaggttaaggtaactaatagcaatgctaattaatcattatttatacatatatacatacacttacatacataattatactaaaaaaaacacaccttgtgaagttcagtaccacagagcaagctatcaacttcctctgaagtccaaaccaaaggcaaagactcttggtaaggcatgacactaaaataaggagcccaaggggataactggccaaggctcctctcgtacatgatggccacagagagagcgagagtaccatccaaagaggaagcttcaatgaggtctcttgcaccagtattccggacggtgaggcaggcaagcttgggaatggtggcaaccacgtcacctacggtgaggtcgcagagtgctctgatggagattccttgaagagggcagtcgtggaattggagggaatcgctaaagtcgacacctttggacttcatccatcgcttgaatgctcgaactcgtctgctggtggtgatggctgcggcggccattgatgattgctaagttgtttctgacaaaagaggtttttcctatgtatatgatgacagtttttgtcgttttggggatttaatgtcgtttaatagccatttagttttttgtcgtttttttaatgattatgctttggttgaagaattatactctcgttagatatgagtttggttttaaattacgttcttcattaaacttacaaaaatattagtatagaaataattttataaataaatagttaattaagagcttctagacagaattttatcaagttcagagactgtcaagaagattggtgaggttgatccactagcagctatacattacattgcttattcggttttttgagtctcgaattgacattgatgaggaaggaaaagaaggatcaatgggtgttatcgtagtgaatggaactcgtactttactgaagagagagagagatttaaagtgactaagcctataaatttaaagtgcgattgcaagtgctccttcatgaaacacaaaaatcaaaaagaaaaacaaacacacattatcaatcatagaaaacactctcgaaacaagacgatgcgtccagcagagatttagtttacatggttggctgtacgtagctatttgtacaagaatctagcatagtagcatgtaatgctcgactcatcttgatcttgtatgaggtcaaaaagatgagcaacaaaattcaaacaaaagggctctggtgtgtttgattttaattaaaagggaagctttaactcaacattgatactataaccataagcaatcgccatgcaacacgctatactcgaacgacggtcgctccatacctgtgagattgaacagtattatatgattcagtacacatttttttaactattctcaacaaactaaagagaaataaatcaaaattccaaaaaccagttctcaagtgagcagcctcagcaacagcatagcttctgagcttctgaagaatccttctctcactaattcgaagcgccaaagaatggtacaacttcttatctcttacgcgacaacacttctctaacgcttcaatatcatcctctaacgaatttgaaccataaagactctctctaatatctgcaattgacaaaagagcatcactaacatttttgttcacaaacttgtcgttgctcggttctgtcattcctttcaacaaaaacatgccctttcttttctttaacaccccaactgaatccacacaagctgacactacaaactccaaggcgttatatgtatgcataggtaacagaattatgtataacaaagttcttagctctatttgaggctctccatcgaacgagatctcgaaataattggaaccttctaggggttgacacttacaccaagggaaagagaacccgagatttttccacatagatgctcttgctctagcgcgtcggctagagaataaagacgagctccattcgactactatttccatgtcgatgttcactatgtcatatgggttattaggctctgtaaatccaaacttgtgaagcagtgtagcattacctatatagccataagtgttatagacctgacaaaagaagaaaactatcaaaacaacaaccaaaatactaacaaatttgaagctggcatgaatggaaattgtaatggaatctaaatttcggttccattgttcgcttcgcttttgaaaaccttgtaatgcaatcaccattacattatttatacgaaaggatatttgcagcataaatactatatgttaagtttttattaccattgttgttacaacaaatttcgtcaactgttgatttagttaagtaaaatgtcacatatcaatattaaataatcttaaaataaataacaatcaaagttaaaatttcaagaaaaagaacaatagacatatgttattatttatttagttttttttcttctttcatttttcagctttgaaattatttattgaaagtggataattaatcaataaacacgtgttagtttagttagatttaataagatttaacgaaactgagattaacaaaacccagatagatcataggagaaaactaacctcagatccagctttgacatctttgaccatagtcatcttcatagctccaaactcatcatcatcctccaactccatctttgaattatctgaattcttattgtaagcataggtaaaatcattcacttggttactatcaacttcactctcagcttcactatcagactcaggatttgaatccgaatcagaatcagaatcagaatcagagtaagaaaaacctacgaggtgtacatcctcagctgcagttttatgattgaacctggaatataacagaagattgtggaagttaaaggattgatattaacaaaaagggtattcaaatttgacaagaacaacaataaacttacaggtcaactaaagggaccattccataaccttgggagtcatcatcaaccaaaaaagagcgagaatgaatgatagttttagcagcgaaatagtcttcaacgcgaaagaagttgggatcgagcttaagagattccattttcaatagaggttgaattctctcttcccagtcctcgcgtagaagagctcgatcttccttcactgcctacctacatctatctacatgttaaagctttgtactttcttaaaacaaaagacaccatccaacttatacaaaatggcctctggtttgatcaaaaaggaatacacatatgcatagtatgcatagataacattatctacatttcaaagttttgtcttttcctaaaacactctactcattgaaaaatttgatcttgggtttatatattcacataacaaagaatgtatattttcatagccaaaagatatgtgtgtgagaaaaatagatataaacaatcatcaacccactaaacaaaagtgagaagtggtaacatcagcctcttatttcaacttctttttcaatttccacacccaaaaacatatgccaatttttttattttctttcttatcatcgttatagttacaacaccattcttataaatttttatatagttttctgtaccaaaaacagaatttatgatattctagtttaacacgagtcattcaaatttgttttcgagattgtatactgtgaaatagttttacagctataataaataccgccagccatgcatatagatttaatataaaggttgagaaagacattgaaatagaagcttgcaattaacactcaaattgcacacaatttttacacataaagtgtattcaattgcatgttgcaaggtattaagtaaaattacataacatagatttatattattacctaagccaacactaacacatcacagataatcatcaaaaacacataataatatatgtaaatatacagatataattgcactaaaaaacacatattgtgaatatacatatatacatgtacatataatacacatatacatgtacatttgtacaccttgtgaaaatacatatacacaaatatacagatataattatactaaaaaacacaccttgtgaatctgagtaccacagagcaacctatcaacttcttctggagtccaaaccaaaggcaaagactcctcttggtaaggcgtgacactaaaataaggagcccaaggggatgagtggccgaggctcctctcgtacatgatggccacagcgagacctagagtatcaccatcattcaaagaataagcttcaatgaggtctctagcaccactagtccgtacagtgaggcaagctagcttgggtatggtggcgaccacgtcacctacggtgaggtcgcagagtgttctgactgagattccttgaagagggcggtcgcaaatttggagggcatcgttaaagttgatacctttggactttaaccaccgcttgaatgatcgaactcgtctggttgtggtggtggtgctggtagtggcggccattgatgatcgctttagtcttctgagagagaggtttgttttggttatgaatatgaagagcaaagttttgtgtcgtttcttggggtttaatgtcgtttaatcttgatttagttagtttttgtcgtttttttaaagattatttgaaaaattaatatatagattacatactattttagatgttgtattttacaaaaggtactgattgaactttgtaccttgttaaattataaaataaattatatattttttaaaattgtaaaagtaaaactctgagctcaatttttaataatttttttacaataattaacttgaaaacgattcttagcacgaacaaatgtagaaaatgtaactaatttcataacacttttaaattggattattattattaagttatattttgacaaaaaaatcagtttatggtcttatttaaactattttgaaaaatatatgattcattttgttatttaacgaaacaaaagatctaattagtaacatttgtaaaacacaaaatttaaaatgatatttactcgagtcattaattttcctttatcatttctaatgcaaaagatgtaaatattttagtaaaatttgcaaatatataagcaaatgttattaatgataactaataaattaaatatttaaaaaacaattaatgacaatattataattaaagaatgtaccatttaaaaaaaatatatattaaaatttattataaatgattgttaaaaagaattattaatattattaataataaataacaaacttataaaaatttttatttaaaatttaccataatactatattttgtgttgaatttgacacaatattataatataaagataattttaaaatataagtaatttatatttttgtcaataaaattttaaaaaccataaatctctctaattccacacaacgattgtaaatttttcaacttttttaatgagattctctcacataaatattctaattatatgatacaattatgtaagaacaaactaagtcattttgagataagcatatcatttgtgataaataagatgagctccaacacaatgatttggagttcttacaaagtgaaactatataataccaaacacgaaataaatcttccaaatataaaagtaaatactttttaatactatatcataataaaattatattttggataatttaatatttatacatatactacaatttgttttaactaatttttgtggacgacaagttctaagaaactatcaactatctatgtcgcaaatggtattgatcatagcttcattctttcatgatgtatcaaaaagcgtgccaccaacaatagtgtcgtgaagaaaaaaaaaaattgcacaactaagctagtgctttgatgatttcccaaacgcttaaggtcacttgcataataatgaccaagtatataaatctaaagttctagtgcgagcgtttttctatgaaacacaaaaatcaaaaagaaaagaaacacattatcagtcatagaaaactctttggaggcaagacaaagcgtccaacaaagatttagcttacatggttagttggacacaactatttgtacaagaatgtagcatagtagcatgtaatgctcaactcatctcaatcaagagaatattacaaaagtttcttgtttaacacaacattgaatactataatcctaagcagtggtcactcaacatgggctatacccagacgactcagacgatgggtgactccatacctgtgaaattgaagaattaactagttgtattaaatacatgaaatagtgcaaaaatctgagatacattccaagtgtaaagttctcctaccagcataacctctgagcttctgaagaatccttctctcgctaattcgaagcgccaaagaatggtacaacttcttatctcttacgcgacaacacttctctaacgcttcaatatcatcctctaacgaattcaaaccataaatactctctctaatatttgcaattgtcaaaagagcatcgccaacaattttgttcacaaaagtgttgttgctcggttttgtgattactttcaacaaaaacaagccctgtccttccatccctattgaatccacacgaactacaaaatccaatttgtcatatgcattcctcggtaacaaaattatgtataacaaagttcgtagctctatttgaggctctccatcaaacgagatctcaaaataatcagaacctactagagtgtcacactcacaccctgagaaaccgagttttttccatagtgatacccttgctctagtgtgtcggctagagaataaccacgagctccattcgagtactatttccatgtcaatgttcactatgtcatatgggttattaggctctgtaaatccaaacttgtgaagcagtcttccattacctatataaccataagtgttatacacctgacaaaacaaggctaatgagtgttcggttggcatgaacagaaattgtaatggaatcaaaatttcgataccattgttcatttcgctttggaaaaccttgtaatgcaatcaccattacatcattacttttccattactaaaagaacaataaaataagaagcaaaatgactcatatactcgagttttgaaaaattttattaacaaaataaccatttatggtcacataagttgtttttgtaaccatagatttatactgtatagtaaattgagcgtggttatttttagcaattttatttacattgttagttcaacaaatttcacctcaataccttccttcatcgaaatataacaaacaaaacagaaaaattcgattccagtgttcattacagtattaaaccaaccatcattatacaaatcccaaatgaatcataggagaaaactaacctcggatccagctttgacatgtttgaccataatcatcttcatatctccaaactcatcatctaattcaggagtaatctccatctttgaattatctgaattcttattgtaagcataggtaaaatctttcacttggttactatcaacttcactatcagaatcagaattagaatcagaatcagaagaagaataagaaacacctacgaggtgtacatcctcagctgcagttttatgattaaaccttgaatataacaaaacatgtggaagttaaggattgatacagcttacatatattaacaaaagggtattattcaaatttgacatgaacaataataataaacttacaagtcaaccaaagggatcattccataaccatggaagtcaccagcccaaaaagagcgagaatgaatgatagttttagcagcgaaatagtcttcaacgcgaaagaagctgggatcgagctttgaagattccattttcaatagaggctgaattctctcttcccagtcctcgcgtattagagcttgatcatccttcactgcctacctacatctatctacatgttaaaagctcattgtttaagatgacatatactctacatttcaaacttttgcctttttcctaaaacaccatcatcaactcattgaaaaatatgatctttggttagtatattcactcacacaacaaagaatgtatgttttcataacccaacatcaacccttcacagaaaatcatcactaatagccaaaagatatgtgtgtaaaaattagataatacacatgtagatataattgtatatattaatataaataaccatcaatctaattatagttacaacatcatcctgtactgaaaacagtgatattctagtttaacacgaatcattgaaatctgttttcgggattataaactattcagaagtttaaaaaatttacagggataaaggtgcagctataacaaataccgccatgcatgtagatttagaatagaggttgagaaagactttgaaataggaggttaggaaattgcaattaacattccttaaaaaaatagattatgcacacttaaattgcacacaatttttacacacacaatgtgtattcaattgcatgttgcaatgtgtattaagtaaaataacataacagagctttatacattattacctaagccaacatcaacccatcacagttcacagataattatccaaaacacataatatatgtatgcacacacaaatatacatatataattgtactgaaacacacacattgtgaatatacatatatacacatacaaatatacatagatatactttggtacaccttgtgaatatacatatacaattgtactaaattaaacacaaatatatacaaacatatatatatatatataactgtactaaaaaacacaaacatattgtgaatatacatatatacatatatacatgtacatatacacacacatatatatgtacatttgtacaccttgtgaaaatacatatacacaaatatatacacatatacaatacaactgtaaaagaaaagcacacatatatgtattatgtatacacaaatacacagatataattatactaaaaaccacaccttgtgaa

SEQ ID NO: 41647 - DNA, 2813 bp, Cannabis sativa
  modified_base (452)..(460): a, c, t, g, unknown or other
  modified_base (583)..(585): a, c, t, g, unknown or other
  modified_base (666)..(669): a, c, t, g, unknown or other
aaacaagctccaaaaatttcaaataagcctatattaaatacagtagtaactcaaatttaaaagccgcccgtgtgttaattgtggtctgattttacaaaaattaaataaaatatattctagaattatttagttatttttctgataaaagtaatgatagatagtacgctgattaatatatattttggttgatgtctaatcaaataaaacaagatataattttttaattatttttaatattaacttacttacttttgttcttttctatttgtatatttttatttttattttgtaggctcctttcaaatattattcacaataaattagatggtgctgttgattagatatttttgcttgtcttttaatgcatactgtttaatcaaattatgaagcagcagtagctttatcacgctataaaaatcttacttttagtcacaacaaaatttgtaactaannnnnnnnnaattgtgactaattataaattaattattattcttatgttgtgagtaaaatgtccgtaattaaaagtattaatcacaaaaattacaatttgttataaatatatttttagtcacaatatttgttnnnactaaaactaaattaatgacaacatgtaactaaatattatgttttagttacaagtattattttgttgtgactaaaagtcannnntagtcacaaaaaaattatattgtaactaaaaagttgtcactaaaagtagcagttttttgtaatgtcaatctcctcatgtgtgttaaaagatattgtaagttagtcgtttaaatttctaagtgtgtctctaaactaagttttgtttttgtttttatttattttagcgtttatatattataacaatatataatttgaaatttgaagttaagacctttaacacacacgcatttttttatgaccacttgagctagcctgaactaggtaaactaagttttgttatgaattagtaattgtgtgctcttttatgacccagttagaccatctccaatgagagatgtaaaaattgttctatatttgtcacaaaaagtagttttgtagtaaacttacattaaattttaactttgtgctccaatacacaattgtaaaattttaatgtaaaattaatatctaattaatatttttttaatttaaattaataactttataattaattttattattattttaatatgtaagacaataaaaaataatataaatatttcataatttaatgtgatagttaaatatactaataaaataatagaaatgatataaatgtaaatgaattaatagtgcatttattgtggtgtaaattttacatcataaaaaatattgtgctaaatttgacctaaaatttattatgtgccaaatttatattattttttggcacacaattaaagtacacttttattaaatgagttctattgtaattttttaccatatcgtgagctttattgggcggacccaaatcttctgtcctactttttgtgtgttcccatctcccaattcaattaaaacattataattcttttaaatgtgaatcctatttaatagtttaatacataattaacaaacatgttttttcttctaatattgtgtagttttcattttctgaaaataaaaaaaaattattatttaattattttgtttaatttcacatattttatttatgtgataattaaaacatatcaaatttaaattttaaaagatacttacttatttaacaaaatacaaaaatactatattattaaagataaaatagatactatcattcaaaattatattgatgtaatgatgttactacatgatacttacgccatctttttttttttaaaaaaaaaagaaataaaaataaataaataatgtgataatatttataattaaaataaataatatatttaataatattgtggagatcataattattaattatagcattcttaaagggtgttatattatttgagtatttttagaagtaaaatatttttagatgatatgaagatttttaacacccgacttacctacctactgtaactactaaatttgaagcaggattgctgtaacataaaagtaaaaaaatcatctactattaacatctacatgaatccatatggaatgactaacagggccttgtcatttggggtcctctgcattttcagcagctgaggtcccctgaccactgcgtcaactgtctcagcttcacagcattcttgtttcccaccaccacacctttcatttgggccagcagctgaattaagcccaacactgccactggcaccaacagcagccgcagcctcaacatgatgcattgggtgtataccattgttggtcccaatcggtctcattgccatttgtgcatggattgctgcttggtgctgttgatgcagttgttgatcctccagcatatctggtgtggattattcaaaactagagtcattgtttactacaaacctggggaggcattgctggtgcctgtggttgagcattgcagctaaatacatcagattcttttgaagctgagccaggatcctatatcatcatagttttattgtaaatgaataattttttaggtacatgcaaattataacacagatttccacactttgagtattaaaaacaaagttccaacaacacagctgtaattctaaagcaagaacatatgcataagagtgcatctctagctctttcattacattaaatgcatcaagtttgaatatatatacgagtcacctggttagttatcttagaattgtatgaacaattcaataaaaactaactaacaatattaattgcatgactatcttgtatttatactagattaatat

SEQ ID NO: 41648 - DNA, 1064 bp, Cannabis sativa
aaaacttatttttttttgggtaagatatagaagaaattaaagttaactatattaatattaaataataaactaaaaatacttaataataatattgtatttagaatgagtatatcaaatctttttgtgttgtttttagcaaaaaaaaaaaaagaaatgtgttcaatttagccattaacaacttaatatattagagaaagctatttttttttgtaaaaaaaaaatattttaaaatattgtaatatagcatttcattacaaatttgaaacttcactaatatattcaaaataaatgataagcatagttttagatgaaactattcaagtgaggcatttttaatggataattactgctaaatttaaattataggtaatgaacataaaaaattaataattaaggtttcataaacaataaaagaaatagaaagagagaatgtataggaattaagtgtagaaatatattacgtaacataatatatatagtacataccacacctccgcagaagcctgcacacccattttgaagcttatcaacgctgtgaatggtggcaataagcgtcccgtgaagcaatatcggcatttttgtaaataatgaaaatatatctctacaacataaaatcaaaagcaaaagttcataattaattattaaacaactgatgatcagaattattgaaattgaatgtaacgttaatttacccaagggtggaatattagaggcgtagatagaataatggatcatataatatagtagtgttcatatttgatgatctaaatatagaagaaaatgaagaagaggatgtttactgttattggtttggatgtgtgggtatcaagattgaaagagaaggaaaagaaaggcaaagcatatatatattttcagaattcaagtaagaatcagttcccccctttcctaccttccaagcagcccctaaaccccttaatatacccttttcttttattttgttgggaaaatatagattttataagggaaattttatttacatcccaacaatttttgaaggcaccctagtttgaataattttaatttgatataaaatttatattttt

SEQ ID NO: 41649 - DNA, 1369 bp, Cannabis sativa
attaactattttgtccttcactaaattaaacttcttgtcctttaacctttacataattaaataagccagtccaaattataggtctttatcatgacataacccccaaatctgatcctggccgtccgatcttcttaaaaacttttattaaggtgatctcatcaccacattctctgtctctttgatacctccctccttccctccctctccggcaatccaaagatgatatatagaacaatatatacacacacatatatatatatatatctacatcagttgctggtaggtagctcttgctgccctaaatagctagcttcacttcttctctcgggccatttgagccatttaagcgcctcccttttatcgcgccaagcttttgcagcaatcaagcccgatcccactttcaagataaggagagagaaacaaacttctaatataaatatatatatatatataagaaaagagaaagagaaagggattattagggcatgtgtgtgcactacacttttttatattttcttttttaattaattttggacttgtatgtgtgtgtgtttgccttcctatatttaagtgtttgtgttctccattttcccattcttgaaaaaccttcctttgttcttctctttgttcttttctctttctatatacatgaaccactactactactactactacttagtcctcgggatctgataatctgatctatagcacaaaacatttatatagttaaggtttttgatcatcatacacttcaattcccgaggtgatctgctccatcacttttaattgggtttctttctctttctcttgtttgtttcttttttctctctacttttctttttgtctcctttattagtggacttttggtagaaaaaagtacttacaagaactaaagatagtgacgaaatcccaacacaagagcttaatcaaaaggtgccttattaccaagcttgtctctataagttgaatatttttatatacaataaaaatatatatatacatacatattatccacacacacagacatatccatatacatgtatcagagcttcgattctaccagatctgaggaaacctagttgtctgcgacagagattttgtttactttggatcaacttctctaatccgtacaatacaagattattgcaatctagcttcaaggttgtgcgttgctattacctcatcttttttatatttcttcttctcttcttctttcttaatattgtgtgttaattaatatatatatttatttaacatatagtatgatattttttctttttgatccgtattatatattacttggtttattaaatcatgtggaatatcgattttttgatacatatacatatgatcattgaatttttctcaa

SEQ ID NO: 41650 - DNA, 1408 bp, Cannabis sativa
aattagactagttgcattttttttgtatttgtttctaccatttttttaaaaaataaggttcaatttattataattttaacaaaatgttaaacgaaatatagttagtttggtagaatatgattattatagattttaatttaaaaattgagttattacgtacccagcaacaattgatgttatacaaactgatgaaccaacagccaaaccagccagctctcccacctgcaattatattgttttaattaattaattagtccaaattaattaattaataatccaacatatgtacacattaaatgatatatatatatatatacgtacggctttagcatcagttgcaacagcagaagtgataaacatcatgttaaaagtgacaacaatctccattatcaaagccctaacatcactcccagaaggtgttgtcgtcccaattcgatctattgggtccagaagtgcacgtagtgtaaatgctgctgcaattgctcctgtgaattgagataatgcatagaatggcacctacacaatatatatatttaataatattagaacacaccaatattcttacatacaatgtttacattttttatattttaatttaatacaaaacgttagtaattttaatccaagataaaaaggctaggcttataaatttataatcaccttcaataaatataatgaagttagtcaactcgatcttattacctttcaaaaatgtagaatgatttttttgagttatatcataattaataataaattattgtaattgtttttttttttaacctagctaattgttatgaattacaccaagatcgtgccactacgtaagcattacatatattgagaaatattaaagggatgagtggctaagattcttataaggtgtaatattattattggtataatttaatatcgagttttacttattttagtttaataaaatttataaaaaaactactaactaattataagataccatgtcacataagcactttagtacccaatagcaatgctcatatacatattgccctttatatatatacaaaattttacaatgcaccctttaaaattaaagagattaccaatgcattccttatatggttatgtacattatagttatttaaaaacattgaaaacaagttcaaacattgtgttacacacaagactattttaatttagatgcatgcgaaatcaattgtttgaatattactttttatattgtaaattattacgaatttttcaaaattttgtataatattttgtaaataactatacatgaatataaaaaaaagttagactaaataattattctaactgcatgtcgaaataaataaaaaatattaatgtatccctattaatgtgcaatgtgcgcatattataaaatcatcctatattatatttcaactctaca

SEQ ID NO: 41651 - DNA, 1964 bp, Cannabis sativa
actcctcatgatcacacagattttgatacacaattataactccttaggctacatgttatagattgcaaatatatataacttcttttataatgtagtactaactttagaatttgattcccaatagaattttgttaattctattttaaaattggattttaatttttcaaaatgttgtcttcactgcagcgtacgctcttatcgctcgggggaaaggtgaaggatgagcatatctctgtactaattcacgccggtcttcttgtgagtgagtttgctttcttttcagtatttgttaactcctaaagatggttttacctttttgagtttgatggttttttggttctaataccataaacttttacttgtagactcggcaaattatggatccaaacatgtactggcttgcaattcctaatatcggttcagtgctgaagggcctttctcaggtatcaaattgttttgtttttcaatctacttgctcagatcacagcaattgacttgatttgaagtctaataattataattatactttaagttcttagcttgtcttaacttaggcccgaccctaattctggttcatgtgaaatgattgtacttacatttttgcttgttcaggggagaaaagaagttctttctcttcttaaccgtaggcgatacaaagaaatgatgatggttactttagagaagacgcgtcttcgatcatcgccacttgatatgaggtttcatcttcgtgatctgattggttcgggtcacctcaaaactatccagacgccaactggcatagctgttcaagtggcgaaacactgaaaaaagcttagctcgacacaaattcatcgatacattaatgtgagctcgtttttcatctttcgatccttaatacgataaacatcgattgtttattaaagagattttaccaatttatgactaactaagtgaaaatagagatatcaactaaaaattagaagtataaaaagataaaattaatgaagttagaggtaaactaaaattagaaagctgtcattatgttctttctggtttaagttattgatgaatttttcatctattggttagataaaagagtttgtaaatttcaacaattataaattcattattcagattattgagaaaatctcattcaaattcaaagataagtttttatttttatttttatactaattttgccaaatatttaagtaaattgttatgtataatatgagtgtggacaaataaaaatgtaaggggttaacccgaaactcgatattcaaatattaaaatggaaataaatttttttaatagtttttagatgggtggatattttttttttttgtttttcaaatttgaacccgaaactcgaaaaaatcgacacaccatttgtgttcatccatataggttcattatttcttgcatgggaatttccattttcataattgaatcttttttttttttttttgtcagaaaaatgaaattgaatcttgatttgatttagtttcttaataacttgaccaacaacaattcttgcaatagtcaaagaaattccaagttttgtgatcaaccatttattttattgaccttagtcaacttctagaactttccaaatataatctacctagaatccttatgtaaagaaaagaagaaagggaaaatattgacaaccaatcaattaaaccaaattgtggtacttcaactacttacttttacaaccaattgacctaaattcgtacatcattacattgactgattaaaaaaataatccacaattaatttattaaaaaaattatgtaaatgaaatcatattgaacatacattaaatgaaaatatcactcattgagtagatcacacaaaaaaaaaaaaaaaaaaaactaactaaaccgtttacaaaaataataataaaaatcttaacaacacctccaattaaatgtatcactgacaattcaatgagtacatgacaattcaattcaatgatgaac

SEQ ID NO: 41652 - DNA, 693 bp, Cannabis sativa
ataattattgttatagtataatatgatgatgagtgtggcagggtagttagatagataatattgggcatataggccaaatgcatgggttataaaaaatgtgatggagctacattgtctttctgtttggtcatgtttccaatgagcttatgttcccttgcacagtaaagcctctcaaaaaagaagtctttttgttttgtcattttcttgttttattcttcaatgatttgggttttcaaatgggatcttgctacaccaaagtctcatatatgctctcccagctcatttctcttattaaaataatcttaatgctttttttatttatttgtatatgtgtgtgtgacagacatcttataatttaattaccatgagaaattaaagaagaaaaattaattagttttttatatatagaattttactttatttctcattagtgcactatatatatgtatatataagtactgatcggtccattgtacatatatggagtgtgacactataatatgaattaaatattttatcaaatagcaggtacatacaagatcgatataatattaattaatatattttattaaaaaaatagaactgcatgcttcaaaaaattaaataatatatatttttatagtgtaaggaattaaaaagagtaacgtaacatgcaacgatacctaactaataattttacagtaatttgctact

SEQ ID NO: 41653 - DNA, 2699 bp, Cannabis sativa
acaaggatagtattgtcaaatactgtcacctaggatttcatattaacgctaattttctcatctttggaaacttgaatacttttgacgagctaattttggtttgtttgttggttttttttaatgactaattttggttactagttatgaacatattgctttatttttattatatttttgtatatttattataatttgatcagttttgcaatttgaaatttcatatggatttacaaacaggtctgaaatttaaataatattattcatatcacacaaaaaatttaatccaagttaaacaacctaaacagccatacacaaatcatcatcctcatcttaagccatcctcccgacccgcgtactgactagctctctaacgccaagcagtggccccaacacacatcaccgactagctctctaatgccaagcagccgcggcaccaatcttgacacccagcctttgcccttgcagcaccattgcataatttttttccccacactacaagaaaataaagatctaacgtcaataataaatttagaaagagcgtcgttagaaagaccgtctttcttcagcaatcgttagaaagactgtcgttcttcagcaatcgtcagaaagcgtcattcttcaggaatcatgtaaatgacatttttccaagtgacaaaagccacacatgataaccaatgcattaggcataatttacgtcagtttccaagaaagaaatttgatgtatgtagagggatctcgcataatatgcgtttaaatattttttataacgttgcttgttaagcgtcagttgtcataacaaaccacagtaaaaaaaaaaatcacttaaacatcatggtcccaagattgacatcaaaagagctatcacttgaagaaaaagaaaatataccactaaaaaatttatatgataaacaattgaagagaatcaagcttcatggttctacaatttctttatttttattcgaccataataaggatatattttattttacaacataaaagtgaatggaaattttcattgtgtcaaataaggacctaatgtatgatgtaacaatccaaattgtgagctgtttgttagtacaaatgtgtaataacgcttgaaaaacattttagtaacttatttggacttgtattttttaaaaattattaattggacattttattttattaaatgataaattagacactgtattatccaaaatagtataaatagacttaaattgaattttcgacaatttttttttaatataaccaacttgaaaataaattctgatacggatagatacaaaaaaacataaccaattttgtcataatacatttacatcgggttattattaagttttattttgaccaaaaaaatatttagggtattaattagtatattttggaaaatacaggatgcaatttgttatttatcaaaacaaaaggtctcatcagtaacttttacaaaatataggatttaaaataatatttaccctaaaaaaatttatttaaattaaattaactaatcaccactaacaattgtatgctcttttatatgaattgagttaaaaatatagtttttggacaaagttattagaatttactcaagctttttctattaggattttatgctctaaataaaatttaattttaatgttatcttaatttcatcatcaacaaatttaattacttatttcgtacattacttaattcaaatatttatttagtgatcatatatttgatatataaattctattaaatcctcatcatattgttatttataatgatagtgttgtctacacaattaaaagtaattatgactatatgatataaattattttagttctgtgatttatcaacgcactagatttatactgacgtgataatcaacgatgtgatttacttacacttatataagtagaatgccttttctaaggcattagcaaattgagcttgtatggaatgtattggttatacatcagactgaggcgatattaatagtgtaaatgatatcataaacttatcataatatcttttcttagtcaatatcacttagttgatcttagataaatatgatctcaatcctgagatggttagactctaggctaatactattcaggttttttgacttgttcgttaccctcttacctataagatttacatccttgggaacatagtagtataattgaatgggagcactaatcatagatatggaatctatagtttcaataaattcttaaaagtgaaatgagggtttccttagagcttggctaaacgagtttaaatggtggagtactcatttcagtaaatatattagtttactgtaatctcatttacaagtagctatgtgacgccctaatctacgaggacaccacgtgtacgattttataaactagttttacaaaagaactatatacgacaatgcctcacaaatataaaaccaaaatacacaataaatacagcccaaaataactcatggcaactcggcacgcaggccggcgaggtcaatatgtacattgctggagaagattgtcacctcatggttgatctagctttttttttatctttacctgcaccacatagcaccagtgggtcacaaggatttagcaagaaaagtaataataataatcatatattttattattcaaatactatcatttatacacaatcagaatcaaaccatcacgcattgttcataagatgaaattcaaatcactact

SEQ ID NO: 41654 - DNA, 1133 bp, Cannabis sativa
tgttatttttaatattactaccactttacagcttgcaaaatatttatttagaagattatttattaaatatattatgataacctcgtataatcaaattttaatattaaaattagttttgaactcacaaatcacaatttccaattatgatatttcgtctgatcgggatatctatatattcagtctaatcattttctaatgtggacgccattattaattcctttattataattataaaattatatatatttatgtatattagtacagctcgattcacaatttcacatgctattatatacaaattagtaattatatttctgatttaatatataattaaatttatgatcataagatccagtactcatttacacagaaggaaattaaattaactatacatctcttcttttgttaattagcatctgatcaattttcattaatataatttacatgtctctatatatatatcattcacaatgaaaattataattaatatagcatattaaaaataatttaaatgaagacttagatattaaaaatacaataacctttttattaaatttaattctccaaacaacaaaatagataaactgatccaataataatacaccactcattcctttcctcttacgaaataatcaagttctatttccctttaataataatttaatatgtatatactattatatatatgagtttcttaaaatattaatgaataatgattgtgatacactcatcgtacacactatctatatacaattttctatataattaatcttaactatatatgtaactaaaaatgatatagttcttatgtattatttatgataaaaattaaatacacatcactataaaatgtgtgcaataagtatttgtcattagcattcctcagtattaattatatttacttatataaatatgtgtgaattaaattaattatttttatgaataaaaactatagaatttgcattactgtaaatttttaaattttcaatgtcaaaaatatttacaatacaatgctataaatattatatatatatatatatatactagaagaaaattacgtgcgaggcacgtatacttagttttatgctaagtgttttttatttcatatggattaagagtctgtcgtaatcagg

SEQ ID NO: 41655 - DNA, 1025 bp, Cannabis sativa
taattaatattgatctattttaattttatttctaatattgactataacatcaataattttcttttttaactaaagtaataataaatgaattaatgttagagtgataaaaatataactaaactaaattttggtactttaaccaaaagaagatatagtcctttttggagacgcatttatagattaattaattgatgtcataatcacaccgattaacaaatcaaagtaagtacatctataatctataattttataaagtggaaaaggtagtgatggaacacttttagttacattatttataccataacattgttgacatttccaaaactaaataaacattttattcaagattaggtacttgtagtgtctagtaactttaagacttattgtcttgtgattggctagctagtaatactccttaaaagttattatattaaactatatgggacccgatacttaattagatcaatagcgatattaacacgtaagaagatgcttaacaccactgatacattttagcatttctctttatttaatgggtttagttgttggtttattcatgatcttttattgcgcatacaaaacttatttaccaactacctctggatttagttacatctattttttaaaaaatatatagctagggtagacttttttaccatgtttttggattttgttttaagtaattcgcgtgtatattttttaaaatttatttaactttacaaccatttatgaatacttaaatttaattttgaatattaataatttatatttttagaacttatctagaagctaggattgcaagattttttagaagagaaacctggagcaggatttgattttattttcctgtttttggtatattgataagttataattagttctattttttataagatattcatttttagtaataacaaatcttttaatttttgaatatttaagaaaataaacaaccttttttgtggcaaaagtaaaattgtaaattaaattattttattgttttgggataccaggtactattaaaa

SEQ ID NO: 41656 - DNA, 4054 bp, Cannabis sativa
agctgaaaccgattctgcagcagaaaataatgcagcagccccaaactcttcccatggtgttacaagaaaatctcaaagacaaacaagacctccagctcatttgagagacttcgagtgttactcactcattcaggactcttcttcaactcctcatcctattaataaattcatatcttactcaaatttgtctgacacatacaaggcttttattcttgcagtttcttctgtcaaggaaccgaagtcttattttgaagccattcaaattgttggttggctgaatgctatgcaatgtgaacttaaggcccttacagacaataaaacatggaccattgttccattgccagcaaataaaagagccataggatgtcgatgggtctacaagattaaatataatagcgacggcagcgttgaacgattaaaagctcgacttgttgcacaagggtatacgcaacaagaagggctagatttctttgacactttctctcctgttgctaaaatggttacccttaagttacttttagctgtttctactataaaaaactggcatattcttcagctagacgttaataacgcttttcttaatggagacctcaatgaagaggtctacatgcgtttaccacaaggtctaactcttccttctactcttaatgcagaaaataatctggtgtgcaagttgcataagtcaatatacgggcttaaacagtcctctagacagtggtacaagaagctatcagacgctctaatacaagaaggatttcaacaatcgcaggcagattatacactcttcacaagaggaaatgaggacactttcattgctctcctcgtctacgtggatgacattgtaattactggacccaacatcaaccttctccacgatttacaacgttctttacaccacaaattcaaactcaaagcactaggaaagctgaagtactttctcggttttgaaattgcttgtgctcaagatggtctctttctttctcaaagaaagtatacacttcaattacttgaagattcgggttacatgagcagcaagcctagcaagaccccaatggaccctaaactgaagctagacaatgaagatggggaagccttagacaacccttctcattatcgacaacttgttggtaaacttttgtatttgaccttgtctaggccggacatcacttttgtcgtgaactcccttagtcaattcatggcaaatcctcgaacaacacatctacaagctgtgcaccatctccttaggtaccttaagggaagccctggacaaggactactctactcaaaaacatcaacacttcaccttcgcggtttttcagattcggattgggcctcatgtccaattacaagacgatctaccacagggttctgtatcttcctaggcgattgtctcatatcatggcgtacgaagaagcaacctactatctccaagagttcagccgaagctgaatatcgcgccctggcagccactactagcgaagtcacttggttacaataccttctacatgattttcagattcctcaaccacaccctgcattcatttattgtgacaacaactcggccattcacattgcaaacaacccaaccttccatgagagaactaaacatatagaattggactgccacttcattagggacaaaatcaacaactccactatcagactcatccctatctccaccaaacaccaattggccgatgctttcaccaagccacttacttctcctattttgagctcacatatctccaagatgtcagtttttgacatatacgctccatcttgaggagggggtattaagaatattagatattgcttgctttttattcctctgtttctctcctcacagtcagtttagttggttaggcttgttgttagttggttaggcttattgttggttttctgttattttggttattagatatatccactacagccacttgttttgtatctcttaaaccgcctctaagcatagtatatatatgcctctcctatttccttttgtaacttaatgtaatactttcacatactgaaataaaatgatttttctctgctttctcaatatggtatcagagcgggaaatttaagttttcctgtccgatccgtcttcctccagcaagctgtgttttcttctccggcgaagctgtgttttccattctctacttcgatttcttttctctattgtttcctctgctctttgtcttcttgcgatggctacagatggggatcaaaccgaagttcaaaccaccattacagatgttggaagtgatcctggacagtttgatcgaattctccatgttgctccaatcaagaatcctcttgaagatccagcaagtccatactaccttcatcacggtgataacccaggaaactctctggtttctcaacctctcacgggacaagacaattatgtctcttggtgccgagctatgcaactcgcgatatccgtaaagaacaagatcggatttcttgacggttctattcctaaaccctctatctctgatcaaaatctttacaatgcttggtatagaaacaataatattgttatttcatggattctaaactcggtatcaaaggaaatttcttcaagcattctctatgatgagtgtgcttctgctatatggaatgacttaaaggttcggtttcaccagaaaaatggtccccatatatacaatctaagaaaagatcttatgaatcttaagcaagaagctcaaaccattagcatgtattttacaaagcttaaaactatatgggaagaactaacaaattacaggccttcatgcacttgtaatggatgcacatgtggtggagtcaagaagcttcaagatcactaccacatggagtacattatgtcttttcttatgggactttcggattcttattctcaagtccgaggtagcatcttgctaatggatcctcttccggaaatcaatagagtgtttcatcttgttactcaagaagaacaccaaagaggtaacaatgctgtccctaattcaaataattctaatcatgctatggcttttgcttttcaaaatgacaaaaagggaaatcaaaaggatgataatcaaggctctcgaccacatcctcctaaaagaaatcgacccttttgcactcattgcaacatactaggacacacaatagaaaaatgctacaagattcatggctatcccccggtttcaacaagcaaaacaagtccaaagaagcaagtgcaaaccagatacaaacagaaaagaatgaagaaatcagcacctctgaaactcatactttgcttccgcaactctcaagtattcaataccagcagttattgaacttactcgcctcacagcaaactggtaacaactccaatcaacctggtacttcctctggaaattcaggtattatcttatctcataattccttgcctcctttgaacgattcttggattattgataccggagcaacaagacacatttgctctagtatcaaacttttccaatgcatatgtaagatcccccctactaaactcatcctccctaatgacaattttctaatggttaatcaaagtgggaatgtcaatcttggcaataacataatacttgaaaatgtactgtacgcacctactttcaagtacaacattatatcggtcagctttcttaccaaaacctctcctatttcagtcaagttcacatctgacagttttattatgcaggacaataccagcaacaaaatgattggaagagggagtgcgatcaatgatctatatgttcttgacaatgcacctgaagcccctcaagttctctcggtttctgcagaaacatggcactctcggcttggccatttgtctcttaaacgattggatttacttcaaaatattttagattgtaatgtctctgatttgcataaaaaggagccttgttacatatgtcccattgctaaacaaaggaaacttcctttcaataataaagtcaagtttgctcctaaaatttttgatctaatccattgtgacatttggggaccatatcacattacttcacacaccaattttaagtacttccttactttggttgatgataaatct

SEQ ID NO: 41657 - DNA, 569 bp, Cannabis sativa
gtctggtctccgagaaagctcctggagtcttgtttccaagaaagcctgaattacaaagttgatactcgatattaaaattcagtactgccataaaacaattatatcacaagaattgaagaagtacatagtcatggattggctcgaatataaacatttcacataatttaaagaaccaaataagaaaaaaaagtggaactcaattaccacagaaagttattagtgagaaaagagtaacaatgagaacatataaattaactgagaaacatgctagtcctcaaaagaaatcttctacaaacaatttatgatgcaaaataatcttacaatgtaagacctgattctttgaagcatcaacttgtctcgcgaatattcaccttggattggatatacagtgaccccatttctgcttattgaaagatcagatgctgggtcagtaagaataactacattgctctgaggcattgttacctgcacaatatgcaatatgtaaagacaaatacacatttcttcactttctaaacaatcctttgaaatattctgacaactcaataggtatttcacaaagctcaagt

SEQ ID NO: 41658 - DNA, 640 bp, Cannabis sativa
aaaaaaaaaaaaaaaatctgtgaaaatgtaaataatggttagatatttgtaagtaaattactaaattgtataaaaataaataaaaatgcccttttggtcttcccttttagtgggtcataaatcatacccaaatccaacgccttaatctcctttttgttctgcatttccacaatattatcagccagctttgtcgatggttcagtatctgggcacacttcgcccttattccctaacctattttgccccctacgcacgccaaatcccactccccacttcctcaatttcacttcctaagactgcctcatctccctttagacgctttctccatgcttgtcttcgatctggtaagtaaccctctaaataatcaatatatacaatttgtttagggttaatttgtcttgcggcagttctacattattatcagtgttttaatttttgatttggcattgtgctgtttcagttaaattatagatatcgatgggttttatcaatggcgtttatgggtgttgtaaactacgaaattattaggattatgttgtttaatagactagcaatctcaattatgtcattgttatatttatttgggtcctgctatttctctacatatgctcttgtacgtataactttgatcatatagaaa

SEQ ID NO: 41659 - DNA, 800 bp, Cannabis sativa
gctccatttatttcattgttgtaacaaaaatttcacattattattcactataataacactttgcaaaattgcactgttggagcttgaattgtggtaaagtgttgctttctattagttgagataatattcatgatgtgaacaaagttgaaatagggctattcttcaaaatgatgaaaatgagaggcattgcatatattgagttagttcatatgatgtagtgattttggatttgatcctatgattagccaagagattcatgccacgtgtagggttgagattgaggagccaagactaccccgccaagtaataataataaaatatgataccctcgtaaaagaaagcctcaatcataaagtcctagaaataatgagaaaagctcattagaaatctccctctcctttataaaaagttggaagaaaaaaaaaaggcaatgcaaatatttgagagagtgagtgactcttaccaaaaaaatatatgtatatattgaaagctgaaacttgttcacaaaaacagctggctaagtaaggaagagatatgaaatttgagattaaacgacatcattattggaccctcttccatacacatatgttctcacaccaacaataaatatagatatacacacacatacagtactactaactatcattatagatatattttttttaaaaaaatgtagggatagaaattgagaaatattaatgggcaccagtgatgtttagtacccttttatgtgttaatattgctattagtctaactaagtatcgggtctcatataatttaatataatagcttttggggag

SEQ ID NO: 41660 - DNA, 1288 bp, Cannabis sativa
tcaattccttataatttaatatataattacttatgtatggatgggaacaactaacaaataaaatattaaaatatttataagtacttaattatttagttgtatctattttaccaaaaattctcatatttaattggttaaaatcataaatttccaacttcttagatgcatggtaggttttatgtccattcttaaaccttatcaaacaataataaatataattgatctttaattagtttgactaattaaatcaatagtttataacctaacttctataacaagttggcaaatttcaactcaaaaaaaaaaaaaaaggattaaacttaaaattttcattttttttttactttaacctttctttttttccactactaataatctacacaattatttgaagcaactaatctatttttgtataaggaaacatccaagtaattcccaaatgacatggtagtcgatataatccgatcccgccaaccactgcggccgccgccaccacaaccaccgtcatcatcgtcgtccttctcttcgcctttactttcaatcactttctcatcttgatcaggtggtgcaatgtacacaaatggcacataaaaccaatcatctaaccctagaagaggctccaaagtagctacaacatcagtcatagtgggccggaaattgggcctgcgactcaaacacttgtaggccaatgcacaggccctttgggcccccttggctgaaaactggccttcaagttttgggtccataatcttgtaaagctttcttgggtcttttagaaaaggcctggcccaatctactaagttctgttctctattgggcctattcctatctattgaccttttgcctgttaaaagttctaatagaactactccatacccatatacatcactctttgtagtcaaatgacctgtatttatacaagtttgaattgggttagtgaagttttatttaacaaataataattttgagatagtagtaatattttattgtaacaagaataattttgagaatactaccttgcattttaaaaaatatatttatatataagagttttgtcccactccataagggcaatttataatttcggcatttgaagaaattataacctaattttatagtgaaaattacacattttatgtttttttttatacaattggtggacaaatatggcttattttttcttaacaaaagttattttattggaaaataaaaaattcaaaaatattagaaaaacagtataaaataattgattactcctttagttatcataccttaaactatatttttt

SEQ ID NO: 41661 - DNA, 7987 bp, Cannabis sativa
atctgatccgatccgagtatctgatctagcgggacggggcgggacagatccgtacatgatctggatcaggtcggatcacagtcggattagatccgacccgctccattgacattcttaattgtatcgactattttataaacactgttaatttaagggttgagtagaattttccaatttattgatataatgaggatatatatgacaagtgacaataaggccatttttgttgtagaactagggtcaatggaacgaaaccaaacagtaacaaactatgtaaatataatatgtacatatttgtataataaatatttaaagataaacatgataaaagtataaaaaagagattttgaccaaagagtgcactccaagtatggggaactgtgtgtgagggctttttaattactagtaggtagtcaaaaagaaccatcctaacagaatcttaaaacacacaccaatttattctatgcaaatgtagactatacatatatacaacaaacctatatatacataattttaattagttaaggcatcattttaaactagattatagtaattatatttgatattttgtttgtttctggaaatctaaataatttacagtggtaaaattacattcaattatactaactatatatatatataaaaatttgttgaaaagaaaatttattttgaatatatatggcaaattatattcagaatttttcataagtatatgagatgttacatcaaaactacaaaatacaacatcaaaattgaataaaatggtataaattagaaaacaccatgagatatataaaagctaagaatccccatctgttattttcattgcgtaaacaaaaaataaaaagggaaaaagttggaatttcctaatattcacgccaagcccacattaaggccccctctcttaatatattcagacagattctctttctttttctccctgatctaaaaccataagggcccattattaattcaaaacttttgattctaaaagctacaataatatacatatatatatatatatcgagagagagaaagagagatgagatccatatatatatatatatatataaatacaatatataatcaagtgtgtaggacctagacgacaacataaaaagtgatgccctgatgagaagggtatcaaatatttctctactcttcttcatatggctccacatacaccaccacactatactcctctcttttccttttgacccaatttgttttcctaataattaatctctcctaatgtatgtcttcttttaccaattcaattttcttattatcttttcatctgcctaaactgtttcagataagcacaaaattaaatcgtatatataatatatcaatacgattatgactatgagccaaaattaaagttgatacaagagtgaaatgaaattattatagataataattatgctccaatctaattgtaatatgtacgtgcattacatatgcatggctcatgcacgtatacaaattttggtaatccttaatttgattgcgtgacccaattaccttcgctagctatatagctatcacctatattaacctgtatacaaatatatatatatatataaatatattttcagtcaaacaaacctatactttccacaaaacgcccaaggactacctatatatgtgcaccatatatcatttcccattctctctccaaacaaaaactccaataccctctctctctctctctctctctctctctctctacttttcctagatctttaattatttccttattacaatatattaattaaaccatcataattaatacacatacacacatatatattgaccctatatatttccaaactgtcttcacttatttatattcacacaatttccttctctctcattacaaacatttgtctcacaagtcatcaattaagtctcatcatcatcagaaaaatatgtcaagaaaagatagaagggtgaatttcagtccagaagaactgaactcgatgccaatgagtgattttctcaaacgaagtgtctcataccgagcatcatcatcatcgccgggaagatcaagccggagaagggtttcggcctcggggggtgggatttggagtagttttaggctgcagccaaacaaggattataattccaaacaatattactctccaatgggttcatttttgcgtaaccttagggctaaggttgctaaagcaattcgtttagtgtccaataagagaagatcttcaggtaaagtatcagcatcatcatcatcatctttatcatcatctaataatctaacaagatgtcgttctgtatctgatcctatggattctcatagagttgaggcattagaagattgcattgagttcttgaattcctctgcttctttgaagagatccaattctgtttcttcaaattattagttgttattattacttttgtgtttatcatcttaattagacttagtgtatatgacattaaaaaagaaaaagaactttttttttttactcatatttttcttcttcttttagatgattgaaattgaaaatacatctggggtgcaaattaaattgctttttctgtttgttcatttttatttctcaccaaaaaaaaaaaggacttcgtttggcacatatataaagatgtttgatgagtgtgtatatatttctccacaattaaatgatggcttatttgtccaaaaatgcaagtgttgttatgattccttaatttggtgtaactaatttacataaagtgttcaccaaatgatataattaatcgatgtcatttagtgttaaccacaactgtaaatgccaagtttcaaataattaattctagaaattgagaaaagttaaaaaaaaaaaaaagtaaaaacaaaaagcaaaaaatgagtagtagaaaactgtagagtaggagaaattgcatgcaatttaataatgggtggaaaaaaaaagggtttataatcataattatgagaaatgaaagttcttgtctggtatttcatcacaagacaacgctaaagatactgaccattctttgaaggggttggcttggccgttgagagatgtgccaattcataggaaaagtcattgtcaggaccacagttgctcagccaatttttttttttttttttaattttcttttttaattttcttttattatatgtatttctttttttcttcacttaattggtttttcactaaaaagaaaaagatacaaaaagtaaacgaagtaatacagaagagggaacacaatctcgttttcatgttttgctttattgctatctttttgacccacttcaccaaactctattactactacccagcttaattgctaaaatgttgcaattaccatagctaatcaagacccacaatttaaataaaagcatctaataattgtaaaacattacatggttttccccccatttttcatggaatttttttacctttaactcaattgtaacaaaatatttatccaccaactctaagaggtctttgagacaaacccaatagacacaattaaactttatattgaaacaaaaagaatattagaattgtgaaagttttgttggtctgatcaagaagaatccaaggagagattttcgagctctcggataccctgactagaagctttcttcatttcaagagctctcttatagggaggagcaattggaggctgtacaggatccaagctctggtaggtggttccctctgcaactttgggcagtggatatgaacggtcagaatcatatccactaaggtccccacaagctagaaatggaatataaaccttatttggtccttctagccacccgctactacaatctgcaatgtgacaagtaccaaaaacaagtcaccacatcaactatacattaggaatatacatctatatatacttataaatattggtcaccaagattgacaatactgctcagagatattggtcccctgttctatctctgagcggtgactatcagcggtggtgaccaacagcacaatccccatacaatcagtattgataacagatgtaaataagacttaacaatacaaacaaaccaagatccagttcaaaatgtactataattcagttcaaaatttcaggataaaagaacaatctctgtggttcagtttcatcccaacttagattggtccagctagctatcttcagggctcataaccatactatttagcaaagcaatgagttgtgtaacatcacttacagttctacctcagcatgattagtaaatttgaatggaatgaaagatggtctatgaaatttgaatgtgaacaatgggtatattacctaaatcatcggcgccagaaggacttcccaccttttctaggagacgatgtagatctttcgggttaaatccttcaggaggagaatagttctcgcaaactgcaaatgcctctgcatgacgcatgggagagaagaaatttagtacaaacagaagttcaaaccacagactctgcattgtaacatcttgtaaacctgaaggaactggcagattcacatttgcagatgtttttttcagatttatttaacatggttttcttagcagttaatgagtttagcactaccataatatcttaggggcaaagttttctctacttaatggaggtgccaacttcaaagcatgtaattgccaagggtagagtctcacaaaaatctgtacaacttcgaaccaagagtttaaatggaaagaaagaacaaaacttgagtgtacctatactagaattgcgactgctttttggtttagcaaacgtcactgtaggaaagaataatttgagctgcaacaaacaagtaatttgaagttaatattttttgaatcattattcatataaattacaagtagaatctactacatgagtactctcaaagaataaaccctttaacaggtggaaatgattaaacatgcattttcaacataaaaattgacaagtagaaacaatttgctgtcatcagttttcataacaataaaaatgttgtggaaatttcagccccagaactgtaggggcttgaaccatagacctttcccttggtgagagtcttaaggaaaatctaaccaccccttcggaggcataaactgcagatttcattttcaatgaaactgaatatttgttcaatggaacttattgaaacagaaactttaaaggggatgaagcagtaaagatcaattcagaggctcattggctaacatattctttagccattgtctttacatattcacatgagcacgcatgtttaagtgacataaaacaactaaaaatgtctatttacagccagaaataaatgaattcttatctgtatgcttttttgaaccctaaatagaatatatttaatagtcttcaacaggaagagcagcagttcatctacatgcaaagcatcaagcaaacaagtaaataaaaattaaacccatgcttggagcttcggtaacaacttaatttacctgacagtacataagacttgtatcttttccccggaatattttagcaataaatttaccaccttctcttaatacatgagtaacgactgttaaaccctgcatttaaaatccgccaaattttatcaatctaatacagcttgaagaatattcaaaacattgttgacaagtcttagtccacaagctttgctagttatacaaacaagaacaagaggaaaagatatatatatataggtatgcacacaagaaaaatgaaattcaatgaggaaaggaacaaagggtaaatggcattaagttaaagtcaaattaaaataaaaaggtcttatccttaaaaataatgcaagaccaagcacttaaatatttcctaatggatcccaccatgtcttagttaatcatgatgattggaccttaaattcatttcacactatgtgagtctaaccatttctactagtaaacaaagtgaaatgaacaaggagaaagcaaatacggaaccacttgctgcaaaacaattgaaacaaaatggaaaaaccccaaataaaggggaagatcctgctaaagaacctgaaatgtgagaaaaattgaaaaaagccactcataattgatcatgcacgtgaaaagggaaaacttactgctagtataagttgggattgaacgaattcatccatgtcatgaaggccggtaactgtagataggaatgaaaacaacataatgtaagcaaagattactactactagagaaactgatatactgcgacaattactgttgcataccatcaggagcaccatcacacacaactagatctgccttgcagccatcaaaatgtctgatcacctgttaaagagtggaaggagagaagttcaaaaaggtaacatttataaccattaatgttttagcagaaaatctaattatttgtataaacgttccaatcctctgatgttgtccttattataagacaaatttatgaataaagttatacatgccaggacaggaaaacgagtgaccaattgagaatgaaggcactgagataaaatgattctataaaaatgcacaatgaatatgagaaatcaattgtttcctaccccttcaattgttcgggcatttgttatatcaccctgcacttgaattacaccttcgattggagccatgggttgtagatcaatagctacaataagaggaagatcgccatccctgcatatcattgtaggaatttatagtcctctcacaaagctagtcacttgaaggtgactgatattataaattatctacaccgttgtgtaaaatataaaaatcttgttacaatgaaaaaacataatgatatgcaagttaacagcagatgagcaagtttgttcaaacagaaggaaaataagtgttaatgcttggaacaaggctttcacattcagattagacacccaaagaatacatttcaatattttccatagtaaattcattagcttgacaaaaaataaacaaatagtataaaaattcatacatcaaaactccacgtagcagtcaccaacataggcaattaaacttttcatcatgtatccagcaaaagaaggggaaaaaaaaactcttctcattatgttcaagtttttatgcatctctattactttgccaacttacgtagaatcggaagaaagtgctgctgggagatatagttttctgctcagaacctatgcatgagaaaatatataaaaggtgtgatgtcagttaatgagccttcgcatatatcacgtccatcaccttttgtgtgaaaaaatacagaagattgtttcaaatgcaaaattgtgatgaagatgagaacatgaatcaagaggagtaggtttttcaatgaacactcagtagaaagaggggagagttaaaatgaataaataaataaacaaagaagaaagaaaaggaatatttaaatctatctattatagagtattatacctgactccagctaccaggggcagcacaaagatctaccacacgcttcactcctggggacaaacaataatcaaatttgtaattttattttattatttttgagtctgggaatttgaaccttggaacaaatatctaccagcactttccgaactcctcaaatttgtattactaataattataaaacatacttaccagatagcttaagtaaatttatactgcattgctgtgggcaaccagaaaaatatataataaataaactgcttgaaggtcttattattttaaaacacaaatggtagatcatcatcattatcgtcatctattattattacaattatttttatctgtcctaagaattagcaagtccttgacatttataaaaaaaagtaccattagacctcacaaacaatgtcaataacaaaaacagtacagattataacaaatattttctttctagtgaaattaatatttcctactgttttctaaattgtatcttaatttccgtatgaaaatggtaagatcattagtctcctactatctctttactacgattttttttttccaacaaataaatataggaattctggaaaactaagtttgagaaattcaaattgcttaccttcaaataagttgaattcctca

SEQ ID NO: 41662 - DNA, 3266 bp, Cannabis sativa
  modified_base (3216)..(3234): a, c, t, g, unknown or other
aagaagaagaaaaagaaaaagattgttaggtgttcaattgagttatgtattgtagattttttttagggttctatgatttatcttttgccttgttagttagttatattttccattttttgtaacggggtgctggtgttggggtcggcagtatttttaggcataaagatagttttaggttcactttctattttctaccttcttttaatttaagttctaactgttaaggaagtaagagcaataaagataagattttaaatgtgataaatcaaaaaaggcacaagcttacaaaaagttataataatgtttttttttttttttttttgaaaaaaaaaaaattagcctaattaaaactttatgagcaaacttagtaaaagaaatgtcatgagagaaaaaagttcaaagacaataacattaatcaataagagccaacctatgaagagaccactaaacaaataggatatccaagttagcgtcgcaattcattttagtacgtctagcctaaggctcgcccacctatgagcaataaccgtcctaatatcatcagtggttctatgagaatacaatccattgggtttatggtaccattcaatgtactcaaaactctactaaacaagcttatcatgaatcactttctttttattaacaagaatattgcactcacagcagactctctagaggcaaacaaaaaatttctcatgagttaaaagaaggaaagttatcccaatgagataggaagaagtcctaaaaatccactcttagggaaaaagggatgcacacaaaactagctaaaaagtcccaaatatgtcgtaggtagtcacaagcccaaagaacatggtgaacagtcttagggcccttaaagcaaaacgggaaagaaatacttagtgaattcccttatgcgtcaagttaggaaaactgtgccaagatttccacctaaaatgctttactttaataggcaagttcatgttctacaatttagaccatgacaaaggtcccccaatagatcctgaagcctaaccaataccattcaattagatcccaagccaatacctactccacaccgtataacgaccagcgtactcaagtctatccgaaagaggaagataagtctgagggatactaagaatagactcacctcccattaaaatgaatcaaaaaattaagagtagtatccaaaggaatggagtgaaaagaggacaatttattccgatcaaggttaggaatccaaatatcatggttgatagaaacttgtgtaccatcattaatatgtcatctagcacggtcatggaacaaatctcgaccccacaaaatagatttccaagggctcgtttggaacgtcgtattagttcgtattgtattatattatattgaattaaattacatatcatatttttatatgatattatcttaaattttaatttgtacgaaaagattatatatttaagtgcccatataagttaataacacatgtagttttacataaaaatattgcataaaatacaattcaatataatactatataataaaatacgatgtaatatggcataccaaacgaaccccaaagatatgaggacttcctagtgttagtcgcagtaagaaaagaagaattaggaaattaagtagccttcatgaattatgcaacaaagagtctcaggctgaatatagacaaggaacttgctttgccaacatagattggttgaaaagaaaaagttaacataaccccataccaccatcatctttaattatagtgtttagtttttgccaacgtttatgtttttggttatattttttatttttattttttatgctattaattttgttatcatgtttcaatcattttttttatatatatatttaatgtttttgctgccttttttttaattgcattgtattggttttaatgattttattttttagttgtttttaagttgtttttattattctgattactttttttttttttataatgttctttgcctattctttaacatttggatatcattttttactatcttcttacaaaagaaccgaaggttaagttcacaaccattgattgcttattcaacaaaatcattaatgcatcgtatgaaaaaattttggcaaagaaaaatgatccttctttgataagtattcagcatatcattgctaattatattagaggtaaaaagattttgtgtgacgctccttggtatttgtgcgatcatgttttgtttattatccatatggagtctaatcacattggattcttgctcgtttaaatgttgtggaaaggcgtttgtacatgtacaactctttgtcgactgttatgaaagcttgtcagctattttcgatgctattgccttattttttttccttatttgataagtttaaaaaggataataaactgatttctttagagccttttgatgtggttaaggttgatggtttactttaacaatcactgaagtaagttatttaaagttttttagtgttgttttgttatatatttggtgttttcctttatggaatagttctgatgttgtttttatgttgtttttcaaggacagcggttgttttgtggtatcgtttgttgaatacttcattgacatgaaaactattccttccgtatttaatgttgagaaacaccacgataagctgcttgtggtgttcgtcaagtatgcttgcatgaaagaaatagattttattgatagtgttaatggggctcctccaaagagtttaaagaagaatttgatttagttatgtatttgttattttcgctaacagacgaattgttttgttattttcctttttaaaatcaaattttgtagacaatctttgacgaattgttatttctagcaagtgattttatatagtacttgtgtttatttataattaaatttttttgtttagtcgatatatactttatatcccaaaaaaacatcataaaaatatcttaattgcaacttgcttttaatgaaacaagcaattgttaatgatttaattgtgacgtttttgtcatttctacattaatgatcataatatccattttgtcctaacaatttgtttaaaaaagttatagaaaatagaaagtttcatataaaaaatacgaaataaccaatgaaaaaaatatgtctcattatctaaatgtttcagtatagtagttttatagttgctaaagagttgttgttttgttgtctattgtaatgcccatgcacgttttttgttggaatttattttacnnnnnnnnnnnnnnnnnnnacaagtatgttgattaacaccataaatatgaa

SEQ ID NO: 41663 - DNA, 5389 bp, Cannabis sativa
gagagagagagagagagattagacaggagaatgtgtacctcatcaatatcttccaatggtataatcacctgaatgatgttaggagaaaatgttaacaatgaatgcaatatgctttcttaaatgtaacattgaaaaacataataataaagatgttcggcataaatcctgtactgatgagaactattcaataagtgcatctacaaatcaaagtattctgctaccattctaaaaattcacattctctatgtgctcccatcaaagtaaaaaaattttataacaattcataaccaaagcatatttcatcttagacaattacacttctaaaataagttttgccctgttctattttaaaaaggaaaagcatatctgataatgaatcatattcacaattgtaagaaattacaaggctaaccttcatttgcttagaaaacacatttgaatgaaaacaaatgtgccatgcagagacatacatacggccatgatataagaacgatctctcaagtgcacatgaataactgtgatcaacaatctgaaaagaataccacattagatacacatataccacataatattgctggaaaatgttgtaatcagctataaagaaactagattatctgggcagccaaatacaggaaagtatttcttaatactccaatttccattaacaaatagacaaataaaatttcattcaactcacttcatatggaggtaggtcaaatatagtttgaaggggccctggcttttgatgaaccactgtgggccctggtaaaggaaccctaggcttagctccattcttagccctaaccagatttcataacgattttaactttaaacaataataccacaaaacaaaagcaatactaaattaccaatgatattttcatagtaagtttctaattatgaaagaatacataaacatatatgtgtagtgaagagtcaaaaagttgtgaaagaagactacctggaagcatttacaggttgcttaattgttttaatgtgaaggcaaacctgaaaagcaaaaatgatttgtgtataatacagacattctaaatttctctaagaataaaaagtaaaccaagacggtcataagaacccacttattaactccaataggtaaagaattgtgtgaaaagaacacctacctgccctgatggatccaacgtataccatactgctcctgtttgaccctcattttcaattgaaacggtcacagaaccaagcacagtgcttttccaaattatatcccaatcatatattgtcacattaatctgcaatgtcagttggtaaagatgagttcaacagaagaatagaagatgagtaatatccattctcggtaagagacttcaagaacaaaacaaggaaaatcttcataatatacaggagacatgcacaaggtgatgaaaagtgcatatacatataaacattaatgggaccttgattctccatcaacacacaaatccaaaatagcacttgagctaacctcaattagcatgattacaaatgtgcaaataagtaaacaaaacaacccaaatgattcaaacactacttgaaacttgcaggaaagcaggaaacagaacaagtttgaggattaagaaagtacctctaaaaccaagatgaagataacaagaaaagctttagcaaatgaaaattacaaatagaaaaatagaaacttgagacctttcatgcatcttccagataacattcagatatacctaaaaagaattataactaaaaaaaaacatactttgtactttcaaaggaaaaaaagtatttggttctttatgctaacttaacagaaaaggttcccaataatagcatcataacaaatatatagaatttaactcttgcagtgcatgctcaccacaaaatgtcagctaaagtcttagaaaagcctatattttagctctccagtcacaagccacaatgaaatagaatgaagacattgaagagcttgttttaacggctattgggtttaagtaaatgagcatattgtaatccaataaaaaacagagcaaactgaagtttttggtgtgatacctgtacaggaagttcgtcaactgaaaaattaaactcctctccccacataggatttcttgaaccaggaaccattgaactgcatcagcaacaaatagaaaattactatacgcaaggatagcagactaaaagaactcttgtttttcacacatgtacaattctagtaatagaagattccatatagcttctcatgaaatctaagccttatattggttctaaaacacactagaaaaaagtgaaaagtgcccaaaaagtaacctgaatcgcatttctgtaccacaagtaatgatagcataaggatccgaagtgccatttatgtttgcagcaattaaattcttagcagccaacaattccaactgaaattaaccatgcacaatttcattatcagttctttttttgattaaaaaccttaagtgggtccaaaacaaggttctgttttttttttcctttttgtgtggaggggaagcgagaaagaaaaaacttgagatagaagacaaacaattcattttcaaaacttaatgtacaagaaacacaggcacaggtcacaccttgattaaatacggagaatttgtctgaagatcaccctttaattcaaatgcctgtcgaaaataattaaacaaaaaagtgagagaaatattagtatagaaaacaaaaagttcaaaatttctcaacttttcaatcagaacacctttaggaaaaaaaaacccttttaggaatgaaattttgtagagggaaaaaaaagaagaagatatatttaaatgatcagataaaaatgcacaaacatacacttgcattgaccttgaattcaagaatattaggaaagattcaaaattcgaaattgaagaaacgataaggagagttgaactgacattgtttttaagatcagaagcagtggagtcggcctccccattggcaccaccgggtctacgagagaaaaaccagtaagcgaaaataacgaagagggaagcggcgactgtgaccttgatctcccaccacgatggaacaaagaaatcaatcaaaaccgtctcgatcatcaccatcgtcgcggacgtcgtcatcatcatcgtattcccggcactgaaaaattggattaaaataaagggaaaagacgagtagggttttgggtgtttggtaaagccatgcgaacgctgagtttgaagaatacgaagaagaagaagaagaccattccgccggcgtagagagagagactgagtcaaagggtggaccgttggtatagagagagaaagactggttgtgcttaaatgcgacaatgaatcattgaatgtgttccgattttaccctcctaaatatcgatattactttggtttgggtgtttatattggggaaatcgcaagggtgttttgggaaatgtacttttgtggaataacgcctttacgatctccgtcgacaagttaagaaaataaaaattagtaaaaaattaaaaataaaataaagtttgggaatgtcaaagaggataatggtaattaaagaattaaagtgttttattacttttattttattttttatattatgtatattgtgtaaagagtccttatttatattttttgtgacatagtttgatttgggtaacaatatattgagttgtaataatcaaaaatggaaaatggagtttgtttatttatttattttattggttgtggaagtgttagcgttgatatgaataaaaacaaaacatgttgcgttttcattattccatgcattgatggaggcaggcctaaaggccttggagttttggggttccatcaaattgaatgagtggattatggggaagaggcctaaaaccattgcttcctgaaattagtttggtggcatctttcacatttagcaattgtaccttttgagattgtgattatttggttgatgtcttttgaggctctattcagggaagaacttcccattcaacctctctacttattcatagtattagtcacaaaggtctgtttttcctgatgtcttgcaattcagtcctataatttcgctctttctgagctgtgggcagccaatttcacaaagaacaaaagttgggattgggaggatgtggaaactaaatagtaaatattgtaaattggtttttgaaatttaacctcatacacacatacactttgctatatactcacttactccccaccaaatttccacctcgtgtgcatccctagcaggaacattaactttgcagctcacaacttagtgaaatggattgcgtagaggaaggaatgggagcattgatccttcaaagatcaattccatgatgctttacaactttgtgaaggctctgttgattgttttttctcttttcacaattacataactttttggttgctttctcttctacttttattgttgtctttctttgctggttgccggtttgtttgtgttagatcttgtgggatggaaaaaaagctcttgtcagcaacatcatactccaagtggggagtgtgtcttgggtgttgaagaatgctctaaggaccaaacccacagtgatgaagcccctcaaaaattaagtcattctcatgccaaataaccttctactatcccaagtatgaattaaaaatagggaattttttttgcattagttgtactagttgtctcaacctcatttttttcattatttaaagtttggataattaagatttttgctctttagattttgacatgtaccaaatcatgtttagattgttaaatttttttcataaactattgagattgttgaatttaaggatatttgtccaatttcatttgattttgctaatgtggctatgcgattgtccatacattaaattgtgcatatcgaactttaatatctagaaaatcatggccaatgaattttaacatgtatcaaattgtgtcccctaaattattaccaacattaaacaaaaatctttttaaatctaacaatgttaatagattgaaaagaatgttgaataacctaaaaagttgaagagtttaatttaacatgttaaaattgaagagataaaaatctaaattagcttaagttttaattccttttgtttgagggataaaaaatataacaaaaaaaaaaacattgcccgaagacagagtgggcattccttttgtttcagctacaacatcttaaaccttaggaggcatttggttgggaggaatgaaaatatagaaatgggaatgggaataggaataggaatggaatggaataaaacttaaaatacataaaaaaaattgataaaaaaatcattaaattttttttcttgttacattggaatggtcattcctttctttctaagatggaatagccatttcaccaaaatggtggaaagagcattccattggaatgctattccaatactttaaaatgcaa

SEQ ID NO: 41664 - DNA, 1333 bp, Cannabis sativa
  modified_base (58)..(59): a, c, t, g, unknown or other
tgttatttctgttctttattaactagtaaatctaattatattgaaatgtgttttattnngggcacaaaacccaacagttaggttttcaatttgcattacaaatttagttttttgagtgtttccctaagttgttgggaaagtttctttgtattcatacattgacattccaagactgcttaactggcctaaaaagtcaaagcttaaagtatctcagctgaaaatagacaacatcaacaacatcatcttcaatcgacctttaaaagaggtacttgtgtgttgttttacttttgtttttttttttttggttgttttagtgttattttttcatttgtctttttttgtttgcattatatctctattcagtttcagtcctttatttttttttttattttcttacagttataacttgaaaatatttctccaactttagtggagaaatttagtttgaatttagctgattatttttctggtgatacgactccttcctttattaagtttaaaggtaagggaatcgtgatatggcggttctaaatttttgcccaagttttctcttgaaggtgaacatgttggtccatcctcatataagacgcatgagcatgtcactcgtattgagtacgaggatttgaagaaagatgtgtaccttgttcttagccagcagtagattattgtgtttgcttttgctgatttgaacaaaaaatagacattcttattgaggtaacttttttttttttaattttttatgtagttattttgtatagtttgtttttttatattgtttaggtttatattcaaatttcaattctttttttagtcttcacatgctgcttctagacatcaagggacccaatcagatgatgcgcttcacacatcaaaaaaagatgatgatgatgctgttggtgatgttgataataaggatgatgaagaattcaatttcgaggaagatgatggtgcttccgattggtgggacagtgatccagatgattatgaggatggtggtggtggagataattgtcgacgacctatgtccaatttgaaaaggttaaaactgatgagacatgcattgttgttgatgttggtgcaaatgttgatgaaggcacaaaagatgcatctactactcaagagtgcacaaaaaatgatgataaaatgattgttgtttcaggaattcttctgatatgaaagagagttataattttgagttgttttactgttatttttgccatgctttgtactttttataagttggctatttttaagttgtttttctttgtgtttagtgaagtaggatttaattttgaaggatgatgatgttggaattttattttaccaggatctt

SEQ ID NO: 41665 - DNA, 2166 bp, Cannabis sativa
aaataaaatcaaaatattaaaattcagacagaaaatataataaaataatcaaagtgctatggagttcagaatcacaagaactacatgttccccaaaaaaatgaaagattagtttcttctggtacccaaaaacaaggacccattctatataatacattcacgtaaagtaatccttaaataaacaataatattagtatatgatatagttcactaattaattttgttccaattcaaaaaaaaaaaaaacaatggctaaagtaacacatatctgcaaacgaacagtagtaagcacaaagccagtcccacctggaaaataccacccactatcagttctagaccgtgtgatggagaaaaacaacctcagaatggtgttctattacccatccatgagatcatcatcataccacaatcatgatgacgtggatgacgatgaggacgaggatgaggaggacgacgatgatgatgatgggagggtggtagatatagagaggttgagagagtctttggctgaaatgttgactagttttgcagcagtgagtggaaggttgcaaagaaatgaggagaatggggagtggatgataaagtgtaatgatgcaggagtaagaatggtggaggctagagcccaagggagtgtggaaaattggttgagctgtgtcgatagggatggagagcttaacctcgtttattgggaggagttgtatcataacccttatttttggtcaactttctatgtccaggtacctaaatatcttataaaaaataactctataatacgctcccaaactgtgtttcaaagtctttacccacctttatttgttttggctaaagttttttagttccatttttttcatgaatatatatgttatatagatatgggtaaaatttattttggatcttgtttttttgcaaaagttattgattggaccctctgttttgttaaatgataaaatggatcctacattttccaaaatggcaaaaataggaccctgaactgtttttttatcaaaataaaatttaataattatcctatctaaaggtgttatgacaaagctgtttacattttctgtatttgtttgtattttcaagttggttatatttaaaaaaaaaaaaattgtcaaaaattaagctcaggatcctatttgtactattttggaaaatacaggattcattttgtcatttaacaaaacagagagtctaattggtaatttttgcaaaatacaatatccaaaatggtatttaccctatagatgtctatggtgacttgtaaattttgaaagtttgaatataaaattaattttcagctaaatatttgaacttaattttttatactgggaattatttgggaattattttcaaaaaaaaaaattaaaatttataaattgacctaaataactacaacttataatcataaagaaaaaaataaacttaaaaattcttttagaagtaaggtataatagctaaaaagtaaataaaatagctaagagtttaaaattaagctccatcaaatactttaaacccttagctataatacatcatcccaaattttaagaaatttttctcaagttcaatgaataatggagaagtaaacatattatatatttttttcactctctttttcatttctttaatttatttttattatttttcttactcatttgtgtatttttcttaatttttataaataaaatatatgtaaagatataatgatataaagaaaaatataaaaatatatgcattctttaatttatttttgtgtatttgtgtatttattgtttggacactttttttaatttttaatttttatatgtagtacttaaaaaatttgttacgtgtgtaataaaatattttaattttcttaaaacaaatactttaactttatttttatttttgatgtggtaaattattctaaaattgtgctcttgaattattgcattaatgtacatgattataagaaaaaataaacttaactttttttctagatacggaaaaaaatataagtttatcataatgaattttttcaagggaaatttgaatttctatgcatgcattaggggataatttttttttctaaacttaaaatagggggtattggtaaaatgagataacatttacttaattctctcattaatccccatttgaaatctgccatctctctctctctctctct

SEQ ID NO: 41666 - DNA, 659 bp, Cannabis sativa
gtttctgggctcggctccaatggagatggtgggatgatatctggttttaaggttggggaaaggtggctgataggttttaccagttttcgggttcgcaggtttgggctcaaaaaatagtacccttacccgcccgtgaaatggacgggttggttgggttcgaaggccacgggttgacccgatcattttttttttttttgtaaggattgtcttgtttctaatttagtatcaattagattgaaagattgtaaagattgtaaaggttgagaatcgtaataaatgggtgggaagatgaatcatttcctgacgaagggcttcttcctatcactcttcatacagtgtagaagctacttggttggtacactacacactggcaattctttcttttgtttgtttgttttttttttttttttaccattaaaattttattttgtttttctctgttaaaaatacaatcaagtagtgatgttttgtttcaataaagaaaagtgtgtacataactacatatatctataagatcactgttttgagattatcaacaataatagattgaaattgaattaatgtattttaaacagttatctattgtttaaatgcaaactttaatattgttttgcagcaaaagtcacatattactatcgggatattggcggctaaaccac

SEQ ID NO: 41667 - DNA, 548 bp, Cannabis sativa
ttctctatctgaatgtcaagtcacatccaaaaaacaccctttttgtgaaaatgattcctaaatggataggcatcaagtgaaacgggtaaccaacatagggatgggatgggatcttcatccaaataaaataacatagggatgggatggaatgggtttgatgagtatgagtatgttgacacacaacattatttttattattattaaagaaagaggataagtggtgcatatccgattcctaggcttaatagtaattcaagagatcacaaaagagtgaattgttacttgttaaaatttaagataaggtgaatgcagttttactttaaaattaattggcaatgagaagagtagtccattcatcttatatctgacaatttatttccacatattagcaatgtgggactaactctaatacaccatcctcatatttgagcctagaaagtgtgggtgtaacgaacgacctttaaaaaaccacagggccgaacgtgatatttgcaagaatcccacaaggcaaaatatcgagaaaattgtgggtgtacatgtcggaaaat

SEQ ID NO: 41668 - DNA, 6874 bp, Cannabis sativa
gtagaagcacccaaaaatattcaagtaaataatatagagtaaaagaattatataatgcattccctagaaagagtccaccgagtctatcgatgcacacctataagtttcggtatctgaaataatttcttagtctaatttttttcatgatcatcttatagttatttagaacatcctacaaaatttagaaaaatttaacacgctgaaaatagagtttaaacaatctatttcatatgcatgtaaaagaaaaaaatattgcgtataagaaactatttaaccatatttttaacgtgttaaattattttggatctcttaaaatttgataagatatcttaaataactataaaccataaataacaaaaaaaaattaaactaaattttttctcaaatattaaaatatataaaagaaattgcatatgggacccatgcattgtggaagcatcctatagattattattacttgaagattggttttggtatccctattatggtacaaccatagatttgattgcatgatgagtgattgctggttgtagcaaaataggaacatgctactttgtttgacacgaatgaagaaaaggcaaaggaagctacctatgactttttgattttattttccaccacaaaagtttcattttctttgggttgggacccaattcaacatggaaattatcaaattaacccctaacccctttgcatacttttcctttctttagcagagctgagcaggtagccgaccattctttttcttatatatatataaatatatacatatatatatattcccctttggctttggcaagcaaaacgacacaaatattcgatcgtttccagaagtgaaatctaatccttcctcttctccaggattctttacgtatctccttcaccttcaggcttcaggttccatttgtcttaaatttaactagtttgacaaaaaagtccaagattacaatttgatgaaattctcgtttcaacatctgatctttcaaacacagtaatttggttggttacgagaaatgagaatgaatttagagctcattttggtcaaattaagcttcttctaatttataatttgtattatctatgatgtaattgtgtaaattattgtgaaaatttgacttcaataattatcttatattgtttggttttgtgtgtggtggggattaaggtttgagaagaagacttgggtcaacgttaattgttttgtttttcagaataatatggttacttatgtatggatttgctcttttctaagcaggcataactagttgttgcatatgaattttaatttcactcgagttgtggaattaacttatttagtgttacactagagcaatgctatagatagcttagctgcacagccttatattaaatcttcttgttcgtagttatcttgatattgtttggttttgtgtggtggggattaaggtttgagaagaagacttgggtcaacgtttgtcacaggtttaatactaaaaaaatatggttaattgatctatattggcagttgaaccacactcacttatgtatggatttgctcttcttctctaagcaggggcagggcataactagttgttgcatatgacttttaatttcactcgttgaattaacttagaaaaagaaaaaaagtgattttttttgttagtgttagaccaatgctatagcttagctgcacagccttatattaaatcttcttgttcgtagttattgccttaagaagtctgtgatgggttggggaagcatctacagaagacgcattaaagttttcactgtggcttttataatatactttgattacaaggtaaattgttgttcttttattaacacaaggctgcacccattttcttcctagtctttattattatttctttgttttgctgcaaaaaggccttacaacgaagagagaaatggatcagcaaatctaagagagctgctttgtgggatagagctcatgagcggaatgctaaacgtgtcctgaatttgatagtagagttggaaggtttgtgggtgaagcttggacagtatttgtcaacacgtgctgatgtgcttcctggggcttacattgctcttctcaggcagttgcaagactctctcccgccacgtcctgtcaaagaggttatcttttccgatgcccaagtttttcatatcaatgcagtgtagagatgtttcttttaagtttttgattaggtctgatcactctgctgtcaatagtttcatctaattactatagtccctacattgattaggttgtatcgttatcatagtcactgtatcccattaggcacatgatgtacccctgctgctgtgtacaatgagaaaataggtagagacaaataacagttcagaacagatgaagagaaaaaggatgagagtcactattagaatttagaaatgctaagacagtggcaaatagttcaggtgtttgagagaccttgctctccgtgatggtgagattcaatactgaattatgtatgaccactctataaaattcccagctcagctatattctctcatctaaaaatctcacccatgcactacacatcctattattctgcctaaagtacccttgccacctatttgatagacttacctttcctagcataagcaaatcttatcatagttctatcatcatattaatatttgttttattcctttaaacattttgcattgaggtcattatacattttttttaacctttgccaaaatcactaaatttaattatttgtttgggcaggcttgtaggaccatagagaaagagttagggaaaccaatggatgatttattctcagagtttgtgaaaattcctttggcaactgcatcggtaagattctcatattgtaataacagacaaaaagatacaatcatgttgtttggcacaaatgactaatttgtttatatcctttacatttttactattaagcatgttttgcatcatcttagtgtttgttaattcacttttatgtagatagcacaagtgcatcgtgcaactttgcttgatggcaaggaggttgttgttaaagtgcaacatgagggcatcaaagcaattatattagaggtttgcaagcttggatctattgctgttgggatgagaagagtgattttaggctgttatttgttgttgaatgaatattatttttggtgatcatatattgttgggtcttgggcatgctattgtacaggacttaaagaatgccaaggcaatagttgactggatagcatgggcagaacctcagtatgactttaatcctatgattgatgaatggtgcaaagaagctcccaaagaacttgacttcaatcatgaagctggtatgctcagtcttgtttgcctcagtagattttatttgtcctttatgtgcagttaaaatatcttttccacgctgatccacatgtgaacacatgataattttaatagttggctgttgggacttggcagataagcttgtttgagttggaataacattgattatggccactaggctatgctctggccaaactttagaattagctattagttactgcgtataagcatttttattgcttctgttcagttttcaatttcatcttgattagaactttagataagctaactttaacttccactcgcacattggcttgataacattttttttttcaaaaataaaacttaaaatctaggcagatccattgcgcttttgctttttaatcattcaatcttgtacacgaattccttaatgtatgcatgcctctcctccttggcttgttgggacctttgcaacattaatttgtttacactttcatatgttttgtagaaaatactaaaaccgtgtctaagaatctttgcggcaaaacaaaatgtaacgacagcatgaatgcagatggcgtgaatgttttaattccagaggttattcaggtactaacagccatatcttctaatgccataaaagttttgcactctgggctggagcctggaacttgaaaaagtattgcttacttttgttttttcctcgtatataattgaagcatcattgttttatcatatcaaatgtggtagattatcatggtggtaaagaggcttatcttattttttaatttctttttttgttacattggggcttggaatattatgttgtataaaagaaatcataggtacattggcacctaaattttgcaaatgcttcgatgtcaattaattagcatgttaagttttcatatgggacttggcaagtggaactttggcatttaacaaacttgtgaaatttcaattcccgcagttatagacaaaatccatgttctttgctgtattgaaatttgttcaaacaaacggtgaaaataagggttacttgacactgcaacatatgcaaaatttaaatatcaacatgcttagttttggttagaggggtaatttatcgttggatttaacctttacctagttttatacttcgatggttatacttattctttctggaatacaattactgcaagctcattaaatactatcttgttaaaataatgttacctccattgacagtcaacagaaaaagtcctaattttagagtacatggatggcattcgtttaaacgactcagagtcgctggaagcttttgggattaacaaacaagagatcgttgaagaaatcacccgtgcttatgcccatcaaatctatattgatggtttctttaatggtgacccacatcctggtaattgtcttttctttcctattgagccaaatcacatattttaaattcttaaataatgtgctacactataatttggcttcatgggttcttttctccaggaaattttcttgtcagcaaggaaccaccacatcgtccaattttgcttgatttcgggcttacaaaaaagctgtctagttctttcaaacaagcactggctaagatgtttttggcatctgcagaggtttagtcaaaattttaatatttatcgtgacattgatggtgtttatttgagatgcatagacatgatggatgaattactgattgttaacattgtctacataattgggaaccaacttaattccccatcttgcttatactaacttgtatgtttactgcaaacttactaaatgagaaatattcattgtctatttattagattattgtcagataagaaatcaggaaatcaaatccttgagacttgattattagctgtagtgtatatattgcttcctaattataggattaagtttaattctgtaactgtaactattgtaatctacactgtttagcctatatacactgtgtatatcaataatgaaaatatcagaaaaagtttttaccaatcttaatcttttccgttatagattttaaatgcagattttaatagctgcaaatgaatgacttcttcattgctgttttcttttctggggttgcttcaaaccattcttcttgaatgtgatgcatttgtttcagggtgatcatgtggcccttttgtccgcgtttgcagaaatggggcttaagttacgccttgacttgccagagcaagcaatggagcttataactgtattctttcgtgcaacaacatcagcaaatgagtctcttgtaagggtgcactatgctgtgtgattatgatagtttgattgtctgatattttcttttcctttagtttttgtcttttcttgttctgtttgtttggtaactcctttcgcttattatctaaaataggaaagcatgaaatctttggctgaacaaagaaacaaaaacatgaaggctttacaggaaaaggcaaatcttaatgataaagaggttaaacgtttcaatcctgtaagttaatatctggctcttctcatacataagtttcctttgatttggtcattgaactttcttttcctcttcttcttcttatcatgctttatcgagtagtaatggcatcttttttcagattgatgcttttcctggtgatattgtaatatattcacgggtccttaatcttctcagaggtgtgtaattgaaatctttattagcaatcaatgtaaagatactgtctaatgctttcttgtgaaatggattatagggctttctgccataatgaatgtacgcatagtatatcttgatatcatgaggccatttgctgaatatgctttgcaagggtaagattgttatgaatcttgttttgctattaccatttctggtttgtttctgattgaactaacataaactttgtcagaaacattaataaggaaccaaaggtcaatgcccagtgggtctatgacacacccatccattctgatttggaggcaaaactgaggcaactcctagtggcgctaggtagtagtgataaaattcttggaatccaggtgtgaaccatgatcaaaaaataggtttttattttgtatcttagtgtgaaaatcagcaatgatttagttacactcactgaattctagttataattcttaatgattttataaagacatgtgctctctcacttgcacactgaattctagttctaattttattatgaatgattttatgaaggtatgtgcttacaaagatggaaaggttatcattgacactgctgctggacaccttggtaaatatgatcctcgtccagttcaacaagacagtctctttccagttttttctgtaacaaaggggattactgctggaatgttgcattggctagttgataatgagtgagtagattttcattttatcaagtttctagattttttttatatacaattttattagccttttgtctacttcagtaccactttaatacaccccactcgtgtaataaataccaaaatactaccctgcattatgctcaagggatgcttttctattgaactaaatttatttaatatttttttcgagaatgtcaaatacaggatagtattttggtatttattgaattgaaggggttgtaaagtggtactgaa

SEQ ID NO: 41669 - DNA, 1365 bp, Cannabis sativa
atattagaaaagatctaataagctttactatctgttttacaggaattagtagctcatatctctcagaaatccaataaatattaaagaaagaaaaccaatgatctcaattttggctgatctagttatctttgtcataaaactacagagtgtcaattttattttttgttacagttattggttctgctagcaatacatgatttttgttcagcctagctggaggcaaattggtaagatggctaaacagaaaagcttattgtaatagccatttcttttttttatatatatatatatagtgtctgtattgtatagaaatcattagattattttgggttatgaaatatgaattggagagtgcatttttcatcatagcttcaatgcagagtgctactatagtcaactcattatttggcatctcacactctatatggttctctagaatttgttaattaattttttatactaactaatgatgcacatggattttaataatattttattcattaatgatgactcaaattataaaaattaaaacatataatagtattaatgattttactaacttaaagtaatttttgtatgtttgttatttaaattttcaagaattttctaatctatgttactaatggattagttgtccaaatagataaataacttgtttggcgagataattattgtatctgtattttttgtaagatgtatagtattattgtgatgaacgtggcatgtttagtatttatttggtgaacattatataatatttataactagccacgttattatatattttttaaattaatttgttcattgctttcaaaaggaaaaagatatacattcttaaaactaaattcaaaattaaatttagacattgtaggtatttattcaataaatcaaatttagattaaagttaagttgtgtgtgttaaaagtaataattctaaatttatgtaaattaaaagaaaatattgcctatagttttcaaatttgtaaaagtttataccaataagtattggaagttaattaaattccaatatatgatatacaaaaacattaattacaaaacaagcatctactttgtgactaaagctcgatcaaatttttcatgcgaatgggtaaatggtactattggtgcctaggaccctccactgtgtcacaccgctattgatgtaattaagtattgaatctcatataacttaagaaaataacttttaaggaatatcactaattaattataagacgtgacttaaacaaaatattaaacactatagtgcccaataataatactcagtagtaatcacaccagcacatgcaaatctttgtattaaaatttatggatctaagccaacaaaaaagtttattgaagtatcta

SEQ ID NO: 41670 - DNA, 666 bp, Cannabis sativa
aacagtatcctttgaaagtgcactctatggatacctcttcaccattcttccttcagagttcttacattctccgacttccaatacggtgaaatgacattctcgaacaagtctatccatcagccaaaatctaatcaattgaagagaatgttgtctgaaaatctgactgattcagaagtaatatttctcttgttggcagttaacacgaattagtcactgtttagtctcctctgcttctagtacagttagttaggacagttggccgttatttctgttagctgttacattcttgttctttactacggttaggttgttattaggatgagttacttgattggttaatctaactcatcctccctctggtgtatatatactttcatgttcttcttctgtaaactcactcgatcatttttcattcttatcagtaaataaagcttttccttctctttcattttcgcattagcagtcatatattagtttagtataatttagggaggactcccaagtatgaggcttaccatttagtactggtgaaaattgtcccaaatagataaattagttagtaaatgttattttttttttaaaaaaataaattagatgaaaggctaatataataaattaataaaaattaataaaatactgtcaattttttttagaaaaaattaaata

SEQ ID NO: 41671 - DNA, 506 bp, Cannabis sativa
aacgagcaaaacttaaaacaaataatctaaaagtaagcaagatgggtttgggagataaagctaaatcattatttcaagtgaagataatgaaaaaagaggtggtggtaccccttggtgtttcgtcactaatccaaaaacattggttgccagtgtctaatctcgaccttctaattccgtcacaactcaagtttgtggctatccaatgctacaagaatccggcatcagattcggggccacaagcttctactaatgctgctgagtcttttattagtagcttgaagagagggttggctgaagtgttggtgcctttctatccactagccggtgaagtggttcgaaactcgcttggtgagcctgagatttgctgcaacaacagcggtgttgaatttattgaagcttatgctgatattgaactagaaaatctcaacatacacaaccttgacgagaattttgtggtaggcaaattggtgccagataataaccatgacattcttgtcgtccaggta

SEQ ID NO: 41672 - DNA, 11511 bp, Cannabis sativa
  modified_base (8855)..(8859): a, c, t, g, unknown or other
  modified_base (11465)..(11465): a, c, t, g, unknown or other
aaaaaaaaaaaaaatagaagacaaatgaattggggtgatttgaaacattttagaaacacgaggatataattgcataaaaaaaaataagttaagggccaagtaacaaactacgattaacttaggggcaatacacacacctccttgaaggacattgatcacaatcatcggcgttagagaggaggacaacgttgtaattgagcaccaaacaaggaaattcaacgttgtcgaaagatttttgtcccaaatggcttctccactaatcaatcgctctcgcaaaaccaaaccctagctccacctctctctctctctctctctccctctctctccctctccactgcgccagatcttctcacggtaccttcgtgttttacttcctacatttacagtccttgcatatttgtgtatctttttgttttgttgacatcttgttcgatcaatttccctttgccacctagctttattgaatgtcattttcagaccagaaaaagaaatttattactttttttcgtaataaatatgttctggacataaaatggtaatggggtagtgattgaagcttctgtattgaattcgtgtatggtggcagtgattctaagtgttaatgtaatccttattgtttttattatgcatattgtttatatgttttcacttcggaagctgaggctaaattgtatgatttgtgtctggttttgcagctgcacaaagctcttgtgcccccttggaaagttaaattgttgaggtggaaagtgtaattacattacagagagagagagagagtgagtgagtgaaagaaagagactttacaactattcagtgaggcttgtgaaaggataggttgaattgggctggaaatgggattgggaattgacattgactgaaaacgaagggagggatgcaagtttatttgatagttaattacgtatgtttcggcgtcttggatggtgggttggtctaaattatagaagctggtcaggaaagaggttggcagatgcccagcctcacccggcgaagattaagcctgtggctatgtttgacacggtacaggagattgctgtttatattcataggtttcacaatctcgacctttttcaacaagggtaagtgcttatcgagtatttctttcatttactatcaaaatgatattcttaatatgtatctgtaactttgtttaacatgattttctgttgttgtagctggtatcaactcaagattaccatgcgatgggagaacagcgagtataattctgtgggtactccagcaagagttgtccaatatgaaggtatgattagaacttgggacgtcttctatgtgagacaatggtaatactactaggctatgcaactagatattggacaaagaaatcagactaagataattacaacaatagagctctaattattatctaagttagcaaacaaaaaacacattaaattctggtagcgaaatagaagaatttcatgatactgttagtatatatgaaataatcatctttatgatagaaatctgccaatgagaagaagaaaagaaatgtcaaactaaggctgtgtcttaaagttgttttgctgtcccctaatgttattttttatctatattccagctccagatataggtgctgatgacgtatatggagtgtggatgattgatgatacagacaatagcttttcaacacagcctttccggataaaatatgcaaggcaggatgtgttgctatcagttatgatatcgttcaatttatctcttggcaaaactgaggtaattgtctgcgttaaacacaaactatactgctataacaatgtaaacatgttgtaattcatcattgatatttaagttgtacagcatgtcagaaaatgaatgtgacttagcctgccacttttattaggaaaatcataatacacaatatttcattctttcataaaggcatttctgcttatgcaagtccatttgtatggtttgtactaagtagatatgcctcgtaccttgcattaacattttgaaatacgtagtgtgtggttttattgcttaaagcctaacaagacttcgtatgagattaggtctaaaattaatgatgttttaagaaatggtttgatgtgccccatacatcccttttagtcaacctagcaataatatgaacaataacaatagccaaatgcaaagaaattagaaacatgagtgtttattggaattaactgggaaaaggtaaaactctgcaccccaggtattcaagaggcttggtgctctcgatgcgatgaaccaacttaattcatgcatacctcactcttctaacaaaaggcctatatattcagtcacaaggccaaccactcaaagaccaaaccacccatcctttttcaattagcttgctgtcccaaaactacccttgtgcagtgttcaaaattgcatttgttaggtgcacctcactttgaggtggaacctttacgcactatggcatgtgccttcatatgcaacaaagaggcatacatcttcatatgtagcaatgaggcgtatgcctcacattggtgatgcacctttgatctgactgatgcctgaaaatgatcaaggcatgggccttagaaaaaaaaagaagaaaaatcgtattggacttttgaatgctcaaaaggccaaaactaatgttattttagtttttcagcttaagtaacttaagcccattggttaaataactgaaaaaagtccaatataactcaaaacaaatttaaaaagttccaataaatagctgtcatttgcttcccctccctcctccctcaattttgattttaaaactccagagaacacaaaaaaaattgtcaagcatgtagtgttcttctcgagctgttggttgaagcttcttcttctttcttgcaagctaaagcttcatttcatagtagaaggagagttcaactttattttagttttgagttttatgagacactttatggtatgtttgagttttatgagacttttcatagtatgtttgagctttataagagatattattcatccttaatatttttaggtgctttaaaaatattttttcaattaaatatttgaggcttacgccttacctcacaaataataataataataataataataaataaaaagaaagaataacttctcaaggcttaaaagcgttattttaaacgttgtcgtgctgtaggtcctttaccctcctcacacatatgaattgtatgagaggcctaataataccctctaatatatttcaccttgtccttgaggtgaaaatctagaaaatgactttgaatggcatcaaaattctcccaagtcgcttcaaaaagaggcaggtccttccatttaattaaaacttcgaaggtgcgttaactgccatgccgaacctctaagacttcaacaggttccacttgcagttctatattaccagtatgttgaggaggtaaagttggagaagaatttgctaccgtgggcagctcggagttgtgacatatgacacaccagataaaccacaaaggaggtaggaaattcaaaatgagatgttactgccctaatgcgacgcaacatcttaaaagggccattaaagcgagtagctaatttctcattttctggacgaccaaagacttctgatgataggggtataacttcaaaaacacatggtcctaacttgaagctccacatgataacgcgaaacatcagctgttgccttcatcttttgctgtgcttggagcgaattcatcttaagatcatcaaggaaagagtcgcgctcctccagccattgatcctcagcgaccatagaggtatgtagacctcactgagtaaaggacaagagtgggtgtattgcgattatacaacacctggaaaggagtatacaccccaaggaataaagagaactattgttaccaatacaacacctggaaaggagtatacaccccaaggaagaaagaaaactattgttaccaatactccgcccgtggcagccattttgtccaaacttgtggcttctccaaagcaaaataatgtaaataagtttctaagtaatgattgactaccccagtttggccatcaatcttaggatgataggtgttgctatgtcgtaactccataccttggagatggaacaactccacctaaaaatgactaagaaacaccttatcacggtcaaaattgatggggtgtgggatggcatgtagtttcaccacatgcttgtggaaggcttcaacatctaccttggcattaaaagggcgcttcaaaggaatatagtgtttgtacttactcagctaatccaccaccacaaaaatgactctatcaagttaaggtaagccttcaataatattcattgtcaaatcctcccacacttgatcggggagcgtcaagggctagagcaaccccgtaggaggcataacttgatgtttattgcactggcagatgttgtagttacgcacaaactcaagtaactgccttcttcattccctttcaaaacacatcaacaactattgattctcccacttgaaccaatcaaagctgccccatccaaacaaataataccagaatcaagtttctaggtcggtaagagcagttggagttcgaaataatgctttgctcaattggtctgcttgtcgggtcctcacccaagaatattgtaagctcaatcttttgaggacagagttcaagtcgtcaattgctttccccatccgtctagagtaggcttgctcggacatagagcaagtcggattggaaattgcaaggcttagtcaacaattctttcaggtgatcgagtttggaattgatggctgcaagtcctttatgatttatcctgattgcacatcttctctttcaacatgatcaattcatcctgaacagtttcgactaccctttccattgattcgacgtgggattcgatgtttcttttaggcattcgccaaaaaaatatatgctcccataccaattgatgtgccccatacacccttctaagtcaagtcagcaataatatgaacaataagccaaatgcaaatgcaaagaaatcagaaaccagagtgtttattttttggaattaactgtgaaaagataaaactcaacaccctaggtatttgagagacttggtgctttccaagatgcaatgaaccaacgtagttcatgcatacctcactcttctaaagaaagggctatatattcactcacaaaaccaacctcacaaagaccagactgcccatcatttacaattagcttgctgtcccaaaactacccccgtacagtaagacctttacctttcacataagtgaatcgtatgggaggcctatcatgattttacattatggtttgtgatgtctattatgaataacgagaatgagtaaaaaagaacatttgacagtcttgtataataaaattgctctcagggtccacccatgtcagctgtaattttgaagtttgagcttatgtatgcacccatatcggagactgggtgagttttttttttccttacttaagctttattgtccacaccttgtgtgttttttttacctcaatttagatccttaattgtaatttgaaaaacatgcaggtctaacttgcaggcttctctaagtgcttgctctgctgcagtccatgaatttcgaattcctcctaaagctcttttaggtttgcattcatattgccctgttcattttgatgcactacatgctgtgctcgttgatgcaagtgtacacattagtctacttaaaggtgaatcatatatagctgcagaaaagcttccaaggtttgtgatcttttaccagttttgggaagtctagattatttgcagtggctttttgatatgttgaagtaacagagttatttaattatttcagtgattctattagtaccacagttgctgatggtgaaagtaatgggtcaaaccaggtaggttttcacacattgttcctctatatagtttcctagtgacatctttttgtcaaaatttatttattattaacttatttatcttatgtgttattattttttctaaagtttgtttacaaaaaataaaaataaaataattataataaataagttctttcacctaatttgaaatatgtggttattatattaggcacagggtcagttggatacgacggattcaaaagctgtcatgcttatcaagtcattagtagctgctcgtgacattctacttgaagagttacaaaggttcagcaaagctgccgatcaagttattgatttggatgagtttatatcaaaaatggatgatataaagctttctgattctgtctctcaaggaaatttttctgtcatagatggaaaattttctggacaaggcaagctacaaaatgtttctgaggtccttacttgtttcacgcagcaagtcttattttagtctttgttcgcctttctagtcatggattttgttgctaaaatgcttctttgtttcttgagcagaatgagaatggtactttagacctacaatgtggtgaatcactcctctctttgccaaagagtgttctattaaacacgcttcatttattgggcgatcaagtgttatatttatggaacacatttttgcagttccacaggttttatttttcttctcttttccaaatgtgtttttaatttttatatcattggccatttagtagttttcactttttttctttttcttcatctaggcagtcgcataatgcaatctcaaattattaaatttattttttgagggggaaagccaattccagtagcttgctactcgggctttcaagtgtcacctaagctttgcactatcgcttgggcctggcgcacctcataaaaaaaagaaaaaataagtaggactagagtacagaaacacacacacacagaacacgtgtaataatgtaatgtgagctccagtttgtatgtatgcatatgcatgcatacatatttttattaatgggatggcaatatattcattcagttatcaatttatcattagaaacctgattcattgacaggttttttgagttcattttaatcttttaattattcagcttcgtgtcaatagtagtatatgtaatgtgctgaaaagtgatttgatcctatggtctaattgctaaatcacctggttttgttgcaggtccaataaaactaggatattggaatatctgcgtgatggttgggctaaagatagaagggcagaatggtcaatatggatggtatactctaaggttgagatgcctcatcattttttaaatagtggtacagatgattcttctccccatagtgttcataaaagagtatcaagtatttggaagctcactgatgatgtaagtgatagaaagtgataaaagttttgttggtcatgccatatttttaatccgggcaagaattaattcttcactatgttctaataaaatattattttgtgctctgtacagccagcccagactgctgctatgcgtgctgagcgccatcggcgaagtattgctcaaatgaaagtgagtcctgtggacctggccactcatgaagtgacctattgctcgtatcttctgtaaattgttattattttatctttttgtgaatggaaatttatttagtgcagattaataatcggtcaatccaagacatgtacatatttggagatccctctcgtattcctgttcttattgtggagcgtgtcatgaatgcaccaacgcgtgctactagtgaaaattcttacttgagacatttggatgtgattaattcacctgctttacttagtgcacgtggctctgaagctgttaagctaactggcactaacaaaccaaagaatggtcgtgttttaaaggtggttgtattcgtgcatgggtttcaggcaagtcttgatgaactgtttttaaatgtttaggattttatatggattgttggaaagttgctgtgcctgttagctttaattatgtaatcatagttgtgtgatattagaagattagaaagttggacctttggcttagaagatatatataatggacatttcctcttggaaaataccagcggaatatttctaagcttttttttcttcaattaagtttttcagttttgtaggtccagtaattatatatataatattctcttttacaagattttactgtcaattattttatggacagcagagaatacactttgcaatcattgcattatactggttattatcttattccgcaaaatattttttttgtgtttcaatctaaaatcatagggccatcatctggatttaaggcttgtacggaatcaatggcttttgttcgatcccaagatagagtgtcttatgtcagaggtaaatgaagacaaaacatctggagactttagagaaatgggactaaggctggcccaggaagtgatttctttcctaaagaaaaaaatggataaggtttcaagacatgggatcttgactgatattaagcttagctttgttggacattctattggaaatatcattctaagaacggcactagcaggtacaagtatggttttcgagtcattctttttcatgaatttatactttggcactagatatttatggttgtctttttgcagaaagcataatggagccatacctaaggtacctgtatacatatgtctctatatccggtccacacttggggtatctctacagttcgaactctttatttaattctggactatggcttttgaagaagttcaagggcacccggtgcattcaccaacttactttcacggatgattccgacattcagaatacattcttttacaacctgtccaaggtactgaagtttttcatgcctttttctggtgttgcttgttatgtgcatggaactatgaaatgtttcacgagatcttgtccatgtatgttactttattgacatggaaagtagtatctgaaccactcctaagttcttttctttctttctttctctctnnnnntctctctctcttttttttttttcgaaaacattgtcagatttggtgtctgtcatgtcaaactatttatattcattcatttattgagcatgttgctcaacaagctataggctgactggaaaacttatatttattggttcaagttttttgaaattattcatttttgtaaaaatcaagctagctgtaaatttacatttaatgcatttttttcatttactctaggattactaggtgacattgtattatatatacgctgtgtataatacttaaaaagtccgaaaataaaaaacattttcccctcatttgcttcaattttctaattgcagcaaaagacactggagcacttcaggcatataatcctgctatcttcgccacaggtatttcaatattgattatgtcatttccagtaaagatttaattactgaaaatggcctttcttagtttgattaattaattgtttttcacgtatctatcttacaatttctttcatttttcctctgctgattttagtgcgctatttaattgtgctgtaggacggttacgtaccataccattctgctagaattgatatgtgccaggcagcttcatgggatcactcaaagaaaggcaaaatatttttggagatgctgaatgattctttggaccaaattcgggctccttcaccagaacagagagtgtttttgcgttgtgatgtcaactttgatacttcttcctatgggaagaacttaaacaccttcataggacgagctgctcatatagagtttttggaatctgacatttttgcaaggtttgtgttgtggtcttttccggaactatttcggtaaaagctgcatgaactgcttttgcagtgatccagcttttctgacctgttatccatagcgatcttccatcagtctaattttctctaacatagtggacaagaagacggtggtgttttattatgtccttgcagatggattaagatgatgaggaaaggtgtgggagacattggccattgtaaattattagcatgaagctaatttcatgtaaggaattttagctgaaaagttacaccaaggctctgaaaaatgatagtgttgtgtaaattagtgtaggtttagataaaattcctttttttttttgtgataatgtccatcttccaagtacagctagaagccgtaacaaggagttggacacttggaatacgtagtggtcctggtataataaacttggtaaatactagtttagtttttagtttttcttgatggagccaaacaaagaaaattattagggttgctctcgatataatttctgataagagtatcgttttgagattttctttgtcaagtattgtttttagagttaaattttagttaatgcccatttttattttactttattaaaggtttttttttaatcattcgttttttatttcttatatgtatttatataaataaattacttcgtcatgttagtgatgaattgatcctactggatctaatttatacattttaatagagaaatgctaaagggtactactggtatttagtattctattacgtgttaatatcgctattggtgcaattaagtattaggtttcatatagttaaatataataatttttatggaatattgttaattaattgcaagacgacaggtttaaaaggtgctaagcattactggtgcctaatagcaatgctcattttaatattattgtatttgtttatattaatgtccattgcgataacaataaaaatggttcagttaaaatcatgcagatacaaatcacttggcaattattttcctgtgttgttgatagtattttttatcatctttagggtgtgtgggtttttaccaaaaccaagtcttttgtgtaagaatgaacaaaaggtgtttgtgagagttaagtttactctcaaaaaatttattgatgatagttcatcattttgggaagagagcaattctttttatgatgatgacctctcggttatacagagaacaaatgtgacaatcactgtgttgagatttatgaaagtaagcgattaaattttaatgaagaaagatttgtgtgcgaaaaatatttaattgatccaaaatagaactacaaattttaaaaaaggttattgttttgttttataacttttaactcgtaacgtttagttttgacacaacgtagttgttctttgtaatcttgaaaaatgtgactatttgggcgataacatttagtcgttactcgattacgaaatttcatatagaataaccaatcatatgctggtgaatattatatctatttgagcgacttgatatgttattaattttcacataaaatgacatcaatcatacgttaacaactttattgtgacaatatttagtcgttatagaagattacgttttcctttgaagaacaacattaacgacgttggaagtgctaaaggtagatgtgcatagtacgtttgaagtgctcaaggtagacgtgccttgtaatcgctttcgcttgctaagataacagtctcctagatattttagaaggactcggatacaaaatgatcctaaatttagaaactaagttacgaaatgtacatttttaaaaaaaattaagaaaatgaccaaatataataaattagctaatnaaaattataaaaatacatttattacatattattttttttttaaaaa

SEQ ID NO: 41673 - DNA, 3756 bp, Cannabis sativa
gacaattttgttagtaggtggcgagaagaacgtgggatactccttatcttaggccaagatgacaagcatgttgaggctcatcttgggtcgaggtgatgagagtgttaggcccttcttttggtcctaatgatgataaggtcgagatgattattttggtctgaagtgatagaggcgtaaggaaccccatggtctaaggagatgatgaggttgagatgtcatgatggcaaggctctacttttggttcgagacgatatgttagggcccctagggctgagatgatgcatgttgaggctcctagggctaatgtaatgcatattgaggccctcaggaccgaggtgatgcatgctgacacccttagggctgaaatcatgtgtgctaggcctttagggctgaggtgatgtgtgctaggcccctagggcaaggtgatatgtgcaagggcggaggtaattttctttctttaacctctctcagtaaaacatgcataactttctcatacaatctccaaatgagttgattcaagatgagttttagaagttgtggaaaagatctaaaacttttatgttgtcttttcgaaaaatctgaacagaacatgattatgtttaggtttaaagtttggcccaaggtgacgaggaagtgttgataggaggtgttgtgaggagatgtctccttttaggtcctaggtgaggaaatgtcacttttttggtcctaggtgaggatatgcctccttggtctgaaatcctatgagtaggtgaggtctcaattaatggtgagggtggaggaccccattaggaaccccactaggaggacctcattagggaggaccccattgaagagtttgccattaggaggacctcactgggagtaccccattgaggaggaacccattgagaggaccccattaaggaggactccatttgcggtgaaatattatggcgtttcccatatccaacgaaaaatttataccgtcaatttttttaggcataatattttctcatctttttttttcttaatatgtttttcacttagttttttttcttatttttcactcatttttttctgtcattttttttattatcatcttttcactttttattaaaattttgagttgcagtactaatcttttttagagtcatggtgaggtctcgattacagagaaattgaaaatctcaaaaataattagggtcatggcataacatgtggcaccgctacactcgacttttgagagccgcagtagaataatgaatcagagagcacgagaaaatttatttcaaagtttggccccgtccttctctactggctttgccaggacttgagtaagaatcttatatagcttatacaaatttgcattcacattgttattaatagataaagctatatatattattataaaattactcaaataaccgactaactccaattatattttttcaaattttacttgttgtctacatttctagacaagagccacatgtggatttggtatccccaaatcagtttacatgctcattctcaaggctctaacagattacgatctgggttaagaacaaagctagaagatcaatggtctggattcgattaaggcttgaatgcaagcaaggccgaaccaatgaatctggagagctgacatagccgaattaccaaatgtccaaaaagacatttacggataacccataggtattccagaagggtagtccaaggggtgtcccagagatcaatcttgtagggtcggtccgacgtggcacgcctctaacacagaatcccacaaaattaggggttttcccccacatcaaacctagaaaacgagcacatcacaaaaaataaactacctttttgtctctgactcttggtgtacataatcgacgatgcatgaccatctttcaacatcaaaaagtagtactttgtatggatgacaagtatccctcaattgggcctataccaggtccaaagtcaatattatattgtattttacgccatcggttgatttattttattacaattatccctcaattgagtctcacctacctggttttagcctataaataaggctctacccctccatatatgcaaagggttacgaactttggctagaatctctgcaaaaattctgcaagaacttatgtaaaatactctatataactaaagaacttcaataatattgatttgtggactaaagctcactaactccctaaccatgtaaaacatttgtcttctttactttaaaattagcttttcttagcttaatcttttattaattcagttttcaaaaatcatggtaaacgatatctatttaaaaaaataataatgataaggtgaaaaaataaaaataaaaaaattgagaggagaaaattaaataaaacaaacataaccttaaaatattatacttcaacacaaaaaaataaaaaataaaaaaattattctataaaaataaactagtaacgaccatattttttcaaaattttatacaaataagtattgaagaagatgtggaaaaatagaaatagatgtgtttttgattgtgtgtagctcgagtaaggcagtttgtcaagagacttaatatctagtgcagtggcgtattttgggtgtaattaattctaatttgaaaaaagataattaatatattttaaatgtaattgagggatggtagtgtgttgagtgagttgttctgggctgtgtgcctttgctgtatgtttgcttttattcaagtttgaataatatttatcttttgttcaaaaaaaaaagtattgaagaagatgattttatacaaataattttcgttagatctgttacttttgccagtgtatttgtttgcgctggcaaaaatcttaattggaaccctaagatgaaacaatgtgtttcattaaatggttaaattctgcaccagcaaacatttattctccccataaccctttctcatgcaagaattttgtgccaaaattttatttacttttgttgaggcaattactcgccggtaaaacattaaacttcctcgctaaaactattttatggagggaaatttcccacataaattttttcaccttttgcaagtacatgcctgcgttgacaaaaatatattaaataaccaaaataggatgcgccttaattttgacgattcctactaagccttttgccggtacaattacctaaatgcgccgataaaaatctcattttattggcgcaaatatgcgccgattaaaattaaacctaattaaattagggattaaaagttatcttttttgccaaaaatttttacttgtgcatttagccaactgtgtcgataaaagtggcaactcttagtgaatagttagagtcgattataaaccgacgctaatatttagcgtcggtttataatcgatgtactaatttttttttattattgattttaaatggtctctcaattttattaccgtcggtcattgaaaaaatagaactcttagtgaatagttagagtcgattataaatcgacgctaatggttagcgtcagtttataaccgacatactaatttttttttattattgattttaaatagtccctcaaatttattaccgttggtcattgaaaaaaaagacataccaatgggaatgcccaattttttttaaagtgtgatttaatatgactaaaattaatataaaaatttaggatcatatatttgatgtaacagtactctaacccacaaatatatatatatatatactagtaaaaaattacgtgcgaggcacgtatactaattttatgttaggtattttttactttattta

SEQ ID NO: 41674 - DNA, 800 bp, Cannabis sativa
ttttttttttttttttgaatgaggggctggttaacattcttagttggggttattctgctcatctgaaaaccactcaacttgttggttgatctgcatgaaattgaataatttatgaagctgtattaagcatagagagcattgtgcgtcgttgatgtaaaataccatataagtcggatacgatggagtaatctagatttatcttggcagtatatcttgagttacttttaataaactaattaaaatttgtgcagattaaattgttaaatagaatagctactttgaaagatgatggaaccgtggaatttgaagttccaggagacgtggattctctatcacttgcatctggacctgaacatactcacactgaagctagtgatagtgagcctcttgatgcaactgaccttcaatatataccaccgctgcaaattgtaatgcttattgttggcacacgtggagatgttcagccatttattgcaataggcaaacgtttacaggtgataaacagagtctatttgtattatcttagtcaggatctatttgttttcttttatatgtatatataacagtatgtgtgtgcctagtatatatatctatacacacattttatatcactgatgtgatacattgcagcaatattattctctcaaggcatatcttgaataatttgacttcatattttattttgttttatttccatttgcctgctattcgattcataagatgagaatgaagaactaatcttaatctcttgactattgatattaatgagggagatctatctcttttttttattattatta

SEQ ID NO: 41675 - DNA, 5091 bp, Cannabis sativa
aaaaaaaaaaaaaaactatgagaaacacaaagtaggctgagtaggctgatcaatctgaactcccaagtacgaaaaataacaacaatgaaaaaaaattgtaatggcagtttttatcaaacaaaccacaaacataaaaaagaatgagcaaagataaaaattattgaatgtcacctgatccaagaactctcactatacaattagaaccttcctggatggatttcacagttgctccctgtttcccaattaagcttcctgcctgtgaggctgcaacaagcagcctagttgacacttttactcccacatttggtggagcattaggatcaccatccaaaccatcaacaatacgtttgtgaactcttaaaagaccatccacagcaggaggaagggcagattccggctcttcctttgcagataccataacctattaaaaggaaacagtaaaataagcacaccaaagttataaaaacatgttattcgacagaaaggtgcctcaacattcaaatggaaacaaggaatgctggcggaaactggaaaccctcatcctaaccaaaggccacaacatatttaataaaccaaaatatgtacaggcctagacaaatctccatttcttgataattttctaacactgtctatcaacaattactggcttactgttactaaaggaatgttaacaacctcaatgttaactatttgaatttaacatctttacttattatcttctatataatttatttcgtttcctttatattttattttttattttttatcttgagtacaccattgcggcaagacatcaatcatccaagttctgaagttaccagaagaatgcagagctcttgagaagtatatgtgtttaaacggatctaacttttcagcactttgtaatgctcaatgctgatctctgcaatctggacctttggttcttcaagtttgggatcttattgatgattgagtcgttgacttaaaaatttgagcatagaacctgcacagatccattgttgttattgccatagatggaatcgtattcacattttaggatttctttgggtgatactctctttatgtcttctttcagttaaagttttagaataaaaactttcatcttattaggatttaggagtcatcaacaaccacttttcatctttccttgtactgtccccacaaatttacagctaagcttcaagttgtttaacagcagcagatccaaacaataattactcacaacaacttcccacaaaattttatctatttaatatcttgaaaactataaatttgaccaagacactagcacaagtatgggatataagcatacacaaaagagctaaagcatggtgactattagatcaaccaaagatcaccaactagaattgataagaacccgaaggcttgttgatttgaagcatgtgaacttagtacggtttgtctctttctaattgaaacactataaattattttttgtaccttcaacttcaaatttcaaattataattttttaacaatattgttttggtgccaagtttctttactaagataagatgttaagatgacagaggtctacaatctacaccctgttattatttcttatcgtttccttttttagtgattaggcccacaaggcaaggatttgtgtcaaacacttgactttagaaatcttcttctaaactgagaataaattttagttaaagatttttagttaaaaatacatgagttcactcttcaacatgcaacatcctactttctgcacatctaacagctttaacttcttaattatgctttccattataaagctaaagctagttgaaccagtaattgttccctaggacctagacagtgataaagagagcagaaacaaccaaatcataaagaaacctatggctctacagcagaacacttattcatttgtaaaaccaacaaatcctgttgatgaaaatggtataccaatcactcatcttatactggaccatcaaacaaaacaaaagtgtaaacttaccgctctttctgctgttccaggagggccatcgagaattttaattcgagctcttgtctcctcgactatttttttgataaattcccctttgcgtccaattatgctaccaactttttgtgcaggaaccagcatacggaaaacactctcaccaggccatccaggccactttttttcagcctcacccatgacgggtacatcatgttgatggtgctcatgctcgtgcccgtgctcgagttcttgttcttgctcttgctctagttcttgctcttgctcttctttctgttcaaacagggcctcatcctctggcatttctgggtgcaggtgatctgggacttcggagtttactgtcatttctaagttttcaggcacctctaagttttcaggcacctctatgctttctggcagttctgagttttcaggtacatgatctacatcttgctcaccgaagctttgatcaacttcagccatagattttgcgctgaaacaaacaagttacgagaacataataaaccttaaaaaccaaaaacatgcagaaccaaatagtatattaaccgcaaatgtaagagaagtcaaaaagcactattcacaaccaacatttgacaatgttccacatttcctaatcttagtaagcagcaagacttacaaattcctagcactaacataacccaaccaaaagataaaccatgtgtatgcaaataaatcctccaaccacgacaatgataaaagaaagaatcacccacaaaaattcgaaaagaaaaataaataaagtactgagattgtcttccataatactcgcgccgaacaaatcccaagaagggattgaaaatgtttcagttgtaaaaaacagaaaatgaaaaccctagaaggacaacagttaatatacaaaggaaagcaacacaatacttacaagggcaacgaagaatctactattgaggatttaggggtttgaaccggagaaccagaagacgttcgtttagggttcgaaaaggggtttaaagagagagatgggagggattggattggagccagttgatttgattttatctgattgggtttgggcttcggattgaagaggaggcaaagttatcgtaatagcaaaactaggcttcaacttgctgctatttcctcttcgaggtccctataaattgttatattcgtattttaactcatgtgtgcaataaacgacagaaaaaggagggagacgacagtaaactacataagcttttccgacactattgggagaaacgacaataaagttttataatgttctgtaaaaataaaataaaaatagtttatgggtgtgattttaaggcaaaaaaattactttctcctttccaaaacaatgctgtcttttttcagttgagctatctatttaaattcatggttttttttcatgtcaaaaaaaatcatggtttttttttcttttattttgctgatatttaaattcatggtttaaaaccaataaattcaacatcacagactgtatttttccaaaatatttgtatatcgcattacaaaatacaaactgtatatcaattattattttattatattatttattaaattgactgaaatcataatcattctattttgtttaatacaaataaaataattggaatgccttaatttaataataataataataataccatgtatatttactattttgggtttttttttttataaattttgaattttttaatctgttagaaaaatatgaacaattaaagaactactttaaagctagaaaaaaaaaaagagttcaaaatttcaaaaaaaaaaaaaataatagaaatgggtagagttttagaaggtcagccctggcactttgcccagagcatcactatttctgttgctcctgataactcttttcctcttacccctgataatttacactatgttcctttttgggttcaagtgtatggaatcccttttatgtgtaaatctcatgatctagctaggttcatagctatggaagtgggtaaccttattgagattgataaggacaccattaaggagggaactggtccttatatgcgtatcctcatccttctggatgttaatttgcctataagaaggggaatgaatatcaaattcattcgtatggggagagagttcatcaaatggctggactttaaatatgaaagacttctatatctttgttttttctgtggaaaattagatcacactaaaaagtattgtgttgcttttttacaaaagtgtgatgagcttttatctgaaccattatgcccttataatatccttctcagaggtaaggagaaaatttcagacaaatctcagcctttccaataccctcaccttccaaccattattatgatgaactaccaacctgtgaacttaaatttacccccacaacaattctttggtcatactatcacttttccatcttttctgaatcttaatgctaatttcactagaccttttgctcatccactatccactgctgtcatcatgatgcctacaccactaaatctcaatctttcgagtgttgcccaccctacactagacccacatttgacatttcattgaggccctctgcttttacttcatattcgactgactctctcatagtggctgctacccaagctatccctatgaccactatgtcctctggcctttcttcccctgaggttgttagtcatgttagtcaaatggatactttgtcccatgcccctgctgatagttctaatatgggcgttaacctctcccagggtcagcctgatcctgatgtttgagggaagggtttggcctctgcttctggtgttaagagaccttccttccagccccaccatgctgtggttggaagctctgtgaggtctcaacttaaacgtgctcgctctcgtgaaagggaagatgagtcttctgctgatactactaatctggaacaggcgagtgatgctttgcacacccgcccagaaaaatgagtttgttaagctggaatgcacgtggattggggagtacgcgtgcattcaggagacgctccctgttggtgaaagagcaatgccctgatgtggtttttttgcctatgaaggctattgatcgagttagagttgctttgggttttgacaatggtgtggaggtccc

SEQ ID NO: 41676 - DNA, 1103 bp, Cannabis sativa
acgtacttgtaccaatcgtttacattctgcttggggccacgaagctcgttcctcaaactcatgccaacgacattttggacacctttgaacaatgtggccattcgagtaagacccttaatccagaggtcagggtcgaagtacttgtccccaaagaagccattttcgtcgtaactgctgcaacaccatgtgggcttggtaatgtggttatctaagatgaccatcacgttcttgtctccaagtccagataccactgcctttatattatttttttcagaagaaaaaaaatcaccagcttaaaataaaatgggcaacatactatttggatttgctactttgtattttaactaaatactaaatttaactatttttttatgtataaatttttttgctaactaaagaattttatttataaaattgattaactttaactttatttattgaaaagaaatcaataatatgtttttacatttttttacaataataatatatttccacctttgaactattataattaatagaattttgactatatttcatttcattttatcttttgaaattaaaaataattttatatgtttaatttctattaaaacatatgatttatcttttgaaattttgctattaaaatatttaattatatttagtagaaattaaaataagagcaaaataaaaaggttgatcaaaattaggtgcatatatagttacttttgatatattttgttaatttgtaaaatatatatacgaagtcaacctctacactcaaaaatacatgtcgaaatattttttttcattttttttttcacgatggtatttgttatgcttacaatatcatctctataaatttttgaaaaattttaaatagtttacactaccgaaaatacgtttgaagtttttttgaacactcttggtaaactggaatatcaggaactctgttttcggcacggtaaactattcggaattttttaaaaatttacatgatgatattgtaattataacaaatatcgctatgaaaaaaaaagaaaaatatttcgacatataattttgaacgcagaaattgactaagaaattgtaataaaaggttctaattaacagtatatattatt

SEQ ID NO: 41677 - DNA, 934 bp, Cannabis sativa
  modified_base (26)..(50): a, c, t, g, unknown or other
  modified_base (94)..(100): a, c, t, g, unknown or other
  modified_base (892)..(908): a, c, t, g, unknown or other
tgcatctcagaattcaataataacannnnnnnnnnnnnnnnnnnnnnnnntaaataattttcataattgaacatgattaactgctaatttccannnnnnnctaagcggtctttacaataatacatagtcgtgatcatagactaatctcaaaaaacatggtctcttccaagctcctataattgcgaccacataattcgtcgcgacaatagtccaaattccaacgtcatgagatttttcttccagttttcccctacttttcaccagttggtagagtttgagctttaataccttaagaataagagaaatcaagcataaaaacattccaaaagataacattatagaagaaaacaacttcaaaattgattcaaaacacttaggctaaaaaaagcctaacatctatctaattcatttaattgacaaacatctgcaagtttcgtaacaagttccaaatccatagtcagtctcactttttcactccagtcaacacaaccaatttgtcccaattgacaccaccccaatcgacaccaccagccaagcaccccaatcgacatctactatcaacacacagcaacaccaaccacggtaaaatgcaccgccaacccttctcatagccctaaaccaccacacttgaacctcaaagcaaccccacatgtaccttaagaacccaatcttagcccaagaaactccctctcaccaccacgaaagcactcacaaccacaaaccacctgacccgaccatagtcacaccccatggccatccttgcaccaccacgaaaacactcacaactacaaaacgccaacgaccactcttctgataccccaattgaaccccagccccaatctcccactcaacaactccaactccaccgctcatgtaaagaccgcttagtttnnnnnnnnnnnnnnnnnttaattatgtttaattatggaaaatt

SEQ ID NO: 41678 - DNA, 2106 bp, Cannabis sativa
acattttttattttataataatgattctatagaaaatttagtgattctgaattcgggttaatgaattctttcactcgcctccacatccgccgctcctcgcgactgcgatcgaccaccaatggcttttacggctttaatccttgaaaccctacaatatttcaacgatgatggttccagactcaaaatctcaccaacagtggtatgtgcgacttcgatccttgaaactaaaaggatttcaccaacatataagtattatgtatattggtgattccctttgcctttgccactggcaaaatgattagaggtatatgccattttttttttttatgaatgtttgccattttcttttctatacttcagtgattagattttcatttgagtttcaggactttttcatttatttgaaaatgctttactatatgaggattgtgatggtgttcatgattgttgaggtgataatatatgtattttcttcataattttcaattttctgtaaattatatctattgtagtaatagtctttcattgccttttatcctttgaataataaaaactttgaatatggattgttcaggttcacacttcatttatctgcttcttccattcatactgatattgattttgatatgatttttctttaggatggacttgtttcacagcgacccatgtcaactttcttcagatttggaaatttagaatctgggttttttaatttgttgcaaaattatccaatataggttatgatgccactaaatttgtaaattattggatgaatttttaattttctcttaattattgctattatgtttttgtgtttgttggggaataacttccatggttgttctttatcgtgtttcaagatggattggatgtaattagaatatttatgatcaacattcttctactatatatctttgccaaagtatcattttttttctttttggtttttgctttctttagatggaaactaagaaggtgaaagtttcctttagtttttgattactcatttctgtatcacccactaactagtattgtttgttttatagagggagcaagagaagaatcacttcttttggttttatgagatttgtttctgtattagccacaatgatatttttccaatatagattgttggataagagtcattagacataatttttttagtgcaattggccgcactaatggtctttctatcatttcacggggaacaatatcgtcgtcctcacaagtgatttcgcttgttgtcactgaaagttgaagatcaccattgtcatagattgttgtcctttcaaaatataaagtccaaaaccagtattcataaaagcaaaaaagaaacgtgtgccttagaacataaataaaattccaaaaagatacatttgtaactagataagaaaaaagtatgaacagtttttcacgtattgtttccatattcatagtttggtcacgtgaatacatgatatgatttttaaaggcaaattcccaacattttctttcaaatgaatagtgcttgtttcaatcttagtgaaactggttttctgaaaatgtgaggttaagaaaaagttttggtcccctaagcattttactgatagtataacgacattagtcttttgtatcatctgatttcaattgtaattcaaaatgtctcataagccctcagagacaaatttagagaccccattaaccacaaagttgggttggcaaccaaaggtacctacgaacaaccaatagtacaaaaatccttgtaagaggaaaaaattattatagctactaacattttcccttctagatgtagctatgaatttgaaatggatgacggattttgttacaaactatttttatacaacacaaatcataaaagtacaaagatgtcccaagcgagcttcctagatttcttgctatacaacaaagttgcactaacaaatactagacgagtctaaacagtcatttacagctcattaacacagagttgattaagtgcataagaaggcgaatgttgttgatatctgaagctgaagtggtagattgattgcgatgatattcaagtgtttggtaaactttttcaaagattggccggacatgcaatgcaatcaagggatccgttggatt

SEQ ID NO: 41679 - DNA, 2254 bp, Cannabis sativa
  modified_base (258)..(259): a, c, t, g, unknown or other
ctatgaagcaacaataatagtatattaatatattttataggtaacttgttaaggtttttttaaaaaaaaaattatgagatcgatacttaattatatcaataataatataacatcgaggagtatattaaacaccaataatattttttagtaattttaatagaaaaatactaaagggcatcagtggtgcctagcaccctcctacgtgtcaatatcgctattggtccaactaagtatcaggtcccatataatttaatatannagcttttagggagtatcgctaaccaatcgtaatgtgacatatcgagaagatgctagacaccactggtgcctaataatagcaatgctcattttaatattactactttttctttcttttcttttaaatataatttgcagaaatattatagagaaacttaaaggcattagctgtgtgtagtattttgatattatattattattggtacaattaagtattgtgtctgatataatttaagataataatttttaagaatatcgctaaccaatcgtaagacgtcacctcaagagtactaaataccactagtgtccaataacaatgttctataatttactttactcttgactttgtctattcttgttggacgttcatgtcatcaacctaatccataaatattttctctttccataaatccacttcactctatggatatattgtagtgtatttccacgtccatcaatgccacgactcatatacatggaaagtagtactatatatttaattataatgaaactattggtctacatataatacaagagtctgaaacaattattctccattctattttcttttatttataaggaatattaagagaaaatacaaatttatattatatattggtaggattttatgaaggtacgtatgcctgaaaagtgaaaaatcatatgtggtagaggtagcaggactaattaaggacaatatatatttaggattgaaagcaaataaagaccattacttatagctaaccacagtacgggcccataagttggtggctcttacctgagctatcaccaccaaggtccatttggcctttctgtgcttatctttctataatatatatagtcagcttaatagtattctctctctcttttatttttttactctttattttttttcatccaaatattgttataatttttgttaagacagataaagagttagagatagctatcatcttttaattattttaattatcaaggcatagaattaattgcctccaaaatttttgaagatggtcaatttcgtttataccaaagaattatacaacatagatgctaattacaatctactattacaacttcttagtcaacttctacgtttaaatcacatgccgaaatattttttttcaattgttttttcatatcggtattcgttatagttatagtatcatctctgtaaatttttgaaaaatttcaaatagtaaattttttgccaattaatatgttaagtttgtgtgtaatttaatataaatttgatagagaaattgtagtcgaggcatatattttttatttttttttttttgaaaaaataacaaatttcatacaaagttcaatatattcaaagatagttaaatatccttcttgtatcaaaaattttatttttgcttatgcctctattaacaatattttgggctattttcaaaaatatgagaaaaattattaagttatgataaatatgccataaaaagtaaatgccactaagtatggcattatctaaccaattaaactaaaaatatagttttttttataaaacattaggcttacgagcaagtacagtacgacatgaatccaagcacagcacaaaaatattaggcttacgagcagtgtcgggcctaccctttaaaaatattgacacgatacggcacgacccatatttttttgtggcacagcacgacacaactccttttttgaaaagtacaaataaatatgggttggacgagcacgacacgcacgaacttacaacactagttgacaaattgtaaacatgggctgttttggatatttttatatcaagaaaactcgggaagaaaactataaacctaaaccccttgaagggcccaacacctaggttgacttggtgctagacctagcgccaaagttgacaatcaacctagtgcgctggtttcggtcattcaaatgccaaatctattccaccatattgaatatggaatggttaaaaataggataggagaccccgtcctcaagttcaagagccttg

SEQ ID NO: 41680 - DNA, 1102 bp, Cannabis sativa
cctctcaaaaaaaaaaaaagaaaaaaagataggatatgttggttgttggtggtggttggtttcttttcttataattttatcttatatatagattctccaataataaagcacatgtattaattcatcaaactgtcaaaattaccctccaacaatattacaattttataggatatatattgggtatatggaaggaaaatatacagaataaaaacatattcaaaaaatggataacaacaataataataataataataataataattctaactcttattataagaaggatgaatgaagtagtagaataatagatgattatttatttatgaattattttttcataatattcaaagagggagtagatttataattttcaacaacaataggaattattgaaagttttgaatgaatttgttattctcatatagtttttttctctcattcaatccttaatcttgttaccaaaccaaacaaggggatttattgagaaagagaaagagagagagagaagtgtgtgtagtatttttaattttgacatgtttttgtttggtaatattttaacattatatatatacaaaatcacctggagacaggaaaaaattaaaaaaacttgagtccccttctcccctccccaccctaccctattaattatacctaataccctaaataactatagctaatagatatgccctagttttactctttcactttctctctctctctctctttcatattttctctctccttttcctactgtgttagatttctgaagattttttgagtcactttcctatctctgactctcatggagatagtgacccatcatctctcctctacaataaaactcaacacaaaataacttataaataaatacacaaataataataaatttccctcttattctagagctgagccacccaagtcattaaaatatgaagatcaagtagctatatatagctactagggttttcagcagcaaatctcacattattaagttttagggtttcaagttttaaggcatcaaggatatatttttcaacacacacaagaagacttacagttacagttaagcctatatacttttactaatatttatttatttatt

SEQ ID NO: 41681 - DNA, 4540 bp, Cannabis sativa
cctattgcaactagcgttggaatgtaaattgcaataaaaaatcgtatagaacccctattactagggacggacccaagtgtattagtttgggcaaaaatattgccttttataaaattaaatgtaattttttaaatttaataattataaatcaaaatcataaaaaaaaaaagctcccataaaattaaataaatctagtaagaataattataatataggtataaatatttttgaatgataaataagctcccacaaagtaaaatttctgggtctgtcactgcctattacaactaacgttgcaacactttagaaatccaaactataaattaaaaaaaacaattaaaaaaacggtacataaagcaatttccttttattttatttataaatacatatcttaaacaaaaacaaaaattttgtaaaaaaaacttatgtctattaatatttatattaacagacttatatcttaaaatattaacaagcttagtgtgataagttgaggaacaaaattattaattgttctttacaaaaagccacagaaatttatttttaacaattgaatagataacaacccaaaattaagtataatattttcccgctagtagtgattttggcagagaagaaaatttacaggaagtcaaagtcgtcgtccttcttttgccaatgggattcgcctcttcttcatcatcagtttcctacacaacttcctctacacaaactcaaatcacaatctctctactccttttcctccatcatatagctccattccccattccaaaatctgcttcatcacccagaaaaaaaaaatatataacaccttctcgctcgatctgactaattttcccaagtaacaatgttcttgctcgtagattgctccaactgccgtacgccgctgcaacttccgccgggagccacttccatatgctgcgccttatgccgcggcgtcacgcgtgtagctcagccacgcgctgccgccgcctcatccgtcggcctgcatcaaagacctgctcttccgccgtatacggttccctcgccgtacaatcgcgtcccggcgggtacgttgccgtcggcacatgggcggaagcgtgctctgatatgcggcgtttcgtataagaacacgaagcaagagcttaaggggtgtataaacgatgctaagtgcatgaagtatttgctgatcaacaagttcagcttccctgagtcctcgattgtcatgcttactggtataaagaaagaaaaaatttctttgatttcttttaatctaaagttatttttatttattgctgttgattatatataacttgaccattgatgaagttgaaaactcatggaacttattttgctactgtaatgatatggttaaattttaattatatcatattttaccaattatttatctctatatcaattccacaaaatttagaaaacaaatttggtgtgataggaagagttcaaagtggcttagtttgtaaattttacactttcatgttagtttggcgaatttctggtattgatattggcctgttgttgcaagtaattttgtagaagaagaaactgatccgtacaaacgtccaaccaaacagaacatgagaatggccctgtattggcttgtgaaaggttgtcaaccaggagactctttagtattccatttctctggtcatggatcccaacagaaggactacaacggagatgagatcgacggttatgatgagacgctttgtcccatggattatgcatctcaagggatgatagttgatgatgaaatcaatgccacaattgtcaagcctcttcctgctggtgtcaagcttcatgccattatagacgcttgtcatagtggaactgtgcttgatttgccctttctatgtagaatggacaggtttgtgggatgttttagtttgtgaagtcttagatagattgtgcacatttctcctacagagctactcaactttttgttttttcttatacttcattctgatctgtaaatgtagaagtgggaagtatgcttgggaggatcatcggcctagaacaggtgtttggaagggaacgaacggcggggaagtcatttccttcagtggctgtgatgataatcaaacctcagctgatacctcagtaagttagaagttaggacatttttcatgtctattcatctaatctaaagaatgaaagaaaaggcttacttttcttttggtttaagttgaaaaaagacacaaaagtcttattgttcttcttatttatgtgcacaggctatgtccaagatcacctcaactggtgccatgacttattctttcatccaagccatcgagcgtggacatgcaactacgtatgggaatatgctaaactcaatgcgatctacaattagaaacacagctaatgatcttgggggtggtattgtgacatccctactcaccatgctcttatctgggggaagcctttcaggcgggatgagacaggtactaccttagttatttcatcattttagttgaattggtagctattattgactaactaaaagaagacaatatgtctctaatgataatcctgaatttgaattggttttattgttttatgttgcaggagccgcagttgactgccaatgtacctttcgacgtgtattcaaagactttctctatttaagtagtcacagtcaaagtaaaatatctctgttctttaatctttgcaattgtcttggttacaatttcacacactaattctttgagtttatgtacagttctggagaaaactcaattcattgaaatcatgtgttgtatattaaatttaaataaaggatttttttattggatttgtgttttgttataaagaaaatataatattatataaaacatcagtagcaacaacaaaaccagttcttgcaaaataaataaataaataagaacaaaccagttactagtattattatgagcattttcattacagcttagtacaatcgtttcagcttatatgttatataaagaaataataacctgttctctacaaagttttcttcatctttaataacttgcattgcttcttgtatcttgcattgtccttcaaagccatctcctggtataactacaccccacataagaaattccattacattattctctcttgataaaaagctctatgaggtaaagaaatgagaaagatagaaagcatatcatgtacctttttctcattgtgagagagtttgtaccacatttgaccaattctcttgctggtttcaccaaaagaagatgatttgaccacaccccaagtagccataacaaagaaagcataagaagtacatggcttcacaggacaactacgccttctaaacaatctctcaaacacatcaatcttcttctctgaatttctcttccttgttttcactttctcaataggccttaacaaattctcagttgaaatccgaagaggataatatttcactggagatatgaccccacttctcagcctcgtaacaacacactccctactcttaatctcctcagactcatcaccctcttcaccaaaacggcaattttcatcaactactggctctgcaaaacgacttcgtctccttaactcttcagaggcatttggggtcacataagaagagaaactcgaatcttcaacagaaaaattttctgggttatatggaactgtcccaggagagtgaagtggctgtggctcaacgttctcgtgaaaaagtttcttggcaatattcaattgaaccgagaattgcaagtcccctgcatcgccttgaacttggattgtgtccccatttaaaaaaccagataattgaagagccatgggagacactaatggggttggtgttgatggtggtggtggtgtatttattgactggtttagtccctgtaaatccatgtccgccattaacgaatgaagggaaatgagaaaccaaacaatataaattgaagttacatgaagaaggaaacgggacgtaaataaatagaatagtacttcatattagtggaaccgttgcaatctttgaaaatcaaatgtaaacgacacttacaatagagtcgttttgaacttggttttcaaaagttgcgaccactccattgtcactatcacacaacgaccgtattcgtttaatgcatgtttatttaatgaaaactaatgtcaatcattgctcattgctagtttttttatatatgaagtgtatgttggtttaactagtataaagcttacattaattcttttcaatccttgtatatgaatattaatataaatagattagctaatcgagaaacacaaacaatcaagttagaaaactatatcaatgatataactcatcttgacatattgagacgaaaagaaaggtaactagcaattgatgtgtttggctaggggcgaactcacataaagaaagaagggtcgttggttgctactctgtaaaaaaatgaaaataatatatattaattataacacttttttttttattaaagaattataacactgttataaatatatttaataattatgtagatgtccaaatcttttatttattaccattaattgtaatcaatattcatttttttcttagttt

SEQ ID NO: 41682 - DNA, 2643 bp, Cannabis sativa
  modified_base (2281)..(2295): a, c, t, g, unknown or other
tctcggaaaccaaagaagcaaaagaagaaaccgatagatttcaaataattgaaagaatcacctgctgttgcttggcaacttgttctctgagcttaaaggcttgtttgcgcagagcatccattgctactgttgatggagcttaaggtgtggttcttctagtgaagcttgcttagttctgtggatttgttgttaagggttttgggatctgaaaaagatggagtagtgttactatggtggggatcagctgcaggtgattacagcttatgcatcgttatattatattctagcttcgtcgttacctccgaccatggaaaagttacactcttctacgttgttctgattagaactttgtagtgggccttgttggatttgggccaagcccaataacctcaactctcgaagcccacttcttgatttctttttttttttttttcctttttctttttcaattttacccacgcacatctttttataaagggattattttagaaagaaaaaaaaacacacaaaaaaattataaaaatacggttatacataattataaatatttttacgatttttaagattttatttatatgaaatacggtattttgatatatttttatgttatactcttgttattttgttgttgttttcttgtttggttttcttgtgtttttatagaatactgtaaaaatatataaaaaaaaattaaacgtaaaagtgtaaagtttttacccaaaatagcagtttatgcaatttttcctttctcttttttttttcaattttatccacacacatcttttttgaaaatatgaaaagtattgcacgtttataattgtggtatagttctttcaaataaaaagatcttcatgtgtagttctcgttatggaaagttagtagtctcccaaaagggcgctctcgagagtctaacttgtccatccggatgaatctcgtgaaaagctagatgtcgtccataaagaagtttcgaaattctagcttttccatctgagaagggtctccaaggaaagttagcctttcctcataaaggagttttggatggctagttgttctatcctggaagggagttctggataatcgactctaactagcatctttcctatccaggaagtcccttccgcatacgcttttgtctttcttccaagaagtgttcatctcttccagaaacccttcttcttgtgctcacgtggggatattgttactaggagtttgttaagtttgttatggcataacttacttaacaatttagcaattgcagccaccgacttatgatatttatcctgagcctataaatactaccaacacttatcatttggggtatgctgaatagattgggtttcgagattgagagagagaaaaattgaaaggtagaaagagaggtacagagaaaaaaaatgggtttgagttttgtatgaagaaagaatatttttgggtaagtgtgagagataaacactttgagagaatctaatagaaaatcgatcttgactgtaacatactttatttttgctcaatcaataaagaggatttcagtggtgttctaaaactggagcagagccatagatcacatcgatctataggacttgaactagtatatatcttgttgttcattttagtgttttattgctttactgtttatgattttaattactctgttaatccctttttttcttcgattattatttgtgacttattaatattgtcattgctaacggtttgttgatcaagtttttagttgatttgattatgcattttagtcgtaaatttttcacaataattttaggaacatactttaaggctgtatttgaaagttggattttagtgagaaaagaaaaaggttggggaaaaaacatttttgttatagcacttagaaaaatattatgtataatggtgcatattgtagttataagagatattttatcaaattttaaaaaatttaaaataatttacggtgttaaaataaattttaaaatctcatgtgtaagaaaatattatgtatgtgcatgtaattaattgtttacactttatttttaatatcataatttttttaagaaaaaaaaaaacaaatcagaaaatctattagaatgacaactataattataatatttacggtgttaaaataaattttaaaatctcatgtgtaagaaaatattgtgtatgtgcatgcaattaattgtttacactttatttttaatatcataattatttttaaaaaaaaaacaaatcaaaaaatctattagaatgacaactataattataatattttatataataataataatannnnnnnnnnnnnnnataataataataataataattcaggtgaaccattgaacgataaaaataactattttataagagaatatttttttttattattattggagcaatttgcggtgaaactccttatattttaatttttatacatttaactctttattttttttttagtggcaaaatctccttaagtttatttttctttataaatttaacacgacaattaaatattaccgttaaatatcaactggatgaccattgtatacacctgtatatacgtaacagtataacattgaagtcgatacagtaataatccagttggtatttaatggtaatatctaacggataccttaaatttacaaaaaaaaa

SEQ ID NO: 41683 - DNA, 3329 bp, Cannabis sativa
atttacttagaaataaattgaattgtaacactattgatttccataaagatactccctgttacaattttcatttggctaaacaaagaaaacttcattttcatagcaataataactttgcttgtaatatctttgatgttatacattgtgatatttgtggaccaaatcttgaagccttatatcaacttcaaacctccttgcatcagaagttcaagctcaaagcactcgggccattacgttattttattggttttgaaatagctaaaggaaaagatgatcttttttttgtatcaacgaaagtataccatcaagttacttaaagacactggttttgtagggtgcaaaccaaccaaggctcccatggatccgcgaccaaaattggatgataacaagggagaacccctcactgatccctcttcagagaaacaacttgttggaaaattactttatctcactctttcaaggcctgacatcacatacgcagtgaactgtgtcagccagttcatggccaatccaacaggctctgaaccatttgctctgttatctcaaaggttgtccaggacaaggtctcatctattcaccaaactcttctctgcatctcagaggcttttctgattttgactgggcctcttgtctaattacacggcgttctattatgggattctgcatctttattagtgattgtttagtttcatggaaaaccaataagcatccaaaaatttctaaaaggtctgctgaagcagaatattgagctttagctgccagcaccaacgaaattacatggctgaattatcttctcaacgacttgcatcttcctcaaactaaacctgccttcatctattgtgacaactagtcaggtatacacattgccaacaatcacaccttccacgaacgtacaaagcacatcgagcttgattgtcacttcattcgtgacaaaatcaacaactctacagttcacctcaccccagtttccagtaacttacaactcgcagatgcttttacaaaaccattaccatctaccacactcaactctcacatacacaagatgtcagtatacaatctctaccgtccatcttgaggggagggggtaacaagtattcgtgtattttcccaatagtacttgttttagtgtgtattcagttagttgtatgttaggtgaagctatttagaggagttagttacttttcagttatttcagttgtgactgattagttggtgggatgttagttatgacagttggtcattcactatttatatactatgtagttcttcattgtaattcattcaagacaaaccatcaataatatttttctgttttgttcactctttaattaatctgcaatatctcaagcttgaacaaggctttcggtgaaaattaaattagtttttttttctgacaaaattgttaattttattgagatttattgaaattttattttcacacatttattaattaaattcttattattaagatttttatttttatattaatgtaatattattcttcacatgttttattaatagtaatcatgcttatttcctattcatgaataaactttattttatttataagaatctttcataaaaataaataaatataaataaaccaatataagtgataaaaatgatcacacaataattataagaaagtaatatgatattatttagaggtgatttatacataaaattttttattaaaatgtagaccttaaattctgtaaggtttttgcctaaattgccttatggttaagctataatatattataattcttgtagtgctttactatttaacgtttctctttaattagatcaacttcatgttttgcctatctattttgatataataattagttattttatcttaataatgtgtcaaccttttaccactctaataatgactcttttaactagctaactataatctaaattggttaggcaaattattttaataataaaaaaattattaagaatatatatgtatgagatgatgaaaatctaaatttgtaagaattattattaaattaattaactattattgaaggccaggaagcaagtttacactttacacggctgtaataacatctttaattcatcacctatggtctaatcgaaatcaagcatattagagtcaaaaaatttcacataccaagtgtaatttttaaagctattaaagcagagtcacttatgatgatatcatttacatatactaaaaaaaaaagagtaatagatttagtggtatgtttaatatacaaactatgatgaggctttgaggaagtaaaaccaaatgattctaagcactgatgcaacttcttaaattaggttcgaggagcttgcttgaggctataaagagctttctttagcttgcaaaccagatgaggagcatggggtagttcaaatcctagaggctgagccataaacacttctttttgtaagtctccattaaagaatgcattattgacatcaaactgttgaatggaccaattttgagctaatgcaagagaaagagagaacaactctaattgtcaatggtttcacagctggactataaaagtttcagtgaagtcaaaactagcatgttgatgaattcctttagcaaccaattgagccttgtgtctattgactgtcccatcaagattaaacttttctttgtacacccatttgcaacctatgagattgggagtccttccaattggcaaaggaacataattccaagtaccatttttcttaagagaaactgttaggttgtttttagtattatttttaagttaatttttagtgtgtttttaatttagttctattcttgtttggagcaattttatgttttttatcttttatttttgcagatttaaaatagaagaagattagaaaatatcaaaggaataagatggaaaaaagataaaaagatctcacaaaaatatgatatataaaatagaaaaaattgtgcaggaaaataaagctgaaacttcaagcctgaaatcgactatgttttgattagattttggaaaaagtcaaagcataaaagttctatatctctctttcatatttccggaacatcttgaatcgttcaattctgagcattatcgagagagttgtgactaaattactattagtcgacgcagtagaaaattgactgccccttctaatcctaagcagaataggtttttctgttcagcgttttttatttgttttatcatttttcagctataatataagtggacttcaatagttttgtgagaagcaattcagagggaaaaaggagtacggatttcagagaccaaagtcaataactaaggcattctatagagggttttcagcattattttattctctat

SEQ ID NO: 41684 - DNA, 3575 bp, Cannabis sativa
  modified_base (2817)..(2817): a, c, t, g, unknown or other
acatatttagtcaaatttttccttattttttcctattctttttaaatactcttttagaattcatattatattatttcaatagcacacgtagaaaagtgaccgtctcccaaaaacttaaggattatttcatataatactcaaataaaaagtttacatggatttgaagttattttacaggatttcaactttttcttttttacaaaagtacggagtatgatttttccgttatttccatgttaccgctacgagaaagtaatgaaaaataacatatattttttttttcaaaaaaaaaaaagggtataaaaatctataagaaaaaaaaaacagaacctgtaaaaattaaaaaaaaaatgatttaaagtactttgtataaattataaatcttttcaaatacatagatgttttaattataaaaggaaaatactgtgtctcacaatgcgttcgcgatttgttaaaagaaaaaaaaaaaaacaatgtgtttgcaatgatgtcaaaaaaatatttgggaaaactatgatagtgcgagaaaaacatgatttccttggcgcgaaaaaaaaacaatttgtaattacaattctgtaactaatactatgtttacatatatttagttacaatgacatttgtaactaaaattttttattctaaacatttagacttttcacaagtaaaaaattatctcgccaaagtttttatcaaaattcatcatagattatcacttcacgaatgcatcatcgcaacatcaaaaaaaaaaattcaaaattaatttttgttaaacttcaatcttgttaaaaaaaaattgacatggcaaatgtatcgttgcacatcgtgtttgcaaaaagaaagttttcatgttacattgcaaatacatcgttagacatcgtttttttgtttaaaaattttaatctaagaaaaattacaaagaaaactaaacttttatgtgcgaattcgaaattaataagttagtgccttgtaaaagaaaaaatgggtttgtgtttcggatttgagttttaaccattaaagcattaaaagaaaaatacattagatgttttggtggtgatcggaggtagaatcattaatggtggttggcgtagggggtgatcgagatctgagaatgaaaagaggggtaacggagaaggtaagtggctagatttcaccaatttttagaaatgggtgagacttgtgagaattaaagaaaccaaaatgtttgaatgataggaggggtcttaaagatagggaaatggcatattatgtcaactttgagtcgagttatgttggcactaaattttgaatgggtatagtgagaaagaactaagaagcatagttgatcaaattttccatataaatttcttatatttgtttcttattgaacaagtacaaactccaacaaatacaaaatcaaaagcccaaatgcctttccaggtttcaaaggctacaaatttttccaaaaggcctcacccaacaaaaacacaaaacaaattgatatggagaaacgaaaactaaattaaatgacaacacttttttttttggttacacaaaatcatatgtaaagttttaattaattaaagttggccagaaaccaacaattaatataagtaaatatatataactttaataaagtgatgatgatcgagaattaatagatgaagctgttgacatattttcttagaaggttgggaaccaagactttgtatgctgcttcagagggatgataactatcccaaaatatatgtttagatgggtcttcacatggtggagtcaaagggttacatagtactgcaacttcaagtgcccctgttccacaacaccctttatccacttctacaaaccctgatgagagaaaaataaaatataagttaattaatgttacaataataatatgtagatgaagtaaccaaattaataataatacaagtaccatagttttgagggttgacaatgagatcgagaagaggattgtagatatcaacatagacaagcttgctacttgaaagtctagacttgagtgagtgaatggtggaggctagtttagagttgaacataagtgctgcttcattgtattcttctgcacattgtcttagtactcctccacctaaagttctttgtgatgggacacaacctattggtggtgctgaaaatactccaatccttcttgccccaagtccatataattcctatataagggttggttttgtaaagttgataattttgcaaacaaaagcaaaaaatgagtatttttagaattataccttaatgaaatctgaagctccacggatcattaaatctgtgtatgaaggaacatcgtattgtaattttctaatacgaatagtgaaataggtattagcaatgtcatcactaccagctacaaccaaaaatatggcattttccaatatgaatttggttctcctttctccaacttttgctttaagctttcctatgtactccttgaacattcgtagctgttcttcgaatgatatcactgactgtgtgttttattttattttatttatcagtaatttgataaattaaatataaatataattaattaactaagtatacataaatataccactattttgggagtcatggggtcatatcctgagccaccagaagcgaagcataccccagttgggagatcatccgagcttaaattagggtccaaatatgctggcaagtattctttaatacccaattcttccgctaataaatcatgacgaaaaataaatataaatattatgagaaattaataatttagatgtgattaaaataataattgcataattagccactaattaaaagtaaaataatatatatatatanatatatatatatatatgaaaacgaataaaataatagtgaaagagtgttaagaaaaatggttaattacatcgaacactaatattgtaatttttttacatatttatgcttaaagttttattttatatatttttattattttttataaaataacataaaaaaaattaaataaaaaaaattaataacaaaataataaaaatataacataaaaatacataaaagaccttattttatgtaaataaaatttaaagaaccgtcaaaatataaaaaactttgtacaaaccgtaattttgtaaatttttttttgtggtttttgtatttttatttttgaaattaatccctaagaaaaatagcaaatattagaacttctttaaatgatttttcttaactaaagtttatataataagatccccataaataaggcctaatgcttacactgatagtactattgttgttacataataataagttaataactgagaatttatagagagttctttgtaatcacatcaaaagactaattttaattaaaaataatattgggttgatcacaaccaagtattagtcccaagatttttttaattttacttatttatttatttttttgaacaattactggttttatttaatttggcaaaactaacaattaatagtatgattgattgaaaacaaatatatatatatataggggatatctactatacgcccccttcaatttacctcatggcatagggatattaaatgagccaataagaattaag

SEQ ID NO: 41685 - DNA, 925 bp, Cannabis sativa
  modified_base (851)..(854): a, c, t, g, unknown or other
atatatattacagttgttaattattaatcttatttgtacgcacatataataataataatattgaataattatgatatacaggtacttaggccagaccctatggtagttgccacaaagctaatggcaagaaggagttacaaggacactggaaaacaattcaacgttatagcagcctcttggattcagttcatgattcatgactgggttaatcatctcgaacagactgaccaggtttattataataatatttatatatatatatcaaatcattcaattaatttaatttatttaagatatattgtatataatttatagcacgaccccattgtagaaaactaatatactcaacctagaaaattgatctacccacaatcagttctgaagttgataggtgggatcatgtgtagagatatggtaaaaagttaacaacaacattatcttaatactataaatctagaaaaatatatgtatacttacttatatatattataaaaattagggtagtttacaataatatatatattttttatctaattattttactactattattgagatgttatgtcagcgaaatttgacatatttgacgttttttattgatttaatttttttgtatttttctgcatttttataacaataaaatttttaaatttaattttatatcatgtaatttgaaatacattttagatgactccaaaatttatttgtatatatcttagtataatcaattagttattttaagttatattatggtaacttataatttaaaatacatttaggtaactttaaaaattattttcgaaactaataagttatgtaatataacaaactattatttttatatatatatnnnnatatatattttttttattattttgaaaactaattagttatctgtataatataataggaaaattctataatg

SEQ ID NO: 41686 - DNA, 2446 bp, Cannabis sativa
attacaccaattttttaatattgctaagtctttgaagtccaacacattgaagctttctgtgcaattctcatagaataaaatctgcaaaacagaatacaaaatatgaaaatatatgtaaggcatcaaataacagggtacaaaaaaataacaaggtaaattgaaaacagagtacaaatagaaaacagtgagaacatatgaaaatatgaatgaaattaccatgcaaaaatgctaaaaggaaatgtgagaaaaaaaaaaggataaatatgaatgaaattttattaatagtcgaaagcaatcatggttatattttgcacatacatcaattacttttccaaaagagtatccaagtcatcctccctctctatcgatactactttccatttctattgttctagaacagcagaacatacatgttcagtttctttaaaataatccaacggaaataatcaagtgtaaaatatggctatggaataaactattttttacttatcaaccacagattgagatgcacacgcaagtaatgagaccactcatcatatgctgcaaaacctgaacatagagaaagtgctataattagaaacaataattttgaatattctaggtaatttagcacaagaactcaacattgcttctaaaggtaaagtctatctaattacatgaattatttctcatgacaacaaatcataagtttggacctaattttttgttatgacaattaatatctttatgatattataaagtaactcatcttttaaaggcaatatataatagtatacctttgaagaatgagcaagagactatcctttactacttgcaatcactaaatctgcaagaaaaataaaataaagaagaacacatacagggcagagaatttgaaacgaaattgaagccagaaaaaaaataattaaagcaaaatagaactctccatttcataataaacccttaattaatttgttaccatattagttcttggtaggaactcagaatcaagacaattataagtttagaaatctcagtccacctaatttttttcagcagcatgtatgtacttcatgtcctgcacaaaagtatattgttaaagtttcattattttctatagaatgggattgcatatcaatgttaatgaaaaaccccccacccaaaaaaaaaaaataaaaccagtataaacatgtttataaaaatcctacacctacaaataatagcctcgtatcaatttagtatcttaacaatataattatataaaaagatagccaaacaataatgattgcattatagctaacctcaattaaattctataaattcgaataattctcaatcagagatggatatataccattgatttcttgatgagtttaacagtttgtttctatagttcgaaacgagtcacaatattgaaaaattttagcttggtcaatgacagtggctcgcgactgtgctgccctcaaaagtcgtgaatggtgcaacgaggtactggctttgaagttcaaaccatggggagtattatggtggtagtggtttatgaaaggctgaaaaatcagatcttggctaacaagccatggaatctcacatataaataaatatatatatgtgtgtgtatatataggttagctacgaaaggcttgaacaatcaaatattagctaccaagccatgaaatctcacaaacataaacaaattaataatcttttctcctaaattcaaaaccagttgatgacagagcatagaaatgcacggaaacgaaataaataaattaataaaatcatctcaaatagatgtcgaagtaacgaacaaatttatatcccaaaaaaattaaatccaaattccaataaaataagtaacttttaaaacataacaaaatccaaacaatctgaaacaaggagaatgaaatcagtaaagataataacaaataatctgaaaaagaagaattggtaagggtgcttactgtaatagttcatccactgtacttttttgggaggtaccatgcaaaaacacaaacataaaacatgaaagctcgaacggatctgcgctcataacatagtttctaaaaatgccaaaaaaaaatcgaaacaaaaataaaaataaaagaaaacgaatctgaaaaaagtcaccggtcaacaatgggagcaaatctagggtttcgatgcgccccaaattcttagaattctaaaccagaaagaatgaaatcgctaagagagaggagagagaaacctctttctgttgtatggtttgtgggtttatgcaagaaagagaagagagagagagaaacctctctccgttgtatcaattcttgagttttcttgtcaatcagatgtagggtaattgcaaataatgaaagaggaagaagagaaggtgaatagtcgtatttttttaaatttaacctcagccaaggaaattattatttttgaataaaaaattaaaaaaaaaaaatcaaccaccggtggcacgatt

SEQ ID NO: 41687 - DNA, 2115 bp, Cannabis sativa
agatgagataaacatttttaagtgtattaccttttaatataatagaaaatacctagcatataaaatttagtatacgtgtcttgcacgtaactttttactagtatatatatatattagagtgatattggggcagtttcgagatgggtattagtaccccgcccctgctccgacctccattcgggtataaatattaaatacttaaacccgcccctgcccctaccctaaaaaattaaccctcgtacccgtcccattaggagcgggtacccacatgtatcccaacccgcaagtataattactatccctaattaaatcttgtaactcgtactctcacactcttccttcttctgttacatatcttgttcttaaaaaaaaaaaaaatcaattttttatcaaaatatattaatgtcattacaatgccattaagataagaaaaaaaaaaaacaaactattcaactatataaaactcatttattataagtttatttttggcggcattaattacttgcgacacaacagaaatgagtaaataaatagaacaggaaaggaatgggaacccctttcttctctctttcttagcagcctctgcccaatctatgatcggttacttccggtcgccaatcggcaaaacctcaccaccaccgtgataaccccgcgcgcgaccgccgctagctccggtggagctatttctgccattgacggacgaggcggaccacggaccgggctcccctgcattccgaaacgtctagctcgaggttctccttctaacccgatctcttgatccgttttgttctctctcacacctccatctccgttcgccgtctcatagtccgagaccaccgcgcgcctcgagggctcttaaatccctgaaccacgaggttctcaccctacacacccatccggagccaatattgtcatcctgagcgtgtgggtatattttcgtaacaccgttttaaattgtttgattagtgaaagtcaattgcgagttaggcaattgatatatgcgattgtaaattttattgggttttatctactgttgtgaaatcgggtttgtctctgtgatattgtataatatgtgtgtgtgttataaactggttttataagtttgggattctattaatcttcataagttgacttgtttgattctatcaattttcattctttaaaagtcttgaaaatgatactgaattggagtggttttactgaaacattgtgaatttctatctattgaatattttgattgaaaattcaattgcctttcggcaaaataaaaattaatgtagttatgttgaattgcataaaactaatgtgtttgttttctgaaaaaattaaagaaaacttttcaaacgtactctatttgttcattttgtattttatttcatacttaactgaattcaatcacaactatgctcccagtgtcaattatctaatcaaagaatctatatcctaagatctaattggctagttgtttacttcacaaattattatgattcacttaattacttgttaaaatgcttgattgtctaattcaatttggatatttatttataatctttgataatttgtattagttttgattttgattttgatgtgtgtcattatatcaatgtataggtgttccatgataagaggtgctcgaattcggctcaatgggtggcagcaggcagctgtggcagttggttctgcagttggagcattgctagacccacgaagagcagaccttattgcggctctcggcgagacaacagggaaacctgcttttgaaagagttctcgaaagaatgaagcgaatcccagaaggcagggtaaccctttacccacatctattttcatttgtctatgtcaatcatgatgaattcattataactttttaaaatatatttacctgatatttctgcaatcgttcactttagtttcttgtataatccataatttgtgttgtcgttggggtttactctggctactatttcatttggtttgtgttaatgcaatacaaaaaagtcggaggtctgaactttcaaaggattttgatatgtaattatgtattaacaaacatgttatatttgtcatgctctaaagactgacagtcttaatattttaattcttgttacacaaaata

SEQ ID NO: 41688 - DNA, 591 bp, Cannabis sativa
aatggtatagagtctaatttcctaaaaaaaaaaaaaaattagtctaagaagtttatctgatgccaaaatcatgtgtgagttttaacttatattatttttattaattacaaattataattagatattttgtaatcaatatatatagagttagttaaaatatgttataatatgactaaatcgattgatatacaatcctaattagaattttacatcattatttttagatactgttctcattttctctatatcatattgctagtttttttttaaagatttttttttttttttttaaattaactgatttggttcttaccaagtttctacctggtgcccgaaattaaatttcctgctctaatccatttaaaaataatcgtgctaattgatgatgtcagtaaggtttattctcgttcattgatgacatcagcaaagttcagctccgctagtcacctggctcctagctcatatggagaccctcgagataagtctttagtcatttctaatggactagaatatttcgactttggatctcctataccatttttagggatattttcgtaaatatctaaaaataataaaaagttgagccttttt

SEQ ID NO: 41689 - DNA, 737 bp, Cannabis sativa
tgaatatcttcaccatggttattcgacaccaatttttcattttgatttgaagcttagcaatgttttactagatcaagatatggttgcttctgtagctgactggtattccaaagctcataaaatagagaagactctatgaggcaaaccatgactctggacattcagacacatggctataggaaagatataactattagaggtatgtatgttgtgggtgagtgaatctataaatttaaaattagataatttaatgttcaagtcttccttaaagggttatcatttttaatacagagcatggactggaaggtttggtttcgagaaagaggggatgtttatagttatggtatcacactcatggagattggagacattcactggaaaaaggcaactcatgaaatgttcactagagaaatgaatttaaaacaaaggattgaaaattcaattcaacatacaataaactgaagtcataaattcaatttactgaggacagaagaggaacactatgcgcttagaacggaatgtctatctgccatagtgaaatcggctctaacttattctgttacacagcaccagaagataggacagatatgaaaaaagtggcagccacattgaacaaagtcaaaatgttaaaagtccaatgacttgcccgtccaaatcaatcttaaaagtcattaggtcttcagattctgtagagttgcaagtagacggcttataccagaaacaaactgcagtatata

SEQ ID NO: 41690 - DNA, 529 bp, Cannabis sativa
caatccaggaagcagctagagtggggtactcgtgtataagagccattagtgcgtgggtgtgagagcccaatggaagcttgaagcggggacgttacagaggtccaccaatggcatttcagtctctcaaagaccattcatcttacaacttttaactgatacatgttatattggtgttaaacccgcttccacccccatggaacccaacactcatctaagcaaggacacaggaaagttactttctgaccctacaagttatagaagtttgattagaaagctcatttacttaaccataactagacctgatatttcttatgctgtcaacaagttaagtcaattcctttcagctctgtggcaacctcaccttcatgccgctcaacgtatccttcaatacttgaagggctctccgggccaaggattgttcttccaccttctacccaactgaaggcctatactgagagtaacttgtttgtcaatgaggtacaacttaaaatttttttctgatgctgactggagcacttgccccaacact

SEQ ID NO: 41691 - DNA, 958 bp, Cannabis sativa
agagttgtagtagaaataaatcctattattatatagtcacatggtaaaatatcattaattgtatttatcaacacgagggtcattatattcataatggagtaagtaatgacacttactccataaataaatcattaatgacggtggttttatcatttttgattctctgcatattcataattaattttagtggtatttgactaaatcccaataataaactaattatatttttatcataaaatattagtgctgctaatgctattacaccacaaatgatcttaaaatcttattaatcttcctcttttggattatgagtagtggtaaacaataccaagaatagtatctttgaaaaaaataattaataaaagaaaaaaaaaaccaataagaccaatttaaaactaagtaaacttttagagttggagaatgagacagagacctataaaaggcttcatcatttaatataagttaaatagtaacgaaagtgattggaaaaaacttaacggaaagactaggtaacaacactcatatcaatattaattttatatttattttatgagcattattttttgagactaatatacatactcaacactatattattaaataattaattaataattttgtatattatttattaaattaaaatttatgaggtttgatattaaaattaggtgtggcaaaacgtattattgtgttcttgtttgtgtcatattttaattaatcagtttttatatttcgtgttaagcgtgttgaccgttttcgacctatctctaattttctcaaccctaactaacttgtaaaaaatcatatcatgtactgaccactctaacccattttactattattgaagttggagtgttataaaaaaaattaaaattctattaaaaaattaaattttatatataataataaaaattaaatttataaaaaatttcaagttctttttctaaaaaattaaatt

SEQ ID NO: 41692 - DNA, 857 bp, Cannabis sativa
tgggtataataatgattttaatcactatatattttgaagattttaggtaaatgaataagttgaaactctatttattttacacggcatataatgtacattatatggagccatccataaattttcgaatgatttagaatatcaaaaccatattcaaacacaaattacacaagtttcttttccaatattttatatacgcttaatttcgtaattatataaactcatttaaatatatgctagtttaaaataaaaatccaaatatattctattcattttagaaatgtttggaatgatgaaatagagtactataactcctaatttacagaaaaagaacatggtccaaaaaaacaaaaaattacataataaaggccaataaataataatataaattcttcaaaattacatattttctccaaaaaaaaaaaaaaaccatcaatttttttttttatattatttatttattttctaaaaaaaaaattacatggtacttattcctctggtctttcgataattcggaagtggcaactataggagaaccaaatctcatatttccttcattgaatcattggtaacatacctcggctgagggaggaaaatcttatgggtcaatatttgtcctctctcaatttcttataaattaatttttgtatgtttatatttttaaatattttaattcttgcccatataaaattaatatttttttatttataccctccatatttttattttattccagtaaaatttataattgttattttaatcgtacataattttatttttatccttgctaagtttacagcttttactttttatattaacatatttttatttttatgtttataatactctttttacaaaga

SEQ ID NO: 41693 - DNA, 675 bp, Cannabis sativa
ctttctgttttaagaacaatgagtaatcctggtgcttttgacttaaaacctcacgggctgatctttcctgctggtgtaaaatttcctcaagaggctgctgctgcagctggctttggagactgtcgagagatgccttggcctcatgaacctgttgttgcaaatcacaataatcttccctgtttaacttcctcagcctctctttgaatagcttcagtttacaaacaacttgatacatttggttccctgaaatttccaagcaccatatgtcttttagcatagagtcatacttaggatgggattcaacatcctaaaatacttgaacggtttttcccccccacaacttgaggatgcaaagaaaggatagctggagaatgatcaaataatccctaattaagaaatacagcttcagcaaactcatattgtccaaccaagcttgattggccataatcctgtctatcttggaatatatcctatcagcccctggttgcttatttgtccaagtgaaaaaattctcactagctttaacatcttctagcttgcaaaaattcacacaagtaaggaaatcagaatcaggataagaccttaccctgtgccccactctctcttccttagccaaaatgtcattgaaatctcccatcacacaccaatttccattagaagataaatcgcacaagt

SEQ ID NO: 41694 - DNA, 1449 bp, Cannabis sativa
  modified_base (326)..(328): a, c, t, g, unknown or other
  modified_base (692)..(700): a, c, t, g, unknown or other
tctctctctctctctctcgcaacttagaccgaacaagccacatttggctgtctcttccgccccattgatgaaggctcaaggtccaaatgtcgtgccatgcctcatccttctctgcgatccttgtcaagcctcatcataactctcttatttctgtggttgttgggctcagttttggcatctcagaccacctcgagtcatggccaagcaaggacagctactatcttgggacatttggggttgttttgaactagggtttttgtggaagtggtctgtggaagatgaaagggttttaggtatagaaagagaaaaagaaaaaaaaagaaaannnaaagaaaaagaaaagaaaagaaaataataaaataaaataaaatatttttcataatattttaataattaatattgcgtggaccactaaaaaatttccatgtgtatacttatggacacgttgacagtccgttgtagcacttaactgagatttttggatagaaatgtaaagagcaaaaaggaatgggggtacaataggttttttcgtcaaaattttagtttatgtggttaagtgttaaaaaatgtagttcaggtagtagtgccactaatatctcttttattttatctctcttccacataatttttgacatcttttcttctaaaatattccaatagtaagcagttctaaaaattattaaaataatatnnnnnnnnnatttaatatatattaaataaataactttcttactttatgataaggatggaaaatatctctattagtatgagactttttgggaaggtacctaaaaatatattcgtgagggcctagactcaaagcggacaatatcataccaatattgagataaatagtgttcgacatcccaactagtggtattaaagtcccacaatggctaaaaatgggaagaatcgttggtatataagggtgggcaatatctctattggtatgaggccttttgggaaggtgcctaaaaatatattcgtgcaggcctatactcaaagtgtacaatatcataccaatatggagataaatagtgtctgacatcccaataagtggtatcagagcaggatcccaaaattagtcacgtgaatgaatgcttagaatgtcaaacaaaggagatgggcctcgttaatctcctgatgggatctgtggatgttctcaattagacaggtggtgtgctctagaagagttggcctgagaaaagagcaagaactctcgaggtagtggtggtgctccatgtaaggcgtgtgctccaaagcattggaaggaagtacactagttggtggagagcggacgaatagaagatcatttgaggggagacaaggtggtcctttgtttgataggaggattgttgagtgtgcaaccaaagtcccacattggctagaaatggaaaggaacatgactatataaggatggccaacatcttcattggtatgaggcctttt

SEQ ID NO: 41695 - DNA, 1672 bp, Cannabis sativa
cacaaaagggacagtgcatttgacgagtcaacataatgaatctgtagcccaatttcccaaaaccaatcaaaacatagcccaattaaaatcaccatgctcgtgcttgtagacgagtcataaaagctagaatcgatccctgtgtaatctggctcatcagggtgctaacattatgcaatttccatcagctaagtaaccaggccttgagatttcagtgctcgcatcactatcttctggtaccattgccaccactctgtgaggtgaccgcacatggtttattctggtgcaagataaccactcaattacattaaaaatagtaaaaagacaagccaaagactaacttcttatgaggatttaacttacattggtcgagcaaggagtgtacttatacgagtctgattcacacaatataaatagcttgactgattattactttaaaatgtagaatagaatattatcaatagcatagcaagttgcaaagacttaacacaattgcacaataagatatgccaaaacaaagagtagtgtataaccacaaagcatggagcctctgaaaaggtgagtgagccatgtaatggggcagaaccaaaagtttcaagttcatcttgtaatttaaaaaattaattagaatgctttatgaacatttcatagacctgaagacagttgtgtgattcatcattagaaccaaaagaacattattagataagcaataaaatatgaagacaaattacaactaggagttctaaataaatggttaagtggataacatagaatttgatcacaacatattagcaaaaaaaaaaaaaaaaaaagagagggagagaaaaaaaaaataagaaaaaatataattaagttaagagagcagagtatatatatacctgaaggcaataagatccagcacaaagaagttgaaacgagcagcatagagaaagcatgtaatagattttcgaaattgggggtcttatactcgagactgcaccgccaaaacacaaagggaagatagaggattagtagggcatttataagaaggagcgattcttgagacaccacgatcacatcaagaaaaatcgccacttctcataaaactaaaaatttttaataataataataaaaataataatgatgaacggaaaccgacataaaaacttccataagaagtgacaaataagaaaaataataataataaagtaagaaaataaagtaaataaaataaaaatgcatacgtagatctctctttgtctgaaaaggcctacacaggttgaacacataaaggcccaagatcaaaatatgtctgagaggcccaacacggggcgacccaaatactgaacctcaagagagcgatatggactaagggggaagaggggcgctaaacgacaaagcaaataagtaagcgccgacggaacttgaaggaggagggaaacagaagaatttgtcgacggagtaaaggccgaatgtaggatgtattacaaatgagaacccaatgaggacccccagctgatctgtcgacgagagatttacctaaactataataagaaaaggaacgccgggacggcaccacgataaggacaaatacctcggacggaaggaaactcggatcatctcagacaggagttccgaaggaagaaagagatactggatacaaaggaagaaatcagtatttctgagagtataatac

SEQ ID NO: 41696 - DNA, 3358 bp, Cannabis sativa
ttgccacttcatccgtgacaaaataaacaactccacaattcgacttatccctgttcccagccaccttcagcttgccgatactttcaccaagccattgccttccacaacactttcctctcatgttgtcaagatgtctgtatatgatctatacagtccaccttgagggggggctcacaagatttagttattagttagtttttggccaatcactctgttctgtttattacgtcaggatgttgttatctttttaactgtttttcccttttctgttaattaactgattagtctttattaatcagttagttaaagcggtttaagggtcttttgcctcttcctatataaagctggctgtactctgtatcaaatcaattaattcattcttaataaaagatgtttttcttttctctaatccgcgttatggtatcagagcggggaaagaaagctttccccagatcttgatttctctccgacttctccgtcgtgcttctccgactccttcgtcgtgtttcctcttcttcctctgttctttttttttttttgaaaccagaattggtgttccaatcaatcctgcgcattccttttcaatcagttctttctcgaactaagcctttcttggtactaaaatgtcaaatgacgataactctggttctactaccatgggagaagatcatggaccaccagcgaatcctgttgtacaaagaggacaatttcagcaaatgatgcagcagagaaacccgcttgaagacccagcagacccatattatctccaccatgctgataacccaggaaatatactcgtctctcaacttctaactgggcaggacaactacatgtcatggagcagggctatgcaattggccatctcagtcaagaacaagctcggattcttggacggttctatccctaaaccttctttgtctgaatctgttttgtataatgcctggactaggaacaataacattgttatttcttggatcttaaattcagtttctaaagaaatttcctctagtattttgtatgatgaatctgcagcagctatatggaatgatctcaaaattcgttttcatcaaaagaatgggccacatatttacaatttgaggaaaggcttaatgaatttgagacaagacaatcaaggaatcagtatgtatttcactaaattgaaaactgtctgggaacagctatctcaatatcgtcctaattgtgtttgcaacggctgtaattgtggtggcgttaaaagacttcaagaacactaccacatggaatatataatgtcattcttgatggggctttctgactcttattctcaagtaaggagtagtatactgcttatggaccctttaccagaaataaatcgtgtgttccacttagtaacgcaggaagaaaatcaaagggagagttccacttctggtgctgagcaaaaccaaaacatggcttttgcttttcaaggagacaaaagcaaaacaaacaagcctgattcaagtggaaacaagtcctttccacagaagagaaataggcccttttgcactcattgtaacattcttgggcatacaattgaaaaatgttataagatacacgggtaccctcctggttacaacaagaacaaaggaaaagaagctgcagcgaatcaagttcaaaccaacagtgagagtgctggagctattggtgacagtcaaactctccttcctcaactcacctcgacacaatatcagcagcttttaaatcttcttgctgcacaacaaactggtatagcttcctcagaacctagcacttctacaggaaacacaggtataatcctttcaaatgtgtcttctttccctgtcaatgaatcttggattttagattctggggcaacaagacacatttgctcaaatcctaaactctttcagtttatttgcaatattcacactcttgataaatttcttgcttatactcggctcacaaattcttacaaagctttcatacttgctgttacttctcagaaagaaccccaaacatatcagcaggccatacaattcaagaaatggttggatgctatggatctcgaacttactgctcttcgcaacaacaaaacttggaccgttgtgcctcttccacctggcaagaaagctatcggttgtcgttgggtttataaaatcaaattcaacagtgatggctctgttgagaggaacaaagctcgccttgttgctcaaggatatactcaacaagaaggacttgatttttttgacactttttctcctgtggccaaaatggtcacttttaaactattacttgctgtttccacaattaaaaattggcatatgttacaaatcgacatagacaacgccttcttaaatggtgacctccttgaagaagtttatatgaaattaccacctggactaactttacctccttccatttctgcagattccaaccccgtgtgcaagctccataaatccatctatggcctacgacaatcttctcgtcaatggtacaaaaagctttcagacgccttaattcaagaaggttttcatcaatctcaagctgattatacgctattcacacgaggctcggatgaccaattcattgctcttcttgtctatgtcgacgacattgtgctcactggaccaaatcttgatgttctacaccaagttcaatcttctctgtaccagaagttcaaactcaaaaccttgggccctcttcgatacttcttgggttttgaaattgctagaagcaaggatggtctctttctctcacaacgaaagtacaccatccaactacttgaagacacgggttatgcaggctgcaaacccgccaaaactcctatggaccctcgcacaaaacttgatgatcagcaaggggatcctttgaccgaaccatctgcttatcgacaaattattggcaaacttctctatttgactctatctagacccgacatcacatttgccgtaaattgtctcagccagttcatgtctaacccccgaagtactcacttacaggctctcaatcacctgctgcgttacctcaaaggcaatcccggccaaggtctcttatactctcctacttcctctctacacctccgaggcttttccgattcagattgggcctcctgccccatcactcggcgttcaacaaccggtttttgcatctttattggggattgtcttatttcctggaaaaccaagaaacaacccaccatctccaaaagttcagctgaagcagaatacagggcacttgctgccactactagcgagatcacatggattcaatacctcctcaccgacctccacatacctcaacctacaccagctttcatctactgtgacaatcaatccgccatccatattgctaataaccccacttttcatgaacgcaccaaaca

SEQ ID NO: 41697 - DNA, 761 bp, Cannabis sativa
attggggataaaaaaataaaaagaaaaacaaagttagattgtactttgttagcgtgcatggatggttggagtttttatgtgttgtaggagttgtatgattaagggtttgccatgtggcttcccatgaaagttggagaaaagtccaaacctacttttgccaagtatgatgggtttcaatgctatctatctatatctccatatatatgatatctccatctcaatctcaaatctcaatctcaagctactctactcatcactttttcagtatgagataatatgggataagcccctagccttccatttgtgttttcactttccaccaaaatcaaaattaaccattcataattttatatatatattaaaagcatttgttatccttaaaaaaaaagcatttgtatataaaagcaatccagactacttagggtttgtttaccagactaataaactagccaaatgtttcttgaggagtatagattattaatcagttaattctatatgtgtgggattatttatcctatataatattgtgggataaataattcttaattttagatttttttatttattttttaagtttataaatatgttttagatttaaaaataatttaaatagaaaaataaaaaaatttattatcaaatatatatattataattggtgaaaatgtataattttgagtatacgttattaaatttttaaaatgatattaattaaataatatataattgaattttaataaaaatttaataacctatatagtata

SEQ ID NO: 41698 - DNA, 788 bp, Cannabis sativa
  modified_base (525)..(534): a, c, t, g, unknown or other
  modified_base (612)..(626): a, c, t, g, unknown or other
ttgtaatttgtttcttattaatatattaatttgtcgggttcaaagtctaatataattaattttctacatatgatttagatatagctaatctagaccacctttctcatttataaatctcatatatattgttaaaatagcacgagtatcatgcataattgtgctttaatttctccaaactaatatatcatttttactctcccttgaaaaaaaaaaaaaactttatatcattttcattttttctttcttcatctattagtcgatgaggtcaagaagtacattgttgtgtaataatattcatgtaatagcatcaaaatctacaatcaatatcgatttgaacatattaagagagaaaaatatacaaaaacatcatcaatagaagactatttttcttatacataataattttaaaaaatcaaaagagtcgatctatgcatatatctattctatataaagtgtgtctatataaccgaaattcttggtttatgagaaattcatgggtgaattttaatttttatttaataaaannnnnnnnnnttatttatatataataaaataatggtttatgaaaaattcatgggtgaattttagtttttatttaataaaataataaannnnnnnnnnnnnnnaataaaataataataaaataaattctattagtatttgaactgacattaaatagctcttcccaatttaaaaaagaaaacataccgtatcttaaattcctaatgaaatttttataggaagttaatatctaaaaaatattaaccttggtcaagtaaataatttgt

SEQ ID NO: 41699 - DNA, 619 bp, Cannabis sativa
aaaaaaaaaatatttggtgcaatattgtttgtttttctatcattgaaatgtaaattggacttaaaagagtagtggactttgacccatgacttattaaattcgaaagtttgattcttgaaatgaaactattttcaacttgttcataatgaagtagttgtaaggcttaattatgaaattcctggtttttcaaaaactttcgtgaaaagggtcaattaacaatgtttatgagaatatctaaagttaaatgtgagacatggctgtttgaactctgcatcggtcttcatggaataacttctcgggctattttttctcagatttgaaatagtcttggctatttgaactataatgtagacttgaaatgaaattttagttgagcactagatcaattacatgaatgtctaagatcagggtgttcttatctgttttgcacagattttgacatccccttttcaactttattaaacagattacgagagcaaaattgctgcgtgcaagaagaaaacagaggctgcaaaatctgaggttgtttctgatgcggaattagaccttcttaacaaagaattagaagaagaatgcaacgaagaatgtttgcttttggaggagcttagataagtatata

SEQ ID NO: 41700 - DNA, 3951 bp, Cannabis sativa
ttttttttttttttttttgatatagtagttcacgtagtgaaacatttgcctaagaaagtgatactaggggatcattatactacatgtgaatgtatgcaatcaaaccagcaatgttggtgtacaaataatatgttcttgtccaaaaaaatctatttgggaagcttatgtgacaacgagtcattagcctattttctatctacttccaggaattagaaactatagggtaaaaacctgtaagtatattttgattatacaataattaatattttttgataaaaaaataaatttaatatttaattaaaggaataagaaagaataaatgaatagagtgaatcccgccaaacagcgaaatagagatccttcattatataggcaaagccattacattactggctgagtgagtggctggcatatctcttaaaaaattgctaaaaatattttttaaaattaataattggaattattattattatattttctcttttgctataaaaaattacttgaatactttccactctgatttcatcttcaccaccaatctttcaattcattctactctagctcaggagaattccagaaaagatggcgagatgcgagagaagggttttgttgctatgcggggattacatggaagattacgaagctatggtcccttttcaagctttacaggcttacggtgtcgccgtcgacgccgtctgccccggcaagaaagccggtgatgtctgtcgcactgccatccatgactcttgtggtcaccaggtccgtttttctcacccccattttcggtctatggaatgctagtaatagtatcgtgaactagtttaaagctaggtgttaaggtaagaggcagggtaatttgatatttcaagataattgaactctataataggaaaggtaataaacaaggttcgggttttgttattgagcaatttttttacaggataggcttgtgtgtgcgcctagtttgctaaggtcaatttattctttattgaagaagaatcaagtgctcttggtttcctttttgtgagttttgttttggccaaatttagacaggtctatacggtttttattttaagtatcaaaactgtgattttgtagctacattacttgagtctttgcagattttattaatatgttatactgcgtgctttgtagctatgtcacaattatttggggtgtcaacatatatggatagtcacaatcacacttaggattttgtagctgtatttcatatttcaataatagctgtatgcaaagttggatatcttattgttgatgcgaacttttattttatgagagttttttttttgttaagcacttagttggtttgtaacagtcaagactgcagatttacagttcagactacttatttcctgacaatcatcaaagctttaatctgattatagaaacttgtttaaacctgttaagtaaaagtggaattgatactatctgttttatggaaatcgccctcttctcacagattctatagtatatttaaagttttcttcatggactgatgagagaagttactacctaccatgtgagaaagagctgaaagattctgtttgtctactgggaaagtattgttgtagattggaaaaaaacattaacagatatgttaatatccttccttagtttttttatattgattcattcttctttgttgcagacttattatgaatcaaaaggtcacaattttgcgctcaatgcaagttttgatgacattgaatttagtaagtatgatggattggtgataccaggaggacgagctccagaatatcttgccatggattcatcagtaattgacttggtgaacaaattttctatttcaaaaaagccaattgcctctatttgccatggacaactgatcttagcagctgctgggttggctaaaggtctgaaatgcacagcttaccatgcagtaggacctgcccttgttgctgcaggtgctcattgggtagaaccagagtccatcaaggcatgtgtcattgatggtcatcatatcactggggtcacttatgaaagccatccagagttcattagactttttgtgaaggctttaggaggcaatataagtggttcaaataaaagaattttattcctctgtggggtattatttctatttattttatttttttttgatgaatttatttctattactttgcgctgcgctgctattgcatttatacgtatattagttattctttctactggaaatgcattgggtttccgcgggtacttgtgttttccctcttgtatgggaatggtctgatggttcatgtacaaatcaatgactatctattaaatggttaagctattccttaactagatataggtaggtgcttttcatttcagtcaaacttgcaatttcagtatgtcattgttactgaccgtgacttgctttcttccattcatttcaggattacatggaagattacgaggttaaagttcctttccagtctcttgaagctctagggtgccatgttgatgcagtttgccctagaaagaaagctggcgatacctgtccaactgctgtgcatgattttgaaggtgatcaaacatacagtgaaaagccaggccataattttacgttgacggctaattttgaaggtttagatgcatcaagttatgatgcccttgtcattcccggaggtcgagctccagagtatctagcattggataagacagtcattgacatagtgaagcactttatggagaccaataagcctgttgcatccatctgccatggccagcagattttatcggccgcaggtgtcctgcaggtatgcataattctctaacaatgaattcacttattaacttgttaatagttatatatttttcctatgtagcgtggtggtataaattaaaaagaatgtcagaaccattacattctataaaagtgcagaaattaattgacatgcttgttttggatatcctttgagatttcgcataaaacatagaacttatgtgttgtgaattttactcttttggttgcacagactctatctagaaatgaccttatagcttccacattgtgacaattctaatattatgtctttctttgctgtatttgtaggggaggaaatgcactgcatacccagctgtaaaacttaacgtggttttaggaggagcaacttggctggaacctgatccgatcgatcgttgcttcacagatggaaatttggtcactggagcagcttggccagggcaccctcagttcgttgctcagttgatggcattgcttggcattcaagtaacattttaattcccaattgtcatttgggccgtctttatctggtaatatgtacatctatacagaataatgatgtatttaggttgaggttattgtctgtgtatgaataaatgagactatgacactgtttttgtatgccaagaataaatgatattttcaccttgtttttttttttagcaaaaatatgttacggtttaccataacactgttgggaatatttttgcctcaatagaaaacaaaccaacaagtttacaagtctatgacaagaaatataagaacacaataacctgagattaaataaggttacaactcaattgcaaaatacacataaaatggagaatatggaaatgaaaagaaagtttacaactcaaaactattagcaacaaatacaacacagtatataaatagtatatatatgaatatataggagatgtgaaacaatctcaacactagtgtataataggggtattactaaatttgaacaatgttttatatttttgtccaaaaacttattactatagaatttctagcaaggtgctttcttgataaaaacaagttatctcaaaatgaaactattaggtccctatttatagtatttaggaagaatctaactttgaaattcaaatctcattcacctaaggttgttaccagtcgtgtatgagagttttaaggatcagaagaatgttggagtgaaa

SEQ ID NO: 41701 - DNA, 1717 bp, Cannabis sativa
tacgcctctgggcagactttgtttcgaaaagaggaagatcatcatcatcaccatgattttttcccatattcttgtacaatatgtggtgagactaatgatatgaaatgaagtgttcaattatatttaaagagtaacgagctcgcttcagtaggaaagaatgacttcttggtagctactgaagttctagaccatttggtaacaaaaagagttgtagttgtgaaatctaatgaaaaaaaaaacctaccaaaaaagataccagtcaataatataaagattaatgtggaaaatatctagcatgttttgatacaaattaagtgttaaactgtgctattcataaaattaattatcaaatctatatcaactaaataattataaggtgttaggcactactattaatactccataagaatgttctaatacaacccttaaactgagcaaaaacataaattatcttagttgcaaataaaataaagtattttaatcaccaaatttgatatgagagttgttgtaactaaattttaatacaaattttaatatgttatttaatgctcacttaataatttattaaaaagatataaaataataataatataaaattaaatgtaaaatttaataataaaataataataatactgcaagtttaaatgagtatattattagctaaaatttaatattaaacatagtattagtgagagaatgagatattagagaggataatgttaaatttttgtctatatattttctttttgttaagagtaaaatgtttaagaaacttttatgatgtactcttaaaagaatgcactgattgatgcacttcagggttggctcaagagtgagcagcaggggctacatccattgctcccattcaagctaaaaaaattaatcttataataaaaaagccagaaaaattatattttatatttttactattgtttttttaaaatttttattatattctaaaaagaatacttaatttatttgttaagatactatatttaatattttattaaaaaatatcaaattacatttttaaaatattaaattttaaatttttaccaaaatatataaaaaaatataaaaattttaatataaaaaagcttaattagatttcttggcccaaaacctccaattagcttgagacgggcctgctgcactctctagcctaattattttcataatcgtatacattgtagttatttaatatatctagtaaaattttgaaaaatttgaaaaaatttaacacaaaaagtaagatttatatagtctattacacacatagtttttatttcatacacgtgtaaaatttaccatttaaacaccgatttttatattataaattatttttaatttttaaaaattatacaaaatatcttaaacttaaataattactacacaaccataaaatattaataaataaattgaactagatgacaaaatagtaagagatgtattagtatagtttttttaagggcacattatcgaagatatgagaaatgctaaagggcaccaatagtgcctaacacactcctatgtgtcaatatcgctattggtccaactaggtatcgggtctcatattttttaatataacttttaaggagtatcgctagccaatcgcaacgtaacatgtcgagaaagtgttaggcaccactaatacctaatagcaatgttcatattatttttattaactaaatctcaattcacaataatatatcccttt

SEQ ID NO: 41702 - DNA, 602 bp, Cannabis sativa
ttatctgaccttcgtaatagatttagtctgggattggaaccatggaagcttagctatgtatattataaacgacaaatcgactatggagttgattctaactcaatcaacattgtgccattgaaaataataatggaaggagagaaaaaaaacggatgatacataaggtttaagggtaataagggtggaatcatcaaagaattttgaagtgaaaaagccaggaagtaacaaaggcaagaaccatgcaggcaagcaggaaattcataatgcggcggccatgccagatggtctctacaaggatcacaggagctccagctgttgtcattgtcaacggatcggtcacagtagtagtgtttgtctcgtttatcctttcaccggctatgttgacggcaatgacgccacaaatctcgcacgttctgcaaagtgttctttcaaaagtaaatggcaagaaatgtagaatgctagaaatgttacacatggtgtaagaaaatactactttttaactcctaagcaaaagcatggttaaataacatttatagaacaaattacatgaaaataacatgtgaaccctacacctttagttgcatttggcatagatcaatgaa

SEQ ID NO: 41703 - DNA, 2237 bp, Cannabis sativa
  modified_base (26)..(28): a, c, t, g, unknown or other
  modified_base (74)..(96): a, c, t, g, unknown or other
agtcccatacctacacagtcttagannnatcccacttgaccttccccaggcggtgtgagattgtacagcttacnnnnnnnnnnnnnnnnnnnnnnncgggactactgactgtcacacgccagatgtgcgtgcttcaaaagtcccataatttgggatcaaaatgggaaagatggccttggaaccacaagtttcttgtcagcttttctcttcatttctcgacctgctacactccaaactcgagccatcatgtcttcttgcattccaaacttgagccatcatgtcttctttctcttttctcctctggcaggccctgtatttcaactcaccttctcaaattttcttaaatcagagcatcctctcaacttcattgtcttgggcatttgggaagatcaccatggacaggttagtgtccttaatcgactgatggccttgtaaaatcccaaacctttaacaattaatcgtggtcaccaaattcctaacgttgagctcctccttggtaagcaagttaaagactgcgggatgattaaggaaaagttgagtggggtcgtccgaagcaagggggacctaggtccactcagtgaatagaaccgaacgctctaaagctctaaaacccgaggagaagaaaaattgatgaaggcagtccctaaaattattttggtaggttaatgggactggggtctcactggctggataaggttgtaatgagtaaaaattatctttaaatctttcccccttatttgggatggacacgatttcgtaaaagtataaaactttagcgaggtgggagcaggccaactcctaaaaatgtaaaaaaataaagaggcacgataacatacggtagccttgggaaataagtttataggagataatcctacgaaaactaaaaaattgataaagtaattttggagtggcaagcttgtcccgaatattagatgtgcctaactccaagccccgaacccttcatagttatgattgggggtcttaaattctcgagccagactgtgagagactctaggttcttagtgcatgatctcgttcccttcatcatcttttctagatggtgagcacaccctagagaggaatgaagatcatcagcctctcattcggtaacacaatgaacatagttgaaaatcaggtctgaaccttgaattacgattaacaaagggacgaagaggcgacctgaggccacttcttaagatgatgagtttaaaggggcttcaggatttaacatgtccatcccagagcagagtttaagggtttcttcgtgtgtgtaggtccctcagaactttgctcatctgaaaaataagaatatacttagcagttagcccacacatcgagcactaagaagggaatagggttccccttaccactgagaagaggcccttccagatgctagcatgtttagaaattaaaaatttcctatgccaaacatcgggtgctaattgccccatgcactagaagaaatggtacaagagatgaagggaaggaaaaatggcgagctctataaaccataggcatggaagccacgacccaaaatataaacagaagacgaccgaagaaaatccccaaatagtagtcatgtagtataaatgtcatacttatgcaaaagatcacaagcaaaaaataataatgaaagcaatgcatatggcaagcaacttacgaaggtgagaagctggtgtggattgcaggtgctaatgcacaatgatggtaaaactgagcttgacaccgtcggaggaaaaataagagaaaatctagagtgccttaaatttttctggtttgagttctaagaagtgtgaaagtgaaaatttgaaaaagaaagagataaaagacatttatagatccacaagagtgactcgagtcgtcacctatccaacggtctcacttcaaatttgtgtaaactcccacaatccaatggccatagcaagactgttagaggcatgagtgtaaacagatggttacactactcaagcaccaatttgacaccctgcaattaataggagcattgaaatcaagtaaaaggaaaactgaatcgacttcactaaaatggaggggaaatattgaataacattaaagattgtcacgcgtgttgcctacggaacttgatgtcagcacttcgagagataagctacaagccccatttcacaaaatggtaaaatgggacttggggggtaaatgttgcctgaaatttctcccaaaatatgtggcacttcaagagtaagccatttggtaatgggatc

SEQ ID NO: 41704 - DNA, 1515 bp, Cannabis sativa
catactgcattcattgcaagggaaaatgaaagcactgtcaaaataaatatatcccactctcttacagacaaaagatatataaacacataatcaatatagtaacctcgtatccatgaggaagtagcttcttagatatggtttcagcactttgcagaaactcttcctcagaaactgtccagcaaaaagaatcatacgagttccaacctctgggtggcaagctagcatgctcaactgcttgcactctgaaattgaaaatcacatcacatcattgcttaatgagaatgaccattttctttcagatgggacgtaaaatgattttgccacataactaataataatagtaacataaggaaaagcacaatttcatttcgaccaacgagtacggtgcaatattaccttttgcccagaagctaaaatttgataagtacaacaaagttcataactttcaaaaatgggtttaacaagatgtaacgaatatgcttgaaaaatcactgaaaagtcggtattttaggaaataatgaagcaaaaaatagacatagttctgaaatgggttttttgaattatcaccgaatttgctattaaaagaaaaaaaaaaaaaaattggtccacaatattcagtcatcatatttgaaattgctacaaaagacaaagcaatttaattcacaagcaaaattctcacttcacaattatgatgacgatgataagatgagcaagattgaagaagctagagagagaaaaagaagtacctgtaaaggataagagaaagggaaaggaagaagaagcatatggagcttgagaaaaagacctgcaaattcattgttagagtagaaactattgaatttctttggggtatgatataatgaggaaactgacagtgataccatccagttaaaccttcttcttattagcgggtaaaaaaattgaaaaaaagaataatcagtaacagatgggtgcagatcctatgttttaaataaacttcatcaacggttcgtaaggtttttgcatttatttattttaggatatgtcttgaaatatgttcttatctgattaatatttttcaaaaatgtattaataatacaatacaatattgctgtactatgatatcattaaatgctcaaactgcaatgtcctgctctctgtcgcaatcataaataagtaataatgatatgtttccaaactcgttgaaaaaaaatccatctagtgtatatggtatagaaatagaatactgtctatgccttatgccattttctatattttttttagatgaaatatatctgtgagaaatgagtaatttctgactgaacactctctctctaataaatataatccatatctatttaactatttacagttacacgacgatgaccatgacaatgactccttgaccatttagaatatttgttcggatccacattaatgatacaataaagttaatatttatatactcttaagtctcactgtatattctgacattaaggaaggaaaaaaacctcatttttatttaattaaaaaaaa

SEQ ID NO: 41705 - DNA, 1260 bp, Cannabis sativa
  modified_base (389)..(407): a, c, t, g, unknown or other
tttgtgaaatttgatattgtcatagtccaccgtattatgagaaccgccctatagaatagcccaccattatggctgggattgaaatccggataagctctatacttcctctaaaacaataattattataataagacaaatcggataaacataagcggaacaataattcacaacagttgaccccatcaaaacaacccgccacgtgtaaaactctgcactttcaacggtctagatcgatggttcacaattacacacgtggaccccattgtacttttaatacgatagcctagcccccccttttatttatttcagtgtattaatggtattggattctacctttgtctgattcacactatcgcataatagagaaaaagagagagaaagagagagannnnnnnnnnnnnnnnnnngagagagagagagagatgggtgaagcggtggtgggtgaacagagtccgagtccgagaagcccagaagcgaaattgggtatgcaagtggaggatctatgggacacgcaggagccacagctcagtcctaatgacaaactcaatgcttgttttgagagcataccagtttcagcttttcctccagctccttctgatcaaggtaaccatgcatcaatttttcatcttttaaacttaaaaatgttttatgctaactgggtttggttaatatttcttgattgatgatcaagttccgaatttgaacaataatatagatattgagaaaagaaaatttgatctgggattattattgattagctgaagacatagtgatctgtaacgattttggggtcccaaaagtggattattattgttttgagaagtttctaatgggttgtacttgtttatgatgttaattcatgttttgaattgctatcgttgtatacagtgattgagataaaatcagatacttccttggctgaggctgttcagattttgtccgaacacaaaatccttagtgcacctgttgtagatgttgatgcagctgaggatgctagttggattgatagatacattggtgtagtagagtttgctggaattgttgtatggattctgcatcaggttagcaagcctaccaaatttaaatgccatttactcttgaatatttcaatctacatattcttttaaattgttgcagaagagtgatttcgatgctaataaatattgtttcttgctcaagttttctttattctgcattgaaaaatagcaaccatatagttgcattatcatggggcatagttgagctagggggaaagtgggt

SEQ ID NO: 41706 - DNA, 3439 bp, Cannabis sativa
taatgaaatatccaacgacgcaagacacaagaacgttagctttctatacgtcaactttgtaagaaataatatttatcctttatttttaaaatataatttatcttaaaatacattataaactattttatacgtttatatttgtattgggtggtccacccaaagagccatgtggatggcatggagggtggctcatacgaaacaagcgtttggtggctttgtcaatgatgtcgctgcaaaaagttttgtaagtaaataaaatattgtattattaaaatttaaatattatattaataatatgttctaataatatttatttaaataggatgaattgcgtaaggagcttgataggaaacgactcgaaagacaatcatagagctatacatctggtactgaatctgatactagttatcaattcaacgtacttgaaaaagttcttggcgaaagatttgactatcaaagaggcgtgggttatagggtcaaagacaaagaaaaaataacatacagtcaaactcagtcaactgtgcctcctccaccccctgatgaaatgtttaacactgtggcagatatatttacaactatacgtgatacattagagagtagtatgacccctgatcaacgtgtcaatttctataacccacggtttgaaaactttattcaaatgtacagtcaatcacaatctcctagtgattcgtcttctcagagttatgccactcctccacaacatcaacaccaaccttcttcgcagcaacaattctagccttctccgtagcaacaattccagccttcttcgcagcagcaacaccaaccttctctgcaacagcaacaccagtttggtccgcaacatgataatcagttcttatatagaatcccatcaaagtctcctccgctcgactcaaattttgctaattttgaaatatttaggagttcatcacaaaagcaataattttttttcgacccctaactcaaccaagcttagttaaggaaccaacacttggtttatcgccagatcaatcatatgttccttctccgccatagccattgggacctcccaatgataataatgcgtatcaagactttgtaacccgagaccttaatgagaattttatggaataataaattcatgtttttttaatactttaatttaatttgagacattttgacagtattaataaaatgaacattgttattagtttgtaatttttatttatttagtgtaatttgagatattttaatagtattaatgaatattgttagtgttaaattataatatttagaattggttaaattatatttaattttttttaaattgttatttatatatttatataatttattaatttatttttcattttattttttaaatgtaacatcaacagatattagcggcagagtacccgccgctaatgctgtgtgttgattttgttaatcgaaactaacacaaagcattagcggtggtgcccgtcactaatgtttgccactattaatagttattaaattccgccactaaaaactattaatagcggccaagtattagtgggagactattagcagtggattcccaccactaatagccaacaacgacgaattttggagttattagcgacagacccttccgctgctattgataataaatgttctagtgtttggtccccaccccagaaagattggatcagaattaattgtgacgctaaggtagggagtgaggcaatgtctgtggtggcgttagttatagatcgctagaatagcttctttgatcctcttattggcgaagcaacgacttccttgttagccttggaaacgatgatttctatgaagcatctttttgtgttggttgagagcgactctaaaataattatcaaagtgcaaaagggaacttattctaattgggatattagtaactacatacatcaatgtaatagactctctaatttacttccggattgtaatttttcttttactctcagagtttgtaaaatattatttgtaataatcttgatgtctagttttcacttttataaaaatacttatttcaaaacgaaaaaaaaaagcctttgcaatttgtgatttatgccatcacacttcgatataagtgtcaaattgtgcctgcttcagagatagtatgcgtattaaataaagttttgagcataattaaaatagcttacaactttacaagaactaaatatcgttcaactttatacaagttggctcactctctcatgctaaaccattctgaaattcccaaccaatttcactccaactgaatggctataatcatacgccaacaaaatgtgtggtatattttaacatgttaagttacacagttagtaagacattgatcttacttctcaaaagagttaactaaaccaagttctaaaattatataaacagaccctacaacttacaggttcaaggcaccttaacggtcaggctgtcttcttccttttgttctgctgccttggtttagtcctcattttagaagcagttataagtttataatcagaacaaggcatttcactaagcttgccaaaccttttctcgtagaagttccacagttctgacctaatggatcaaacatttaaaaatagagcatgaaaagaaattgaataacaattgacactttgttagaagacattcaacatggagaatctattgcgtaccaatacgccaagaactgaaatggagcatacttagcataaattctttcaacatctgtcaccattgtcctaatgctagattgtatggcatgaacctgcagtactttgattggcttcttgttcagataaccatgaataagcacgcagtacttcgtaagggtgatgaagattatgaaaagagcaagagagcaaacctgtgctaaatgtctgatagtttcagagtcagttggaatgacatgataaaaccccatacacataagcacattggcacatgtaaaaggaccaaacccatcaatttgtctcagctgctcagccaacttatggtagctgttcaagctcctttccatgcaattttcttccaattgtcttagttgaatcctaccctcaacaatactctgagccaagttcactatccggcctgctctgtacccgagcttgcagcgctttgccaggaaattcttgtcaagttttgcaagttctgttggagtagggaaattcccaaccttatcaaaaccagtgtccgtgactaagtgaggatcacagagcaaaccagaatcagcaatacaatgttctaccctcaaatttcgagatgtgggttggactttgtccagaacaatgtcattggaaagattttcaaacccttgtttgatctctccagaaaactgggaagccaagcatttagaagctttggagttttgaagcttcttcttgggttctacttctttcaatgcaggtgtttcagggatgaaatgctcagtcttatcgggtactagagactttagctg

SEQ ID NO: 41707 - DNA, 1981 bp, Cannabis sativa
ttttttgatgaaagggtgggtgccaaagcacccaattcattaaaagataaacatccaatacagaaacaaactaacacagagaacaaagcccagtaaacacagacaaactgctgggaagaacaaaacaaacaacataataagaaaacaaaggcaaaagccgaaatacaaagtcaaacactcatccattatccgggatccattcttgatagtcatctatgatctttttgtccaattactcagtgtcaagaaagcctgaggtattcgtagtcttggcccacttcgccacattgtgcaccataaagttgcattgtcttgcaatgaatgtaatgtcccactccgtgaagatgctgcacctatggaggaaacgagtccgtgctgcttcaagtttatggtgttgctcagtcgaccgagctttgaaacatctcacaactgagaagttgtcacattggaaaatcacccttatgtaccccagagagattgccacttcagccgccatacacaaggccaatgcctcccctagtttcgggtctgtgacagtgctttgactagtgttaatcgcacacactgccccaaaatcattgcgaaacactcctgcaaggactgagaagtttggtgaaccggtctcgcttggtccccgtggactttcttgtttctttgcttccacacgtcttccacaatgcatagagtattcaacatgaattcttcaaaagtggtttcaggcggtctattgcaatcccagttgtcgactcttacctgttcagttcttatgccccatctggtatgaaaccagagaacttttgatagctcacactccaaaaagaggtgtatagtagtttctgtcttcagctcacaaagggggcagaggttagaagctagattcaaaaaattgaattaagcttacctttcgttgggagcacatcccttaagagttgccaccataaaagtttaagccaagagtgtatccctgaatgccagacaagcttccaaaccgaattaagctcattgttcccatgacatgttgagatcaaacgataggctgatttcactgagaagttaccactggcttcccccaactaaatccaagagtcatctgcctcacactctagtaggtcaatatttagaattgctttggcatccaaagggtgaaaccattccctaaccatgggaacattccatctattgtgcggaccaatgacatatattttaaaagttcttatgataaatataacacatttaagtttgaccaatttatatagtattttttttttaggtttttttatggtatttgatatgccatatatatatatgtaattagcttttcaaatctcatatttaatgtttttatttatttaagaagttttatttgtcattgatgctggaaaagtcattggagtttgctgtcggtgccagaaaaattaccggagtagcggtcggtgccggaaaagtcgtcggagttgctgccggcaccagaaaattcgtcagaattggcattgttgccggaaaaatcactgaaaaaataagacaccggtttcttggtgatttttccgttgacaatgccaattctgacgctagcagctactctggcgactttttcggcaccgataacaaacttcgaaaaagtcatcagaattggcatagtccccggaaaaattaccaagacactggtttttggtttcttgatgaagaaaccagtttttttggtgatttttccggtgatttttctgacgacaaattttgacgactatttaggcgttggtagcaactctgacaactaatacagcagcagctactccggtgactttttcagtaccgacagtaaactctgggaaattcgtcggaattggcattgtcgacggaaaaattaccgggaaaatcaccaaaaaactggttttttttcttcatcaagaaatcaatttcttaatgaagaaaccagtttcttggtaattttttttgtatctttttttctctatttggttgattg

SEQ ID NO: 41708 - DNA, 1042 bp, Cannabis sativa
ttcctttatccattttccaatttccattttccacaagcaaatagtagtttggcataaatattccgagtatcattcgattgtccaagaaaagaaaacacaaatagagtgttatgaagtcaatagaaagagacaaaagatgttgttgtcaatatttttggtggtttagtcattaatatttttggttagattatcttaattaataatctttgccagcctaggcggctcatctcattttaaaaaaaaaagtctgggcaggcggctatgattgatgatttcatagaaagttgacttttcaaaagatatgatccatttcttttaacataaaattaaaataattattctcaaaaaaataaaattaaataaataaccaacagagaaactcattaaaattatcattccttttcttttttattattattattttaaaaaaaaaatctacacttaataatgggttttataaaaattttatttacagcaaaatatatatgtaaaaatagttttttaataattaaaaaatacttttgttttcattttgaatgtaaattactttttttttttttaattcattcattcattatatttggttgtattttaaaataatttaacgaagaactgattttaatttctaattattttcaattttataagaagtaagatctaaaatataatttcttaaagttaaagtgtcattatactaaaatataaatttcaaaatataattcttttagctctaactaaaagtattttgaccacatttaaaactaattttgatctatctcaaataaataaataaataaaatcttataatcctaattgtaatatgtttttagaaaatacaagatttaaaataaaattttaaaaactatagagttcgaactaatttttcgtctgcatactatttcttacaacatcgtccatgggggagaagtttttgggcctattgttccaactagagggattcgtcagggggatcctatttctccatatcttttcatcatctgcgcagagggtctctcagcactaattcggctttatgaagaaa

SEQ ID NO: 41709 - DNA, 1376 bp, Cannabis sativa
tcgatcatctcgtcgactagcctccacattgctttaaattcatcacactctgcaaaaatcttcatcagtaaatggtaactgtttgcagtgtgcctgtaattctcctgctggctagaccatatgaaaaacttaaacccgagttttgcacaccgcattttattcgaatgatcaattgatttcaatattccagtaagtactttcctcacaagcagccctgaaaccctaatgtcaagctcatccaaggccaatttcgaatcgaatccagggccatcttgtttcaaaacctcaagaactctttcagcatcgatccttgaaagttcaaaaaagctctgcctcagggaaaattgcctccgaacattcgtttcaacgggttcctcattcatagcaaaatcaaaatttgagctactccacattctcttcaaaggttcctcgaagctatcacatttactatccccactaccgaaatcagagttcccattacaaaaacttcttattaaatttaaataagacttaagtttgcttgttgaaattaaataagaacaagttctccgaaccaacctcggaccacatagagagatagaattcatggctaaaacccattattacaccaaattttccgaactcaatgaatccaatagacccagaaatagatagtgcagtaacactgaatagagctctagagacttcgaattgtgaaaattaaggatacccattaaaccccaagagagagagagatttgaaagtctcagacttgcagttgaatgagtgtgaagactaaaaacataccaggaatcaagagactggaatgagtggttggagtgtttaaggtggctccaactggaacgataggtttccgccgtagccaaagaggaagagagtgcacaacgaagtagaaaacagcgccctctgttctctgggctttctgtttggttttgtaattctattgtcgttttttcttgttatatgtagtttccatactttcttgtcgtttcactttatgtatattttctagttccaaacaaacaattgcaatttcataaaataaaaaataaaaaaaaaataaaaaaaagcaaacgcaatttagtttttaattaaaaataattaaatacaaaatctttacatgttttgtcatctcatcaacttgtttagtctaatattttctttcataattttcttttaggtaactataacgagaaagaaccacaaaacaaataccaacgaaggagaggaaattaaatcctccaagtttgatccttatcctgccttaaagcttctttagcattgtgatgagttgcactgttgaaagatccagagatgtgctgtagaaaagcattagagaattgagatagcaattttttaattaacttgacaacact

SEQ ID NO: 41710 - DNA, 654 bp, Cannabis sativa
tttcttagaaaaataaaatgaaaaacttacttgcatcggttttaaaatgatgctactttgcgtttttttaaaactgacgcaaaagtaaaagatcaaattttaaccgacacaaagtagcgttggtctagaatcgacaaaaaattttagagtgatatttttgcatcaattttaggtgttaatcgacgtgttggctgatgcaaaaaggctattttgcagtagtgaatactttaaaatattattaaaactatttaaatcatattaacaaattttaaagtaacaaaacaattaaaatatatatttttttaattttttccattctcttatttttccttttcctcttctcactcttcttaatctttgcagcaacaccatgtcactgctatccaccacacaattatcaccaccacaccactattatcaccaccaccttcatcgcaactacaaccattttcaccaccactgtcacaccattaccacaatcactatcaccaccaccaccaacattttccctaaatcaaattaaaaaaaatcctgatttggaaaatagaaaaaaaaataatagattattttttttcttttcttttcttcttcttcctcttcaagccctagccaccaacgtcgacccctcagttcgttcaacaccgcattaaaccc

SEQ ID NO: 41711 - DNA, 797 bp, Cannabis sativa
aacaaaagacctccataaaagaacatgtctcattgagcacaaattactgagattaatgaagagcttcaattttttccacctgcacaaaacagaaaaagagagccagcaagatagagaaaaaatgctaacgttgaggttcggggttgtggatttgggaacagtggttgccgaagttgaatcgttgtccttggcaaggtggagagacgatgaggaggagagatggggaggcggagggatggtgagatagagtggcagtgaaacagagagatggagaaatagagagatggcgagaaagagagacaacgaggtgggtctaggggctttggaggtcaaggaaccaattgtgatgaccgtttaaggccaccgttcaccggagaaggatgcacatcaaatcacgagagaggtgagaaatagtgagagaaatagagaaatagagaaagagaagagaatgagatttgtaatcaaagagaaatagtgagagaaattagggtttcatttgtgatttttggatgacattaaggagaggcagccgcatctgctaccaaaaaggaggggaaaattacttagggttttttttagagaaaaagataaatgtaatattatataattgttgagttttctaaaattttatttttttttaaaaaaaaaaagataaaacccatgcgtctgacgtgatgtgataggttttcatgtaaagtattatatataaattttgttttctttttatatttttaattaattattacagctgtattttttttttttaaaaaaaatattatcatatagtgacgcgctaa

SEQ ID NO: 41712 - DNA, 922 bp, Cannabis sativa
aattataaatttcaaagaaaaaaaatctcaacaatttgggggtatgagcaccattatgtatagagtagatctatcactcggtagaagtacaataaatcttcgtttagaagtggcaatttatctttacggttttgttcgtattatgttgggactcatgtattacatatatatttgacccgaacacgacttgtttaataatcgtgtcgaaaattatgactcaacacgactcatttataaattgattgacgcgacacgatttatgtaaattatttataaacacaacaactcattaatctataaatgatatgtttaacacgtttataacatatttatgacctgttagagtcttaaattaactttaaataagttattagcaagtcaattttatgtgagtcgtgtcagtcaacccaaaaaatgacccaactccaaacctgttaatttcgtgtgaattttaattcaagtcgtattatcatatctacctcattttactgctcctatttttgtgtaagtacatacataaaacgaaatttatagtgcattgtttatttatttaaaaaaaaaaagaaaatagaaaacttgccatatttattgtgacattgcttcctaatgttgatttacttgtagtggaatatggaacattgagtgaaattctctacttccttttaaaatgaaaagcatattgtattgtcaaatattgtatcatgtaatgtttattaagttattactaaataaagcctaaatgcaatgcatggtaaacaaacttagaaaaagcaaaattggcctaatctcattgtattgtcaatattatatcatgcattattaagatttactaaataaagccttagttccatacattgtcaacaaaagctatagtattatttttagactaaaagtaataaatcatagcaaaggcatttttttt

SEQ ID NO: 41713 - DNA, 575 bp, Cannabis sativa
cctaattttgatctttatttagtaacgttttattatatatattattacatggatgccaagtaaagtaagagcattcaatacttgtgattaaacgaataataatggtaattcctgaattcctacaaattgaaaattgtgtaaacaaaaaagaaaattgtgtaaacagagcatgactttagtttagttgcaacttgcaagcatgatcgtacagttgagtcttggctttagaattgaatgagtattagcaagaaatttaagaggctagctaaactatataattatactgcatcgaaagaataaataattgtggactattctttgagaaaacaaaaatagatgatgcttgatgtgaggttagagggacaaaatatttttgaaaaaataaaataaaattcagaaggctcttttaatggttgtgagcttaattatcaaagtacaactcaaaggtttgattcatgtatttattgttacattatggctaatttcaatgaatatgttggtttttgtgtgtaattactacatgtgagtatgcagattttaatcactttgcctagtagtttcctaattgtgttgta

SEQ ID NO: 41714 - DNA, 1714 bp, Cannabis sativa
aataaaaaatactaaaaatttatccatgacatcaagtatccttcatagcattttggacttcgtgttttgtaaaaattacccattagaccctctgtattgttaaatgacaaaatggaccttatattttctaaaatagtaaaaataggaccctaaactcaatttttaacaatttttttttttaatataagcaactttaagacaatttccaacacgaacaaatacagaaaatacaaccagttttatcatatcatctctagagcatattattattaagttttattttgacaaaaaatccgttcagggtcctatttgtacaattttagaaaatacaaagtctattttgccatttaataaaatagagggtccaattggtaactctttgcaaaacacaagttcaaaatagtatttaccctttatatatatttaaagtataagtttgtaaaatatgactttttattcaaaaaaatttattttatggagaaatttagaaaaaaattataaaaatatgaagaaaaaaatagcataatgtacttgattacccgtttattatcattggttacatctctagttaccataagagtacattatccttaaaaaaaaaataaaaacacccaaaaaaaaatatgcaaacccataaaatttataatttcgtataattcaaaaaaaaaatattgaagggttttcacaagcaatgagaatttccattaaaaataattttaaataataagagccgtggatattctggactctagaaaatttatgggcccaactcaaaacaaataatactcattggtttatagtgggcctaagtttatgacagttactttaggcttcaaaaatatccaccacctacattgaaaattcagttatttttaaaattaaaaaaaaaaaaacattttactaatgtgtacaatttttattttgttatttatttttaatttttatatcaactttgttttattacttagctcaactatgtgttctatttcaatagaacctaataagaaaattataaagttcgtaattattttcttagaaaatcgtattgttccatcatataaacaaattatacttgtgaaaatcaattgaactaaaatcattttactatttaaagtgcatttggaaagcccgcgacaattagaactgattgtaacacaagaaatagattaggtgttggaatgataggaggaaagtaatgtaaatattttgatacgaaatcagcatgaatcaggaagacacaaatacgattagatataaaaaaaaaatatatgaattttgatacaacagatacatatgatattataaattagtacgattgtcgactaggcacgaaaaatttatgattaagcacgacatgaaacgagaagtatgaaaaacacgacatgtaaacacgaataaactaaccctaaagacaaaacacatgacaaacctgaaaaatacgacacgaaacattaaaaaaatcttataatttaataattataataataatatatatttgtcaattataaataaattaaaatagtaataaaatttaaatataataatattataattctataattaaaactattataaaatataaaaccaaaactatatattaattacgtttacgttgtatctaagtgaaccaaattaattgacatgacttgaggagtctgtaatttactttagttggagtaatttgcggcaaaacccccaactatcaatttacttg

SEQ ID NO: 41715 - DNA, 2568 bp, Cannabis sativa
tataaagttaggaatatgtttagatctgtaatttatatatttctgaagtgttttataaatcctaacattttatttttctttcttttcttttgtatttattttggttcttcatgtattatatatacatatgaatagatttttcatttttactcttcatattttttttgggtatctatgttttttgtgcattagtttcattctcaattatcatcattttattgtgcttttaaattatattatggttagataatacatataatattaaaatatagttatattttacttttaatacaattacttagtaggagttttatttgtactaaaattttataaaaacattcaatttattattttatatataaaaatatttttaatttatattagttttttttctttttaaatttcttctttttcacattcttaaaaactatatttataaaataagataatacagtgtagtaattttattataaagtcaagacatttatatagatgttatgtaataaaaagtattattaggaagatgatagaataaataattataaataattatacggataaaaattgtgttttaatattgtggattataacgacaaacaatgtgagtaattaaattattcaaaatgtacaataactagctatattgaaaaattaaaatattcaataagtataaaagtgttgttaaaacaaaaattacaaaagtgataaggtgcctaagtataaatatttagattataaagttttcaaataaactaagaaaactatctttcttttttcaataaaaaaaaagggtacacttttattgaagagaaaatcattaattttttcaaaccaattcttctttaccacgcaacacgcagatttattctctagtaccaaaataatgttataatattgtatttaataacatgtgaaaaatgtaatgaaatggtaagacttttaattacatggactatgttaacacttgctaaaatgttataaaatacatttaattacactttttcagtgttatgataaatattttttcttataacaattcttttagcttagaattgagtgtgatgacacaaaataaaagttggtagaaatgttagcatatcatgaaagcattaacatactttcatgacttgggttagaaagagcatacaatagctacatttaaaattttcctataaagtttctcttggaattgattttttgtctttggtttttacttttagattcatgatcagtgcaaaatagttgaagaggaaaccactgaggtattaataattactcgtttcctcttattttattaagagtttcattataactataaaaaagagaaataagtttgttcacttgtcaaaacttttttttttcttatatactaaataagtatatataatattattgtaggtttagattatacttatattcccactatatatctatatttgatctaagaatataatcttgagtgttgaaaatctcatccatacatctactaaaaagaagcatattatttacatcaagactcctaagtatgagttctgtaggaaacaatcacaagcacatattgttaaacaactacttagtcacatttaaataattttgtgaagccaagaagaattatcatgtttgttggtcttactttagattagttatttctctttattatatttttgtaatgtaaagatttttgttaagaatgtaaatattatggtacctacaaagataattacttttatatctcttcatatatctcttctaatgtttctcttcatattgacaaaaatagagcaaatttgtaatatctcctccttatagttctctttgtaataggcaaaaacacatttaaagttttttttttaatatgttatttttataaatttatcatctttcacatgtaatttgagatgaaaattatacctattttatgcatataaatttgtatacatataaaatttcaaagtagcttaaaaaaatacatgtttaaaatgatttttttttttacagtaaagtgatagatatagatagtactaaaaaggacaacaaaaaagtcatcaactttgttgattgataaatatagatttaaaatgtttttttaaaaaaatccttcaacaacctccatttgcacgggtacccatagtgaaaaacaaaaaattcaaattcaaaacgcgatagagagagaaagtgggggagaaagtttcttagagataacaagtgggaaagaagggttcttctccatcattttcctcttcttcgcattattacaaaacctttcttctctttttaaatctctctcaaaccttgatactcacacaaatttcattcatttccccacaaatttctagggttcgatcctatccatatttctaccaacccgattctatttctctttttagaactttgatctcgaattttttcaccatccatggaggcgatcgaggaatcgacgcagctctctgattcgatgcgccaagctgtggctctgctcgccgacgaagacgtggatgagaattccacctccagcagttccccgcgcgaagagattccactttcctcaatgttgtcgctcttggcaat

SEQ ID NO: 41716 - DNA, 5303 bp, Cannabis sativa
ttccaatggtgttcggtaggtcggcttgaacggttttttcgattttctggattttatgctcagtcctattagtcactcttcgggaggaagattacaagtgagtcactcttcggaggaagattgaaagttacacactctttgggcgaaagattgcatgtgagtcactcttcgggatgaagtgtgcaagtgctatgatttaaagggagttcaaggtctagacactttagaaatttgattagaagaatagattacaacagttgcagcaaattcaaagagggagtctttatttgtataagtcaatttaattttgtaatcacttgacattcatctaataaatttcattctctgggcgtggccccgtggataggagtaattcgaaagacttgctaataccacgtataaaatgttatgtgtcatttattttctttattttttactttctgtattatatatctattttgtcaaattctgtgtttgatagaatagagataatatatgttcatacaattataatacaatttcgcattatttaaattgtttgataatttcacttggtaattataaaaaatagaatttcaatcatcatcccatgaataaagcgacactccactcgatcgtatgcctttgccatatcaagttttaaagcacacttggatccattttgaaattggtttttcctcatagtgtgtagaccttcaaacccaataatagcattatcatgaattaatcgtcctttcacaaaagcgatttgagacttcgagataaccccttctaaagtgagtcttagccgattagcaagacatttagaaacaatcttgtaaatgacgttgcataagcttatgggtctgaattcccccatccatttaggctgctccatttttggaattaaagcaatgatggtgtcatttaaaccgctcatatccagcccatcatttaaaattttcaagcagatacttaccacatcatcatgaaggtttgcccaatacttttgatgaaagagggcagggaggccatccgctcctagagtttttgttggtggcatctctttcactgccaattaatagtttcttcttctttaaatgactctagcaaatctcgattcatttctagagtaacccattgtggcactgagtttaggacatcatcaaggacatcatgttggatcatggaaatggtgaaaagggtatgaaagtacgtactaataattctttgaaccacaaccttgtcttcttgccaaattatcattgtgtccaccaacccatgtatctcattttttttctttgagcagaagcttcatgatgaaagtatttagtattatgatccccactttttaaccatagagtcctacttctttgtcgccggtacttctcatccttatcaagaaaaaaatttgactttttttcttattttttaatttccatcccaatggatggttgctgaaccttagataagtcacccaaggtcttcttaactctatcaagttcttcattgttttttgtttttttttcttattccacttcttcgaagctttcccacatagagaggccctccgtttgaacccctttgtcatacctaaattagctttgtccctctaatgctgctcagcaatcgctttacactccccatcctcgcaccaagcctcttcgaaatgaaatcgagttctcctcctgaccattccaaacttctatgttgaatgacctagtggtatgtcaatcacaaaggctctatggtcggactccagccagcccaacaccttaacatccgctctcgcaaagctttccatctaaattacacaatgccttgtctagcctctccatgaccctattttccccatgcccattacaccaagtaagttcagttttacaagtgcaaaaattagccaatccacattcatcgataacctccctaaattcctccatatccttcgaagctttaacccgacccctattttttcagatagactaacaatttcattaaaatccccaacacaaagccatgggctagtaatttcattatgtaaatagcatagtaattccgaagaaaacttccgttgagatgtattaggattcccgtaaaaacccgtcaaattcaacggtaaaagtcctccaaccaccacagtcgtaatgtaactaggagaactcgaatccactcgtaatatttcttttttttaaaaaaaaaaaaagctaatattttaatttttttaattaaattttagcatttgaaaataaataaagtggggagtaaaatacatttataataagggatggagcccagcccaaccagccaagagtgcaacccacgtactgtgttagctgacaaatgaatgaaaagaatatagaaatggatttgtttgaagacataatgacgagtccagactgtactcttaatctgatctgacggaccacattgcatcatcatcaccatcgctcatctttatatactattattacacaccttccctttccctctcattctccttcttctctctcaaacctctaaactctaaaccattcattctttcattcatttaccacaaaccctctaaacttccatcttgcttttcgcatttcaacaggttcataatctctttcgatctctttatttcacccgatctgtgcttatgttttagtattatcattttttaatttcatatttatgtatgttttacaatttgtatttcattgttggatttatgattttgtgtttatttctttgtccaagttgttaaaattaatgctcgatgaattgggttttcgttaaaaagatttttttttttttttgtttctttttatgttttttaagattaaatatgcaaatataaatgtggtaaataacctaaagaagaagaagaaagagaaaagatcaaaaattgagttcatctctacaaattgattgtatctgttttattttgtgtgtacattcttattttaacacaagaatttggtgtacaaatagatacatgcattcgatttatgttgcattgttagtatcattgtatcgctatatgacgatctaccgcttttatttattattttatgaaagatgttcttataacatagtttggtgaacaaataggtaagtgaagatggcagatgcagaggatattcagccacttgtctgcgataatggaactggaatggtcaaggtattaatgttatttgtcattgttgaaaagtttcccattgaatcattaatcttctgtgcaaaagctagcttaatgttacttgtgggtgtgtagaatttgcctcttgaccattaattattgtgatcttacctattaggctgggtttgctggagatgatgctccacgagctgtgttccccagtatcgtgggtcgtcctcgtcacactggtgtaatggttggaatgggccagaaagacgcatatgtgggtgatgaggcacaatccaagcgaggtatcttaactctgaagtacccaattgagcatggtattgtcagcaactgggatgacatggaaaagatctggcatcacactttttacaatgagcttcgtgttgcccctgaggaacaccccgttcttctaaccgaagctccacttaaccccaaggccaatcgtgaaaaaatgacccagatcatgtttgagacctttaacacccctgctatgtatgttgccattcaagccgttctttctctgtatgccagtggtcgtactaccggtgagtaccaagtactttcttcttttcattgtcatagcatgatttcttgttagagtatcctatagacactgaaatgagacattaaatatggtaagaactgagattttactaataccaatctcattctgtttaccaactacttgcatcatgatatcttaccttgtcaaatattgtagtgtggctttggttttggaaattatatttttcttgaagtttaaaccttgaccctcattttctaatactattatgtagcttttatattgccctgtcttaaaataatttagctagaagttttgccttagttttgcaggtattgtgctggattctggtgatggtgtaagccatactgtccccatatacgagggatatgctcttcctcatgccattctacgtcttgatcttgctggtcgtgatcttactgatcacctaatgaagattctcaccgagcgtggatactccttcaccaccactgctgaacgggaaattgtgagggacatgaaggagaagcttgcctacatagctcttgactttgagcaggagatggagacagccaaaactagttctgctgttgagaagagttatgagttgccagacgggcaagtcatcaccattggcgccgagcgattccgatgtcctgaagttcttttccaaccttcattggttggaatggaagcagcaggcattcacgaaactacttacaactccatcatgaagtgcgatgttgatatcagaaaggatctttacggtaacattgtcctgtctggtggttcaaccatgttcccaggcattgctgataggatgagcaaggaaatctctgctcttgcaccaagctctatgaagattaaggtggtcgcaccaccagagaggaaatacagtgtctggattggaggctccatcttggcctctctcagcaccttccagcaggtttatattttttcatatctaagtttggcatgatgatcttaatatgatgattcaataattactgatatcatattttatcttttccttatgcagatgtggattgcaaaagcagagtacgatgagtctgggccatcaattgttcataggaaatgcttctaagcatgtgagaattagaactactgcagagagaaaagcaagtactgttgttttgattatgttggagaaaagtgttgtttgcagaaggttcattctagctcgttaccttttttttattctcaacttgaagtgacttcggaaggccaggagttaatttatccaatttgtttcttttaaattttattttatttttgttattacaacttctttgattatcattattattattttttggtcattccatcccaaaattccgtacttacaaaagctcatattgaatgcttaaatttcttatgaacccaattcatgagataaaacctttattttatgaatcaaataatctgtatgatccacgtgaaaactaaattttatttacacggcaaaagcagttcttctaaaagaagacttgcaagtgaggcttcttctcagcatttttacactcaaaatatcatcttcaaataaacaaaagtttatcaaacaatgtcaaaggttgacttaaactattgtaatcaattctctttgactcttagttctgccaaggaagaaag

SEQ ID NO: 41717 - DNA, 1213 bp, Cannabis sativa
ggaagaaattaaaaacacctaaatcccatcttacacaaacataagacgtaagcccacaaaaccaagttccaaaataacaaagatacatttggttgaaagaaaataacacaacagaaattagtagttagagagtctcactcttcaaaacctctcaatacaggtttcgacataaagctattctcttctcccctacaaaagcatataatatattaaacactaaaaaccaacgtaacaactcactacagacattatgatatatttatacatacatacatacatatatatatatatatgtatatttcaaaatggagcagttgacgttcggtgaagggttcgctttttggaaagttgtttttgttcggcagcaatctctttctcaatctaaaagagtttatacccaaaaagagaataaaccaaaaagagttaagatttcccttttaacaataacattacaaagcctaaaagagagtgttattataaagaaactttatacctcttcttgtttctttctgagttttctgttctcttcactcaatttagcagcttcattctccaaattagtcctatacgcctgtacaaagcaaaacatacataataagcaacactaagtaattaataataatgctatcttattagaatgaaaatacacaacagtataataataatactttcctcctttctagctcttgaacgacaagcagactctcgatttttgatcattcgcttcatatgtttgtcatctgcagggagatagccattatcagctggtagtaagcttttattcccatatgatgaagagttgtagaacatggtggtaggagttggaggagtactactgtggctattgcaaaaaggaaaggccatgcttggaacgtagttagtagcggctgttatgataatctgttgtggctgagtactattaactgtaatattattactctctgggagagaggtaaggtttatatctttccagatgtcttccatggtttcttgtatgttaaattgttgaaaacgaaataaggatggggtagagaaataaggaaagtagaaacttgatgatgagtgtgatttatttttatagtgtaaaaagttaatgacaatgaggaataaggagttaattgtttttgtttaaaaggaaaattaaacaacttagaagatgtagattaacagtactactaaccaaccaacggtgagtttgactaataatatagta

SEQ ID NO: 41718 - DNA, 1156 bp, Cannabis sativa
agcattgttagtgggtactaatacccaacacttactatagatgacgtctcacgattagtcaacaataattcctatctataagttattttcttaagttatataagacccgatacataatattacatcaatagcagtatgataacaaaaaagatattagtatcttttagtatttcttgaaatacgtgatcaaattatcaaatagctaggtacatatttttttttttatcaatgttattaaatattagtagtgtctaacattttttaaaggtgtcagtgtacgattagttagcaatattttttaaaaattattatataaaattatataaaacttgatacttaattacaccgataataatataataacgagtataaagtgctagatactaatagggtttagggtttagcatttctcttcttttttctcatgaatccagcaagtatatatgccttactttgtaattatactgtgttttcaggcctagctaattatctaaaaacatttttcaatctatttttattattaaaaaaatacttgccaaattcaccaaacaaatttattattgaagaagatcatcgtggctatatattattttggctgttgagttaatttagaaaagcctactgattttcgagttattagttgttattcttcgagtgtgtacttttgcatgatctatatattttagtactctctccacaatttattgctcattaattaattacttgagcaattagtttctttcagcacaatctctatctataatcttttacatatagctaataagaataataattacttcatatataattaaaatatataagctaggccggctaattatgaaatgatgagttactattacattataatactgagctatatatatatatatagtcacctgaatagcctttttaattatttgataacttttattaattaagttcagcccaatatgcatgcacgtactaagaattacttgcaaccaactaattataataattttttttagttttagatacctattcgtttaccctattatatcgaaagggaggaccattccactacaagaaaaatgagcattactgaggacaaatttcgttggtaaaaacccctgttttcgtcagtattgcgcatcaatgaggacatttcgttggtaaa

SEQ ID NO: 41719 - DNA, 1160 bp, Cannabis sativa
atctgaccatatgttttaaacaaggttcaaaataatgtatgtaagtaatcatttagggctggtttggagtttcgtattaagtcgtattgtattatattgaattggattatatatcatatttttatataatattatattatattaatacaatacaatctaatacggcgttcccctaaaaaggtattttgatagactctttatctattttaccatttaagagagtattttttttttgttatggtcgtgaacattatagttaattaaaatttactgtgggtttttagaaaatttgagtaatttataatatcgaaaataaagtttaaatattttgtaacaagcataattattttttcttatgcacgtagtaaataattgtttgaactttatttaaagcactttgtaatttattcaaaaaaatttaaaaattttctaaatagctacaatggatgcgatcatgaaaaataattagtacaaagcttttctagatggtgaaatggataaagtttctacctgaatatttttttgaagggtatatactagagaaaattttataaattttgttaggaattttctaacactctaataggatgttaataatgtcttgattgatgatcattttgcaagaaaattaaaataagacttgtaaaaaaattgcatagaaaaatccattttctgatattgacacatttcatatattttttttttccaaattaaagtaagaagagaaaagaaatagtccttataagttataagcatgcacgtagtaccaatttcttgagttgttttatgtgaattaatactcatatatttgagataaaggagaacatgactcttatagggctaaataattaagttgttttgtatattaatttgggtgaccatcacatttctaaagattgtatttctattattatttgatgacaaccaaatgcattatttgtttgactaatttaattgtctctattgttaggacttactctgttactggtagttaatacagttagtttgttatgctgaggtggcttattctgttatttctgtttattacagctgtctatctctaacagctttgtattgtatatttatagagcaattgctctcagtaatgagttgttcattcattccacatattcaatctgttattcctttcgtttcaacat

SEQ ID NO: 41720 - DNA, 899 bp, Cannabis sativa
ggtgctaaaagggattgggaattacattgggacatatgttgaatctgatgttaataacttctcaggggtatggagagaatacttgaaaattcgggtcaccatagatatcactaaaccgctcaaacagaggatgaagattattagaagtgctgatgattgattttgggcgaatttcaagtacgaacatgtaccaacattctgcttcgtttgtggtattattggccattcggagagattctgtgagcaggcgattgatactccattcgatcagcttgtaaaaccgtatggaatatggatgaaagctactcctcagaagaaggctcatatgattggaactcaatggctcaggtctggaaaaaataacaacatggaggcgaattctgctgaaagtcagtcggccggagaatatggtgcaggtgctattccggtgggtggagaggtgactcatcaaggcattaatcatgccaatattaggggaggaaatcgtggggttgaccatgggaaatatgtagctggtagtaataatggtgagggagtaatcaatggaatagatatgggaaaagaaaaagggttatatatggaaagtatggaggagggtcaatgttatatggaaggcaatgaatctgtggctattactgatccaaaacgtagaagggtatttgttggacaaatggaacatgatattgggcccaatagggactcaattgttgaagaccaaatgttgggtgatgggccaaatacaaatgaaaaggaagcttatggagaagctatgggtatgaagattgatctatcaaaaaacttaagtggggtgggttctggtgttcaggcccgccgagaattatgaccacgttaagttggaattgccgtgggcttgggaaccaacggactctacaattcct

SEQ ID NO: 41721 - DNA, 1284 bp, Cannabis sativa
tgtttccttaggaccttttggaaacctcccttctttggagtcacttactctaaattttatgataaatgtgaaaactttgggaaatgaatttttgggaatagaaaacacaacaacgacaacagaatcattcccgaaattgaaaacattacgcttcatagaattttggagttgggaagagtggaaatattgtagtgataggtcacaagcaataatgccacgcctccagttcttgcactttgatcgttgcgagaaacttgaggcgccgctaccagagttcttgcgaaacacaatgcttaagaccttaaccataagacaatgtaacaagttgaaaccacttttcaaagaagggttaaggatggaggaattggtcaacattctcacaaggtagtaagttcacttttcttgtacaaaaatattttacattgctaaaatatgatttaattagtatgtattaatctttttaatttcctaatgttgctttttcttcgtgtgtttataggaagattggtgtaaacaattgaatgcgaagacgacgtatttaaaaagtcacaatataattagatttatgtgtaactgaaaataattatacaattcgacatgtttgtttgattatgtaattacactataattgtataagaaataatttcaaaaaagcataaaaacaacaaaaaaaaattacaaaaatatggtatgtaagaagtttttaatatttttacggttttttagattttatttacataaaacacagtctttttgtgtatttttatgttgtattcttactattttgttgtttgtatattatttttcatgttgttttattgttgttttaatattattttcttgttactttcatgtaaatttcttgtgtttttatagaataacgtaaaaatattaaaaaaaaaacactttaaacgtaaaatagtaaatttttataaaaattgttgttttatgttattatcccattatataattagatgtaattgaggagttccaattacactttctaattctcatggcctcctattaattactaaaaattttccatttcaaacattaactactaaaaaaatattatttttctgtgtaattactaaatattttgcctcataaaatattaagaattcatatgtaattatcactttatatttaaatacacattgtatttaaaatatatcgtaattactatagtgtttaattactaccctagcaagtatactaccttgtaattacacagctatttttaaacacacctataattatacttgttttatctaaactattagt

SEQ ID NO: 41722 - DNA, 1270 bp, Cannabis sativa
attattattattattatggcacaaataaagcaacacgatcacaattattgtgttgtgtcggggcatgtaatttattattatgtttagaatttagattaaaaaaacgattcataaaattaatatgtttagaaggttctgatcaatctttttctacatacgtagtcgtgtgaacataaattataagtgaatcatataatacatatagtacgagagtataatatggagatgtaataagtacgtaactgttttcccttatatgataatatagtcctatttctgtagttaatataagtttgatcagcataatatggtcccaaaacgatatacatatttatagtttttttttctcaaaaaagaaagtggatcggtcacgaggcttgaaatataagtgattgaaatacaaaatttgtagagacagcaaccattattatgggagaataaatgagtttgcaagtgccaagtgcatggggggcacaaatagattggtttgttatgaactttttaagaaaagaaaagtaaaattgatgatatgaatgtagtttcacagtgggaaaaaaaaaaaggttgcgtctttcataatttggaattggatatagttagagaagaaagtagaaaatgcagtagtatagaagaagtagttactacttatccagatcagatgtagtgtgtggtacaactctctctgctctcatgatgaggctcatgaggttgtcctgtatctataattaagagcacctaccctcacgaacaagcacagtaaatgtcaagccttatataaataaatatctatttatatgtgtattgtatctcattaataattaaggagaattgactttttctatactggattaaataccacaccaacatcagcttaaattgaaaacaaccattcaataatagtgttagatttaatgtaattttttttattattattttcattataggctctgttataacaagagtcaaataccaatatggttattttaactaacatattaaatttgttgtgtggcgtgtgtctttttattaaacatagcatatatgtattattgtcatatattcaaatattgagattccatttaagaacattttagcagatgaaacaataagtgtacttctcagtcaatgatcactgaacaaatttgaaattttaatagtttaataataatgaatctttattttattaagtgagaagattaagataataaacggtgtaaggggcaataattgttaattaattaattcctttttccactgataaggtaattct

SEQ ID NO: 41723 - DNA, 978 bp, Cannabis sativa
tgtttctactgatgggttctccatccgtcccagtcaaacaatcaaacttgctctaaagttgttccatagttgttttcatctgagcagtaagtctttgttgttcttctagggctgcctgtgtagcttccaactctgcagttacttgcaccagaccagggtcatgctcatatctttataatatccatctttatagtagtaatcatcatcatcctcttcgtaaccctctgtattttggcaatcaccatgaccttctacgacgttgtcggtgttcctctgttgattctcagcgatggtgttcttctcttggtctttagtagcagctacgacttctccctcattttttacctgagcgttggccgcataagaggtgccttcctccatgaccgtatccagcaaggttcctttaccagaagtctttcatgtttttaccctgatcaaaggacgatgaacactacccaacttccttcacctctcaatgaaagcaccaaaatatttaccgagtttttcagaaaccaaatatattttgagcttaaagaagataaaaataatagacagatttttatgtggttcaggcgttgaagatccttagtccacgagtatatagtattagcctctctgggcaaatattcatgagattacaagatggttacagtaaggactactctgcttctctctctcaagagctttcttagaattttcgcagagtgactgtaagtaaaaaattgttctctctttgcttaaaaaatgggactatttataggcacagatggggtaaatggcaataccctttacccacctagggtttcatactccatacgcaactaagctcagtacttcaaaaggacgatctgaccgttggttggtgatgttgcccaattagttacactgcggtcgcggtagtaaacgggctatatgtcgtatccacagggaggaaaaatacactcaaaaggacaattagtaattttacaagaataaaat

SEQ ID NO: 41724 - DNA, 740 bp, Cannabis sativa
agactaagtcttagtcacaccttaaaataggcttgagcatgcgggtactcagagcttgacctatgggtagtcggtgttgaccacctccagactatgtgtgcccaatttttttttactgggagcatgccgagacaaggttgggggtactactcttgagaccaccatgtgggggtcagggtataccatcccaagaccaccccatggtggttggaggtatcaccccgaggctcaaaaaagtcctcccggagacccaagactatataccccaagtgggctgttaccttgagatagggggtcttgggatacaccccgagctgcctttttctacacaccccgagattggtgtttgggggtgtctcaccttgagactagcatgtggttgtcaggatgtccccccgaagccaaaccacaatcgttagcccccctcgagcttaatttcttttgccaagatggatgtggggggggaggggtgcaccacccccgagaccaccatgtggaggtcgagactcaccaacctaagaccaccacatggacgtcaggcgtttagtacctcgaggtgactgagatgcagtcgtagaactacatatgtttatggagtggccctaatttttttgaaaaggaaaagaatatacataatatatattaaattaggataattagattttacttattagaaaaatgtgataattctcttattactaagcctaataataaattgtgaagttgaaattaaaaaagaa

SEQ ID NO: 41725 - DNA, 4502 bp, Cannabis sativa
aaatttaccataaaataatatttttcaaaaaagacacattttgcaaacttgtaactaaaataccataaaaaatgaaaagtctaatataaaataataaaaaaaaacctctccatacacaagtattatcccaaattacttataatttattaaattgaacaataacaacaaaagggtattatatattatatatattttatatttgttgttggaggaaatttttgaaccaatgtgctgagagtttggggtgccttgtaagagcatgtttgtaatccacatagttaagcccaaatcgaacagtgtgccctaatatccattcaaagttgtctaacaatgaccatgcaaagtaacctttcaccttcacaccatcctttctgatattcataccataaaaaaaatattaacatatattaataattaattaatttaataataaaattaatgtgtataagatttttgacatacttactttgagacacgaatattcctttttctatctgtctgacttcaaaaatgacttaacatttagatatatttttttttaataaataaatttaaaattagattaacttttatatattgaaaaaatataattaaattgtattaaatttagttttattattattatttaaattaataattaaggtaataacaactaaaatataattttaattaagcaaacatccagtgcatgctactaatacttagtatatatatatatataataggataaatactattgtagaccattgttttacaatagttactaattatactctctgtgttttgttaaaagataaaatagatcatgtattttctaaaattatataaataagaccctgaattaattttttgtcaaagtaaaacttaataataatcggatctagagatgttatgacaaatttagttatattttctgtatatattcgtgttaaaaattatctgaaaattggttgcattaaaaataaaattgttaaaaattgaactcagtgtcctatttttactattttgaaaaatatagagtctattttgtcatttaattttatcttaataataattagtagaaattaaaaaaatcaaattcatgaaaatggtttatacaactgccaagttaagtaactttggtttatgatcatatttttagaaataaaaatgacattctaatttggaatcattatacgtacacagtacactacatgaatacttgtaaaaaaaactaattaataaaacaaagattaagcatagaataaaataaatcttgttatgcctaaaaaaggttacacatgttgataatgattgatttaataatctttaaagtggttgtatagtaaaaaaaaaaatttactaattaaatcctaaaattacatgattgaaaaaacatatgtttcatttaaaatattttataaaaatattatttgtacaaattcgaaactatatttaaagttagtctatgtaataaataattttaataattactctataagataaatataattatttttgtgaaaaaatacagatatatttactcatattcattgttctaaataaaataaaataaagaattgataggtcactagtttccaaaagaggtaggtgttttgttttctataatcttcttcatcacgtggtatattaaatttgtagataaaatccacgtgtaaaaattcatgctggtttggtttctgttgtttgtttcacacgtaccataaatagaatgtaacattctaaaaaacagtaacttatagtcaataaataaattattaaaaatatgctacaataataacagtcacttatactcaataaataaattattttaaaaaataaatagaatgtaacattataaaaaacaaaaaaatcaaaaagcattactcaacaaaagtcatagttaaagaaaaattttatttattctttatttgaatgagtccaaggaacgtgcatagttaattaatttatattattatgtttgtgaatagaataattaaattcatggtatatccctatatattcttcaaatatatttatatataaattaagggcaaaattatggtaggacttaacaaaagtttcctatcagtagggtagtttttttaatcattaattttagatcgttattataatttaagatatatattcttatcatacaactaactgtatacaataaaaaatttatactttctaaaaaaaatatttatttttaaaaataaaaaatattaaaacttaaaaaaaggaccctaaattttctcactctccattacaatattgttcttccaaaaatctgaatggcattctctgcagcaaacccacgccatctctccattacaacaatcccacgacgacccaatggcgacccgacggcgaactcattgtgaactctcgaacccggacgacataaactcatacaaacaataaaattttacttattactaaagcctaaaaaaaataaagcccaaatcttaaataatcaaatttatatatattttttcccttttaaagcttaatattacttccccatagcataggtcattatacttggtcctactatataaatgccccatatatatagtagctagagaaagcttccaaacgagttaggcagaccttataaatcgacctattatatttttaaaaacagattttattgtacttttatccagcaatttattaaaaataaattattcctatttattttattaatttaaaggtttgtatattacaaccatatgtaatttaaaactcgaacccaacctccaacacacagatccttctatagctacttaagctagcctcaagtaataataaattaatcttatctgcatatctttgtttcttctaataatttttattcgtttcaaactatatataagcatggcttgtgggtactattagtgaccaacattttttataagtggtactttataattagttagcgatattttttaaaagttattttttaagttatgctactagcgacaccaaagagagtgttaggcattagtagtattatgtaagagaattgctaaaaaaaagcaccactagtgcctaacactctcttcggtgttatcagtgtaattaaatatcagatctcatattaacttaagaaaataataacttttaaaaaatatcactaactaattgtgtaacgctgcctttagaaaataccgagtatcattagtgactaataaaaatatatgactttttagcatttctatacttataattattgtaactatatatcacaccatcctatttaattatttttgtactaatatcgttaatataaaaattcacactttaataataaataattctctctattatatatataattatatatgtactccaacttacttatatataggtccatatatataattatacaattcaatttcaaccaattcttgatatatatacatatatacacacccaattaattagttttaataaaaaaaatgttgaagccttcaagtgccaaactatagtgttcttctaaacaagccattgatatccatggaaattatatattatgaactttgactatatatatgcacatttcacacatcaatatattaatgtaaaataaaatcaactcttcctattctcaaataatctaacaaaactttccttttttcggatgagataactaaactatatataaaagaaaaagttttggataagcaattttatatttgaatgaaacttatagtaaactaatttattattatgtacaattaataattaattaaactcatcctattaggtaccttatatatatagccttatgacacatgcacacacataaattaatacataaataattaaataatctaacactatatagaggtactctattattatttattgatattttttaaaaattattataccgaagaaattactaagcatcacggctgacttttagcatttttcataaattaaaagagctaggaattgagacttaaatgaacctatattataattttaaaaaaacacattttttattttattttttcccagcaattaattaatatccatgtgcataatatcaaagaaattcccatctacatattttgtttctttctaataatttcatttcttatttcttgatctattataactcgtccacacctacctttttatatatatatatatatatatatatagaggtacatacattacataaccacatcaattgcaaccaatcttgatctagaagaaaaagagagaaaatatatctatatatatacacacccaattaattagtttgtactaattaatcaaaacaaaaatgttgaagcctcatgttcaagttactagtggccaaactagtgttgttctaaacaaaccattcatccatggaaattatcattttcaatctccattttcattgttagtgccctctaaacacactaacaaaaataatgttggtgtttcaatttctcatggtggcaaaggcaataatattatcaaagctagtttacttggccgattggtatcaagtaaagaca

SEQ ID NO: 41726 - DNA, 1812 bp, Cannabis sativa
atatatattttagaatgaaactttcattaggtcaaaaagtcaattacaaatctagactgaaataaaattatgttaatccggccactatgctctcgctacatcaagcgttaacgccattttagtaaaattataagccatttattatttttttttagatttattactcttctaattacctattagttttgtcaattaattttgagatgtaattacatgtatctaactaaatatttgggatataattacatgtctagtgttatgagattcgaactcataacattgtataatatgtcatacacttcaattaactaagttatgaatatttattgtttacaatacacttaattttagtaaaataaaattaaagtctaataaatttttttattttttattttggaccccaaaaagtatgggtctagacacgagactagcccgcctatgtttaaagccgactttgtgtttattgcatttgtttgtcttaagaattatcttcaagctgtacataaaaaaatatcaaaaattaagctcaagatgccgtttatactattttaaaaaatatataatccattttatcatttaataaaataaatagtccaatcagtaattttttttaaaatacataatctaaaataatattaaccttatattctttctcgtgaaagaagtatatttttcatataaagattttagaaaagaaaaatgtatatatagtttttgaaacaaaatgaatataatatttaatcatgagaaatcaaacatatttgtggttactctacatgtgaatgattattactaaactacggaatgcatgtatgaatcatgtaccccaaatatagttcatgatgcaaatttattcttatattaatttaaaagagtataatctaattgtgattttttttttcttcggcaaagttttataattgcgatttagatgccttaattttctacatttatggaagctataataatagtggatttaatctatgacattgcatatgagtaatattttcctacttttttttttttttgctgaaacacaacactttcacttatgtgaattaagcaataatagtggattagacgcatgtgtgagctgtgtgcacgtatgtggacttgtgcatcatattatttttaactatgagcaagttcttaacatgaaaaagttgtaacaaagaatcccaaattggtttcattacataataatgtggtccaatttttttttttattattatttattaatgttactgttgttatcattattacaagagactttttttaatcatattattataagagacttttatatatgcctttggttccaacatatacgttgttaattacaacttacaagacagagatcaataaagggtaaactcatttaataaattgttgagaatattatataataaaaaatcaagttgtaattgtccaaaattataggcaaacccacatttattaatatcgaaacgcatgcctccaaaggaatattggttggtcccactagttcccaactttcatcacccactataaatttttatatatgaaaagaatgtttgtggctaaaccacttaaattttacagtttgtaaccgttaaccataaaaattgaaattttagcgtcataactatttaaatcctggtttcgttttgctctgtacccttccgtccaaaaattacaattaagtgctacggtggactatccgatgtgtacacacttgtatacgtgataaatttttagtggtccacgtaatattaatttctaaaatattataaaatttaatttaaaaattataaaaattacaaaaaaaaaaaa

SEQ ID NO: 41727 - DNA, 1091 bp, Cannabis sativa
gcatgtaatttattatttattaaccaattaatttcactgcatttctctgtatttagttgtagatttctggattaatgaaagataggattcattgtatttgtgagaagcttcgttcgttccctatatatgttgaatttcctccctcctggttaacattctacgtattctactattccacgatcgaaaagaaagaaaaagaagtaacaataaacccataacgttttgtttttaacgaaaacagccaaaaagaacaaaaataatgatccaagtagtgcatggacatgttaaattcctataaataatgcaacatgcattttcctcacaacatctactcaaaagatattccttttgaggttcattacatattttatcaaggtctctatacaccccacgaacggtcacatataatatatatgtatataaatcgtatgtgtagtatataattatataaaaatatgtctttaataaattatcatatatataagtttggatttaataattacatttgtgatacctattattaagtgataatattgtgtttcctaattttttttaaaggaaagtgataatattatggctatatatattagtattatatataggaaaaatgttttgtgagagcatcaatttgattttagtgatgacaacttagaagaaacattgttactctggataacacgatcaacaacaaaataagatgttctaaaagtactaatatgaacactattctaagatcgcctaataaaaaaaacgaaaatatcattcaactcttctaatagcaattttattaacgacaaattttgttgttaatataaagagaaattgtaaactatttaattttatatgattttataaattataattatattaattattttgattcttgtttatttttgaaattttttgaataatttacagtattaaaaatatgattcaaatatacagttgcacatataattattttaatttgcacgtgtgcaattataatagtcaccacaaatttttttatttttagtcacaacaaaacttgtggctaaaagtaaaatagttgtgactaattacaaataatcatttttatattgtaactaaaa

SEQ ID NO: 41728 - DNA, 6875 bp, Cannabis sativa
  modified_base (1038)..(1038): a, c, t, g, unknown or other
ttttaacctgaaatgaattgaattttcaggggaaaatgggacaattgacggccagggttcattttggtggcagcaatttcacaagggcaagctcaagtatacaaggccttacttgattgagcttatgtatactgaaaatattcagatttctaatttaacactcttgaattctccatcatggaatgttcatcctatttacagcaggtacagagtaatattattcttttaattcaatttcaaaccctgactaaaattgattaattcctgaactgatttagtgaccatggtctggaacttgcagtaacattcttattcaaggaattacaatcattgccccaatctcatctcccaacacagatgggattaacccaggttggtttcctttctttcctctccaaattatgagcattcattcattcattcaaacaaactaacatagtaacattaacttcaattccaatcacagattcttgcacaaacaccagaatagaagactgttacatagtctctggggacgattgtgtggctgtgaaaagcggttgggatgagtacggcattgcctttggaatgccgacgaaacagctagtaatccgacggctcacgtgcatttcaccatacagcgctgtgatcgcgctggggagtgagatgtcagggggaatccaagatgtccgagcagaagacattgtggccatcaacacagaatccggggttagaatcaagactgctgtggggagaggagcatacgttaaggacatctacgtgaggagaatgacaatgcataccatgaaatgggcattttggatgaccggaaactacaaggctcatgctgataaccactacgatcccaacgctgtgccggagatcaaagggatcaactaccgtgatatggtggctgagaatgtgtcaatggcagccaggttggaggggatatctggtgatccctttactggtatttgcatctcaaatgtcactattggcatggcggccaaggcgaagaagcaaccttggacttgcactgacgtggcggggatcacgagnggtgtcactcctccgccatgtgcgcttttgcctgatcagggtgagaagaaaatggattgtgatttccctgctgattcacttcctattgatttagttgagttcaagagatgtagctacaagatgagttattatgtgtaagttagttgtagaagtcgactaccctatactatcaaacagcagcaattccagctcttgttgagtttggatattgatatttcttacttagtagaagaagataagatcatctctgtttttgtaattccacgttgaaattgaaagtgtatgcttttcatcaactatagtaatatggtaattgattattaagttacactctgttcgtttatcaaattttgttcgtttaccaacggctgacacaattttattctaaaagcctagaacatgaacattgaaatgtcaaatcatgaagttaacagagctagtaaaaatattttcacatccccgtaaaagatttgactgctaggaatattaacttttggacatgatttgtgagattataactcggtatgtaaggcaaacacgtttaagcaaggaccccaaatgagatacaacttaaaatacaaggcaacaaatgaaataaatgacaaatatcatacagtactactccaaggcacaataataagaatttattagaaacaaaatacacaaaaaggttgtaggctatgaatgaataaagtttttcaagcatttcgtcatcatcaacaagaagaaacaatcgacacaaagaacaacaaacctacaccagtgagggactggcgctctctaaacagatcaaccgctctactaactacaagctttaactagattgaatgttacagacatcacaaaggatcgtgtgcctgataataacgatcggacaatgaatgacatctcagaaccatttttcagtaaaacccacaattttttcccctctataagagagggaagcattctggcccattgttgattggccaattttctagtgtacactgtgtacagcagatcacaacacaatcctcaatcagttggatctggattgaactttacagcttctctccagatgagctccttgatattctcttcagtaaatgatggttgctcaaaatcaaaattgaaaggcattggacagaccggttcctcattgatatcatgaagaggtgccaagtatgggtggcaaagtgcctcatccactgcaaaaaccaaggaaggaaaatatcatttattattcttcagggtcctgtagatgaaatgaactacacaaaattaactctcttttccttaaggtaccctggaaagaaacccctaaacttttaaaaggctcaaagtcaaaccctgcaatatttgggaagcatgaaacttttgtaaccaacaaactgcccgaaaggaattttaatcctggaactacgtgggagcaaaggcctgaccactcaaactaccctcaggttaagcaagcaggactgaaagtctttctttcatttgcaaagtgattgacattgacaagcagggatgtgagcagaaggaaaatttaatgcttatatggagactatgaaagcagagagagtagaaaacttccagccaaaacgagaaggaagaaaaactatgtttaagagtcattgttcaacataaatcataacaaaatatagaaatttgctttttctttagacttattttcttttattattttagttttgaatggaaaataaaaacttgcatgaccatgattcggtatacctgtaatacgcctgtttggatcaaagataagcatcttctctagcaaatcaacagctccagcagacatattaggaaatttaagagagaactgttgctttgggtactgtggaagctgccggacatatcttcgggcattatcacttcgtaaaaacccaaggctagtatcatcaggtgaaccaatcagctgctcagaataacagaaatgtttaacaggtttgccactaaataaaaatgatgaatacagtttcaaacaacaaagaagtaaaactgacattcaaggtgaggctatcttaagtggttgggtcatgggtggatcaatatgtgctttgagtggtaagggttcaagtcatcattaatgtatgtttcaataataatcagcataacggaatatcaaataataatattaaaatatataattttttaaacctgaaaaaacagatgaaagtaatctagatttaacaaggaagttctagcaaacctttaaaccatacctctgttataagtctcagctgatgaacatagtcctttcctggaaacaggggttgtctggtcacaatttcaccaagaatgcagcccactgaccatatatcaattgctgcagtgtattcagaacaattaagaagtaattctggtgctcggtaccatctagtaacaacatactcagtcatgaaatcagtttcagaagttgtccttgctagcccaaaatccccaattttaaggtcacaatttgaattcagaagcaagttactgggctttagatcgcgatgcaaaacgcttgctgaatgtacatacttaagtcctcgtaatagctgatacagaaagtactgcaaagatatgataaattcatcagtgccagcttcagatttgcaccacaaaagttgctaccatctataagtttcactagtcatttttctatatctgctataatcattaaaaccgtaaaagtctccatctaaagcagaacgataaatttctcataagttgtcttaagtgccaaatattctaaaatcatactgctttccgcagcaccagcagaaataaaaatgaaaacatgatcaaattgaaggttatacatgccaatattttataatttatactctcgcttatgttggaaatctgtacatgaataatcaaaattgttccagtggctacgaaaaagaggaatactgattttaaatgcaatggtgataatactttatatgcaacaaaaaaattcatgaaataccaacccgacaatgatcgtctgtcaatgactggtgggaacgtattatttgatggagatcagtgtccattaattcatatacaatataaacatcattgaagttctccctctgtggtggtcgtattatgtcttttacggaaacaacctgtgaacaagaaagaacaaaccaaaacgcataagcctcaaaattcagaaggtattaaccataacatacaaacatttaaatacacagcataggaactttgatgggagatggcctattcatgttaatttttcattttaagaagcagttggggtttgaactttgaaatcccgactttgtactcacaacacacccacccaaacacttgagctagactagtgttaatggcagatatcaatttcaaatgaccatggtaaaaaaaaaataaaggcaggacacatatcttgaaatccacctttataagcccagaaaaaaagaaagtcttgaaactgcatcatgactggaaatacaagcatgatctttaagattgactagggaaagagcacacgaaaatatctatcaaatttaaatcccaataacaatgccaaacctcaaactaatctcatgctcactccaacttttacacatttataagcctcaaactaaatgatctccgagatatgaacctaaaggatgtgtcaaggctgtatgttatgtgaagtatttgcaccaacatgcaccttaaggcggtaaaatatattatacacaatcacaaaacagcatcaaagaatgcattatcattgcatgcatagggggttcaaacccctaaccccattttgtttctagttgattgaaacaactacttagaggactagattcatcatcagtttttcttcaactgtatcaaaattatggatgatggcatattaccatcaaatatttgtgaattgaaaacagagtttgaaatgaccattcaaattacatgaaggcaatgccaaccattgccagtactctgaaataaaaagaccaagtctatattatataacactgcataaggatataataaatgtaaagaaactagcgaatctaagaacatcatttcttagctcataaataccaaagtttgttaagaagagagaacttgtattaaagccatgaacaagtgagttaaatggttaatgaaattacattttcatgatccatatggcgtagaagtttaatttcacgtaaagtcctttttgcatctattctgttgtcaaatgcattaccaatcttcttaatggcaacctcctcatttgtctcggcattagtagcagcactacaaaataaataagtgagaatttagcttccttaatcgtatcaatagtacaactgattaaaacatacacacacacagagagataaggacatatttgactgttatatttaataaaaacatgtcatctaaccaaacactattaaataatatcagaaacatgaaaaggtacatctctaacataagaaaaccacaatttccttttttatctattacatgtagcatatgaactcaaaacttatgaatattgttaactgcacaacaagacagaccaattctctttatcatacagtggcaataccggaacaaaactagcttcctactttaggaaaaatagtattcaacaactgtaatgcgataacttgaggcagctttaatattatccatcaaatccacactgagttgacaaaacatccaaatgatttttgaatgcaaacacatgcatcatgaacttcagtagttccaattctctctccctatagacttttaacctttctaagtactaagcaccaaaaacccactaatgttccatactcttcacaatcaaaaaatgaataaattatcaattcacgaaagtcccactagaaaattcatccccatagctaaagaaaacagcaataacaaattaaacccataaaagacaagtacacaaagcaacagtaccagctaatctacattggcctcgccaagattttcaagaatcaccataattgaactagtgtaattcccaattcaacaaaataaatgtttgatatttctaaccagaaaccaaaccaaatttctcaaaaacaaaactttcggtttcggagtagaaacagtagagctagaagtgagagataaaaaaagggaaaaagatctgaaacacagaaaagacatcttaccaaacaattccataagcacctctaccaacagggcgaataggaggaacgtacttttttgaaacttcaaagaggttaccgtaaatattatactgaagataccgtccaccatgagtaggaacccctctgatgtgatggtccgcagaggcaacaccggtatccatttggacccgagacgagcacagatcaatacgaccgaattgggcaacgacccaagtcaagtgagagatttattaaggagaagaaggggctgctaatgaaatctcggaaggagaagatgtgtcggtaagcataaatcttttttacaaaatttttatttattttgtgtagtcttttaaagaaaaacaaaaacgaatttcttcgaagaaacggggtatgtatgaatgtcaacttagtgccattgacagtggcaagcgtgtgtatgtatacatatatacatacatacatacatacatacacacataaatgtgaggtatgaagaactttcaattcaaaggagactttttgaactggaaaagtttgttgacccgtgatcatgacatacaaattacaaactgagttttcttcctttgtccctaattatttttctaatatataaatttttaatttttaaattactttcatgacaattttttttttttttttttaaggaaaatggtaactttattaataagaagattcagccattacaatagaaagaaaatcagcaggaacatcatcctcactaaaaat

SEQ ID NO: 41729 - DNA, 1961 bp, Cannabis sativa
aaaaaaaaaagaaagaaaaattgttaagcgcgaaatcaaaaatttacaaaactaaataataggaatgctttattaatctttatttttggcgccgtttttggtccccaatttgatttgaaattgaaaccctctctcttccaatccatggcggcttctccagccctaagcaacaactcctccgacaccgccactactgcttccaccgccgttgcactttctatacctccatcttccgccactaccactaccactgccactgccactgctattgccgctgttgctgccccgatctccgttccctccgtcattccggctgttaacaccgtcaatcgtacggacacaccgcctaagactcttcgcgggcttaataagcctaagtgtaagcagtgtggtaatgtcgctcgctctaggtaattaatttaattgatttcttctttggtttcttgtgttatgttattttggagtcttgattgtagtgaaggagtttctggaaccctagagattcgttctgctgttttgtagaaagttgtacttagaatttagtgggaacttgcttttaggcttctacttggttttggatttaggacagagatatatacataatgattggaatctgtagttatcggaaatgatggcatacagggacttgcatatccttgctcacaatgtgctaaaatgatctggaaagtagctcagattgcttgcgtatttgtatgaatacgctggaaatgtccacgacccattgtgtctagaagagaattttacactaagagatagcttgatgcagttcgtgagctttttgtgaatcatagatgttgtatacggtcctgagaattagagtcttaagaagtaggaaaatttcaattcgaaagtttgttgtcagatgactcgtaactagtttactgagcgaaaagatggaagtttgatgtaagacatagctagaatgagacaatgaatatctaatatctatattactgatgccttacatgttttaggtttatgttttttacgatggggaaaatatgattatctatcagggttaaatatcttctgtaatcaatagatggatacattgtttggtgaggtagctattgtcagatcagaatcgttcttacattctctgattgtattcctcaaacaaattaaagcagatttcaattattgaagtttcaagtatagtgaggttgtcggatttggataggacaagttaattcttttgtagaagaaaaagaaagggggaatagctaagtgctcaatgcttatgacaagatataagtatgatggataccatcaataattggtgttaagcataggtcaggtttttagtagattgttgttgttgatgatcaactatcagtttaacattcacagtactggtcaggcgtgtggtttgctcccaccaggtctaatgttcgagtttctccggggtagccacatagcaattgctacagtttcctggttcccaaatattgtacggttaggctgtgatcgtagttttaaaagaaaaagaaatgtttacagttgtggagaacttgcaagttgtaaccttagggcatagatgcaagtctcgtactttcagtttttcttgacaatgaataacatgttcacagtttgagctgagttgcttatgtttttttatcagatagagtcaattccaaagctttgcacttactgagatggtcattacttcaaactctgttcagttattggttttttccactggttgttgaatatgtaggatttggtgttagtatttacttgaggaacatcacatcacattatctgtcagttacttataccatcttaaggctggtactgctatgtggattataattagataaattaactgtgcaggtgtccatatgaatcatgcaagagttgctgtgccaaagctcaaaatccatgtcatattcatggtatatgctaaatcatattttgttttatttaattgcattgtttat

SEQ ID NO: 41730 - DNA, 620 bp, Cannabis sativa
agtttcccttttctgctcttatttattggtaccagcatgggttgggggacccttttgcttgataaccattccttttttagaaacatttatggcactgtaaactctcttccaccacttactgttacactatgaaaatatcaggacttgttagtaatttgcttatagagttagagtctataaatattgtttagagattattggatatggaatgagaattagaactttattcattttggaagattgacactgtcgagtgcctcaaatttcgagagttttgaatataattcacactaatccctttttagaaatattcttgtagggagactaggattttacttttagtttcaatttttacggagctaaaaattgaaacttatagaaattcaaacatcttcaataagtctagccaaccaaccctttactgcttgaattgaacagattcactgttttgagctttgaattttttaaattctacaaaggaaaggaccacggtgtaaaactcattgcaaattgttggctttctaatgaaaccaagtcaagtgtagccacttggtcaacttcttaattatcttgttcataatcaagaagtaaataatatgtttgtaagtctttatatatat

SEQ ID NO: 41731 - DNA, 693 bp, Cannabis sativa
tttttgaaaaaatttccgtgtgacagtatttttgtaaaagttaatccaaatttcagtatttttgtaagtttcccttcttatatccttatagtcacttactcatatatgttttctccactaaaaataaatatatatttttcgaaaaaaacaaatatatatgtgcacttacaaattatattcaaaataatatttttgagaagaataaataataatgggtctcaattaataaatataattaacattgtggttttatataatattttagtatagtgagttgttatggtattggttggtataaatatgaatatgaatggatgagagagttgtttgttgaaagataagatgtgattaattaatgatatgtatgtgcattgcatggtcaccacttctcacatgctactcatcccaattatttattcctatatatatgttcataattgctttataataatacacaataataaattatataactagatatacatggagtaaaaaaaaaaaaaaagtgagattagaattgtattgtgtgttgtttggcattttgtactaagaattaagatagataatataagagatatttgaggtgaggtctaccatgtcggccaattgtattaataatttatttatttatttatttgtatagagattagaaggagacgtattctacagtcttattttcaaatttcaacctcc

SEQ ID NO: 41732 - DNA, 1087 bp, Cannabis sativa
tgtggcttctgcttccgcggccggtacctccgagatcatcaaagagccgtcgcagccgtcttctatggagccttcgccctcgcgattatcctccgaaactgcctacgattcctcctctcttcccgccacacctgatcgcgacgatttacaggtcatttggtaattcagttgttgttgctgtttgttttttttttttttttggtctgaattgttgtcggaattggattttgaagttgtatgcgttcgaatttattgttttgcttgtttgtgtgcaactgaaaatgacttctgagttcttgcattgtagtgaaatttctcaatttttatttttatacaaattatgagaggaaattttggaataattattctggaattatagaatattggaacttttcttagattaagaatgtagtatgagaaaatttggcttagttgattagttgttggcttagaatttttctttttgttgcagtaaatgatttcgtttttcatatataattaaaagttcctgtttggtttgtgtcagactgcaactatattaagaagtgaagagtatcgccaattgtttcgtcttcctcctgaagaagtgagtacactgtacacatgctcaaggctttgaaggttgtatgttactggtttaattgaacacattgtctctgttatttcacaggtacttattgaagattttaactgtgcgttccaggaaaatatactaattcaggtattacgtctctttgacttatatactgtgcaatcaatttctaacattctatttcttggttcctaatgctacttatatttatctgttgtagggccatatgtacctttttgttcactatatttgtttttactctaacatattcgggtatgaaaccaaggtacgatgatgaactcattcttcaataattctgtaactattttatacttgagtgtatttgtcctgtatttatattggggcttcgttgtttcaagaatttttaaataagaaatgatagttgtatattaatatttaaagtttgtaagacatcattataagttttgttgagaatcatggggttccatctcaaaaccaattggcaatgagtgg

SEQ ID NO: 41733 - DNA, 1372 bp, Cannabis sativa
ttttctgtttttttccctaatttataatctaccattatatagaagaaaaatgaatagttaattagtattaataattaagaatcaaaataattaaaattatattcataatttcatatttagatcgggtatgaggtccggattataataataaaaaatagtaataactaacttgtttttgttttcaaaattttaattcactcaattttttttagagtattattattaaacattttaattaaagtgtacgacaatactatattaatgtagcgcgttataagtgtattatttattaaattagatttgtggggcgaattgcactactaagaatatgagatcgcattaatgtgaatatgatcattttttcaagtaaaatttctcctttaaacgattcagttgattattcccataaaaagcaatttcatcaaccccaaaagtctttcaagtctttccaaaatactataaaatggaaagtctttgaacgattcatttgattattcctaataagaaaaattccattgaccccaaaagcctttccaacaaactatagaaggaaaaaaaattctcataaaatactactatagcaaaaatggcaatgttttctgagctttgttttcttattgttcttcttattcttctaccaaacacagccttatcacaaacaaccaacaacataacagtaggcacaacactcacagcaacagacaactcatcaccatggctctcaccctcaaccgaattcgcattcggttttcaaaagatcaaaaaccaaaacgatcacttcttgctctctatatggtatgcaaacataccagacaaaacaattgtctggtatgcttttaaaacaaactcctcggctgtagtgccgagggggtcccaggtcaacctgacagctgaccggggacttgtattggttgatcctcaaggaaaagaggtatggagttcggagatagtaagcggagaagcttctcacgctgttatgcaagacgaaggaaactttgtgatcttcgggtctgaaaagctttgggagagctttgatcacccgagtgatacgcttttgcccggtcagagtttgagccgcggagaggggcttttgagtcgttggagggagaatgtgttttcgaaagggagatttgagttgaagttgcagcaagatggaaatttggtgttgtattctgtgaatttacctactcggaatgataataggccttattatgctagtaatactgatgaagggagtaactcttctactgctggaaaccggttggtgtttaatgagacaggtaataaagtacaatttttttcttaattttaagataggatagacacaatattatacattaagggctcttttggaacgccgtattagatcgta

SEQ ID NO: 41734 - DNA, 1050 bp, Cannabis sativa
aaacatgttttcattgttagttctgtgtttaaggtaatgacattacctgtcatgatatattctggtgcagcataaccataagttcccattattcgagtcgaaacatgagagttgtcaccttctggaccgtcttttgcaagaccgaaatcagagagctttgcattgtaatcctgttcaagaattcaaaagtaatttcttatgtttaagcgaatcgaacactttggctgtaatggttgacattgcttgccttgtgccttaatcaacaaccaaaattcaattaatcaaataaatgtacgttcgaactataatcatttaggattcgggatttgagggcccaagatacgagcctagtctgccttagtcaagaccgagtctgattataagacctctatatattgtttcattcaaaatgcttaacactttctcatctattagagggcgaatccatcaaactggataaaccattaacgagtaattctaatgtgggtggatttggtcaaagaacaagttaaaccaatagttttcgatatggggaagattgagatgctaacctggtccagcagaatgttagaggtcttgaaatcgcgataaatgacaggtttttcagcttcatgaagaaaggcaagtccttttgcagcaccataagcaatcttcattcttattgaccatggcaaaggaagcaacactcctgcaacaatcaaggaaaggctaatcagaggtgatttacacattagtaaaattttcgatacacaaacgcctttagattcgtcgagaattcaagatacatcaaatgttttttacatcaaagtcaaccgagcaagagctcgtgatctcaacgagttgaaaaactcgaaagaacatcatttccttccccaagttttaccttttacctttctaatccgaaaatggtatccaattcaagatgttagccctattacataacaaaaaccactttcttatgatgtcaatcctaagaacatatcatcattctagaaagaaaaacatcccaaaatttcatgacacaataatagctagctctacgaaagtact

SEQ ID NO: 41735 - DNA, 804 bp, Cannabis sativa
tcatcatcatcatcatcaagtttggaatcggaacagtagtatttctccatctccattaatggcttctccatctccaatggcttattctccttcaccttgtttggaagaggtgggttccaaccccgcccaatattattccactccctatgaagcctcaaattatggtgtcgacataccatttgtcgagttgagtcgtgcattcgaacagtgtacatcgaccactcattcatactctcaacaacaccacggaaccacctgttccgaaagaaaaactccacatcatcgcctgtcttcaaaacacgttgctcggccggcaacaatggtggcgcgggcctaacgttgtctgcattcaccgtttccctaaggggatgatcatgatcaggagacgatgaacggattccgtactcaacgtagtacaggataacattgcccttcatcttcgctggagaacgaataacagtcgccggaaagtaagggccggtcgatgcatggccgggttggtaaacctctactcgatctcccactttcatattggaagccgccattaaattaattaattcaagatccaaatataacacacacgtaccaattgcttaattaattaattaatttatcaacttaatttcacgaattagggtttgtttgttttttttttaagtggaaatgaaattaatgagagtgggatttgtgagtgtcaactctccaatttatcacttatttatagcttctccataatcctacttctattactaataggcaattatagtactcggtcaacttcctacttcttttagtaataggaaa

SEQ ID NO: 41736 - DNA, 1601 bp, Cannabis sativa
aaacctaaaaagtttggaagtttggatgtgatgaacagtactttattaattaaggtttttgcacgtgatgtggtacatattgaaaatagtacataacaacatactattatcaacaataataatcaatacaaatttatgttcatattattcaagatggaacatttaattttaattttattgttaattttataaaacttctttgatctatgcagatacaaatataagaaagtttgggtatattaaacactagtgttctttctctctacaccatagtcacactcattccatctctctaattttctaatcaagagcataacactttttataaggaattattggttaattaggctacatgcctaatgtaagagaattaattgtcctctcccaaatagcagactagtgacattttaaagcatgtttataggatcccgaacatgttactacgttatatccatattattattattattaagattttttatactacatattaaaatttttaacttttttattttttaactgtaggataggatttttttcaaaaatactatcttttttatactgtgtattgtgttaactttatactgttgttccgcggttatatttttagttgcttcactgttgttttaattgttttgttttgttattttacaattattttataaaaagataatatttttataaaaaattctatatgataataaaattataaatttttgctaaaaattcagtatttatgtaaaaagtcctatcatatgctaataccgaataagcaattcatcattttgttagtacacctcaaatattctaacaattcatggaccatggttatatgcatgaaaatgtgtatataatattaaaagtaacgtaggaaagagtgtttcagtcaaaggaaaaaacaaagaaacaaaactgtcgattaatgtactaatcacatggttatgtattggtaatcacaaattggcctaaattaacttcacatagtaaacggtctaataatgtttttaaattttgcgtgaagctgttttatactcatatagctaatttttgagatgcataacatttactcttgcttgagattttcaaacaaacactaacaatggccgaaactgtgatttctgtgatggtacaactgctgacttctcttcctcttgaagccataataaaaggagtgaatgagcttagaaatgttgaaaggcgagtggataatttgactcgtaaactaaggtccattcgagctgtgttgcaggacgccgagaacggaagatggactagcaatcgcgaaagcgtaaaagattggttggagatgcttgaagacgactctcatgagatgactaatgtgcttgatagatggaacactctcattctcagatcccaaatcaagaaagattttaatcagaggagaaaggttagtagccctgtcttcttcttgcttttgtattttcactaaatttaattggctagctggccctgaggtgagacgagtgaggtggccgccttaggcccctccaccgctaacaaagttagtaataaaataaaggctaattaggatttttgcctcctgaattttgacatgtactaaattatgccccctgaatttt

SEQ ID NO: 41737 - DNA, 1222 bp, Cannabis sativa
tcatgcatgtatttctaattattatcaatttatcattgtgttctaaattatatcaaaccttgtatcatgatattttatgattttctaacaattacaaaatgagttaaaatcaatacactacaattttgaacacaaacagcagaagactatagatttgcctcaaaccagaaatttcatagtttcagaaagcaactaaccaaaattacaagtattaatgctataaacagattaagtttacttcaaagaacaaagaaaacaaaaaacctgatgaggacgatgaccaaagttgaattcatacacatcgtttgctttgtcattaatgtcgaaagcttccactatattcgcattcactcctgccctagtcagtgagtacctctaataacaaaacacaaaagaacagtaaagaaaccaaaccaaaccaaaccaattcatccctaaaattttcaaataatttgagaatcagcaactaccattcctccgatgccgctgtagaactcaaggatccgccatggttggtctgggtgtttggcggagttgttctcctccattgccgtcgtcttggaaaatcaacgacaacccaaagacttggtttttggcagaacaaggaaaatggagtacagagagagtaactatagaacgacaaacgacatctttgatttaaaacgacatatttgtaataaaaacgacaataatacttgaaacacgataggaatataataaaacgacaaaatttaagataaacgacaatatgcttgaaacacagacgaatttgtgcttttcggtgcttagagcagtcacaacagcttctctaaaacagataaatttttataaatttaaagaattgtattaaaaacatgttgtaaactctttctttattttgaagtttttttaaaatttactatttgtgttctacatttataaaatactattttattgctttgaactattttattaattgttttgagttataataattatttttttacgaggatatatatatattagtattatatatttaaaataaataaaatatattaaaatttttaaaaagtagaattttagtgatgtattttaaaaaaattatacatggtgtcaagtaaaaatatattagtttttgtgatgtattttaaagaatagagaaaaaaaacttatgagaatgctccaataaaacaataattactaaatttgagtaatatttattgctatatgaattacaaattta

SEQ ID NO: 41738 - DNA, 2121 bp, Cannabis sativa
ttacaacaaaatgtgacttattaccataaagaatcaaccactacaaaagaaatcaaacttgagcctaggtgttgaataagccatggaaagtattttggatgcaacaatggagtttgcagcctctgtgtaatgaataccatcccaatttatgcgccgagttcctttgtcgcagacttgatggccggcttgaccacacgtcactttgatgttgtaattgtaaggaggacctccatcaccacaacatgccattagaggacttgagaagcctacaaaatatgtgagtgtccattcaagtcctaaaattaagagacacaaaagcaattctaagatatcaccaatatgggattgtgacacaagacttaccatattttgtagagttggcaataagatcatacttgatggagtagatatctacatacacaatagttgcatctctcatttcagttctcatcttttgacacaaacgacgcaattcttcgttgaacattttcgctgcatcattataaatcgaaatgcatccatgttggtctaatttctgattcttaactaatgaaagtttctgaggaagacatcccaatggccctgtgttatgtacccaaaaattcctgccaccttgatcatatagagtctgcatttgatgtagaaacaaagtgtcaatgcaaattcatgaagaattctttgtcagtgaaaatattgagcaatttcttcttctcaccttaattgcattctgtatttctatagttatggatggaatggtttttacaacttcaagataggacatatttttagcaaaagagtcagcaatgtcattttgcccaatatcgatggtgtaaagcgccttcttaaacccttcatcggtgattaagtaaagattatttgaacctaaaacacaattaatcatcagcacatattgtcaattattggtagaaaattgaaaccattcaactcatcaaataccaaacaaacctgctgcaacaagctcaagattcctagctttgaaatgagtgaactgcatgacctgaatattcaaagaaaagggtacatatttagggagggttgaggaccccacaattgcaaaattggccccatttgtgaacttgctcccttccaatgagtctaggtatggaatcaaaaagcttgtcttcaaactttggcctgcataataaggttaaaaaattacacaaatttttgtataaaatataacatacctaacatagattaagcaacatttgatccctgtggcacattgtgaaatatacaatgagacaattcacaaggcagacaatcacttacactaaagctggtcaaatctttttcttttttcatacaattgttttgaataaaaatatatatgctaacacatcatcattttctctacctgtttgtgttaaaaattatcttaaagttaatcatattaaaagaataaaattgttaaaaattgagcttaaagtgctatttttattattttaaaaaatataagatccattttgtcatttaacaaaatagatgttgggaaggttctatttcaaaactaattgacaatgaatggagtagtaatatttttatatatggttcaattctctaccatttattttatgtaggagaatatccaaaacaaaattgaattaataacttttataaaatacaaaatttataattgtatttgtccaataaaatattataattttagattacatagagatttgtagtatttttaaatactattattggagatctcaaagtaatatgttttttaataaataaatttagaaaaaggaagatgtaaatagagagataaagtacattcacaataataatgggcaataattataataactacggggaatgggtaaatatatatatagggaaagatgaatggaacatatcaacagtgggacccattttatttcactcaaatccacatctaactccgacaactcccgaaataggagacacacaacaacattcacaatcacaattctccccatcccaaacgctgtcgtttcgactccaaacgacacgaccacaattaaaataaaataaaataaaataaaaaccaccgtcaaactcaaatttcatggtgctaccgacacacataaaactatacatatagaagatcat

SEQ ID NO: 41739 - DNA, 797 bp, Cannabis sativa
ctgcttcactactttctagtttctctaattctttataaccttcttttctttttggtaacaatatttattataacagaaaaaaaaaatgagtgtagaagtattggatgccacaaccattgtgaactttgtggaagatgaagaagcattccacatgttcatctgtgatcgttttgctgacctcgataccaaccatgatggcattctttcctatgctgagatgttgaaggagctcaagtttaagggtgttcgaaactcattttgggatcgacataaaacccgagccaggtgagctttctcaggtttacgactcactgtttgagctgtttgatcacgactcgagcggctcaatcgatctggaagagttcgaggaagagaccaagagaatgatgcttgccatggctaatgggatgggattcttgcctgttcagatggtgttggaagaacacagcttcctcaagaaagctgttgagcgtgagaccagtaaattggttgcataagcatgttgcaatcagcctaatgcaatatttgttataattgagtttgtatttgttactaatcttttgtgtttcttctctgttttctttctctttttcagtgtaatttgaataagtgattacagctatgtacggctacggatgattttcattgaaaaaaaaaaagttaaatcaaaagttaaaagagttagaaaaatatttttttaaatagaagttgatggattaattatttcaatttcctctctaatttcataatgaaaatcacatagcaaaaagtagggatattggagttactactaccta

SEQ ID NO: 41740 - DNA, 1958 bp, Cannabis sativa
ccagattctaaatcattggatctaaatagaaacatgtagtatcagttactttcaaattttattttaataaattcaaaacggagtttgtactgacaaaattaaacaaaatttacattttactaacattaaatactatggttgtgccactaaaaaaattattgagtttacatcgattacaaactcaaaatttaagtatttatcatgcaattattctgacacttttacaaagattaaaagtttattacaaggatggtaaaaaaatttgaacaacaaatcattttatctaattatgatggtacaaaatattctatcaaaattataaatacagatattattaaaaattaaaataacactaacaatattgaataaaatgtctaggtgtatgaatatctgaaaataaaaaagtaaagtgatggttttgattaaagatgagctagcgaaaatgagtgatgtcaattcttgtcttggatggccttttcacaatcattacagagcaacgagcatgattggcgcaatagtcgcttacgcttcccagaacagtcctgcattgcattcatgcatacatttaaaaattaattacttgcatttttaaaagagaaatgctaaaaggtaccagtagtgccaagtactctcttacgtgtcaatatcgctattggtttaactaagtatcgggtctcatatagtttaatataatagtttttaggaagtatcacaagccaatcacaaggtgacacgtcttaagggtactaagcaaaactggtgcctagtagcaagggtctttctaaaaaactaatttataggctaataatcaagtgtttgagtagtactacctctttactacaccataattaggacttcccacaactaaaatggatgcgtggtgtctctctacagcttcacacattactttttttggattaccttcaactacctctatctccacatcttctatctgcaaaaaaaaaaaatattgtaaattataatttcacgatataatgataatttttttttaaaaaaaaaatcccaaaagaagtttttctaaataatgaggggagaagggtgagatatttgaagaataaatggtattataataatatgtaaaagaagaagctaaatagagcctttttggagttttattttgaagatatatatactactcatttaattatcagaaataaaaatatgtatagagtttattgaagcatttactacttactagtgatcattaagccattaaaatgtaaaactacatgtcaaaaatgtaataaagaagtaaagaaatgaaacaattgcatactgatttattcagacacatttgcttaatttgatcaatacttcttgaagcttttctcttaaactctgactccattattgttataaaatttccagcacctgcaataagatttaaacattaattgataagaaactacaccacaaaattgaaaaataaaccttctatatgaattttattctacaatttttccttggatatccaacccaactttttttttttagaaaaaaaaaaaaaaaaaactctgagtaaataataacattgggtttattttcaaagggaattgattaaaatgatatttttttcaaaataaataaataaaagcaaagcaaattatcttgcagttcagttacttgagtaatgtaatgcgagatttaacaatagattacccaaataaaaacttactaaattcctatttaaaaatcatataactaaattttttttcaaaaagaaaaaaaaaacataactagaaacataactttctggagaaaaaaatatacgaagggataaaaataatgaaaaccgaaactataataaaaacgaaaacgagactaataatcctaaaaaattccttaaaaataattaaaaaaaaaacctcaaaaataaaataaaaagaaataaaagcaaaaggaaatatggattagtttaccgggcccaccaacaccga

SEQ ID NO: 41741 - DNA, 1187 bp, Cannabis sativa
tattttgatttaatggcgtatctaacgttggatgtgatataatatgtggtcagatgatacgaggagtaaaagtacggcaacaaggtccaaacccaaaatcagaaaataaaaggccagcaaaatctcagagaagccaacacacaaccactccagctgggaccaaacaacattaattaataataaaaacactaaagttaaaaaaaaaaaaaaaaaaacataaccattctcacatatatatatgtttctctctcctacatgcatgaagacaattggatagatgaacggtcatgatcttctctcgaatatctctacctatttttttttttttatatatatatatattatataaatattatctctgcatgcatgagtgatcagtggcccttcattttccatgtctataaatatatatagcttctgatgtttctgactgtatactcagaaagcatagtgtgatgatattttgagagagatatttccatgaccgatcgcaaatggaaaaatggggtggttttgaggattttataagtgtagattttgtaatatatattaatattattattattattattagttgtaccgttttgttatatgggagaggaatggatatgatcatgtccatttataaattatatatataaatgttgtaattttaatttagaattatggatcataatgtgtacatttttaattgatgatgctatatttaatatatattatatgtgatattatttattatttaatatttagttggatgaatagtactattgacaaatagatattagatataattagtatttaatagcatttttaaggtagaatttttggttaagaacaaagagcattgccttttacaattggttataacaaatatttttttaaagttatctttttaaattaaagtaatttgcaatttttatgttttaatttttatattatttttgtgataaaattaccttacattaattattattttttttatataaatttgatgttaaatattatgcatatgtgtatgtgtaacagtaaaaaaatttgaaattaaaattttaaatttacaaattacttaaaacagattttgtcataaaaaaatttaagtgtataaaattaaaacataaaataattttacataaatttctttttaaattatgagatttgataattatatcacactaataatgatataa

SEQ ID NO: 41742 - DNA, 4767 bp, Cannabis sativa
taacagagcttatcaatacaaatcttatgagtgcagagagaagaaaaacagagcaacaaagttttgtaaaagctacaaaactttgagctggaaggcctttatttatagtccaaaagatacaataaaaggttgttacaacagtcctgtaactaactcaaaaacagaaataaaccgaaaaggacagaaaggtaattaacaatttaaaacagaagaaatgttattctgtatcatcccccctcaaacgaaatggtgttgaaaacactttgagtttggatttgaggtataaaaatctgtcctttgataagaccttggtaaggatgtctgccacttggtcgagagaaggaacataacgaacatcgatttgtttggctaatatttgatcacgaacaaaatgcaaatcgatttctatatgtttggatcgcgcatggaatacgggattggcagcaagagaagctgcaccttggttatctacccatataactggagcagagaatagtcgaacatgcatctcagagagtaaggaagtgatccatttcacttcagctgctgtgttggcaagagcacgaaactcactttcagtgctggagcgagctaccacctgttgtttcttggctgaccatgagactaagttgccaccaagaaagacagcataacctcctgtggaacgacgatcatcgggacagctagcccaatccgcatcagagtaggcttgaagatcaagatgtagtgatggtcgaataagaatcccttcatgaatggtgccctttaagtacctgaacagccgcttacatgcttcccaatgaatggtggttggtgcatggataaattggctgagtttgttcactatgaacgctatatcgggccgtggcaacgtcaggtattgtaaagcaccgagtgtgcttctgtatagactttggtcagaaaaaggttcaccattggtaagagatagttgaatggaggtggttgttggtgaggggcatggcttagtgccttccatgtttaatcgggtgagtaagtcagctatgtattttgattgagataaatacattcctgtagaatttctcacaatttcgacgcccaaaaagtagtgtaagttgccaaggtttttgacagaaaattcggcattgagatcattgagaagttgagtaatgagctgttggttgggaccggtgaccaatatatcatcgacatagaccaaaaggaggattaaagttgagccactgccatgcacaaacagagaattatcagaccgagagacagaaaaacctttgctgcagagagtggtttttagtttttcattccacgcacgtggggcttgcttcaagccatatagagccttgtgtagaagacagacatggttgggtttggagggatccacaaatccatggggttgctgcatataaacggtctcgtggaggtcaccatttagaatggcgtttgaaacatctagttgtgtgacagaccagttgtgtgagacagccaaggtaagaaaaattctgactgtagttggctttacaacaggggagaaagtgtcagtgaagtcgatgcctggtgtttgaagatacccctttgcaactagtcttgattttagtttgtccaccgagccatctgcctttagtttaatgcgatgaacccatttatttccaaccagaaccatgtgaggaaggtatggaactaaagtccatgttttattcttgacaagtgcatgcatttcttggttcatagcagcaagccactttgggtcagcaagagcttgtttgagggtggttggtgctcgagggaatagagattctgggagagggtggtgagtagcaaggaaagcttttggtttatggatacccgatttagatcgagtttgcataggatgagtgtttatggtggtagtgggtgaagtttctggttgagagatttgtggtggaggctgcccgagagcattgttgggaggttggtcagttatggatggtggatttgctgggttattggttgatatgggcagatcattatggtcatgagcaccaatggaggccggtattacagcagtagcatcaatatgagaaggagataatgctgcaggatgatggctcgatgtggattctggtgtagcagcattagttgcaccagtgggagaatgtacctcgtgagtggcagcagatgaaacatttgtatcatgtattagtggtgtagtagcaaagctaatagtaggaaataatgtgtgaagtgatggaggtacctgatttgttgtctgggaggcatgtgcaggaaattcagtttcattgaactgaacattgcgtgccacatagattctgccgtcaagactttcacaaagatagcctttgtgttggtaggaataccctatgaagatacatttagcagaccgtaggttgagtttatgtggcaagtacggcctgagatggggaaaacatgcgcacccaaacggcttgagaaacatatagtcaggaactttgtgatataagcattcatagggggagatatttccaattacaggtgatggcaaccgattgatggtgtagacagcagctgtaaaggcatgccaccaatactctaatgcaaggcctgattgagcaagtagagtaagaccggtttcggttatatgtcgatgctttcgttcggctcgcccattttgctcatgatcatgtggacatgagtgttgaaactgaattccctgttgcaataagaaagaagcaaaggagcgatactcacccccccaatcggattgaaccttttttataggtagctgaaattgtttttcagcaaatgttttgaattgtaaaaaggtagtaaaggctgcagatttaactgtgagaggaaaaagccaagtgaacctgctaaaatcatcaataaaatgaatgtagtatctaaaaccttccttagaagtgatgtgagagggaccccatatatcggtatggatgagttctaatggttgagatgctctagaattggagagaaggtaaggaagtttatgacttttgccttgtttacaagattcacaaaaggataagtcttttaatttggctgctatattaagttgagacagtactttggctaagatgctaggggcaggatgacccaatttcgagtgccatacattgatgttactagaactttgtgaaagaaataactcaacagattgagagtcatttaaagtatgtaacagagattgatctttattaatagcaactttattacaagaatttgaatctgcaatagcagattgcttattacaaacaggtaaacaacaagatggtgagataggttgtttggttgctagttgacactcgagttgaacatttgaatgaggaaaggatgtgtgtgacagcaggtaaatgccatttttctcccttcctttaagcagcactttctctgtgattttgtccttgacaaaacaacaagtggaatgaaattcaagaaagactttgttatctttggttagttttgagacactaactaagtttttggtaatagcaggaacttttaaaatagaattaagatgtaaagatttagaagaatagggagtaggaaaagaggtgttaccaatatgggttatgggaagcttcttaccatttcctactgccaaggattcagacccagaatagggaaattcagtttcaagattctccatgccttgagcaacatgattcgttgccccggtgtcagcgtaccaatccatatcaggttcaaactcagtgatggtgttggaagaatagacctgtggagtctctttgtcgtcaatctcagttaagaaagctttgttatctccggttcttggagtgataaaatctttatcgaagcgataatggcaaacagctgccgtgtgccccattttgtggcagacttgacatagaagacggggaacattatatccagctctgcctctgccattagaagggtgaggtggtctgtggaaggagtgaccccgattggtgtagccattggagcgatgtgtagccgaattgggggaatcttgagttgctgacagtaagattcgcggccatctttgaagaaagatccccaagactgtaatgtctttcaagtcgactttcatgggtgagtaaaagagattgaatagcttcaaatgataagttgtcaacaagactagtaacatgtactacaactgggtcaaattcagggcctaagccatttaaaagatgcattaccagatcattttcatctaatgggtgaccagctgtagataaagagtcagccaaaagttttactttatcaaagtaatcagaaacagaaagattacccttggtgatcgttgataactgagatttgatttggaggagtcgagccttcgattggcttgagtatctctgttcaagggctttccaaacagaggaggaagagtgatgctgggctaaagatccaagaatagtctcagacatagacgagcgaagccagctgaggagaagttgatccttacgtcgccagatggggaactccggattaactgctccattaatcaaatgttcgaccggagcaatgccagtgaaaagaatgtcatcgagtccgtgtccgataacggtggggatgacctgtgatttccatgcaagataattggtgcgatccaatttaacggtgagggatgaattgagggaattttgaaagggattccatgattgagactgcgaggcagatgccggagcaggagtagcggtggtgggatgatcaagaacgccaggatccattattgacgaagatgcctaaggctatctgataccataacagagcttatcaatacaaatc

SEQ ID NO: 41743 - DNA, 955 bp, Cannabis sativa
ttcctcaaatttattccctagtttttaataaaaaaaaaaatcaaatgaaacataagaaagtcaaaggatgtgaagtaaaggtcctaactcttaagtattgcgtggttttccatcacagctcttaatgtggctaccattttgactctaaagggtttcactttcaattcaaactcacacatatgatctctctcacctgttttctccttaattactctctcttatttattacttttattttcattccatttatcacatcacttattggtccctctctctgtctagtctctacctatatatttatatttatatagatgaccaccaatattaattattatagatagctcctctttccactttgagcttaattaacaccaagttctctgtttttgccaaaaacttgttatagctctcttaacaattatatactctgatattgttgaggtaatattagttacaatttcttcttctagtgatattattattgttttttatgaaaaaatttcttacaattttctttttttggtgggaattcctgcagattaatttcagtaaagataggtgaaaatggttatgatggggttggaaaggcttgtggtgagtttgaagacaaagataagatcactgaagatggtgaagaaagcttatgataagattgaaaagagtgaaagcatgagagtggagataagaagcaagaaggccaagaagcttattgaaaagactctcaagattgctgattctccaaccacaaagtcttatgctttttgatactcttttcgttctactactactagaatttcttagaacaagagtgaagtgaagtcaaacactcccttcctccttcaaactcaaaactagtgtaattttatgtttaatcttcaactcttgcttttcctcttttttttttttttttggtttatacaagatgatgaataagagtctctctctctctctctct

SEQ ID NO: 41744 - DNA, 1135 bp, Cannabis sativa
  modified_base (78)..(103): a, c, t, g, unknown or other
  modified_base (795)..(799): a, c, t, g, unknown or other
acttgtacgcctggtaaaactttgacccctttgcaaagcgtagtttgcaaaatgcgctggtaaaagtaacttttaccnnnnnnnnnnnnnnnnnnnnnnnnnnaagtgacatttcttgtagtgacactattaataggtacctaaggagctttatttggataccctagctttctgtcaaccatttactatattactagaaaacacaagccttaatcattggcaatgttatttttatgagagttctaatataggacaaataagtttttagacttgtttaagtaattttgtgatcctactaatctacaatcaaaattttgagtgagaaaattctctttattcttcatgttcatagtactatatatttttgtaaatttattatgtaatgttgtaatctcatatttctaccatgcttattaacgtgtatatataatagaaatatcttaatttgtttaattaatctctaagttttttattgcatttttattggaatcatttattaaaatctctgactggagacaaaaagggtcaaaatcccacacttcatttcggagcatcaaaggatcaatttataaatatggtcagcgagcattttgtccaaccccataattgactggaaaaagaaaatatattacttcagcttgaaaatgacaatatatatacaaatctatatagcccttgagccgagccaagaggcagaaattaggtctgagcaaattgcagatggacaagtgagcacagcagagtggatatacataacataatatcattataaaaacaaagagagagagagagagnnnnngagagagagagagagagagcatttgttggaaacccttatctcttggttaacatgatctagacctatggcaggacatgggcggccatacgttgggccatgcaaaaattctggaatatattcgaagacaggaaccttgacttgatctcaaattaattgcaatgtttttgcatttgcattacatatcatacattgcagatccctattattattattattatggccatgctaatacgtatccacaatgctctatatatatagaagaagaagcacctcggtcttatagcatgtcattaataatatatatatatatacgtgtgtgttagtttgaggataatc

SEQ ID NO: 41745 - DNA, 654 bp, Cannabis sativa
ttaagtttctaggttcatactatatgacaactacatctcaataaattaattaataaataatacaatctcagcttataataattaagtctctgcatataattaattataattaataatccctcattataatttctaccctttaaatgaatatgagaaagaattacatgatatgatctaattaattatacatattcagctttctaccaaagtttcaaataatgtaagatccaacttgatgatgatgctatttgaaaatgcactaaatagactttttttgtataagcgtcactaaaatttccagacaaaatttcaaaaaaatattaaaatttacgagcactttttatctgggaatttagtgacaggagtactatgaaaattacgtaatatctttatctgtgaaaaaaatagtcagaaaaaattaaaatttcaactaattttcaaagaatctcgcaaccacgagcacaggcacaagtctttaatggcaaaagattacctcagtaaaaaagtaatttttcttatagtgtgattatatgtatacttaattatttcgcgtatgattgtctcttattgccaaaattataagatagatgaataaattatttagtataataatcatattaataagtaaataaattattatgtaatttaccatta

SEQ ID NO: 41746 - DNA, 807 bp, Cannabis sativa
ccaccaccaacaacaacaacaacattttgatcatcattacctctagaattgctaccactaacacataccatttcaagcctttcactagtggtttccttaatggtaactaagaggggaaataatgtctcatcaacacatttttttctcaagtgaatatagaattgtaaactattttcatcttttattctcatgggtgggattccttgcttaggttggaattgaatttctaattggtgcttatgatggtcaattttggtagcatcataaatcaatgtattgaggtgcttgaaggaacaacttactggtatcaaaactcctgtcacttcaaaattcacaaaattgcaacgatctacccaagttccattgtagtaaacaaacacaatactcgtatccattttgacattaactgcacaaatcaaacaaaccaaaaaaaaaaaaaaagtgttataattgaaaaataatataaaaccatttgtgtctcaattctcatcatctctccagaactccattcccaattgagtccaaccctaacaatagctccaataccatgtgaatacggaacaaatttataatttttgttgttgagattttgcgaaacgttgaatattgaagaaatttgggttaggtttaaactaaagattacctgagaagcgaagaaagccttgtaattgaggagagagtgggagaaggagacgcaggcggggtctcgctgaaggtcgccgacgagggcggagcagagggaagggtcggagaaggcgttgagcaagttgcttagattctttgttttgagaaaaagaaagaaagaaa

SEQ ID NO: 41747 - DNA, 970 bp, Cannabis sativa
tttcgtactgtttttaatgtatgggataatattgccatgccatgaaatttgaaaagggccaatttttggagcagttctcttatacaggttgtaacaacttgacttctgattttattattaatacaatgatgtactctaagtgatatgttttcaagtacattaaggttttcttaaacacttgtttaaagatggatgtaatatgtaaaaactcgtttgcagatgtaaagataagcatctttcaaaacaaaatatgtgttgaacacatacataagatgattctattaaatacataaaatatgtttacttgctaatagttgatatacatttattacaggtattattgataatttagtatactacaagtatagaatagatgatgttacattcacgatgtacaataaaatttaaagtgtaactgtttatccactttttcaaaaattaatttaaaaataaattaagctaaagaaaatatatttagaaagtaaatgagatgagatatttatgtatccatgaatcaataatattttactctttgggccatagagtattttacacaagtgtgtttcccagaattttgaactctgaaaatccaaccctttgcatgaagggttcttgacatttttataggtgaagggttgggttctcaagctgacctgaacttggtagggtttgccaaatagaaataagcttactgatatgaaaaatataattaaaaattgactattaggctgggtaggtgagacccaattcctgccttctttggacacgaagaaggagcaggcgaagcgtgtcgttcgtaatgaaaaaaagaaagaggattgtgaccgttgtccgtacgggactgtaccattttatggtgactgttgggcgtgtgtcgccggtttgttgaggaccgttagaataacggccttggacaaaaaatgtgatcatcttttttgctgtgagcctttcaaatgtctgacacaggaga

SEQ ID NO: 41748 - DNA, 3877 bp, Cannabis sativa
ttgtttaagtcaattgcttttgtaaactttgatactttactaattgattttattctctgggcgtggccccgtggactagtagtgtctcaaagaacactgatgccacgtacaaatctcttgtgtcaagtgatttaatttcctgcaattatttttatatatttcctgttctgttttgtctcagcaaaactggtctctatagtaacataattacatttggctgctgcagatgtatacaattttatattcgtatatttctgtaataattattggcatttgcaaaaacttagttttttcagagtgatcttttatcctttcactcccttgagcagagttacgcaattacccttatgggaaagtctgcaatgaactttaccgctgcatgacaaccttcagaatttccaagcgacccttttatacatgacaaatagtggtgccagcttgattgacatttacgtgactggacctacgggaccagatagatttctgacaacacaaccgaaggcctctccattcgtggaggtaaccagcaaaacttttgcctaaggaagtcaagtgggtggatattttgtttctcataaacttttcttcactatcagttccaggaacttctcatccctttcagctgtgtgtggcctttctaatgttgcagccacctgcccattaacacgtagggtatgactctgggtctgagatcatgtagcatagtcctaccttaagctggcagagtagggagtgttgggagatgtgttctgggagctcgagagtaacctactatcgagggagatcgtacggtaccctgttgttttggaacaagcatatttgtaggaataacccctacccataccttcgacaaacattccatttcctgcagcattcccatcgtctctcgagaatttttccactttgacatcctcagcccatattctctcttggataattttgaaaattttactgacttcggctcgtcttttattttctatgggtttctcaagcttcattcctagagttctgctttgaacaactcgggaagcactttccatcaagtctgcatcgcaccatacctaaagaagtaggtctgcataggtgaagacactgatgtaggatatcacttaatggtcggtatgcacggggtttcgggaatgataaccgatgaggccctcccaaaaacaaaaataagattggtactaatatcgaaggggcttcgatggactattggcaagtgtaccttccaaatacaaaattccctaggccttcgacataagcttagacaaagttcctgcccttgtcctatgctttacgtcgcgatactttctgtagctcccaataggtcgctcgtcctcaaaataatgtttcctacccttttttcacggtttttcctcttttgagcaaaaggttgccaaggctcgaaagaacgggtggcctccgacatgatctgagggtcaaccagccaaactcgtgtttttttgaagaagctcggggacactagaacctcctagacttcccacattcacctttcccttctcccctcatcggtgtaggagattcgacctttgtaaggctatctctattactctccacaacacattcggccaatgggtcatcgacataacctcctcttgctagatctctcaacttggccagcagtcaagccacgacctttctccatcttgttagcgagcccttcttctttaggctcgttataacaagcacaacataagttttagatctttcctcagctcttaatgaaagcacaaaaatatttaccaagatttttggaaatcgattatttagagcttaagaaagaagtaaaataattgatagtagacacatggttttatatggttcaggcgttaattatacttagtccatgagtccattttattagccttgtaggtaagtattgcatattacaaatgtatacagtttggacatgcactctctattcctcttgtccctttctaaagaagaagaatccaataggaaattttagtagaggttttgtaggttgaagaagttcttcccttgttcatgaaatatatttgtatttataggaggtttcttgatacacactagcttaagtgtaatatccacaggcgacttggaggacaacaacaactgtggtgacggggaaaaagtgtaaacatgcagagagggtgagacttgatatattccttagacatgtaggcctttaaggaggattgtgttattgtccttatttttgaaaataaatgagttggatgaaattcaacgtaggcattattatcaagacaaaattgagaaacacttaataatttttcggacggagagcgtgaatgataaaattgacataattttagaataggaagagtagaagaaggtagatatgtagaacccacatgtgagacaaaagacaacttaccattgcccattgtaatgtgatttaaaccctaatactgagttggagactctaaaaggttgaagtcgggagtgaaatggtgagatgcgcctgagtctatataccaagctgggttagtaaccacattggatgaaaagggatgggtaacaggggaggattggttttgggcctttgttgggtgaagtaggcaataaactgacaagagggtgggggagatggttgaaactgaaggttagcccgatgatagcacgaaggggttgtgtgacctactttgaagcaaatttggcatttgggcaggtgtgagtttggatgatgagtagatggaagccacggggaaggggatcgaggtggttgagggttgggtgggtgagggtgttgttgagagggtcgagaggatgggcgagttgtattagggtaatgttgttggggattggtataaggtgggttgggagatcgagatgaaaatgaaggggctggagatggggggttttgggagttgtttgggaaagggtaagttggaaaaataggcttgaagggagctaatggaggcgactgctatttgtcttctaggtgagcttcatagctcaaaagaagagcatgaacttcctcaaaagtttgcataacaggacaggctaagattatagtaacaaaagcattatacttcaaaactaaacaatttagtaagtataccaagtgttcttgatctgagattggttctcctacagaggcaagagtgttgtagagtgacttgagtttttcaaggtaagcaaaagcagtgagaccttccttttttaggctctgcaatgtcatggaaaagtcaaaactctgagcaaaagaagcagcggagtaggtgtgttccaaagaaacccagatgttgatggcggtggagaactcacaatttgtccaagcattaagtctaagagagaggcgtagagtcgactcatgaggagccaattgtatctatgccatgctgcgaaatcaggattgactttggttggtttcgaatcgatgaactaaggatggcaaagtatcgttccgtctatgtacacttcaagtccattcgcaatgatgatactttgcctttgcatcctccaaacaaggtatttggtatcatcatgttttactgagattgtttgattgagagatggaatatttgaggctaagagaatagatgaagaagatgaaatagcaggggtattgagaatgttaggggcggttgtatgagaagggttaacttgatttttatcagtagggtttatagtagggtgttgtgtgttttggtcctccattggtggtggggtagaccctctactcactacagatatcatgggagtcgttagggctctgataccatgttagaaggaaagcaataaaattataattattttgcctcaagggctcgtttggtacaccttattgtattatattatgttggattttattgtattgtattagtactattaaatgcaatactatgtttgg

SEQ ID NO: 41749 - DNA, 2174 bp, Cannabis sativa
  modified_base (679)..(689): a, c, t, g, unknown or other
  modified_base (2144)..(2147): a, c, t, g, unknown or other
gtcacccatatatatatataattagtttaattatactttaatgtaaaaaaatatatatatacttatatatataaagtataataattattgcatgtgtatgtcttcactctccattattatattaggaaaaacgatcatgtgtttaaaagatgtccattcgggtagttttgaaaacatcattattattaggaaccacggaatgaattttagattaatcattgagcaacatgtaactcgagagttataaatgtggtgtattagaaaattttagtcatgtttatattattgaactctaataatagtgtataatatgatataaatttgacacatgttaaaaattatgttaaatgtacaacaaaacacgtaaatcaagcagcatctccaatggaatggagtgctgttttaatattattatacaattttattgaaataaaatttattttacacctactacctactgtattagagcacaattatagaattttaactatatattggaggtgatcttccagctattttaaactacccaaatgttatttttttttaaaaaaagataaatattattttggacattgtgttttgcaaaagttatagattgaattagtgttaaatgacaaaatagaccatatattttctaaaatggtaaaagtagaatctgagcttaatttttgacaacttnnnnnnnnnnntataactaacttgaagacaattcttaacacgaacatatacaaaaaaatgtaaataattttatcataacacatttcgatcggattattattaaattttattttgataaaaaatcagttcagagtcctatttgtactattttagaaaatacagaattcattttgtcatttaacaaaacagaagatctaattattaacttttataaaacacaggatccaaaatggtatttaaaaaaaactacccaattgtagctcaagaaattttaagcttatttgataaaagagtactcttttccacaattctttaacatttgagtgaaagaactatttatgcttttcaagaataatgcttaatgcaatgtaagtttactcttttttttttggtggcattgtaaatattattttgattaataataaagtgaaataatttataattttcataaggagaaaataacagctttatagattacgtacctatagatcttgaagtggcaagaactccgagaacacggtacccattccaatttatgacccttccacctgcattttcaattctctccaactcatctcttctgtttggctgtgtacaaataattaattaaaacaccatcacatacaatttaattatacattattataataatattgctttaattaattaattaaatccttacattcttactaacaagtttttatcataataattaatgagaccagagagttaaaaggagattaatatacatcatatacatgtaatatatagacataggagatctcacatatatatttgtgttaatatacatgtattcattattggtaaagaggggagtcacaccacaaaaagctacctttattttcttcaaccatcaattcaaaacccatgcattatttaataattttatttatttttaaagaaaaaaaaaagaaaaaaaaatccgctgttgatcttaatttgaattaatctttagtattaaaacgtattatttttcctagtgttgagaatcatgaagttctatctcaaaactaattggcaataagtagagtagttcatgttcttatatatagttcatgtacaatttatattttattctatgtgccacaattagtttcttagactcatgttcccttcattcttctgtagaaaaagctggaaacaaaagaagaaaataaataaataaatcatgaaattaaaagtacttttcctttgtttaattaaattattaaaaatatatttttgcagaatttatattacactaacagattttggttacacataaatgttattttcatgtcattaaatttgtatataaacaaaagtaaatagtgtcataaacacttacaattttatatttgtaaacggtataaatttaggtggcgtttgataacactattttattagttttctgtttttaaaagtgaaaaagtgaaaatattttttcaaaaacatattctataaannnntttttacttttcaattttataattaga

SEQ ID NO: 41750 - DNA, 2946 bp, Cannabis sativa
  modified_base (1696)..(1705): a, c, t, g, unknown or other
aacgacggagatggcgacaaaatgctagtggcgacggcgacaatactgaggcaatggcataggtaagttactcatatttttctttagtttgtgtctttttggcttgtagaactgaggatcttgccttgcttttcttctttggagtgaaagaaaatttgatgttcttgcctcactctcaactcaaaccagccgacagcaagactcactctcatctcaattctcaagtgataggttctctctagttcaagtcttacctcacatttcttaagtcattctttttttttttttttttgatttaagcatttatatattacaacatgttttacttgggactcgaacccaggacctctaacactcacacactcgcttatggccacttgagctagcctcaagtggttcatttcttaagtcattctccaccttctttttcgttttggtaaaatttgttaaataactgagttttgttgatttgttaaagatgaaggattcaatctcacatttttttattcttctttgctggaaaaaaatctaagcaaaagttggtgcctatgcatattaagcaatattcactttcactttcaccttaggcaagagttatcttaggtcatctctcaatttttttcctttctttttctaatgctactgttatggtttttattagtgatggtattggttataactattagtgatttaatagtacaagtcttgccaattttaggatgttaatatggtgttgtcattgttttatgttttccatttacagattgattacatgactgtgaacgctaattaatttttgttttgaaaatttacgtgcttcggcacgtaacttctaactaatatatatatatatatatatatatttcataatttgattaatttttttttttcaattgcaggccatacataaattaaaggtgaagatatcaatgatattgttttatattagttgatgccaatgaaaatatatactagatttattttgtttaattttgttatcaatgtataggttatttagtctttgaatgacattaataattactgtgactaaatactcgcatatgaattttcaattgggaaaaattaagctttgtaacccaacctaaaccaacccgacccaacccataatgtattgggttaggttggattatacatcaaaaatgatatgaatgggttagaattttataggccaatttaattaagttggcctattaaaatacctttaacccggccaattcaacccatgctcagtcttaactatgatggttacatatttaatataactattgaaacctcctttatatatacattttaaaagaatactaatgattttttcaaaaaaattatgtaaatattttcttaattaaataattaataatatttataaatttaataaaaaattaaaaaaaaaaatgagagaattaaagagagagcaaataatactacagtagaacatctatctaagaatactctattcagaataatttataatttgctattaaaaaattaagtctcaatttgggacagttataaataagaataattttcaaattgtaattagttatacattttttaagtctcgtattaataaaaaatacatctatataagaataattacatcttaataaaacattacatatattttataaatttatttatgtagaattaataattttatttcaaattgtaatatatnnnnnnnnnntatatttactcaaaaataattatagtattaaggattgtttattgttatttttattacaatgatatttttttagtattttaattattattttttattataactctatttagttataacctcttaattattgttaaaataaaaagaataacctcttaattagaatataatttatttgattctaaatatattcctaaataaataaaggtttcactctatttagaaaaattatgaagtgacactatttagagaaattataaagtcacatgtgactcctttatgcctctcctagtcttcatgtgttttctctccccatctcacttaataataagagttttcatagaaaaaccccgactccaaacaatcgaaacagaagaagatttggagggatccggaaggaagaatattcggttacctcaagtagtaaatattttgtgtcaaattttcactccctaatttattttggaggtggaggatgatgaagtgtgtttactttagtattggtaggtagagaggagtgaatcctagtaagaggatgactgatgtttggttggtaggttgactggtaaaactaagcccacgttgttagctagtgttaggttctagtgatttctcaaaccaagcacctgcacacccatttattccgttatcaactcccatttaattattttcatattcatataggggaggggggaactctcatgaatgatcatctcatctactctcctccaatcccacctaacaatttgattttgtggcctccttccattatataactcttgtctgccctcacaattcacataccctttaaaaccatcctatcaactttttctatttatttctttctataacactttatatatagtaaaaatatagcagtagtcaacagctatcacacttatatagagtatatttatttgcagaaatagtttgaaaatgaatctgtcaccattgacatcctccgaaattcagattgaagctgcaaaatttcccccggcggttaagcctcctggattggataagactttgttcctcagtggcgcaggtacttacttatataactctatattctatatatgtgagtggtatattttataactctatcatcattcagtgtactggtcaattacttcactttaataatactttctcatttgataatcagttcttctttcagcgctaggtttggatgataagtcgtttatataagtaaatatttaggtctaccttaatgttttgaacga

SEQ ID NO: 41751 - DNA, 2943 bp, Cannabis sativa
  modified_base (1149)..(1150): a, c, t, g, unknown or other
ttatttccaaaatataaatgaattatggtacttctaaaatattgagtacaggataaatttcacatagtgtttaagtagtgtaaacacttaaaatggtattttactaaacttgcttaaatttatgaaatattttaagaactttttaagtgttggtatgttttagaaacaagtccgatttatgaaactcataattatttgagtaactattagacatttggttaccattggtgacgagttaccaagtgtaattataactaaacaaaataaatggtaaacgctagagatgtcattagtgaaaattatgagatttcttatttgtgaattatgaattctactcttacgcatataaaaagtaactcactcgttgagctttagtgtttgttgtctaatattgtttgtaaagtcttgtcaaattgttcatcttatggattgtgtgtgttttcttatggttagattctcttatttgtgttattttttgaccgcgtgtctttgttatgatttggaaaagtatttttgtacttggtttttgtttgtgttaataagctagtactatattttaggttaattttaatgtatttttaatttagttttactcttgttttgagtaattttacgttttttattttttatttttacagatttaaaatagaagaaaaaaagaaaatatcgaaagaataagatgaaaaaaaaaagataaaaagatcacataaaagataattgtacacaagatgggggtcatgcctaggcccgtgtcacgtgaagccctggagactaaggattttgccacacgagctgcggcataggaagtccatgtcacggcccgcccatctaattcaaggcaaattaggagttttcagcgtggggttattttttctatcttttttattcccttattggctatataaaaagtggacctcagttattttcgacaggcaattcaggaggcaatcaaggagtacgaattttgaagaacaaagtttatattgaagcctttctcaatagggttttcagtatttttttcttctctattttcttcttctattctaaatttatatgtatgaaatggctattatttgacagttcatgagtagctaaacagttcattaagatttagattgatattatttgacattaatttttagttttaanntgatttaatttcccctcaatttctatgttctattttatttgtacttaatttcatttaattgtctgtccatcaattaattgtttatgattttgatacaaaatttgaaaagtgagtgtcgattatgctatatggaaatagaaccaaatttcgatataggacgagagtacctatatggtttggatagcttatagggtttctgtgtttaatgcctttaacatgtttaatttatcatgagggtagaaaatttacatgtaattgaggtttatatatataagaagactataaattaccttagtaaacctactattgcatagaatttaataataggaatagaatcatgttcaaccataatcaatagatgtaattaaaatcatgttaaacttgttatttcattgtttctttatttgttttctcatttttaattttctcttaatttctcttttttttttttttttgttgttgcattgatcataatttgccaagggggagattgtaagaatcatggttttgtatttgtcaaattatgagttttctactatctagacattcagtagttccatctgagtttgttttttactggtttatatgtaactttgacagatcagcattttcatgttaaaatatcttagacagttgtcaatgagatcagtattttcatgttaaaatatcttagacagttgtcaatgagttgttagtgagttctcaaagtcagttttgtgtgagttggtgttatacatagttgattcttgaatattctaaccaactcccactcactttgattctttgatagagatttttctctgctagggcagaaatatttttcttcttcttcttctttgttttttgcaggtttctccattgttaaagagttcaagcttctgtgacgaaataataatagaggttgtttcatctaaagggagttcagagtcatagccaaagggatttcaactaaatcgaagcaatgagagcttttcttcgaatccaaggggacttagatttgaatcttggttggttaatcgagatcttagggtaaattaattagtgtaagaattttttgttgtattgttttacatacatttgatttacaaactagagttcgtatcttgacattgattcttattggaagttatttactctggttaggggaacctaagcactaactgcgtagaacgtattcttagggtaggctaagcttgtaaattactttctgtttcttagcttttaatagtcctttttaatttatagtaaaactactaattttatattgtgtaattgaataccattgttttaattagtagcttccattagattggttttacactattgagacccatttaatttttggagaagaatttatttgactttgaagtcaacacaatcaaataaattcactcacaataaattcataattgaagagtaacaactacaactactactcatttactattctgacccacattcctctactaggaacaccattaaccacaacaaacaacatataatacccaggcggagcaaccgccgcactcgacggcgcgtgaccctcactcacatactcataccatttacccttattcgacttccctttattttccaactccctcatatccaaaaccaaaactctttggttcattgcaaaagaatgtgtagtaaacgatggagccaccaaattgaccgaaatacccttcactccgttgactttgtagtttgaccgaaaatgtacggaaatcgtctgattataactcacctccttcttcactggtttcatcgaagttatcaatggccgattagga

SEQ ID NO: 41752 - DNA, 930 bp, Cannabis sativa
gtggaggaaacagtggctaccctctcattaaactcaatggtgggcatctcgtctgcccacacgatgaagctggcgggtaaaatcgatcaacaacctgtaactgtactcattgatagtggtgctactcataacttcatttcattagaggttgtggaagccaccaaattgcctatctctcgaactacagggtacggaattctcttaggtactggtgacaaggttcgaaccgaaggggtgtgcgcacaagtttccttggacttgggtacgttatgtgtggtcactgacttcttgcctcttgagctagggggagcagacgtaattttagggatgaaatggctggaaactctcgggaatatgcaggttaattggcgcaccatggtgatgaaattcgaacaggggggcacttgggttactttacaaggggatcccagtctttgcaaatccccaaagagatcttaccaaaggttactggaaatgtaatcagaacaaggattgagatcataattggagaacttgttaatattaaattgtagttcaatttattggaaaggaataaaatcgcccagcagagtgactccgaactttagaagtacaaggataggtttggaaccggatagacaaaggacttttgattttgtttgaaggaaattttatgatataaaccagattagtatatcagtcagataaggatgtagaatggaaggttctaaataagttacattgtacatcatattctttatactcaggagtaacaaagatgtataatatcagttattagagtactgttaatgtggtactgatgcagtttaaagattcaagtttgtatattatttatataatggatggaagagctatgctgattcaaagtgtatagatattaaattccaagttgggaattttatctttcttcaggttgttccaatgagggaa

SEQ ID NO: 41753 - DNA, 807 bp, Cannabis sativa
aaaacaaatatctattaattaattaatttaattttctttattttgaaatgtttgaagtttttgagtgagagattggataactctagctacgatagatatggttgctcagaaagcagtagtaactttgggcagctttattcccacgtctcaatctctctctcgtgaatttgtgactctttcttctgtcacaaattaccatttgcatttttgacaccacacactttgtcacccaccaataaagcatcaaatttcacactttataatcatgataagcaccaaaaccaatatcactgccctccctctcttcctttctaatttctccactcttatcattcccacccatcacggctcctccactcatctcaactagtcaatcattaattttctttccattacacccaaaacataaaatcaactatgaaaatgaaacccaccatgttaaaaacacacccatcaacctcattttgtattttattaatattagttccacaacacacctcaatgctatatatatatgtcaattaagggatactagtgcctaacacttgtaaatttattgttttataattagttagtgatattttttaaaaattattaaattattaaattatatgagatcacctaatatttaattaaatcaataacaatattaccacttaagtggatgctaaacatcattatgtctttcagcgcttttcttattcaaataaaaggaacaaaatatgaaaagagacatattaatatacaaactatatataattaaaacaaggttaattagtaatttttccccccgaattttgacatgta

SEQ ID NO: 41754 - DNA, 855 bp, Cannabis sativa
cagtcaaagcagaagaatcaacagaaatattggacaattgtgaggctggtggggagcacccaaaagaggtaacaattagcatagagagctgctataagcaaacttccatatctatttatttcaagactttcttctttgactgcatgattttaatctgtaatctaactagttcatacatttacaggcctgggctagtagtggaggcagtgaatggatttcacagcgctttcacgagcttgttcctgacatggcacttgattttccttttgaattggatacattccagaaagaggtattggttgataaagttttgttttactagttcatacatttactaatgcttgtgctaagaatttattatttgcgctggtttacaaagcaacttcagaactctttcttttggctcaagttttgttaacttatggtctacaacttcagtggaagaactgatacgttttagtttaaccattgtgccattctatctctttgtcatgatatattaggcttgacaaggtttggagatctatttttgctgtagttgagtcattgaaaatgttgaagtatcaaagtttgcattatatgaattgtaatgacaatgtctaagcttctttctgttctccatatgactaatcactgcaatagtgcaatgtgtggttgaaatttattgtttttagcctaaataacaatttcctcttttgatatgtaatgcccacaggctatctattatcttgaaaagggggagtctgtgtttgtagctgctcatacgtcagcgggaaagacagttgttgcagagtatgcatttgcattggcatcaaaagtatgtcatacattcttgagttgctttaattacaagtt

SEQ ID NO: 41755 - DNA, 5193 bp, Cannabis sativa
tttacaaacattgggtacttatctgctaaaaataaatattaaatttatgtcacttacaaatttaaaactttgagtacttatgccgatatttattatattttttatattcttttctttgagtctttcaaattaattaagaaaaaattgaatgaaaatagctaactttaatcgttagaagaaatgtcgttatgaaaaataaccacaactataaataaattataaaagaaaaagaaaaaaaccaaaagcgttacttccacatgcgccttaggcgctctaagctcatgagatgttgatcaagttcaaatagtgttgaaacttaatccttgtaaccacttttgtaagcataactacagggttatctacagccccgaaattctggagaatatccttcatcaatgatttcactaacaaaataaaattgaacatcgatgtgcttagtgtgaccataatggacttggttctttaccaatcaaatggtactctgactgtcacagcaaacctccacattcttcttaacaatacccaaatctttggtcaacccgagaagctagatagcttctttgaatgcttctgttacagttatatattctgcctatgtagtagacaaagttatagttgactgtaatgtggatctccagcaaaatggtccacctgccattgtgaacacataaccagtatttgatcgacgcttatccaaatctccaacgtagtcagaatcaacatacccgacaagatgtttaccattagtcttatctctctcaaacttcaaactaatatatacagtaccatactgtagagtccacttcattgcttgacagtgacctttaccgagattgtgcatgtagcgactcatcatactgcatgtgaaatattaggtctggtgcataccattacatacattagggcaccaacgacatttgctatggaatacactccattttcttcttttcaattgtggtgctaggtgaaatccttgcacttaacttaaatgaggtgcaggaggtgtactgacaggtttagtcttctcgtttatgtcaaacctttgaatactttcttcaggtactgagtctgtgttagatagattgttcttgcaactctgtttcttgtgatctccatcccaaaattttttttagtttctccaatatctttcatttcaaattatgaacttaactgagtctttagggtttagggtttaaggtttgcattcatccaatcaaagaaaaaaagaataaaattttaatgttcatatatacatatatattttacgtataacaatataaaatctaattactcgtctaaactaaatgaaaatactattgtttcgattagatattggatatattagatttttgcacagcccatccaataacctatcatcaattagatattcaaaaataacatcgaatccgattagaacataattagatttccaatgtttattagtagattgtaattgaatcaatcggttatcattagattgaatcaatttatgcaccctcctaataaaaagaaagtatactgaaatgatattttggtaattatctcatataagagcatcagttgagatgaaataagagcgttatattttggatcccataattatcttactcgatttgatttccaaattaagaatgatctttaaggatgcttagagtgttgatgatgagttcttggatgacacatttaagtatttaattgataagatcaatcattatatgtgctctttacttgaactaaaagattgaacccaataaggaatacatgcaaaaagacattttgatgcttaagtcactcaattattctctcttctactccaaaaattaaagttgcaaagtgaatccaaggtctccatgatgaatcaatgatttcctagcctactatttatagagagttttggcaaatcgaaaaagtttgcactagttagtgtaaatctttctaagtatattgagtttttgacaattaaattcttttaattatcatttcacttgtacttaattttttaaattcaaactttagcagtaaaatcttcaaaattattgaactgttagtaaatttaaagtgtcatccgactgactgccaccacagactgcttatgtgtacattcttatatacgtgacacatttatagcagtacatctaacattatttaaaactaaataaaattataaaaactaaaaaaatattattaattttgaaataataatattagttgtatcaatataaacgtgctacgtgtactagagtgtacacataagcaattcatgttagcagttatctgtgaaaaatagatgacaccttaaatttgttaatatttcaatggtttggagtgttttactaccaaaatttaaattggagagttaagtacaaataaaaatatagttgagagaatttaaccgcaaaagacttcatattatttacctattgcattttaactcttctttcattagtttccttctatccctttttcaccaaaaatgggttggttgttgttgtatatatttttttttctataatagtttacataataactatttaagttattaaataatttataaaattaaatttaaatattttattatgcatttattaccatataaataattatatatataaaagaaattggacaaagaaaactctttctaaatgtcgaacaaataaaaaaaatgtacaagaaaggtgttctaaatttttactaatatatacagaatagaatataatgtgatttgattcttaacaatgcgatttcaaacaagtttgaaacaaattgtgatctaatctggcatattctcgatgtcaacaatgttaaatgtcgtactttttttttagactcaatcgtagttttgggcacatgcacaacttgtacatttttgtcatgatgagattgtgtaattcacattttagaaaaattcaaatctgttgtatgtatatttgattatttggtctcaccccagaaaaatcttggtctgattttattgttattgtttactaaattagatacatgtagattcctaattcaactttattttatgtcaaatcaaaaaaaaaaaaggaaaataatgattctttattttattttatttgcatttacagtaattttgaataataaatgaaatactatttagattgttgtttttgttttttgagaaataaatttagattattgtttgtactatctctactgtttcacagttttatggtatttattcttttttttttcttaaaacacgattttatgtattactcttacctttatatgcatgtccataattgaatgataaatcttttttattttcagtcaataaaaaataaaatcttttctatttttttcctttgaaacataatccaccattattgatattgaacacatattttggaatttaggtgggccacataagacctcaaattttaataatttgcccactgacattattcctttacctctttaccaaatatagttgtcaaatgtcaagtagaagcaccatagcatggtgatggtggtggtgacaatgtactgtgttaatttctagaccatgctatcaaacaacttgagccacaccaaaatcacatatatttattttgttaccctttttccttctattttcttaactttttttaataatgattttttctcaccctatatttggtaaaagggaaaaatcgaggattttttttttttttaagataaaggtcgagaatacaaaattatttgtttaattggaaggaaaatatgataaaaaaaaagtaataggagagaaaaaaatgagtaggtcctatcaatatttttctctcaaattagaaaaaaaattggaggagaaattgtttataacattaaatcaaaatctcattttctttttttgaagctgaaattatatttctcttataggaaatgaaaattacttatccctctccttagttttcttttatttttatccatatactatttttgattttattttttatttacatcgctgtaactaatttttttttgcacaaatacggtaaataatcttttgtggtattaatacggatatatgttttattttgaaaaattagtactgaagccacaccccatcaaatactgcgatccaacaaagaaaaaagaaagaagaaaaatgtgcgctagagcttcacgtatgacatcatctcctctagctctggcaagttttcgacaattattattggaattgctaacctttgactcatgagaatgactgatagaggaggaagaagtaatattgcaatttgggttgcgatataattaaatggttatttaagttaggttgcgatttaggttgcaatttgcgattggacatgattgagattgtaaatatgtttaatggtgatttagggttgcaatatcggttgcgatttgtgttgtaatatcagttgtgattattcaattttgtttaggaaataaatggaaacttcatgcgttggtcttacaatttaagttgcgactggggcatggttgagattattacgtgatttgatggtgatttagggttacaatttgggttgcgatattggttgcaacttttgttttgttttggatttcaatggaagcttcacgtgatggtcttgaataatcacatagaagagagaatgactcagaggaggaagaagaaagggattgagattgtgatatatggtttgatcatgatttagagttgtgatatgtgttgtgaattccgtttcgattttagaagaaaataaacatttttcatggtgttaagtaattgggagtttgagaggaagaacacatacttgattaatctttgttgttcttgttctacagtagaaatatgggttgcgatgataattcagtgttttaatttcttaaaatcaagagatatatgcgaattgagttttgatttgggaaacttcggatatgggttgagatgaggattttagggttgcaaattgggtgtgcatttgggaaaattgtgatttggttttgctaatgtgggtactgattttaaatttaaagaagatacactatgcagaaagaacaaaaagagatcgacaagctctgtaatggtagtctttggtggacacccattatctccaataatcacaaagatagaaatttagcgagaaaagaaaaaataactttgggtgattctataatgtacccccttaaaagggatgtactgatgcacccctacttgtttcggcatctagaaaaaaatttagt

SEQ ID NO: 41756 - DNA, 528 bp, Cannabis sativa
aaaagaaaaaaatctttcacggcgccgaattagaaatggggaccaattcaattagatgatgatcttcgaaatggtataagccaatgacgcatgagttatacatggccttatatatatggatccaagttctagagggtgtattaatatgtagaaaaagatatttataaattacatttgtttcgttcttctatgtcggcctgtccttttgtcaacctcaccaattttagactcatcataatatgttatgtgtgtttatatataataagaaaatatgaccctacctcaaaaagtttacagggtctcttgatgcacctatataccatatttctttttatgtacataaatataattcttttttttatataattgtcaaaatataattatttaagatatgatgtaaatttttaaaatattcaaacgtgtcaaaaataaaataatttaatttttatttatacgtctgacaagattgttttaaattatactttttgtattatatataatttattttgaatatatacaaaatttata

SEQ ID NO: 41757 - DNA, 2087 bp, Cannabis sativa
agatattacttgattttataaattagtccttaaaattaaaaataatgtaacaagaaaatatttatcaaccatatacattgtcattaaggaaaaatgagtacattaaaaaattctatcagttacctttgaaagccaaaccatctcctctaaaacgtgatcccaatgtgttttcggcctacgaggttctcggggagcttcaagcgcctgaaagaacatgtcaaaaagtcaaaaaaagcaactacaggaagacaattcaatttatggacagttcctagaacattgagtgtaatcatcaagttggagcatgaattaaaaaggtcactgcactaatttgatttctcacgagctttacataccatttagagtttctgtccctaaccagtaaggtgacacgtagaatgatgatatcacgttgttacatgttagcattgtgacataccatacagcatgtataaatgcacacacgaaatagtataatgaataagataacaagcttcagacattcataaacaaaccttttggcgtttagctcttgattcatgatcaagcttagaccttggacctttggaagccatactttccccagctaactagaccatcctgaagattgtagcataagtttaaaacctggacagagaagtatgatattttgcgcatgcaacatccctaaaagaattagtacaatacatgtacaagtacatacataaacccatcaaacatagaacaaaaattctggtgaagttatttgaaatgttggtaatattttactagatttctaagatcaacttcagaaattaagaaatctgaagatcggtagctaaggagttttccgaagaacaacattttagccatgagtttgccagcacggtataacattgatgctaaatgcgtatactccattaatctgagcatctgagctcgtagaaagcaattgcagcacccaaaaaaataaatctaaaagcagaaactccaataccataaatttcacacaatcaaacaatagaacttacaaaattaaaatatacacagatatttgtttgtttgcatgggaataaatagcgaaatattcacatcatcgactgtcaagttttctgaaagataactaaatgagtaattaaaaatggcaacactgtagaattattttgtttaagagtaaaacatactgaattcgaaacacactggtttggaagcctctataccgctcgtaacagctatctatctagctcgagatgaaggaactaattcaaataaaaataatggtttctccaactcttttcccaccgttcccgcgattttttctctccaaccaaacaaaatattattaagaaaaataccagacctaaatagaaggcgagaacgaaacactgagtaagtcgtgataatcctacgatctttagagaacgaaaaaggtatttaacaaaatgaatgcagatatctgagaagaggagagaggggaagagcctgaacctgtcgccgtaagctggagaagacgacggagttagggtttccagtcgggttcgggtcgggcggagaaggcccgagtgacaacctttaccagatccgaataacgaaaaccagaaaacaaaagcgactcgagccaaagctgtgttttttctctctcctcgtttggctgctgctcgcttctcttttcttctcttaggcccttgttatttactgctaccggttcatcttgacaaaactctggatcaacggtggatcattgatcttttaaactctgacggctgagattctttttctaccttctatgttacgtttcgcacctcaattcgtccacttatttgtattgttatatgatgatcacccgacttgtataataaaatatatcaaaatatattttttcttatcatttttattttttaattcataaatataataaataaatatatattaaatattaaaaaatacatgaaatcgtattaaaataaaaaatttatatatattatataaaaaacatatgaaaataagattaaaaatattattgaaattaacaaaaaatatataaaaataaatagaataaagttattttattttgttttaatatatttttttttataaaattacactgt

SEQ ID NO: 41758 - DNA, 1918 bp, Cannabis sativa
tttttttttttttttgagaatctagaagctttgaaattgttagagataataatgattttaaaaactaaaaatgttatgatgccgaccatttatttgttactcttacttttagatatttgttatttgttgggaatacataattgatttttgataattagcaatgtgatactatagattaggagtaggcttcttaaaaaaagtcaaagatttctagtggatgcttcatacattgccaatggcaatgacatatgccatcaaaagactcatattttgttgttatcttacaaaatatgctaatctttccatctttttcaaaattatttcattcacaactcaatttcattctctttcttttttctttttttatctcactctttcatccactttctaccacaaaatttatgaaaagatctaccatcactactcgccattcttattaaggataatggcggcaaaaccacccaaactttatattttttaacacttaaccacaaaaatcgattttttgaagacaaaactacctaaatttccattatgttttgctttgtacccttccgtcttaaaatcacagttaagtgccacagtagactgcccacgtgtacagacttgtacacgtggcaaatttttagtggcccacgtaatatcaattattaaaatattataaaaaataatttgaaaattataaaaagaaaaaaaaaattattttcttttcttttctttttttcttttattttctttctttttttccttttccttttttctcttcttcttcttcataactgaaaaaatcatagcacccagccgcctacccatgacccaaccttctccgaccccctctcacacactctctctaacggtgcacaacgtcagccttgtccgaccaccccatgccagacgggctacagaactgaaccccacgacccaaaaatctcaaccctgatctgccctcttctctctctccttcgatctttctctcgcccttttaagtgtttctattttttttttttcgttcagttcaaagaagaagaagaataaaggaaaagaaaaatgaaaggggagagctagagacctcaagatctcgattcccactttgagaatgactactagactaccggtggtccccatagtggaacttgccggactcgcactgtgaacgaagacggagctactgagctcgagaggaaaaggaggcgactgagtgctaggatttttttcagttaagagggggaggcagctggggtggatggatgagctagggtttttttttttagttcaaaagaagaagtagaagaaaaggaaaagaaaaagaaaaaaaaggaaaaaaaaaatatttttataatttatttatttttataatttttaatttaatctttataatattataataattaatattacgtgtaccactaaaaatttaccacgtgtacaagtgtgtacacgtaggcagtctaatgtgacactaaattgtgatttttggacgaaggagtacagagcaaaacagaatgggagtttaggcaattttgccaccaaaaaattgatttttttggttaagtgttgaaaaatataaagttcgagtagttttggtaccaatatcacttcttattattttatgtgatttttcatatttctttctttccctttataattttcatttatattttcttagcatctctatctacacaaaaatgatcatataattttttttatgatatttttaaatttgaaacacaaaattgaaaaaattcgatagaattcaatggaaacttgatacccaataagaatttaataataaaaaaaattttgctcgatgaaactcaatgactgctcgatgtcattcttaaaaaatacttactttttagaaatttttacactaaaaatacaaaaggctaactttattacatatatactacaacacggt

SEQ ID NO: 41759 - DNA, 2004 bp, Cannabis sativa
caacgaaggctagaggattggggactcttagaacaacaaatttaggactggaaaaagagtggggttagaatttgagaccagtaggggcgcattgatggggctagcacctagggaagttgatctgtgtgagcttgggaaatgcaattgtcttagggatgcagaacaagtagtagaacctctaaaagcaactggcataagggctaagaaagaggggccagggtgagtttagttctgctagtttggtgggggtgttggctaggcattgttggggtaaagctaggacttaggttgacaatagggatcacttgggtggagatgaataggccagctgagtctgtttgatctccttcctgaagctagaaagagaactcttgctgggtacgtggcccttgggaagcactgtgtgtggcaatgttagcaacttgttggcttggcattttcatgagttgttttggttggggaatttctagtagtcgtggctaattgtaataggggagtattacaaaaggtccttggtttggtctagtggttccttttagcacattctcgtaaggaagcggagggggtgtggggattcatcagtggccctcatgtagtcaatgcaccatgtgtaagtgtggccaaggcatccatagtagtagcaatggtctcggaggtcttcatacttcaatttcagccatgtagcaatggccatcccagggaagagaatagatatgcacctcatgagaggtttagtgacatcaaacataacatgaatccgtaagtattaatcctaagttttgagtagggatggttggtgtatctctagcaagactccaacaatttggcccacaagtctagtgaaagagatagatcatcaggaaaaaggaatgttatggagctggacccaaaaagggattttacaaatagcttcaggaacgaggatggagtcaagattaggtatttcaagaaggacagggcatttgtcagaaattcaaggttagtttatgatggcttgtcgcctatcaccttcataatggaaagcggctaagtacaaattagagtttaatgacctttctttgacactaatagggaaccgtcccttccaacatttttctaagaagttctttagagaattatgattatacctttttgtagtgtagagggtggccatgaggtagaataagagtggagctggtggaagtcattcatggattttagcagagtcaacaagagaatgcatagtattctctgtatcagtaaggttcaagactgcagagaaagaacatgctaagtcttctataattggtaaaataaatacaggtagaaagaaaggaaaacttgagcaaaaatggtaaaagacgcaacctgggattgggtccttaaataggctatgaacagaatttcaaaatgaggaaaaatttgggggcttatacgattataggtacactcaagtttttaagaagatagaacttttagcatttaatttcctttttaggttggggattatccaaatcaacccacatgccaggttggtagacatagcgattaaacctagaaacatgcttaggatacgaaaggatcctaaaaattaagtacaaagagggattatcattagatttactcagagagaagatcaaaccggcaaagctttcattaatgttgatcaaggcttgccctaaatttctttagtttcgagtgggatctgacctcagcaatgtgaagggaggttgttgagtgtccatcgccataaatgcagtgccaccacgacactttgaagggtggagaagatgtgttaggaagcaaaaaggttggaggtggtcatgatgaccactactgttagaggaagatgaagaggataccagcgaggtgagcatgctcttacagaagacgaaggtgtctcgaaagttccagtccttcttaggcccaattgtccccaccaatattagttggtattggaagaggatagtggccatcaaagaaaaattcaagaaattaattgacttgtagcaatttggaaatgaa

SEQ ID NO: 41760 - DNA, 3280 bp, Cannabis sativa
aacccttttcttttaactcatccacattaattatatcacttattaatcacaatttcagaggtggagaataaattaattaataaacatgataatgttttcagaatcaataacaataaagaaagaactacatcataagtttattccatgaattcagatttttaatttatgacctttcattattagtaacaacacataatattttatcacacgcattagatcaaacaccttatgcatacaatcacacataaaacaaaccatgaacaaaaagtaaatgaatgaaagagagatcgtacaaactcgaaaactaaagaataaaagtaagaaaaaagaaacatacttggcaggaggcttagcagtatcagcagaaggagaagcaacatcagcagttgtagcaacagtagtaactttttctttcttgttatcaacttgatccaacgacccagaatctttagacgaaagattaagcttcaaatcaacagtttcagagaaccctctcttaatcccgttgttcttgaccatctccggcactcctccggcgacttcaccacatcccttcccgccgggaagacccaagcgtaattcggtctcttcgaaattaataagctccacactacccatggtttccgtctctccaattttccttccttgagaaaatataacaaacccttttcccttctgtgaattctgtaaaatatcgtttgcttttcagttatggcgaatacgagctcagaaaaatacaaaatggcgaaactgagagtaagaaagaagaagaaggcgatattgggaaccaaatggtctaacttataagacttttttagagcttaaagaaaatgggagagatttcgacggttaagatgaggccacgtggatagtgaaatatagcagattgtcgggggaggagtgacgtaatggatgacgtggaattttagaatgattgtggccaagtggacagagatatacgaagttggggttggctgtgagctctgttgtttgctttttactattttgtttcctaaggctccaccaatgagaattcgcttctattttatgacaaaattcttttattaaaacaaataaacaataattaattaacagacaataataaaagtagtttggtttttgtctttgacaattataatatgtattttccaaaaaatatatatattaaagatgctttaatgtataattggtaagttgcttataaaaacatgtataactggtaagttttctgaagataaggtttatcaaaagagctaatctgaataataaaagtaaattttctagtgttactctttctttcatttagtaaaaattgctttgaagataagggatttgttttggcacatgcatttatctttcgctttcttttgtcccttttaacatagcattgctagttttcttcttctcttatcttatttcaattttcgacaaatccagcaatgtgatgtgtttcttaaacttctttggttggtcttaaatatacagaattaatttatttattttgccttggacgttcaaacatgagtcattttcttataagtataggcttcactcataaaagcatcacaaacacaataaaaaacacttaccatttccatgattaaatgtgataaacaatagcacaatatgtggtctacaactttagtagctaacttctactcataattaattatttagttgatttctttaaatacgattttatcacttatgcatatccataaagttaaatttccatctccacaaaaaaaaaaggggtttcaatcaaaagaaaattagacactaccaattatcgttctccaagtactataataattaatagttatcttaattcttatcacaattccagcactttatgtggtgtcccttccaaacaaaaaataatacattctaattcttggtacatatgtaaatgtttcaaactttctggtacaaaattttgaaacaaaaacttaaaaataccaaaatatccagcttgtgaatgacccaccatgttgtacattgtttaatatatatatttttttaaaagaaaattattattattattttgggggtgtaatgaagaatctgttatgggatgaagtggcacagaatgatagatattattacgcatcattaggaggaaaatgggatctccacctgttgattcggggttgtgtgaagtttcgaggaatcatcagacggtggagaaaatcagtgggccccacatgcaagaacagacgataaaagtcaactcaacttctgaaacaaaacctcccatgtgagtgactgaagtaggggcttcatttactgggcccccacaagcccagcccatcaaaaaacgcacaataccatctcaagttgcgcctgcttgggcttgatctcctacgtcctatgtatcgtactcccactttagcacgcgtgttcacagtgaaagaaagtgctcaattgagaacataaagtttgtacaaatctatatgtaaaaaattaatatattttcattatacgaaatcacgggtaatttaagatcaaaggagacattaattaagatttgcatgtctaaagtaatatcttatgaaatgattgcaacagaccacatcaatttttttttttttaatatcatgatttatggccattatgaagttgtattgtattgtatatacatgtctgtccctctcgagtattttattttattacgaagtagtttattttattttatgaattatagtttattcaagactacataattattattctcatgacttttttctttaaaagggctcatggctaatatataatatacttttcagctcatttgtctattgttctacttttttcccttttcaattagtcagttgtcaattgttatatttacaaagttgagttatggcagaataatgtgtatttttaagaggtttgtctacacaatatttaattggaaacaattataatagaggtgtcatttttgttcttataatatatatttaaaatttagagaatatatttttaaaattttaacatgaaaaatataaaatcacataatgtatatggttttgaaattattgcctgaaaccatcttggtcaccttattgtagtataggccggttgtcatggtggaagatatgcagctaaagtcattaaagccatgaggattaaagaaactctcagttggttaaagaccaataattggcaacatgttcaaattgagaccgacagtcttacttcagtacaagctattcgaagtaaccaagcaatgaagtccactttcggccttttaattaaagactgtcaacttttgttatct

SEQ ID NO: 41761 - DNA, 5412 bp, Cannabis sativa
  modified_base (5359)..(5387): a, c, t, g, unknown or other
acctaaattttaatataataaatatttaacttttttcaaacaaacttacttcaaaaaaaaaaaaaaaatcaaacaaactaataaatatttaatttcctaaaataaaattaaaaaacaattaaagaaagtaaattacctgtaaaataaatgacttttttgtatttcccaatgcattgatatttattgatttttgacttaacaattctaaaactaacagaaactttagagtcaatatgtaataaataaaatggacacatgttagtatttgattgtaggaacaggaatgggatagagagtttgggacaggtgaattttattcctacaaaagactatatatttctattaatataatttaatatcatctctaacataatttaataattaacatacaaatttactaatcactgacaatgcctcgtcacattattagtatggtattagaataacaatatcctattcgaaaaagcaacagaaatattatggaccccacatatgtcttgtattttgttggtttgttcatttatacttaatttgtttatgtataaatatgtatagcctcggtagatctcatccttggaatcggattgcaagataatggagttggaaaacaagaacatggccgtggcagatgatgaaaatgacgagaacaaatcgaagaagatgaaagtaaagaaggtcggtggcattagaacattgccattcatttttggtatgtactgttgttcgagagactttgattattatatatatttagttcaagtttaactttttactttgctcatatggtcatgagtgcatataaaatttctatcaatatagagttcatccaaaataacaaacaataaatttgtacaccacttgtgtttaatttcactcatcgattatcaattagttaattttagttaagaaaatattatatattgctataactatgaaatttaaagctgacaatttctttttttctttttctaaaattcaatttcttttagtaacattgaatttttggttttatggtagcaaatgaaatatgtgatagatttgcaagcagtgggttccatgcgaacatgatctcatatttgacccaagagttaaatttgccattagtgaaggcctcaaacaccctcactaactttggcggcaccgccaacttcatgccactcattggtgctctcattgctgattcatttgccgggcgtttttggaccattgtcgtcagctcaattgtttacctactggtttctttcttcacctttctatctctttttatgtttcagttattcgtaggtcatacttatgacatgtggtaaaataaaagaagcattaacagttattttttctttcggtaagaaaaagtaaaaaaaataaaggtattctctctgtatctaatttatagttatctaagtacatcttattttctttcgaaaaaaaaaaaaaagtacatcttattttattgtagtaatagagagctactgaaagaatgttaaaagagttgcctcgttttgataagctatttgtaaatgccagctgtatcatcttagctttgctcagaattaattaatttagtgtgggagcatatttcgcaaaaaaaaaaaagtttgtgtaggacgttaagaaatttctcactagaagtcaaccttagcccttgtcttatctacctacgttactccgtaggcacgctcaatgtacagttaatatctactgaacgtcaaaaaccacgagcatttttaccaaagatgtttatttgtgcgtgtatgtgaagagtgtgtactgctcccctgcttttgtgaggagtgtttacttctttaatttcttggtcatgctatttctcaatttggcctttttttccctaattaaatttattactttgggaagtcctatgtttaatataaaatgaaaaaaaaaagaaagaaagaaaatctgctgttgaatattttaaattctaagaaatttcatcaaaattattaatttctgatacttcacgtttatattatgtgaaattgtaactgaaaacaaaaaatgatagcatttattcgcattaatattaggtgatttgtgtatgataagccttgttaattttgtgacaggggttaatgagcataaccacatcagcactgctcccatcgctgcggcctcctccatgtccaacccaaacaaactgtgttgaagcctcatcctcacagttatggatcctttacatggccctgctccttacctctattggctccggtggcatcaggccctgcgtcgtcaccttcgctgctgaccaattcgacatgagcaagtccggagtggccaaccgcggatggaacttcttcaacgtttactacttctgcatggggttggccacgctcacagccttaacagtcgttgtttacatccaagacaacgtcggctggggcttgggtcttggcatccctacggctgccatggcaatatccattgtaatcttcctaatcggctcgccgctttacaagaagatcaaagctgggggaagccctcttgttagattggctcaggtggttgtcgcggcagtcaagaaaagggacgcagtggtccccactgaccctaaactcttgtatcagaatagggagctcgacgctgatatttgtttgcagggaagtcttatgcactcccatcaattcaagtgagtcattaaatcttatagctaataatcttcatttattaacaaaaatgttaagttagaaaaatgcttgataataaattatctaatatacacagtactatatattaaagaataaattgaaaaagaattagatgctattagaaattttaaagtgcccaatacaataaatggtggtgtttaatttcttttttattttatctgagattcgaactcagacctccaaaacacatacacccacctatgagctcaagtgatttatttaatttatttgttattactaattttttatattatatgaaacttaataatattaacatggcacttacccataatattcggattcaaggtgttctctgatattgctcaatatttatttttacgagtattgttattaggtatttcaaaatattcaataccatattgcattggtatgtatcttatgatattcaggttaaggtatatactttgttggaatataattatatattagttgtttaaaatatttttaataaactattgtattagaagaaatttacagttaaaatcccatgtgttttaattgttatacacttaattttttatttttttttatttatttctttgttttttttggtggtaatacccacttaggttcaaaatttgttttgcaaaaaattgatggttctcttaaattttgatgtgtgtactcatgatatgttttcattgcctcaaataattttaataaatttattatgataaaaattatttaaaataaaaattaaatagaaaaacatcttttttttctcatttctatttacttattagatttttttaatctttaaataaataaatatgaaaatagaaaacataatatttttatttatttttaaatttaaaataatttttataatgtttaaattttaaaaaaaaaaaatgcactaataaaagcatgacatatgtacaaagtgggtgacccaattgagacttaataaccaaatataagacaaacttcaaatttacaaacaaaattcaactaaatggagtattatcacaaaaaaaaaatgtttagggttaaggtataataagtaaaacatactggggtttcataaaaaaaaatttattctataaaaaataaatttatgtttactttataaattgataaatgtaggcctatacgaaatacttttgtttgcttactagcttctcaatttaagcttaaaaataattagaagcacttaaattgaaaagcttaatgtttggagtatttggtttcaaaattaattgtatttttaatcataatgatctatttccaggtgcttagatagagcagctattgtaaccccaggcgacgagactaagaacacaacaacccctccaaatctatggagactatccaccatccaccgagtagaggaggtaaaatgcatcattagaatgcttcccatttgggcctctgcaatcctacttgtcactgcccaatcccaccaacacagctttgtcatccaacaagcccgaaccatgaatcgccacgtggttgtcaattcctcttttgaaatccctccagcaagcctctccatctttggcactatcactgtccttgttggccttattttctatgaacgcctcttcgtacctctagcccgccgtataacaaaaaaccccgttggcatcacgtgcctccagaggatgggagtaggatttgcggccaacatcttctccactattgtatgcgcctttgtagaaatgaagcgaaaatcggtggcagccaaccatggtttgctcgatgaccctaaagccattgtccccattagtgttttctggttgatccctcaatttttcctgcacggggtggctgaggtcttcatgtctgtcggccacattgagtttctctatgatcaatcaccagagagcatgcgaagcacagcggctgcattgtattggattacgatttctataggaaattatgttggaacgttagtggttactctggttcatcattatactgggagtggtgacgacaattgggtgcctgatagaaatcttaataggggaaagttagaaaattactacttcctcgtaagtggaattcaagttgttaatttagtgtactatgttgcatgtgcatcgttttattcatacaaaccattagaggaggtaattattaaagaagaagacgttgaattaaagaatgatgaagagacacccaaggaggttagaatgtgacaatatgtaatactggttggaaagttaatatatatttttataccacatataagtaaattatttatcaacaatgagatagaatttattttgtgtctcgtaatgatcaatcgtacaaaatcataatggtgatacctcagacaatattgaatgcaagatgtaaagataatgtttaatttgttagaaagaataaataaataaatgttagatttgttacaatatttattattattataccaattataaagtataactcatagctctactagagttaagcacgactttaacacacattagagtcatggtaggtcgaaggagatctcacaatatctatcaccagtctcaatctaaggaatgtaagtgtgcaacagggaaggtatagtttcagagcaagagtgtgaatagatataatcagaaaaagggaccaagctcgtcgaataagccttttaaggtaaaagaacgattgaggaggtcgtttgggttgcggaagtggaatttgttggaatttattttacnnnnnnnnnnnnnnnnnnnnnnnnnnnnnttattaacatcctaaataagaactt

SEQ ID NO: 41762 - DNA, 1752 bp, Cannabis sativa
cggcgcacttcaatagtgcaccggcaaaacatgcatttgctggcgataataagcgccgagaaaagttcattatcggtataacaaaacccttaatccccccaaagtgggttttagaaacacttttcctggcgcaataatgtgcgggcaaaagtcattggtgccaattcatctcaatggcacaaacacttttaccggcgcagtgtttgcactattgagatgaattggcgccaataaattttgccgacgcattattacaccggaaaaaagtacaaccgggtttaattttgattttcctatttagttttgccggcaaaaaaaatgcaccggcaaagctttttttaaaatatattttgataatttataataataatataataaaattaattttaaaagaattataattaaaaaaatatatatttacattgataattaaaaagtatttcgatcgaactaacatacaaacatgttcgattagttataaaattagtaagtaataaaaattgttaatagtaaataaacaaaataataaaagatgttcgaaaaaaaaagtaatgctctaaagttaattataaaatatatattgttctaaagacgggtaatatcattgtcgttattgttttgagtctcgggtagatgcgatgacgatctagcactgggaggagtggggaatggcggaagatccatctgaggcaagttgaaatcaggcacagtctgagagagatactcaaactgatctgcgaatcgcttgaggtagactttgttgtgtttcatactgttgcctcgaatactgactaacttgttgtgcctcctccactttcttctgtaaggcatcatattgttctatagtaacagtccgtgaggcaggagaagttgtggcaggtgctcttttacccccaactgctttcagtctcaggagatggccaaaacctctcacatgtcgagattattcacaaggaaaaaaaatctgatccaaattttaaggattcatctttggtatgtattttttaaaagtatattaatgtttttaatttatcttgttatgtatatttaattttttagctatttatattagataactgttttttgtgtttaattgtcattttatgtaattgaggtttaagtttcattctttcttatgttattttaggaaactggtcttactgtgtcagatttacgtaatttgcttgctttatgtaattctcttgtggtatgctttaatttttttttaattaactagctatttcgtgtttcaatatattattttattattttaggctttttatattttgtttctatattaattgttagttttgtttaattagttatctaatgtaactggttcctccatattttcttaaaaaaaaactagtttgtatgtttcaatttatctaatgtaactagtttctgcaatttatattggtaattggttttcctatttagttattatttttttttattttacataactgcctttaacattctaatttttaattcggttgatttaaataattggttctcactcatagttttaactagttgattactgtaattggattcagtgtgtcagattccaaagtctaacaacagtgacaactccaatgtctaactccggtaattttccagtaatgaagacaattctgatgccttttttaatgattttctgacaacgataacaacttcggcaaatattctaattctattttttactttttttgcggctaatattttattttagttgataatgactatttt

SEQ ID NO: 41763 - DNA, 1530 bp, Cannabis sativa
gcctacatgaacaaataatgacttgtgagtgtcacccttttgagcatgatagtacacatagatatataattgcacacaaagagatcagcaccctctgacataagattgtgtatgtgtgtttacctctcttaattgcaagacaagttcctccatcttcagagactaaggactttctgcaacaacagaatcagtacagatgaaaatggaaatgagtgcatactatcctaactcatctggacaacaaaaactggcttcatttactgcctgcaccctttcaatgccaaaatttgatgccccactattcactccaaactgaagctctaaatacaatgaaaaaatataactccattaacacatatgcatcataccaataatcaagattctttcaaatagttttgtgttggaacttagctctgtttggcacaattgtcgaatcggtcgtaaaaatatatagacctaaagcgatttaaataagtgttatagactcaaattctatatcatacatctcaactaactaataaatatttgttatatttacaatttgcttaattttatttaaatataaatttgatgagattttttattttttattttaagctcccgaaaagtatgtaccgaaacatggtgtctatataattattttttactattggagtctcacatttcaaatatactatttgctttgttagtttcgaattccatcatgtattgatggcttgctagaaagtcatcttattggagttggctattcgaatggtgtaatttccataatttattcttgacagaactcagtatgtataatattgatgattttgagctagttctaagaagaagaggatgattatatagaataatggaaacttattccactctctataattaatatgatcatttaatattaaatatatgaataagataataattctgctgattttttgattgttgcaatcaactactagaggagcatatatatgtaaccacaccactaagatttttcattccccaactctcaccccttaattctctatttgtatacataatacaaccttgattgatacacttattactatattattatcaagaatagtcaaatatttaagtagaacacaataggtttacgtacatataattagttttactatacatcactcacttcactatctacacttgatgtctacataaatctctaagaagaagatatgggaccatgtagaaaaaatctagatgtgaagtttatatataagaattatttattaatttcttcgtaaacttcttaagaatattagtcaaagtacaaaaataacaatacagaaacagttgtaaaatcatttgtggtggagagaagagcacttgacttgaccccgttaaggtggaggattcagaatttttttaaacaaataataaaaagacttattaggatttttactacttaaattttaacaagtaccaaatcatgcctcttgaatttttctggccgttaaaaattcccctgaactattgagattattagatttaaggacgtttgtctaa

SEQ ID NO: 41764 - DNA, 1546 bp, Cannabis sativa
aaaaaagtgggtagatttaataaagtataacatgagggtatttttgattaatagatacaaaaaagtggtatttccaacttatccctaacttttactaggaatacaccaccccaccaaggtttcaaaatgtgaaggtagctttgggttgagtcttaagaaaggtatcttatccgccacatcacaaactttgtactccctaatacattcaaatagagcattgctataaggtaccaaaaccgccttaaaatatagtgagtcataaaaaaattatttttttagcatttatttagaaaaaaaatgtaatatttttcaagtaaaaaaatatataatgttaaaagggaaaaatattttttaggcctctaacctaggggcttaagcacaggcctaggctgcctatgctcaatatcgagtctgggtggcgccttataaatattggttaacgatattccataaaaattattatattaaattatatgaaatctaatttctcattcaaatataagttttgacagaaaagtaactcgttttctagaaatttctatttgtatttgacaaataataattatacattttttcagatttttaatatattaaattatcacatgttcaaattaaataaagtgacagattatcttcagcacttgtgtaatactctttagcaacttcgagtcaattactacacaaaaaccagtacgtaatacacattttcaacatttataacttattacccattcatatctatagtgtttgtttggcattgcaaataatagttcaatatataaataaatatatatatatttatatatatttgtggtgctacactagatgccataaaattaaaatatatattaaaaatgactattgtgaataaagcctaatttgcatatagaaaggtcaaaactcgagctatatgtgttcatctattgtgattattatttatatggctatccatatatgcaataaagtaatacaaactataattcaagtgacaattaaagagttgatttatttttctatttttgacaagctctatcaacaaacaatatttatttatttatgtatatatattgtatactttctaaaagtcaaaccccaatttcttttcttttccaattaaataaaattattgaacataagaagagatctaatcattatcattatcattatcattatcattatcatcatctttggctagtcaagacgatcccaaaaaaagctcaaaccaaattgatatgatacatggttatacatagaagaagacaaggaacaaggaaagaaagaaagaggaagctagtatagatagttagatatatagatgaacatatatgtatatatcaacatatataaatgataagcttattaattttttgaacaatgtaaaggaaatagagcctataatatataagtagattttttttttctttttgcctcatgtattcaagtttgaaacctctctaataaatagggagtggggacttttataattatttataatataattttaaattgggagatatcattttctttgacctatttttatttattt

SEQ ID NO: 41765 - DNA, 1215 bp, Cannabis sativa
  modified_base (907)..(909): a, c, t, g, unknown or other
catgtacatgcgcccctgctaatgagatactaattttaatgtctaaatatgtgttcattacaattataatacaaagtaaatgtaaaacatatcatcttgaatatcatcttgagggggcgtagtaaaaaccagtttctaattttaggctgttctttgggaagttaattagttagttataactaactcagctgagttgattagctaggttccgtatgtgtataaggatgaccctttcatcccattttagcatattcattttttttcctcaaatagaattgatatctatttaatattaaatttccttttgaccttttgttgtcaccattaggcaccagcactgagtatttaaatggctgatatttatatattgtatttatgtaagctgataatataacgacaaattcttatctacctaaatttgattttatatatttatgcaaaaaaacaagcccattacacgcctattacaatatatctagctataaagtcaaccccacgatcatttagaagagaaaacgtaatgtttggtacaatggaaacccatgattatatatttaagcaaatcatatatccgtatatatgtgtccaagaaacgtaacacgagtgatgtataataataaagacatgtatttttgatttgttcaaaacatttcgtgactacaaattcaatcatatatatgaggttcttcaaagagagtacaggttgaagagtagtctaggttttaatattgtattatattgaattatattttatgcaatatttttacataaaactatatgtggtattaaattttaatggacacctaaatatataatactttagtataaattaaagttaaacatagtattatataaaaatatgatatataatccaattcaatgtaatacaatacaatacaatacgacnnnatacggcgttccaaacgagtccatgtattaatttactcctaccattttttttatccttcaaaaaacctactttcaaatataaaaataaaaaacccatatttctattatacaatacatcaaagtttttcgtctctataattatctttacctcattaaaatattatatttaattaattaaaataagaaaaaaagaagaagagattaaaaaataggattatcttatatactattttttaaccaaagtgtaaaaatgaaaatgccccaaaaaatatttatttagacatagaaagaagaaaaaggaaaaaa

SEQ ID NO: 41766 - DNA, 3808 bp, Cannabis sativa
atatatatatagtagagtgtcagtagtgggaggcaaaagataatgttacacagaacaataccaaaaaaacaatccactttttatatatataggtacatacatatactaacaatttcatacaactttgaaaaccagacattccatttgctcccaaaaaaaaaattcccactttctttttcccatataccaccaatttttccatctttttttttttaaaaataaaattaaaaaaaaggctgtcaaagttgaagaaataccccacaaagaagttgaaatctcaatccattcccattccccacttctctttattttttttccactttctttattttactcaagtatgtattttttttcttctcaccacctaatgcatcaacaataatatccatgcaatttatatatatacacacacacaaacacatacctttccatctttaaaaagatttctctctctctttctttataaaaaaaaaaccaaactttgaatatttgagagctcaagtgtgagccatcttttttcttttgacacatatttgatcttattattagatttgtatggcaagaatggttaaatgggtcagcaaagtttcattttactgaggcataaagatgacacaactctgacattttcctgagaaagagaaagaaaaattaggaagaaaacaatatataatcaagtgggcacactactacaattttgcttcacaaaacccaagtagtacaatgctgtgaagcactatttttcacttctctttgtagctgagctgatcaaagttcacagctttatattatcatatatcaacacacaagaaggttctttcactttatgccctcttttctcttctggttttaaagatgggatttttatgtattcaaaagagtcttctttttcttcttcttcttattctacctcttctctgttcatctcaagaaattaatgtgaaaagagtagatactattatgatcgacaaagacaacatcattaaggtatgttttcaattttctcatttaattttgatcttggtaaatatgtaacactaacaccccatatatgtatctatcattataattacagatggatcataaactattgcttaatattacaattcatggatttcttctttgggcttcaatgggatttttgatgcctattgggatcctcactataagaatgtcaaacagagaagaatgtggaagaaggcttagaattcttttccagattcatcttatttcacaggtaagactttttacattaatctttatttattaaattatttataagaacatagtaaaaaaattaccatgttattataatttatacagtctagattaactaacccaattgtgttttttaaacccatttttaataattttattttgtttttgattaaattactttacaaacaatatctctacagtttttcaaaagataccatttatgctttgagactttgtttattgaagatatataccccacaactcaacttttaatgatgatcatgaaagagaaattaaagcaaatattaatattttatgtagcccactgattaatttgttggataactaaaaaatataaaaaataaacaaaagtatctaagggagattataatgaaccttagagatcaagaaaacacagtagtactgtttagtatttctaatttcattaaattatcaaagccaatctctgatcttattgttacacaattatgatgttaggtgtgtcaatatataaattgagtcacaaataattaactttttttttctttttttctttccataatgatttaagaagtgttttttcattcatttattcatcacttaattaattaaatttgtccattttttttggctgtacagactcttgctgtacttattgcaacagcaggagcagttttatccttcaaaaacttcaacaacacattcaacaataatcaccaaagaataggagtagcattgtatggaataatctggttgcaagcccttattgggttcttcaggccaaacaggtaacactcaattaattaaggctaattagaatttttccctatttccgttagtcttttacatgtattaaattatgtttatcgaactttcacccacgtcatgggcccattgacgaaaattcttaaatccaacaatctcaataattcaaggagaatttttaacgacctgaaatcagtttagtgctcagaatggccaaatcaatatttccctattaatttgaaacattatttacaattgttgggtttttttctctacaggggagctaagggaaggagtgtttggttttttgcacattggattcttggaactacagtgtcattattgggagtgtttagcatttattcaggtttacaagcctttcatgagaaaacatcaaaaaaagtatggatttggacctcacttttcactattgaattatgtttcatatgccttttttacctctttcaagacaaatggagttatatacaaaaacaaggaataatcttgggcactactactactacaaatccaatggctgaggctcctccaaaagaaaaacaaaaagaattgagtcttgttgagaattaataatatagtatagtatatagtaaagtatattaattaattatatatttactaaccaaaaatccatttcttgtttcttttttttttctttctttgtttattaatattctcatgtgggacacattggtttttacaatccagtgttgggggtgtttgaagtttgtatattggattgtgtaatgaaaattttgaacctttattagttaaaatttgtaatgagagataataattaacaatgcagtgcaaatttttttcaaattcaattttggtaatcatagcaatcccctaaatttcttgaaatatattcaaggctcaaccatataatctttgacatttttaagattttctctaaataaatattagtcaaaaaagataatgattctaaaatttatgattatgtaatattctctaaccttaaatgattgaattgaaaatacttaagatacttttagactaatgtaacaacaaccattaacaacctaataattcttatccttatatacatattaaatgtaaaattttgacaattaaggaaaaagctgcacataaccagttgcaatagcaatacccaatattataatagggggaaggattacaaaggcaccaattgtggcaaagaaaacagagtcattcctttgagaaacttcattcatgtaagtttgtcttttgatatttctcttctgtgaaatggttaagaactttgcactcactttcttcaaattcttacccaatggtatgctgaaatcaccatctctgtcccgaacaagttcgacaagttgatcgcggatgcttagcttcccagtcttaccatcactctcgtaacctgttcatcgttagggtattttggtcattttgaaaaatattttgacaaaatttgaatttgatgtactatttcgaattatttaacaaaataaaagatccaaactggtaaaagtttacctgatgggctagtagtagaggaaagttgctccaaaagatcaagttgtgaacgagcagagttcaaaggaccttttaagaaaattatatacatcagaactttaaatattaataacataaatttattattctatgatgatctatataaataaataagccaattttcttgcatatgatattagcacaaaaagtgcagttcttccattagtatttagccaatgaatataaatcttcctagccatacatttagtttttactgatgatcaacttatctagttaaaataatcttatagcttagtaaact

SEQ ID NO: 41767 - DNA, 2164 bp, Cannabis sativa
  modified_base (2101)..(2103): a, c, t, g, unknown or other
cgaaaaggatcaatagagaagaaaaaagagttattgaagaaggagattatacagtccagttggagcacttacatgcatgatgtgtcagtatatggttggttgatgatggtgatgggtgatggtgggtgtcacctctcacactaaaaaataataaaatacccttgtttggcagccgccattgctgaaccgtgaaaccaccaagatcaaagatctctcaattttgtttttagcttgactacaaggaaattaaaaatataagcactattattactattaggctccatatataaggctacacatattagattccaatgcatctatcatagtacatgcttttatctatttggtacatatttctatacctctaattgtagtatatactcttatatatatatatatatatatatttatatttagtggtagtacctacttcatcattcatcaatcacgagaaatacataagatataaatttcattgcttaaatgtttttgtcttctgtctaaatataaacgtgaaaatctttaattgtttgtcacacatggctcaaactaaataacacattacaatatttatgattattagaagtataaaatttcgctgctaataattcctcattccactagtaaaagttaatagcaacgggatttgtcaataataatttgctgacaaatttacaatatttaatcgctaaaaatgagtattattgacacccccgctattaatattggtgtcagacacataaactgatattattagcagcgacggactaacaacgagccacttctcctttaatactttttgttttttttattacatgttaatattgattaaaattaaaattaaaactaaaactaaaataaaaaaaaatattactcatttgaataatttagataacatttactaaaataatcttaaatttaaaaattaagttagtaaatgtctattttttttaaaaaaaaaaaattaacaaaatagacaaatatgaaaaattaattaataaaaattataatacatttactacatattatttttttaaaaaaatatatataataattaaattaagtatataattttttcagtattacatattaatatattataataaaatcgaataaatatattagatcattaaatatattgtattattaaaaattaatatactgtagtaataaaattatataccacaaaacaattataacaatattaaattaatactcaaaatatgtatacataccaaaaaaattatatataatcattatatataataaaatagaaactaatttatatcatcttaaataaatgatatactatacacaacaaaaattacatgccatacaacaaaatatatatacttataaaataatataatattattaagaaaattgtatatacaataaaataattaatataatattaattaaatcatgttagaccataatagatagatacaattgaaattatattcctaatttcacatctattgttaaacctcttatttgttttatttatttttgcttagttcatttagtttcaaaatttatctattcgattgccaaatagaaataagaattcaatcgattagtacctagctacagtaatcgtagcaacaatctcacttacttaagtattacttgttaaaacgatatgtatagtacttgcgtgttaaaaatatgggttatattttcgttgggtttttcaatttgtatttttcgtcgaggtatctagatttaggttgagtggattatcagattgagcgaattataaaaatttatgtacttcttcttataaagagatcgaatgtctcaaatttgaatctctttcccccacattaaaaaaaaaaaaaaagaatttatatatagatgaatttttggcttttggtattattagagtatcttaatataatttgacaaaattattggagatcctctattaatttcttcgaaaaagtactgtgattgatattatctgtgttttttatttttcctttgactacacctaaatatgtatatatataaataatgagaaatgagaaatgctatatatataaataatgagaaatgagaaatgctaatagcaatcctcatatatatatatatatannnactaggtgaatgtacgtgtcgagccacgtattgctagttttatttaagattttggtctttt

SEQ ID NO: 41768 - DNA, 2602 bp, Cannabis sativa
aattgaaaaataggacataatggcaccatagatggtcaaggtgcaagttggtgggcaaagtacaaggctcaacaattaaacaacgtaggaaggccacacatactccaaatcttgttctctactgatatccaaatctccaatctcactttgcttaattctccttcttggttccttcatcctctctattccaggtttgatttaatttgattcaaatccacacttttttttttctcatttctcattaattaacaataacatatatgacattgcaaataaatgatacatatttgcagcaatattatattccaagggcttacaattctttctccattagattctccaaacacagatggtatcacacctggtgagttaattgctttattacaattctttatgttttataataaaaaaattaagactttaatttcataattttatttgtggatgaagattcatgtagcaacgttcgaattgaagactgttacataaacactgatgatgattgtgtcaccataaagagcggattggatcaaaatggaattaagatgggaatgccaagtgaacacatcataatccgaaggctaacatgcatttctcgagataacaatgtcatttccctgggcagtgaaatgtcaggtggaatcaaggacttgagagctgaagatgtcaccgctgtcaccgcacaatctgccattgccatcagaacggcgtcgggtcgtggcgggtacattaaggacatcttcacacgaagatttgtgcttaagaccctcagatatgtggttcgagtgaatgcttttaacaccaaccatgctgatgattatgacccgagtgctctatctgaaatttcttctatcaagtgccgtgatatgatggtagaaaatgttactgccccagctaagtatgaagttatacctggaaacaccttcactggtgtttgcttctccaacaccacggcgacaattttcccagacctcaaaacttctttcaaagttgagagttgggatttgttgccccatgctaattccaagaatattgaatgtccatatcctcaagataagttgcccattgaagatgttcctttgaagacatgttctttgtgaatgttttaatgtactaatgaattatatcatatctacatgtgtttttatcatgtcctaaggccattcatatatttatataataaattgttaggtttttaaatttaaaaattgatgagcgagtatctcttatatgtattcaagagtgtgtaactaactatgttatttagttgtgttaatcaaactgtcttgtagtaattcaaaaatatatttaatattagtttgtttttgtaaagttgatgttgggtgagtagttatcgcaaaaaacaataagtgctaaagttatttttttttatgaggtttactttatttattttaatttttaccttcatttttatattctttaagatatactcatttttatagatgatgttctcgttataccctttaagttaatgtaaaatatgtgctaaatttaagtgaaaagtgagattatattggacaatctacttaaaaaaatgagtatattttaatgaaatataatatgaggatatttttaaataatgaataataaaaaaaaatatttctcaacttatccctttttctattgatgattttgttgtgatactatgggtcggtcttgagattacatattgggcctaagacgatttaattttgagagtgtagaaatttacactattcctaccccaacaaaaccccccatcagtgtactaacaacgttattataattaacattttcccattctaagcaaagcttagagataaataaccacaaatattgtatcgtatccccgaaattcaaaaactcttcctcgatgatcgagaaaccccctaaaaacacaaatgcaaaacattcacacccagcaaagatttgaaaacattcacacctagcaaaagatttgaaaccctagaagccaagaacttgcttgaatctatccgaacacacacaacaataagcacacacaataggtcaaggcacaaataaaaaaatataaatgagaaaggaagagaaaacaccctaaatgaatttggagttcaccccaaatcttaggctacgtctctgtcaagctgttttagagatctagcttgagttttcactaatcaacaatggcgattatacaagtttgagcttccagtcacaagaatcaaccaggtaagatttttttttttttatttctttgaatagatgtttttctttttttttttctctttcagactaactttatgttttttttccttttacatgtactctcttctcaccatgagagtttcactctctctgctatatctctcttggatcttggagctgaaagtggtttttgggtttaccagttttataaacttctggtctctatatatagagtagttttaagagtggaagatggtttcaatagatgaatccaagttagtcgtaaatgtccatccaagggtggtggcatcaagtaattttggttgttaactaaaaaaaataatcataaatttaagaaaataaaaataattaagattgtaatttacaattgtatatgatcaaaaagaaacccttt

SEQ ID NO: 41769 - DNA, 725 bp, Cannabis sativa
cttcttaattatgtctttgactaaaattcaaagtgataaataaagacttatagcttaagaaagctatcttgtacaactaagcacaacttggagcaagttgtcctcttgaaggctatatatatgccttggtccctttgatttagtatcccattttgaaggcaattttagtgagggaggcagaaagttcaacatatatatatatatatagagagagagaagaaaagtgttaaagagagagtatagtttctcctaaatatttgtagtctttcttttgttaaagtgagtgtttctcctatactaaaaaagaggtggtcagtatgcttttcttgagaaaagttataacctctttgctataataaaattcttcttcatttatacaattattttgacttaattttatttaaggttcacattttcatatctcaattttagttttatttggtgcccaagtactacaacattcttaatactattttgtactattttaaaaaatataaaatccaatttatcatttaacataacaaaaagtttaattaataacttttataaaatacaaggtccaaattattatttaccccatttaaatatatgtctaccattaatcttagtatatattatttagggctgagatgcaaaatgaccctaaatttggaaactaagttagtaaatgtccactttttaaaaaaattaagaaaatggccaaatctaataaattagctaataaa

SEQ ID NO: 41770 - DNA, 3338 bp, Cannabis sativa
tctgtttctttattgatgttgaataaaatggattacattgaattggagttttatttagggcataaaacccaatagtatcatcatgtccaacatagttaaattaccaattcatagttcctggattttagactcaagagccaccaggcacatctgctctaatataagtttgtttcaatgtgtatgcaatataactcctacaagattattactacctaatggagattttgtctttgttcatcaaagtggtactattgctatcacataacatattgcactaaaggatgttctttttgtgccaaatttcaaatataacattatatttgtgtgttgcttaaccaaagacagttgtctcaggtagaatttacaactgatacactcatcttgcaggatctaaccaacaagaggacgattgacagaggtgaatccaaggatggactttacatactggatccaacacctgatgcttctccaatttttactgttacagcaaacacttggcatgctagactagggcatttatctgataagtacttgaaattgttaggaaataagctcaattgtaacacttctgttttacataaagactctccttgttatgtgtgtccaatggctaaacaaaagagactttcttttcccaataataataattttgcttgcaaaatttttgatcttgtgcattgtgacatttggggtccttaccatgttccttctcattcaaattttagattctttcttactcttgtggatgaccactctcgatttacttggatttatcttttaaaacataaatctgatgctttaaatatcattcctcaatttctatcttatgtccaaaatcaatttaattgtatgattaaaacctttagatctgataatgctcctgagctaactttcaaagatcttttcttgaaaaatggaattttgcatgacttcacttgtgttgaaacccctgaacaaaatgctgttgctgaaagaaagcaccaggacttgctcaatgttgctcgtgccttatattttcaagcacatctacccataaaattttggggagaatgcatcatgacagctgcttttttaattaatcgcatgccatctcccattttgcaaaacaagactccttatgaattgttattcaaaaggcaacctgactatcaacatctaaggaccttcgggtgtttggtttttgcttccactctcactactcataggacaaagtttgatcctagagcacgcacatgtgtttttcttggatatcctcaaggattgaaaggatatcgtctttattatattaataatatgcaaattttcatctccaggaatgtggtctttcacgaacacatattcactttcctcaaactaaatgataatagtgctgatatagaccctttcattaccactgttataccttctaacacaatatctaagacacttgttgaggattatcaacatataactactgatcccactaattccaattcatgtgcagaaaatatcaataacaatgttgctgatacagataacacaccagcaaccaccacaaatttgcaggaagatatacctggagatcctgacatgatcccttgcagaactacaagaatttcacggccacctgcctatttacgtgactttgaatgttattctacaatacaggacaattcttctactcctcatgccttaaataagtacctttcatatgcaagattaactgaatcttacaaagcttttatccttgcagtcacttctttgactttgaaggagccacaaacatataaacaagccattcaattcaaacaatggcttgatgctatgaatgctgaactcacagctcttagaaataacaaaacttggagtgtagttcctcttccacctaataggagggtcattggttgtcgttgggtttataaaattaaactcaatagtgatggttcggtcgaaagattcaaagccaggcttgttgctcaagattatacgcaataagaaggtcttgatttctttgacaccttttctcctgtggccaaaatagtcactttcaaattgctacttgccatatctacaataaaacagtggcatactttacaaattgatataaacaacgctttcttaaatggggatctcaatgaagaggtctatatggctttaccaccagggctaaccattcctgactgtgattctacaggtaccaatctcgtatgtaaactccacaagtctatctacgagcttcgacaatcatcacgacaatggtacaagaaactcacagcagccttgatacaaggattcacacaatcaaaggcagattacactctcttcacccgtggcaaagatgacaattttattgctttacttgtatatgtggatgacattgtcaccacatggcccaacattgaagtcttacaccagcttcaagctaccctacatcaacaattcaagctcaaagccctcggacagctcaagtactttctgggcttcgaaattgctcatgcatctcatggccttttcctctcacaaaggcaatatcattgcaacttcttgaagataatggttatattggatgcaaaccagcaaaaactcccatggatcctaggaccaagctagatgatcaacaaggggagcccttgacaaatccatctgcatatagacaactcattgggaaattgctatacctcaccttgtcaagacctgacatcacctatgttgttaacacattaagttagttcatgtctgcccctagaactccacatatgcaggttatttctcatctgcttaggtactttaaagggagccctggacaggggctgttataccccagaaattcatctcttcatctcaaaggattttcagactcggattgggcctcttgtcccattactagaagatctactactggattctgtatcttcctaggagattgtttaatctcttggaaaactaagaagcaacctacaatttctaaaagttctgctgaagcagaatatagggcacttgctgccacaactagtgaactcacttggcttcaatatctcctaaaagatttccaaatacatcaagatgccccagtcttcatttactgtgacaatcactcggccatacacatcgccaacaatcccaccttccatgaacgcaccaaacatatcgaattagattgccacttcattcgtgacaaaatcaacaactcaacaattcgattaataccggtcttaagcaacttacaactagctgatgctttcaccaagcctttgccttcaaccactcttgctactcataccaacaagatgtctgtatataatctatacagtccatcttgagggggggatattaaagactaagtgttagtctaagttact

SEQ ID NO: 41771 - DNA, 4039 bp, Cannabis sativa
ttataatataaatacttaaaataaaaccaaatcaaatgagattcacttaggtacgtctcactcaccctctctcttatatcatatatcaaataaaaaacaaagtccaaacaaaatttttctgaaagagagaaaataagagagcgtgcaaacacgacatagacaaagcgaaccacgttagaggaaggcctcttggtcggttggtaatgttctctaactgaagccttaacaccctctctctccttctatcttcatccctttgagtccaaaactctctctttcttatcttactactactactattacggccttactatactctcttaagattattcttgttctctctcccaaaccaaacagaaacactccaaaatatccctgctatcttctcttcagtcccacgcaaaaacatagaaatctttccttaattttgttgtcatgaggaaactctgtcccaatttcgaccgcgaagatggtctcgatactgtcctcgaggttccaatccccgaagaaatgtttgcttcgaagactagtaatatgatatcatggcagaacatgaaggcttggatgacatcatctcatccttccaatatgaccgcccttttcggtggccgaaacgccgagatccagctcttgttaggagttgtgggagctccgctcattcctatagcaatctcttatgatcacgaactcataagccgtaacatcaaagaccatcctatcgtaagtaccacatatatatatatatatatatacttggataaccaccagccttaattatattcttactgattatagtattaatttgtgtatgtttaattaattattataggaggcttcgatggcgaagtacatagtgaagcaatacacggcggcggttggaggagagaaggctttgaattcgatagagagtatgtatgcaatggggaaagtgagaatgggggcttcggagttttgctcaggagagaagaatgtaaaggccatgaaagtgaagaacttgagatcttctttacaaggaggagagatgggagggtttgtgctgtggcagaaaggaccggagctctggtgtttggagttggtcgtttctggctgcaagatcagcgccgggagtgatggtaaagtcgcttggaggcagaccccttggcaccactctcacgcttctcgtggcccacctcggccccttcgacgttttcttcaggtgctttttctttgatatttctctccactactgttacgtaatagtaaaaaatataaaatcaaataataacaattctatttacatctactgctttagtctttaattagtaaagtaaagtaagtatgtatttattgttaatttgttattaatggttagattacggttgttgttgttcttgttgttgatgaatatgacaatttggtgtttctttattacgaaagttgataggacacattaaaattagttattttctttttctataggtgattgccatggtctttaatttgttgaaatacatatagctggacccaataccccaacaactaaagtgttttcatttggagatttcgtagactttacataggaaagtaccaaattctaaattccatgtttgttcatcttggttaaccaacgcctgccccacaacctaatcagttttttttttttctttactaaagaaagaaacgtgctttcacaattcacacttaaacttggtcaagggatcccacaactactctatagactttttggagtaattagaaatatatgtatattttaaagtcaaacattctcgatgtgaatacaagaataaaatataacaaagcgattgtgaagaatgtttttcttttccagctacaaaaatcaattaaaaataatacttaggtacacgtattatttttaattagttagatacataatagattacactcacagatttatccatagtctcattgatttggataaattattctattcgactggagtactaggaaatctagttagttgttggaaatatcaagcccagctcaacctgttgaacaaagccagctattattatcatctcaaattatgggtaataatattaatatagaaagaaaagaaaaagactattgggtacattaatgtatattaataattgaattttatattgaaacagggtcttgatccaaggtctacagcaaatttgttctccaactcagtttgtgttggtgagaaagcaataaacgacgaagattgtttcatcctaaaactggaagccgattcatcaactctaaaagcaagaagcagcaacaatgtcgagataatacgacacactatatggggctacttcagccaaagaacaggtctcttggtacaactcgaagactctcatctcctcagaatcaaagccactggaaacaacgacaacatattctgggaaacgacaatggtgtctttgatacatgattaccgaaccatcgacggtgtgaacatcgctcactctggcaaaaccactgtctccctatttagattcggcgaaaactcgacgggccattccaggacgagaatggaggaggtttgggagattgaagaagttgattttaacataaagggactttcaatggagtgtttcttgcctcctggtgatcttaagaaagaggaagaaggttgtggtttagtgactagtagtactaatccaaagttacccttcaaaattcgatcagcttcttctaggattagtgcatctaaagtggccgccattgatttggatgaggaggatgatgatgatcatgatgatcatgagaactttgttagtactagtgatgaagatgaatcagtgtaaattcttttggtttcgttggtttctaatttttgtacatagcacatatataaaatagccttcattccatcattgtattatttatacatgtttttggcaatagatgagcatttataaattagtcatattttgtaccatatgaaaatgaaacacgacttgtgatctgtcctctgttggccttttttgttcttctctttcttcacaatccatctcttaattgtaaggtctcctgagtctcaatcaatttagtgttacaagttatggttgtaaagcgataatgacaattttggtttttaccaataagagagtttacaaatcaattatgaaacatttcatgatggtgtcttcatatttcatttctctgttttgtttttaaaacagagaacttgattcaaaaccatgtaactaacaacaacaaaataagagtcctcatctcaacagcatcacccaatgaggattaattcgaaatcacgtcactctatgctctttggtccactcaatatcaaaagctttaagattatctgagatgtagattaactagacacattcagctggaagaattgttctacattctgatgcactgaaaacagtggcttatatacacagaagagactaaagaaagctgattaataaccaaccaaagttgttacaaaagaagctgtagtaacagactctaaccatcactattatctgccttaacatgcatgaacaaagataatttgagggtgttgattctttacttatttgttatcatctttaatttcttgtgtgtatgtgttagacttagttttgctcttacaacaagcttagtgcaggttatgaggttttgattgtgccaagaaacacaatcaagactcttacttcacatgattatatcaagattgaggatgtctacttctgcaaattttgaattagagaaattctatggaatcacttatttcaagtcattggagagagtctcaagggcacgcaatttagtgcatcaaatgatagctaaagttgtaatagacacaacggagcttgcttaaaagttcatgacaagaaatacaagacatgaaaaactagcctatcatacattcattgtgtacttgtcaaaaaaaaaaaaaatgcactgataaaacaactgaaggggtgcgagatgcattactgctatatatgtatatatatatactagcaaactatgtgcgagacacgtatactaaatttatgctagtttttttctatgttatttgaaagtgatacaa

SEQ ID NO: 41772 - DNA, 1761 bp, Cannabis sativa
  modified_base (414)..(436): a, c, t, g, unknown or other
tttttaggtaccaaatggaactggattgggacttggaatggcccagctggtactgtatgcaatgtacagaaatgcaaagccatgtatgaatgtaaatgatgtatcaaattcagatgtacttttggaaaatggctcccaaacacaaagcctcatcacatgatcgatcctccgcccactaataatgcatctatatatttatatagtaatgagtaatgagaaagatccattgattcacttgtgttgaactaaatggtagatgaaactagggaaaattatgatttggaggataaattaaactgattgcatataatttgttttccttatttaatgtatataagggctacagccccaatctttatcactgccctgcaactaaattcatctagaagaagcctattattattattattattnnnnnnnnnnnnnnnnnnnnnnntattattattattattttgtgaaactttgtgtaataaacagaaagcaatttggttgagtaaaggtccgtttggcacaggtttttaaaaaattactgtttttttgaaaaaaattaaaaaattataaaattatgataaaaatgtgtttggtaaacagtcaaaaattagtttttttgaagaatttatggagaaactacaactaaaagctaaaactggtacaatctaactgtggtgaatcaatcgccctccaagaaatcaaagattaacaaagaaaactaaaaccagaaattgtacagcaagaaatgaaaaacagaacacatgagttataaggttcaatctcaagcagaaaacttgaatctactccttgagtggaactaccttgaggctttgcctttattgaattgaagatgaagctcagagatggtacaataacaggacagaaaacatgaactaaatggagtcaagctcccattgaaatggctcacttgagggacatgagctatacaaatctcataccctttacaactttacacactctcaacttaactcagctaatgaatagaaatggtctttatatatagaccaatacaagtgtacatgaaccaacaatctttaacagaatttaactaacaattctaactaccaaagctaaccaacttgcacaagtgtataaaccccacaaattccacctggtttatatacttgtacaagtttaaactctgagcaaaaacaaatgggcaaaatcgttccatcattaaggttttccttcaggaatggaggattagcaatcttctatgttcagtagctttatgtatagtctaaacttctcaccagtgacacacttagtaagtatcacttagatttttatgtgtgttaatcttcttcactctaactttcttgctggcaacaatgtctctgacaaagtgtagcttgatgtcaataatttggacttttcatggcacataggattcttcataagatgaattgcactttagttatcacagtgtatgactaaattttttagcttgcgtgttcagtttccatcaaaaaaatatatattagggtattggtgaagtgtatatagagttgcattgagataacaatatatatattaggcaaactataaagccatcaaattagcatatcaaggcattggtgaggtgtacatagagttgaactaagataccaatagatatatgctaggcctttttcaagaacgttcctgacctagttttagacttgtgagtaggtgcatgggctcctagttataggtcggttatatatatttttgttttatacttttttttactgagtttgtcgactcaca

SEQ ID NO: 41773 - DNA, 2423 bp, Cannabis sativa
aggggtttgtcccctatgtcagacctaagtaatgcgcgcaacaccaaaccaaaaccacctttttgtccaacactatattctttgacgttctcggtaccaacatagttgcacacgatacctgacatcaccaaatcctccccactcatatggacgaccattatcttgtgaattgaacctcacctaattgaccaaaaatcaatatatattgtattttatctaatcggtgggcctagttgacacttctaaatcttaacgggtctaggttcacccgtacccgattctagcatataaatataacattattccttcatgcaaaaggttgaaaatgattttttgctatcaagatctaagaattagaatttttcagctagggcaaaatatgtaagaatcttttgaaggttttttagttcaataatattgagtcgtggactaagattcattaacgccctaactacataaaaattcttatttttttttcttaaatttatttactttttcttaagcttatttattttagtccaaaaatttcgataaacaaatatttttttttttttgaatgggataaacaagtatatttaaattaacttgtaaactaaaaacaaataaaaaattaataacatgcacacaaattactctaaactaaaaacaaataaaaaattaataacatgcacacaaattactcttgtcctttagttatactattatattatagaattcattggaaaataggcgttaaattaataataaaggaaaaaagaaatgcagctgtattcatgatttgggattgggtaatggcttgttttgacatttacacgttcccacttccaaattggaaagagaactgtttaaaccggttgactctgcttagggctagtgggcccaaactctatactatttcattattcctcttattcttttttaatttaatttaatttaataaataaagtatatttattctctctttttttttttcctttttgatttttttttttgctggaagagagctgagcaaaatgatgttgttattgttttgttctgtaactcttagacgatacacagattcctcttacatttcagattatgctctctgatcgaaaattaaattagaagaaggacgaaattgaggccttaaggagaatctgagggtccggagccgaagcccggaccccttcgccaacgccgccgttgccgtcgttgatcttagtttttttttttaattattatttcgactgtgtagcgatttaatcgaaagttgagcagttttttcgtttgcaatctgattaactctttagtttgagtttgggttttggatttgattgatgggttcgaagccgtggctgcacccggctccgacctatcgtcccctcgagacttactgggataccgatgaagatgcccctggtcctcgctgtggtcatactctgaccgccgttgccgctacgaagactcatggccctcgattgattctatttggaggcgccaccgctattgaaggcggtgccgcctcgtctgcgcctggcatcagtataattctttcttactacctcttagttacacttgcttcactctttgctttttttctttttattgaatcgattgttggaagaagtaaattaaaaattatgaattgtgcttcgtttttgtaatgtagggttagcgggtgtgacgaattcggttcatgcttatgacgttttaaccaggaagtggataaggtaagttgggaatccaatctattatgtttctcttttgagtaactgattcgtgtatggagcaggatattgttaatcactgtggtgagtttaattttggaatatgcagagttaggcctgccggggacccaccctctccgagagcagcgcacgctgcagctgcagtgggcaccatggttgtctttcaggtgcttcaagcagtgtaatttaagagattaataaagaaaaagaaatacttttattaggggatttgtttcggtgtctatggatgttaacttgatttttgaattcatcttgtatggctagggtggcattggtcctgcagggcattctacagatgatctctatgtgcttgatttgactaacgataaattcaagtggcacaggtgatattaggcagctagaatcaacttcttttcttcactttttttttcttccctagtgtgattgtagtttataaaaatcaagatttatggttttattaatgtgattgtagagtggtcgttcaagggcaagggccgggtcctcgttacgggcatgttatggacttggttgctcaaagataccttgttactgttagtggcaatgatggtgagggcatttccatgttggatgacattaagattcaagattttatttttattgaaaattataattgtggactttctttagtgttgttagactccttttcactaggataattgctaaaaggca

SEQ ID NO: 41774 - DNA, 1921 bp, Cannabis sativa
atctttttaacctttcaggaaatttatatgtaattatagctgttgctagggaccatctaatcctgaatttgtaatcattatttatcaccttagatgcgaaatcaacttatctagatcattcaatgagtgtcctagacaccaaatataaaagataatattcagaacgtgcaacagtatggtcacttgtatactatactaacaagaaacaacctaacataaaagtagaatgcacacaataaacacgagaaatcgaacctggagaacccaatgggcacagctgagaaacctcgcaatacccagtgcaaatacataatgagccgtgaatggttcaacgatctggaaaaaagcaaaaaaaaaaaaaagaatataaaattatttctttccatttgacaattcagatcaaacattttctttttctttcagtaaaatcatgcctttgtgttctgcatgacccgcaactgtggcaacactgaaacagcttcaagatacacacagaaagcccagaaaatcctgttcaacaaatgatgagaggttgatgggtgaatgagcaaagctaatacagcacagggcaccacctgcatccaaacagcaaataagcatattacatcaaacaacctcacgttgttccaaaagactaagcgaaatcccagtgctgcagtaaccaaggtggatcttttaaacaagagatgaaaatactcaccacataataaattgcaaagttgtctttatcctccatgtaactagatttcaatttaaaacggatcatgaaaataacccacagggtcgttcccagggttgctagatcaagtagtgtgtgtatatcatattccatcacaaaactacagtacaatctaacagctaaaaagattgctgttagttcttgggacttcaatgatagccctgcacatgatccaaagaagatctttcaactgtgcactatgtaaggtgtaggaaacaaatatttgcagcaacatataactcttacaaagtcaattactggtagacgtgtcattttgcagtttcaaataagagatctaaagccattacttatataaagaggcataaaaccaaaattgaacttgatgataaatatcatactcaaccaatccaaatgatcaaatatgtacaatccacaaaacaagacaaaaaaaagaatctcatggcccaatacaatgataaaaacaaataggaaacagatatctaacgtaaagttatttcattaagctctattatgctgaaagccaaactattaccaaactcagacaataaatcttcaattcaaaagttacaatggggtcacttttcttagcatcactatttattaagcacaatactccttgaactctgaaattcaagtatccaagagaagtatacggaaaagaaggtattaataccagatagctacaaacatccatgtaacaagataaaaagttttagtacttaacgaacaaagagtgggaattcacttgaagaatactccctctctctcgctttcttggtagtaaatataatatggggcaaagtcctataacatcacacagcgagactctaacacctctgatacttagtgaatttaagttgaatactttcatcaaatgcagtacagcaaataatactatgatatgtgtgataaatcatcctaattatcaaagttggagtgccttttatcaacaatatccaaatctaatagtatagagaggacagagaaaacaaaagtacctaaaaaatctaacaagaaaagggttctttgttctaatgatttctgaaataataaaaattaaaattttaaactattgataaaaatagtgaaaataaattactgataaagaaagcaaatctaaaatttcatctcgatataatcgaatgaatcccaatttacccaagaaaaaaaagatttttttagggatagtcaccgaattaa

SEQ ID NO: 41775 - DNA, 1266 bp, Cannabis sativa
  modified_base (1138)..(1182): a, c, t, g, unknown or other
  modified_base (1225)..(1240): a, c, t, g, unknown or other
aaaaaaaaaaaaaacccaaaataagaattacagcggcaaaatcccaaccctcgacgaaaaatccacagtattctctaccatctcacataattcacaaaacataccattaataataagaatacaaccaaactcattgaaaatcaaaaagcgacgtttctttctattccccttcacaaatttaggtccttgaataacaaaataagcaaaaaaaaaaaaaaaacatgaaatcttaacgaaatcgaaacgttgtacttaagtagtaaagatgaataggaaaggggaaagttgaaacctggaattggagtcgagaggaagaaagatgtagagaaggccaaccccaaccccaacccaaacacaaccaaaaggttccctctattgtcgttgagttcacagttgttggaaatagaacagagcagaccttgtaaagttataagtttgtcgttttgtactgtttttgtttgttctgttcaccattcaaaagctgcatcacggcccacccagaacttatccattccaatgggcccttagatatccaaataagtacaactccaatctaaccatcttaaaaaaaaaaaaataaataactaacaatttttacattatcttaaaatattatatatatattcttttttttcatttacattatttttaaccactttactcttaaaattatttcaatactaagcaattttagaagtcaagagaatgaacccacaccctattatttaatatattattaaattacttttaatattttaaatattatattaatacacattttgatagaaaaatcataaaaaaaataaaaaaaataattcaactaccattgcttgaccgtaaccattgtagtagcccacacaattttctttagtggtcaagcaatcaagattgcttttcttagactgacaaaggcttgatgagcaaccagcattggagctgctctaacataccaaatttaaaagaaattacattgtatatccactttacttcatttttttattttcacttttatttctatattatttaagatatactcacttagatgatgccctcattataccccttaagctaatgtaaattatatgctagacttaagtggaaaataaaagtatattggactgttgggttttatgccctnnnnnnnnnnnnnnnnnnnnnnnnnnnnnnnnnnnnnnnnnnnnnatcagaaataacatttaatgttactgtgacagtcagtagtccnnnnnnnnnnnnnnnnaaataccgggtaagctgtgcaatccc

SEQ ID NO: 41776 - DNA, 1104 bp, Cannabis sativa
tgatgttaatgggaatgaaaacccaattgaggttgatgtatacaaacaaggagctttgaagactgagatctgtaacaaatggcaggaaactggtgagtgtccatatggagataactgccagttcgctcatggagtcgacgaacttcgccctgtgatgcgccaccctcgttacaaaacccaagtttgcaggatggtcttaaacggtgccgtttgtccttatggtcatcgatgtcattttcttcatgcactccctcctcgtcaccacagcaacaaggtaaaataatccccacatattttaccatatctatctatatatatataataaggattttgggtcgacttgattgatgatgatgatgatgatggagattacttttcgaataggacaagatatttagagttgggaacatgtttataatgaagtaaatatatattggtgggcatatgatgatgatgatgatgatgatataattattattgttatgttggattaagatttgatcaagggggagaaattattttgtaatagtggatcgatgtggctttgtggccttaattaagaaagttgaggattaagatttataatatgagaaaaatgtgatgttatgctctgtaaaatgtgttattatgttaaattgaattcgttgtgttactttgagaaatttttatttgaatgaaattggatacttcattaaactataagccattacacaaaaatgtacagtagtaggaatattgcctccattaaaaagataaatgaaatttttatttgagctttgaatggttttggacagaaacaagtgaatcggtttcagcaaggattggcactgagttttagtggatcataaaaaacaaaatatattgggctaagaagtgtagtatttttaaaattagtaaaaaaatatatatttttaaaaagggtaaaaaaaattgagctctcgactaagtgggccttaagtacaaaattagcccaccaattttcagggccgggcttctagtgccgtaagttgagaaatataactgtaaaataattttaattggtaaatatcctcttttataattaaagtaccaaatataacttcatataatttatcaaaattagag

SEQ ID NO: 41777 - DNA, 1392 bp, Cannabis sativa
agagtatttgtatacaaattctcaacaacttttaaagcaaaactaaacataataacaacatgacacatgacagacactaacatactaacaactcagataatactacctaatatacagttttcccaatcaatcacaatttggacaataatagttcttacaaattgtattttatttcttgttatcactatagtcgttattgtgatatatattacttgtaaagaagtatgtggtaggtagttcatgagcttcttttgtttgcattttagtcaaattctaataacatacacaataattcatatttatgggtttatttaaataaatcgcttttaataggtaaaacttattctaaataaggatggttgtttaaaattacttatgtgcatatatcattactcaattatatttcttcattcaacaatcaatcaaaaatgtctatatgtacacacatttaatgacttagtgtacaactggattttcaaaatttaccaaattttatgtaataatattactttttcaaatatattattaaaaggagccaaacatgatgatgagagtatttcatgcctagtctttagcttattaactcaatcaaaatcatcattattagatagaaagaattggtcaattcaatgccttaaaatcaaatgcaaccaaaaatatagagaacaagaaattaatgtaaacattggaattacttcaattcaaatgttcttacgtaaaaaaaatagtgagacacatacttaaaaatccatataaccccaatggttacgatcataatatatacttgactaaaaaccaaacaaaaaagaaagactcaaaccccaaattcatacgtaataaaaaaccaaaaacatcttatttcttgcgtgtaagaatatttcaaacattaatttcacatgattctaaccatttttattcttataaaaagaaaaaataaaaatcccttttacaattataacccaaaaaaaaaaaaaaaacagttcaagagtcaagacgcgttcattaaaattttcatttcatcaaacttaactactttaaaataaaataaaaggtagatattaatttaattcataccaatatgtaacaacaataacaccgcgtttggtacgcggctaaggttttgttaattaggtctaataagcccaaaccggtcccacatttcgtactgaaaccaaaacggtgtcgtttttaagagtgagagacagagtaagtcagtcagtccaccgacttgcgttgaccagtttaaggtcaaatttgaggtttgatccattccattctgtaattaatcaaacaccttaaacttaattaaagtccctcccagcggtgcagcccttaccctttcaaactttttcaacggtcaaatattcaaaactcatcacaccctgttgttct

SEQ ID NO: 41778 - DNA, 4592 bp, Cannabis sativa
taaatattttacaaaaaatagtgtcttatgtaattattcctaatagtgtcttatgtaattattcttttttacaaagtgtgtagcctacatgaagaaataaagccttatttataggttaaaattgggttctcaagtgaatctggacccgttaagattttgtacatgaaataagttgattgatgaggtacaatatattataatattaactttaggtcgagtaagtgatatccaattgaggggtaattgtcgtccatacaatgtagtactatttgatgttgacaggtcgccatgcactgccgatcgtgtacaataaagtagttgacgttggaaaaaatgtatgttgttttttgtgtgacacaggggacaaacccctaattctgtgagatttggtgtcagatggatgccacataggacagcacccgaacacctctttaactactccttcgagactatccttgaaggtatccagttgtgtttctctaagtctctacttttctgggtgaaagtcatcctttttggacgaaagaggtctgactttatcgagacagggttatagctaaacccagagccgtagtcggactccgtttatgggttgacccattgctttgtttgggcttgacagatgggctcatgaattgattttgggccttgaaagtacacaagtcctccatccaggaaataatatggaaaatttttagtaattacactatgtaattacactcaattctcatttctcattagggtcatgagaattggagagtgtaattagaacccttcaattacctttaattatatagttatagcataattacatggttaaataaaacatgccaaattacataattacattaattacacccaaatccaattacaccatgacttttcaaactcgccctaaatatttagggtttgtttggaaagccacaatgtaattagatttgtgtgtaattagaggtaattacacaatttgatatatttttctgaccatataattacattgtaattgtgtaatttaagtgtaattactaaatttttttctattttaaacattaactactaaaaatattatttttcgtgtaattagtaacaattttgccaaacaaaatattatgaattcatatacaattacactttatatctaaacacacattgtattttaaaatatagtgtaattactaaattgtgcaattaccactctaataattacacaattacttaaagcataacaaatcatgttgtaaataattatagaaattagagcaaaaaaaaaaaaaaaccatggtacaaaaggaattcaaatacaaattacacgggatgcgatgaaaaaaaaaattgcacatgtcgaatggatccgaaaagataagatactcctacaaactattcgagttattattattattattattatttttacaaattagggttgttcaattttttattttttattttttattttataaatcacaccatagatatttaattaggattgcccaaattaaattagtgagtaaaaaataaaattgtaatttttttacaaaaataataaataaataaattaataaaaagcttgagtctttatagtttctcatctctttgagactgagagcgatacaagtataaatccttctttctctattcaccaaagaaaaagtacaaccctcttctccattcgattcaactcattcacaccctatatatctctgttctcccaaccaataacactctcgattccacccaaatgggcaaatggaacgatcgtcttcctcgtagaactttccgtcatcaaaaaccatggacgccgccgcatgtcacctacgattcaaaacccatcatcggtaaccaacaatctgtctccccatgtttgaaattttgtatctttttatgatttgggttttgtttcgaattgttaatggttaatgtaattatgggtcttttgggttaacttggtaatgtgttgtttttagccctttttggaattgttgttgtttgtttaaggtttgatgttgatgtctttgtttggtatctataattagattgaattgcatgttgttgttcttggtctaagcattactaaagaagaagggtataaattaaaattttgattcaaagttgtatagacactgattttagaacaagaaccctatgtgttgtgtttcttagcttgatttgaatatttttcatcaagttttgattttgatttggtttgaatacttattgtcaagtgtatttgtacataaagtttgaattttggtttaattagtgttctaattttataacaaagtgaactcatgaatgaataatcaattggatgtataagaagtagaagtttgaatattggcttaatttgtataatactaatgttcatgtctttgtttggtatctataattagaatgaattgcatggtgttgttctcggtctaagcatcacaaaagaagggtataaatcaaaattttgatcaaagttgtatatatactaattgaagaacaagaaccttatgtattgtgtttcttagcttgacttgaatatttttcatcaagttttgattttgagttaggttattatggtttgaatactattgtgaagtgtatttgtgtattgtgtttcttaacttgattttgattattttgaagtacataaagtttgaatttttgttttgttgatttggtttttggaagataatgtgcctgcttgggagaagaaattctgctataagattggatcggtaccatggagaaagatagtaaataccaaggatttcatgtcttactatactaatgttgtcgattggaacgattctgctgtgaaagaagcgtttgataatgcgaagaaacggttttgggcagagttgaatggctttgattgtgatataccaatgcctgacccggacagttacatagatgaagtagattggaacccggttattgattctgaactgatgaaggaattggagcgaacgttttttaatcctgatgatgtgaggcaagagaatgaaaatcagtgtaagaaagaagatatgaagagtaaaagctcaacttctgctcctgatggtggtaatgtaaatccttgggaatctaacaatgccgagactagtaaagaagatggctggaaccagtggaagaataatagtgcaggtgtcccgatgaatatagactgtaatgagaaatcttggcaatcaaacattactgagaaagatacaaagaaggagaactcgtggggagatcaagcgaagaaatcatggggacaggacttgatggaaatccagagttctaaccaaaatgaaaatccttgggaccgtggtaatcagaggtttgccagttctagccaaaatagcggatggggttcttggaacaaggtttggggcttgaataagcatgagtcgagtaatatgggaaataatgatgatccttgggtttgtagctctagccaatacggatggcaacacaaagggcgagaaacgaggggtaggaaacattggaacccttatagtactcagaacaaagggttcggaattagaagaagtggcaatagccgcgaagtgtggaacgaggatttctctaatagggtcggtggctatagaaactcgaggtttggaggagaagaagctcaaacaagttggaggggaaataataaaacaagggtcaccacctacacttgtggtcaatgaaggagagagaacaagtactcattgttttgtcaaaatatttagcaattctaacttataattatgcattgcttgattgaagctttgttatctatggctctgttctctgtcttgtaaagcaccgaagggggcggtatggagccatccatccccagccccataaatttgcactaactgtttatgtttttcagttagaagggtaatgagtggacaataatgtagcttgtatttcattctttaatttacttgcacatactataatataaaagacttgatttgttatttctaatggttagagagccttcatgttcaatggaaatttttcctttgtgtgaagtttggaatatgctgtaaattttttttagctggaattgaatggtgtttgttttatttaaggttaagaaattacatgtcattttaagcaatgtgtttcgattagcaatggccttagaagagaatcctttttataaaataatgaaaaagagttattttttatatacttagaagcttatttttttttaagttacactctcaattttagctaaaaaaacgagtttagaaagcatgattagagatatgattagagatgctcttaatgcaatgtttcttcttcactcactagaccatatatttacacaaaacaaattagactaatcagtattggttggtcgactaaatccacacatatctagataataagtcaaaatttaaacaaaataaataaaattaaatactgaataatattatcccacatcaaataaatataaaaatatgaaatagtttgagattcttattagaaaatttggtctcgagattaattatgtatataagaaaatttgatattaataaaaggtatataactccatagttcaatacttcaatgagccttgatagatttacaataattttgattagaaagtaagatgaaaa

SEQ ID NO: 41779 - DNA, 3107 bp, Cannabis sativa
ttaaaactcaatttttaatcgatctgtaatgaggagagtattggacaccatggtgcattatagtaatctcctattaaaacccaagaagaatatttaatatgattttcaaccttgggaaacagtgagactatccgttaaaagattcaaatgcacgttcaatagtcaggcacgtatatcgaaatggggataagtaatagatttgtttgtcaagttgagatacggatctcagtttgtcatgtcacaaaatgtacaatatcatctagagagatctgccaaaatgtttttcttccagctctcaggacctcatcatcgatgtttttccaatattgcacaaagagggcccaacattaacactagcacaatcaaattaaacatagttccctgctactttttgtattgataatattccccttctttattttaagcatatttatttagaatgtgaactagtacatcagacgaaatctttcacagcttcgaaggagacttgtaccagccccaaggttcatcagaaatgtattgagtaacctgcttcacgctcaagtagttatcaagtcccctgatgatgaaagtaaagaggaaaattagagtactggaaataacatcagagtttcaataatggaaatttagaataaaagtatgtataatagtggagttctccatcaacatcaacagctgtttggtataacatatacgttttgggataataactttaacataatatgaagatggcatgttacatgtcaggccaataatttacttctgagatgggaagtgaagatcataccattctccaagttcacgaccgaaaccactacgtttgttgcctccccatggagcctgacagaagcatggttgtgagcaattgacccacacaattcctgcttgaaaagcctgcacagagaaaaaaaaatggtgcataaattacgtaaatgacttaacaaaagacctgatattctatcatcattatgacagggtctcacctgagttacacgctcacatctctctagatcatttgatatcacagcagcacctaagccaaagctgtaaaagataggcataaatgttattaaagagcttttgaatgaaattatagcaccttagccataataataaaagatgtcacctaccaggggtaggtgcttttagttgaaagataatgaaaacgcttactgtgtgtcatttgctaattcaatggcttcatcttcagaagaaaatgttttcacacacagaacaggtccgaatacttcttctctccaaatttgcatggacgtggtcacctcactaatgagagttggttctacaaagaaccctttctttagatgctgcaattcatagaataagttacactatcaggggaggagttttattatagtaattacactattattactaaaattatatcaagaaaaaacacgggtaaagaaggggatcatacctcaggacgaccaccaccacacaaaatttttgcaccttcactcttagctgttgagataaacttcaacactttttcatactgaagcaggtaaactatttattagatacatgataacttcttatttaacataattaagacctgggaactagtacataccccaaaaattagtccaggaactttaaaataatattagtattagagactgcatgactcgagtcatcattgttaaacacctaatgcaatatatttaactaaaaacagaaacagatttaaactaattagcaggcaacaccattagccatttagattataacattcttttaagactaaaaaatagcctctttggaataatgaaaaaacttatcgtggcatatcacctgccctccgctaacaacagggccaagccggcaaccttcttccagaggatctgagatctttatgtttttgatccattttacaagtctgtccaaaaattcagctgcaatgctttcctgcaattagttgtacacgtccattcagatacaaaaaagaagactaaagaaaatgtaaagtcctaaaccgctaatatatattgttacaaactgccatgttctgaagcatgtactaattcagcaataatttattcaaacacatgagataaggaacatatatacattttggtaatgcacttacatgcactataagacgagatgttgcactgcatatctgaccatttgtccagaagcaaccaaaggcagtccattcagcagctgggtaatcatgatcacagcacaagagtaagaagttattctgatgtaattaacacgtatagccacataaatttgatcaaatatagatgttaaagatactatatacaaatatttacaacatgcaattcctccatctaagaataatgggtagcatagggtttaaattatactacataatgtactaacctttgtcaaggtcaacatcatcaaagatgacaatagggcttttcccaccgagctctagtgaaacaggctaccaagagatcacacatgtcagaggatgattgtaacaattgtaatttaagttaaaaatatatgatcaacacaaaattttgcaggtccaatgttagtctagaacaatttttaaaagaattcctcaattttatggagcacgtcaaaagattatacccacactcaaggcattcgagaggcctagagctctccccaagagcaaagctataccaaattacaatctaaatgcctatatcccttcctactgatcaatgtatactgattaggattggaatgacacactcatgccctttcatttgtttactaaataaagaatggaaaaacataattagatatggaacgagggtaatgacttttatttagtctttttgaaaataaaaattaaaagacaattttgtcttttgaaaataaatctcacaaaatatctacttatattttgtttaatcaaacatgcatataaccttcccttagtccatgctggaaatttcctttattcctattggacaaacaacaaaccattaatccagcctccaccctacttaataactaatttcttttacttctcctagaataagtaaagctcacaagaggcccttattcctatcatagaaccacataatgttttagcataccttgaccaactgagctgcagacgccataattttgct

SEQ ID NO: 41780 - DNA, 698 bp, Cannabis sativa
taagagtaccttatgatttattttatttattgaacatcttgaaggtggtgtgggtattgctatatttgtgtcttccattaactcatcctgtcaattttaataatcattcgaattgaaatttttcagaatgaccctacttctgggccctccaggagctgggaaaacaaccatgttgctggcccttgctgggaaacttgataatgatctaagggtattattgtcatataatatataaatttaattatcacaaattttattgacattcctatcaaaaatatatataagttgcttttataaagggcacccctttaaaaaagatacatgatacactgatgcactatttatttgttttgacatttaaaaaaaaaattagtcaattttttttttatattcatatacgttatagttatttaagatattttacttaaaatttgataaattcagaataatttacaagatagaaagcagtgctcaaacagtctatttcacacgcgtataaaataaaatagttacgtgtacaacacactgtttgaatccttttttcggcgtgttaaatttttccgaatttcttaaaaatttcaaagatgtcttaaataacatacatgaccatgtaaaaaaatttgactaaaaaattatttcaaatagcaaaacaaataggagtgcatcagtgcattcattttaaaggggtacattgtaaa

SEQ ID NO: 41781 - DNA, 3260 bp, Cannabis sativa
taatgaaataagaatagcactgtagagggagtaattgtgttatttggtcattaattgatcaccattcaatatgatgtcaaaaattattattgtgaacttggactacatttatttttcttaaaacattcttcttgaaacagaaggtcacatatatttatacagaattagatttttttttccttttttataggtgctatttcagtttattaacttagatgtggtctatcaataataaaaagttatatgctaatgagttgggtgtaaatgacttgaggctagctcaagtggttataggaggatgtgtgtgttggagattctcggtttaagtcccaattatgtattgtaatatatgtattattatttttattatatataaaagagattgaaaataataacattttggagtatacagtatgctctacaattagctaacctaaattagtttgagctaatatacatttagctcatatgatgtagagcttttttaaaacattacatctaaatttatgaagatttgctattttgataggatttaaaagttctttaaaatgaaggagctggtggatggtcatttaagcactttagctattagctatttgatggggacgatctaaggatataaaaactatatcatatttcttatctctttcaaaatttcagaaaaagtaaaagattagatatgatttgactatatcattcaatggttgagatcgtgatcaaattaattcattggtctaaatttattcgtcaatatcttatcttcaaattttaaaaagagtaaaagagtgtatatgattcggccataccatccaatgattaagattgtggttcaaattaatctattggcctacttttattcaaatatcttatcttcaacttttgaaaagagtaaaagagtggatatgatttgactataccatccaatgattaagattgtagttcaaattaatctattagcctacatttattcgccaaatatcttatcttcaacttttgaaaagagtaaaagagtagatatgatttgactataccatctaatagttaagattatgttcaaattaattcattggcctaaaattattcgtcaaatatatctttaaaatttgaaaaaagtaaaaagattgaatatgatttgactataccattaaatgattaatatcatagtaaaattaatttatcggtttagatttattagtgaatatcatatcttcaagtttttgagaagagtaaaatattggatataatttggctataccttgcaattgttaagacattgtcaaattaatatgttagcccagatcaaatagcttgatttcttatcttcatcaattatagataagcttgttacactataaaacatggatatcatttgaaaaaaaaaaaaaaaaaagtgcatgaaggatgaaggtgatgttaatgcaactaatgaaaactgaagtgcaaagttgggtgatacacaataaacttcgaaatgtattaattgaacatttgtggatcgagtattttaaattattatctttaatgtgtgttgttttgtaatatttttaccaatataattaattttgttataattttataaatagtttaatattaaagtgaatattcttaattatataagaaaataataaagaatatgccttttagtgtcgtagttaccccatttttgtttgactagtctttcttcaaagcatttcgcaatctcttaggattaaaattggactacatacaaatataaattttacaagaaattaaattgtgaagatgaatagtttacattcagatgtgcttataaaaggtaggattggaaaacttaacccaaaagaaagaagaaaaaaaaatcatactttacaccttaactcaactttacaaggatcagattcagaactctttgttgaagaagctcatagtctacttggataattcaattagggaagaaaaaaaatatatatattaatttagaaaacaaattgtaggtctcaatgttagaccacaactgccaacaatgtgccttactgcttctatttacaagtgtctaacagagaactcccctaaaaatgactacaattcaaatctctcaaaacacttataaggtacattaaaatacaatatcaaacttacaacatcacttaatacaccaattaccaggaatttctggccatatcttaccattaagatttggagaggatttagggctgaatgatatatttgtttttatgagctgttgttctgaacaggctgtgacgaacatctttcctcgataccaaacggattctggatctttctcaaagagcgatattgcagtcggacattttcaccactttcaagaattttgagtaaatacctgaaacaaatatgagattaattttattttagtttaacaaaatagccaccaagtagaacaagataaatttcaggtgcgtctcatataatatggccatattggatagcaaagttcagcttatttgtgtttggtaaaagtttagatttgatgggaatgggaatgggaatgtcaaacttaacccatgtttgataaattacattttaaagatcaatgggtttatgtttccaagtgggtcttactttttaagtttaatcgatggtaatattaacccctccaacacttaagtttcatattctcttaatctaagcaccctctaactttactccctccaagtctaacccacataataaacaccccattaaggtaccaagagaaacccatttttcattgaattaaatcagccaatttgtaatcatgcagatttttttttctttttgctattacttccttctcttgatgtacagtcacttgtaatcatcaacagacactagctgaagatttgtaccaggaacttcgaaagtaaccctaccctttcagacaaggcatatagtgaaaaagagatctttcagacaaggcatatattttcttgagaaagagataacggtcgactaacctcttggatgtcccaattttaggaagcctcacttatggcggagggacatcaaggtaacaaaacaaaacatccattacaatatttacacataagatactaatatcttaagctcaactcagcccagaactcaaaatcctagatattaaatctaaacattacgttccaagtataatatatcaatcatggcatatatatcaatggtaactgctcgagaaggtgacaaagaatgtgttagataatagtcctcttcgagagaggacaaatctccaaatgcactcttcgagacaatgtcaatctcccaattga

SEQ ID NO: 41782 - DNA, 1189 bp, Cannabis sativa
actaactagttaccatcatgtcattaaaagtaaaaagatgatagtaggaactagttactattatactaatttttaaattaaataattcgatactagtaaacagttattgtaaaaatattagtaagatccgcttagaattgaaattaaccaaatagcttaacaattacataaaactaccacttgtcagtacctaaaaaagtcacaaaattatgtataaaatattaagagataatatataaaatatgagttaagtagccaaagaaaagatcaaagcagctaccatcaccatagtaaaatcagtagccctcttcaagctgccaccttcgttagacccatgtcctgttgcagaatttggtgatgttggtacagtttgaaacattggagaagctgaaataataaataaaaagaataaaacatgtaaacatatatgtggaattatatgtttatgtataaattaataattgtttgtgaattgtgaatatatacctgcaatggtggagtttacgtgagaagtggaattggtgtttgtcaacatttgagacccaggtggactagttgtcacatttctccctaatcaaaatgtgaatgtacaataatcacttggtattcttgtaacgattaaacacgtacaaattaactatttcgaacctaacatggaaataataagaggtcttacaaaaatattgaattttaagtaaaaatttgcaattttactatcatacagattttttaacaaaatattatttttctataaaataatcgtaaaataataaaacagaacaattaaaacaacagtagaataagtaaaaaaataacgatgtacagtataaaaatacacaatatttttgaaaaaaattttgctctacagtaaaaaaaaattaaaaaattaaaaatttcaatatgtggtgtaaaaacctcataagagtcattcttaattaaaacgttataggggaaatttttatttttgtggtttctttttccaaaaacttgttttttgggaaagttaaaaaaatggggaaaacaggttgctagttacttttaggataactaattactgtttttttttcgtatatttaaactttctttataattttttttttttgaaaaaattatatttttgttcaaattatataaaacccataatatgtgtaatattcacaaattatattgtaataaaatagtacaaaaa

SEQ ID NO: 41783 - DNA, 644 bp, Cannabis sativa
cctccctcaacactcctaggtccgattatgtcacgagagacaagacctctaaggagagtaatgtacttcactccgttcacgaagtgaagggctccatagattcattactagagtggactatcactagaagtctacgaacatgctcatgtagcttacatgcatcctttgacaactaggacaagagacatgttaaaggcaagttacacgctttgtagggcaagctcactacgcctctagttaaggaactagtcaagtcttagcagtgtaaaccatacgttagtttcatttggcttggttagtccgactcatttcttgataccctataaataggacctaccttaacttgtatgcaaatccaatttctagttcacaagctaataagctgcctaaatcaccacacagaactccgttatggtaaatgttaaatcttagtacaagttactcgtagactaagatctcattaatagcataaaatacttaaaatccctgcgtgttcattattatttctttttatttcattatattccatctttcttctattttctaaattgagaaacacttagagcgcgtttggaaagccacatgggaattggaattggatgtaattggaagtaattacacagtttgacgtgtttgtgtggcta

SEQ ID NO: 41784 - DNA, 2496 bp, Cannabis sativa
cttttcaatgacctttctatttgtagctcatcaatctcaacttttgtgtgaaattgttctcttcgggaggaaatagtgtagtagaatgccattccttgacatagacttgagacaaattttatatgttaacaattcattaaccacaaaatcaactgaaggaagagcaatgcaatatagaaccatgaagtatatatcctcaaaatcactacaaagagccagtaaaaattgaaccaaccattgttcctccctatgagtgatataaggtgcaaaagcacgttactcatctgatttggtgagtgccaaattcagactcaagcttgggcgaagaaaagacttatcttcttgaatgggtactaaaactagattcttttctaaataaacttctcttaccaaaagttcaataacattattgtggacaatgtcccacatggaataaatggtagagattgagccatatataagaacatggactactccattcattgccaattggttttgagatggaacctcatgattctcaacatggtatcagagccatatcccttatccaatccgtatacggttcaagattgatgagcaaaaaaatagccatcatcttaccaattggttttgatatggaaccccatgattctcaacaaacattatgatcattgtttttgctcactaggcttgggatctacatgaaaaagactgaaactcaaaactatcagaagaattcaacagggaagaagtgaggagaaccataagaacagctttcttatgcactcaagcatcaccagcagctcgttcatcaatgtcaagagtggttgcaatgctttcaggagacactggtgtgagcagtgatgtttcgaggcctggttacttagttgattggaaattcaacgatgtcagcaccttaatgaatcaaattgaacaagggacaactcatcctaccttgtatgaatcgtgtacaagtacaagcattgttgaagatgtaatgctatgacaaagcgataagctaacccatccaatgcttcaaaacatcaacaactagccaagttgataaagatgtttcataaaattggatggactatgcctatgattttctgtttatgaaaaattcaagtatgagttgcacctcatttttgttatgttcatgtttagtactactccatagttttgtttgtataataggatattaattttgatgaatcaaccttgtcttgtacttaggatattagaaatttcattcaatataattaagcttagcctattttgatgaatccatcatctcttatgtcaagttttacaggctagacatttttcaagtacatgttttctacaaggtaattactgcttataggggttaaaaatgtcacaaccaccctatgtaaaagttggattttgattggaaaagaaaaaagtaaagaaaatgattgaaaaaagaaaagtgaaaaaaaaaaatcccatctttggtctagaatgaaaaattgtacgacaaaaaacttgatttaataaaaaaaaattatagctgaaaaattattttttttttacatttttcttatttttaaattcaaaatttttacatcataatttaggacatctatttttaataaagtgagttatattatacatttgtattacttatttgtatctctattagagatgtttttaagggctagtttagtacgttatattagattgtattacaagaaatatcacttttgccagcacatttttgtactggtaaaagttagtattgcgctggtaaaataaaatttacctataatgtattggtaaaagaggttggcaaatcaatattggtattagaatttttgccagtataaaataaaaagcgctggcaaataagacttttcctagcgcgtaaatgtgctggtaaaagttagattttagccgctgcaaatgtacgctagtaaaactttgatctctttgccagcgcagtttgtgaaatgtgctggtaaaaatgacatttcttgtagtattatattatattaaattagattatatcatatttttttttatgtaatactattttaaatttaaatttatactaaaatattatatatttaagtgcttataaaaatcaataccatatatataattttttataaaaatattacataaaatataatttaatataatattatattataatattatgaataataaaattgttcagcagtagctgcttcttcttttatcaattagtttatttaactcgaaaaaataaagttaaaagtgggaacaaattcataacgaccattgccatgtgaatacggcgtcgtttagattcaaaagtcgagaaaatgtactatttgacacgtgtgaagacacgaagttaagctgagtagatttacagccgttgatcttgctcaaaatcactaaaccgttagatttgcagcacgtgtcttggagtcacacaaaaaattctggtacgtaaaagccgtcttctttctcttcctcctaagtttcctacctgttcttccacttcttctt

SEQ ID NO: 41785 - DNA, 731 bp, Cannabis sativa
cagcctcttcattagaattagaccttaaattggggacaagccggatcaaccatacagctttgtccacaattattctcactattgggcggaaacaacccatcagcggaattgtgtaatttggcagcaggaacacctctgccaacagtctcaccacctcatcttctgtcactttatatccctgcaaaaataaaatataataaatggacggatcattgattccctagctattatccaaaccatactatattaccagttcttccaaccacttatgttagttaagtaactaaatttttaactgccaatttcctttttaataaagacaaccatttaaaagaactgcgtacctctttagcatacttagcaaaccgttgaacagatagaagctttgggcagcgggcaagaaacctttccaacgcagactcaagactgaaactcttatccatacccattctaaaactcaaaatatattgttaactaactgtaccaatatcttacctattaattttacatatataaggctatataacgttatttgttccggaaacaatcctcattagcgcgtacctgtgaatgaagtaattgtttttcggcgtacctgaagtaattgtttttccggcgtacctgtaaatgaagtgattgtttatttccggcgtacctatgagtgaagtaattgttttaatgaacccgagtccgacaagccaacggaaatcctcctctccggtcagtcgatc

SEQ ID NO: 41786 - DNA, 5653 bp, Cannabis sativa
  modified_base (5517)..(5524): a, c, t, g, unknown or other
atttttttttttagtttttttttacgcgaactaataaaattgtgccacatgtaaactgtgtacacgtggacaatccaacttgtcacttaacatttcatcatcaccctggttagatcggaacagaatcttgattcttttgttgcttgtactatagagaagaatgtctcggtgttttccctttcatccacctacatatgcgaacaaaggagaggccttggacgagttgattaaggtttgttgagcaaatctggtttttgctttatgttcaactactttctacgaagttatcattaatcacaaggcctctcttttaacccaacagttcatttgggtgtcaatataccttagttttgctgtctatcttttgggttttaggttgaaagtattaataaggtttagtagcaatgattcatctgacccggattttggaaatatatcgtttaatgttatgtgggttttggctaaaactgataaccaatagtttgaaaagacctaaaattgttggatgattaatcttcttaagaaaagaattgtttgtctgaagtattgagttaggccctttccagattttgtttcattgcattatttggtattttctgtaccattgatttgtagtcgcataagggctattttaacttacgaaagttaagagcttcattctttttttgtcatgggaattgtttcttttttttttttcgattccaaagattttaggtcgatgttttatgttaattgtcatgatgtaaaataacactgaataaagtttagtaacatatatgataacttttttgttttaaatctaagttaagagtttccttcttttaatggatattgctatagtatgtttgatgtgaattagaattgcatgtgttgatttggggaaactgtgatagcgtgtatccccttttagtacataaaatttaggatgatgaatatcctattgtactgggatttgtggattttcatgattatttgttctactctacggttctcgttctggtgcttcaatggctctgaaaagataaggaggaagcaaagttgaagaggaacatcctcaatagaagaagtgaaagaaatacttgtatggtggtaaccattctaaggcagctgcagaggagaaatatcctcaacagaagaagaggactgttgtggacgaatctgatctattagaatcgagtgatttaagtcaagaacaggagcaacccacctgttctggaagtgttagctttgcgtctgatggcacgtaaaggaaccccaataagaggagattgcacgagtcattgtctaatgatggcgacagtgaaagaaaaattattcgtatcaggctacgcaagactgcatctgaggttcatgcattaaagagttcagggagtggttgtattgacgaaaacagaagttggtaaacatttccttaaaccttgccaagaattgccattggctacaccggaggggagaaattaaacaaagaggcacgggctcattcttaaacaacgccaagagttgctgttgcctccacaagataacagcaggcaaagcaagaggcctgaaactcagaagctctgccttaagccatctctagagttgccattggctgccacacaagggagcaatgaatccaagagtaatgaagctcataaactcgagagcagaaaatccaggaggacctcgaagaccagcttgtttattgatggtagtcaaagcttggatcagttttatggagagttgttaaagccttggcttcttcgaaggcttgaagcagagcattgtgactctgaagaagacgattggcttattgggtcaaagcaagaaaacaagcaagatgctacaatacataaagctgccaatgttgtgtcatgttctaggacctccaatttgtggccacaagctaactacttgccggaagctgaaatttttggattgccttacaccgtacccttttgatatatttttttgttatttattatttgtagtttaaccttttgatatttaaccaacttttcatttggtttagtgtcttctgaaccaaagaactgtagtatggaaatttcacattacaaagagctataaagtctgtacatgttttacaaaaaacagatgaaaattgttggaaaagctcaattgctaacagaacacgagttttgggagttttgccgcgttaattgctagtgaagtgaaagtattaggggttctgtcgcaattaactcaaaatttattgttgaaaaaagtttggttattgaaattttcttatgttcatcttagaatgcatatgtgaacatgtgtatacatttgtttgccagtcagaggttaatggggagacatgattattgagaaattttatgagcttattttcaccatccattgaatcttgttgctgatgcagattggaaaaatggggattcgacttgtttggcatattctacatttacttgtcagtgtgttctatgtagttctgggaatgacacatgttgcagaaagctatcttatctctagtgggttatggaagaaatacagagccttcaataaaggcaaagttcggtacctggccattgtggtagaaagtgaagaagcttaccaaacttcaaatattatcaagcttttgttgtggctggaaagtattggtgtgaaacatatctgtctttatgatgcagaaggtgatattttaagttgattaggcatctctattcctctctatcatcaatattaacagaattgttgttttgccttttcttttgtgatgtctaggaataatgaagaaatcaaaggaggccatcttggagaaattaaacaatgcaacattgtttgaggtatcatgtttctgtatttattttgccttcatttatttagccaggcagtgttttttttaatgtgttgtgatcattcttttatgcctatattaaacaatgtcttatatcttttctatataatattaatttaaaagcttacaataccaagattgtaaggatttttattaagagaaaagttgactgaagttttatgatactttaattagaaatagaaactcccatgtctttatagcttttcttactctttagtttaattaaacttgtataaatgacacctttcgtatcattcgatggacctttacgtccttttactcaatgtgaacctcaacaactaactcaacctaatgtttatcattttacagaaagctagtgaacatgacaagttacttagcgagaattgtatgactctggaatttgcttcattttctgatgggaaggaagctgtggctaaggcagccaactttcttcttagagagtatatgacatccactgctttgaatggaaaccaggaggagaatacgttcacagaagctcaaatggcagatgcacttaaagctatcggtttgttttgttgttaatgtgtttcttgattggtttcgattccactatcatatttgacgatttatttatatcttatcagggtgcaatggaccagaaccggacctcctattagtctatggacctgtaagatgccacttaggcttccctgcttggagaattcgttacactgagatcgtgtaagtacttagtagtcttgcaaaatgagtcatgaaattagttatgtatcttttttctggtatatctctatagtgattagttcaggaattaaattactatatatggaaagagtgtgactcagttacctgattagttctaagtaggctaatattttcttttgaaactagaattacaaagctctttatacatcttattttgacctatccattgctctttctctgccctaatcaataattgggagaggaaagtttggaatagataggaatgactcaccctacaagccttgcccgcaaaaggtcatctttgtcaaataaaacaactgatttttcattgttcctggtccattgaatagagtagaaaatatttcctgggtgcatgcccacttatccctacaaatatttgcggttcaagaagttatagcaatttttatacaagtatcccgaaagtactcgaacctcagattttgttggagaaaaccacatgtctaaccatttgagctacctttcttgaattatgtaggccaatatggttaactgtattccccactcttgcattgcacttctttaatctcacaaactatgagtgactcactaaaagtaactcaatttgaacaaggtgctctacattccattcttgatacaattctcaccacttgaagaaaaaaccaatgctttaaattttgtgtcaaatacatgataatatatggagcaataaatatccgtagattggtttgtttcagtttgctttatttttcatattatttacattgtctccatcattctaccattttgttatgcctttttttgttaaatgtcagattctaatttgtgagaaactatttagtctccatcactctattgctccgagctggagaatcgtttattgactactaaaattctttgtcttctgcatcattttcttccgagttctaacccgaattgctcttttgtttcacagacatatgggacctctgaagctcatgagatatggctccctaatcaaaactatttacaagttcaccatggtgcgccaaaactttggtaaataattatttttcttgacatttatataccaatgaggatggagaatgtgagtttaagaagggtaaatttaaatggtcaagtgtgtaatttgctttggcaaattaaagtaagttctagattaagttcctataaattaataatctcaattaagttgagtgaaatagtataaaattaacatttagttgattaataatatcgaaaaaattgtatgttttacaaacaaactactaattgtaacttaccacatattaataatctcgctttggttaagcttgctttgactaaaagtagtagttcggtatgttggctcgtgaatctaatttgtattcagaatctattaatagcggatgatatttttaaataaattctcgcttccacttttttttagaggacttaatgctcttgctccttggttaataaaaaaaaaaaaaaattcttcttccccaaacttaattcatcatgtttaatataatacactctattcatgttatggatatgtaagaaatttttaataaattcaaataattaatagagatgaaaataaaagtaaacaatctcttaaatgagagtagaggtgtttattagatcacatctaggcttatttagatttgatctaattatatattggatgatatatcttaccattcgattcaattaatttcaattatccaatagatctaacatccaatagatgttggattagattaattctatccattggatgtatttcatgtatatttattagtttaatttaagtgtatctaatattttagatttagtatttattggatcggatcagatccattaaatagattaaaatttaagtaaaattttaatgttaatttttatatatatacatatatatatattttttcgtataacaacataaatctaattactaattcaaactaaataaaaatattaattagttnnnnnnnntgttggatgtattggatttttggacaccttatctgacatccaatttgattggatattcaaaaatattattcaatccgatttgatcataattggatatcttatgtttggcgatcggttattattgaattg

SEQ ID NO: 41787 - DNA, 1195 bp, Cannabis sativa
tttggtaaaaaataataaaaaaaaaaactcctttcttttatgatcacatgtattgtaattagttaaagttatttaaacattttaagaaactttcgaatagtttacaatattaaaaagaaagcttaaatagttaattatcatgtgtctaagaaaaaataatcctacgtacaacaaaatatgtaaattttatttttggtattataaattatttaaattttttaaaaaatttacaaatacttttaaataacttatataaaaaattggattaaaaaattatcttaaataccaacacttcctttaggatgtaatgtagacttactttcttaccatcggtctctaataatatttagtgtatatgtatcaattattattcaactttcttagcaacttgcgaaccaaaaaattgaatttatgaaacaatattattatgttgaccaatctagttggctccaaaaatatatgtatatatacataaattatagaaaataataatttatgtacacttgtttattgtttttgattatgtcgtgagaatgatctagttgaaatttttactattggataataagattgacctagtcatatcaaatcatcatattcatatcaattaaaatatattttctgaaaagcatgatcataataattagttagtacttagaagtatatatatattaactaattgattataatttgaaagctactaattaattgtgactgctttcttctttctataaagcaggtgctcttgaaagtggtccacatgagaaacaaaaccatactttggtaactaaagaaaatgaaacccaattaattaaatgtctacacattctgaaaatactactcaatatacatatactatatgcttattaattaaaaaaaaatgaagcttaattatattgttaataattgtgataaatttataatgactaattatagaataaaaagaaatcccacttgtgattagctcttttgtttatttagccgtcgtcgtataagaaaagttagttattttaagtgcattgaatttttattaattatattaaaaaaatttggatagtttggtttaggatttgaaaattaaaatggtgggggttcacataagaatttttgattggtggagtgtttttaaaaacaaaatttgaatattattttgagttttaggctaaaaaatgaaaacaccatttttttttttttt

SEQ ID NO: 41788 - DNA, 986 bp, Cannabis sativa
ttctaactgacgtccctattcaatgcggtcagttcatagccgacatatatgatgtgagagtatgtatatatatatatatatatcaatggaaaaaacgttgattttctaaccatgtgcagttggtttaaatgtcgtgttagaactgaccctaatttcctttaccatagtagtgccctcatcaatggattagaagtagtagtatgttggtaaggagaagtttattgttggtgaaggtaataagctctccatttcttatcttggtaatggaagcctacttaatgaaacttgacatcccttgttattgaatgaaatgttgcttgttcataagattactaagaatttacttattgtttttaaacttaacagaataacaatgtgctaatagcattttactctgactattgtgctgtaaaggagaaggatacaaggaaagttcttcttcaagggatgtttaacaaagggctctataaactcaaagctccacacaccaagtcggcctttcattctcacaatcaaacaaagtcaaatagatctccatttggtgttactgtgaagtccaaatctcatgtaaatcaatccaaaattgatagtttttctatttcaaaagttatgtttgctatacgagattaggccattcaaattttcttaatcgtgttttaatgttaaattgttaaataatgaagcaaattatctacgtgatacttaccaatatggtaaatcatacccattgcccttaaatcttctacaaacaaagcagaacatattttagatcttgtgtatagtgtcttatgtattgaaattattttattaagatcttattttatggattttttttaaataaagtaaataaatatggaaaaaatggtataagggaactagttatcctaaactcatattttcatactttttaacattttcttttataagtttttccctaaaataatttttttgaaaaagaaaatcatatttttgcaaactttacccaa

SEQ ID NO: 41789 - DNA, 1223 bp, Cannabis sativa
ccccagccccattccaggtgttcttgaaagaaaaaggtaatcacgaagtaaaccacaaggtgatggaagagaaggaagcatcacctaggaaaagaaacatccataggaattcctcaaccaaaatgtatttttagttctcaaaaacaaggtcagttccagtataggaagtaaaatgcaaggctctaaagctgaaaaagattaatagttggtaattacgctaaatgcaagtactaaactaacactcacattaaaacataacaaagttatgaggaatctaactcactaataaattaacatacttaatagaaacagaaaaaaagaacaattaatacctaataaatgtgatgaaccttacaaactcagtagtgtagacatcaactgcctgttcaaagacaccaacatcttccctctttctgcccatttgaaaatagagaagcataaacccattaaaaaaaaaattaaaaaaaaaaaaacaatgaacgaaataaaaatcttgctgcctcacagcagcaaagtgcgataaaaaccaatcaccattgaaaagttcatatcagcagccggacaaataataaaatgaaaaacaatcttacaactttctagcctcgaatcgcccccaagccaatgaaagaaagagccgaataaaaagcaccatcgctgtaaggttatatagaggtggtccataacgatgtctttgctcttccattggactataaaaaataatacgcccaaattaactaatatcgaacaacatcacactgctttcttaaacttgtttttttttatactttagaacttccgtatcttatgaagtacacactcacacatatatttatgtacatatatatttaaatatcatctcaatttagaaagaaaaaaaaacaagaagcatatgataaatagtggaaaggatacaaactatcctcaaaacttacccatcatcatcatttatttgacgggtgaaatctagtaaaacctgcatccagaaaatgaaatctaaagatttactcaaggtatcattaatttttaaaacaacggaatacaaataaacaattcatacaaagcatcgcaatgagtctagagaaacataactcaaactaaacccaacaactatatgtacatgagaactcatatattgaactatataaattacaaattactaatactattactgaacacattgtgtcaatgaaaactcgaagatgtaacgttccaaggaactgcat

SEQ ID NO: 41790 - DNA, 2444 bp, Cannabis sativa
tagaaagacttgatatccaaacacataactcccttaatatatctttcatttttaaaagaaaaaaatgatagatttaattacatgattttttttttctctaccaaattgttgcttatactctaataacttcataatctttaatatacgttaagattttagaatgagcaagaatatagtggaatgcaatttaaagattaagatttgtatttggttagacagaataaaaatacatgaataataatcagaatgagtagaaagacaataaaatcgaatttataatgcataaaaaaaattaataattatttttattttatatttagttgtaagtttaattttttatttcggtattgtattttaattttactttgttataataaataatgtcatataatttaattaaataaataatgttatttttaaaaaaatatttaatgtatatttcaattttttttgtttaaaaaaaaaagaaaataaatgaaaacagagtatatagtgtagaaagagagattaaattcacatttgtttgagtatcaaactccttgaatttacatgatcgtgccaaacataacaaagccaatgcttaccgagtacttaagcaaagtaaaatcaataaatagtcataaaaaaaaaaaaaaaagataatcattaatggttaaaatttttaacaaaaattaagtagcattgaatattaatgtagtaaacacatatatactacatgtatatttataaacctttataaaaaaagaggatagtaaaaaaacgtaataaacttgtgccatttttcaatggtaacataacataacatacatgtgatacttaaagaaattccaaacctttttttcaatcattgcgaagaccttaaattccttattttcccacttatttagcaccaaaataacaacattaaatgaagacattccgagtctagcccacaacaaaactctcatttcttacaaattgaagatgaaatagggttaaaattagcaatcttacataagttagcagacagttctcaaaccttctagataaaatttgtgtcttaattaaaaaaaaaaaaaagattatcaccaatgatctaacattccagtccaccacgttagctcaactctccaaatttttcaggcctaaactcccatcaccaatataccgaaatccatttatgtggcttctaaattctaatacccttctacgaagaatgtataaagaaagatcaaattttaaaagtggaggagataaagaaataaacaaatgaaatcattgtttatatatatatatttttgaatagaaatcattgtttatattttattgtttgatatattatataaatagatatatgagaaaaagagagatgggaaggaggcgctgactgagcgaaccgtgtcgcgggttagtggggctccaggcgggctgggacagtcatatgggctgggctgggctttcatttaatgatttcttttttttttttttttggttatggcagttttgtcatttttctccattccttttccaactctgcttctttcattttttttattcaaccaaaatacacttctataatcctattattaccaacattatgtaatgagtcaaattaggcaaaatcattcaacaaaatattttgatggagaactaacttagtaaatgtcatataactagtgactgtcccataaattgataaagatctctaagtctaaatatatagagttgtagtaattatgatcatgatgttattaaataaaaagaaatatatatatatatatatatatttatataagggaggagggaacctttgaggttgagtgacacgtattaaaaaaaattgcaaacaaacaaatatgaggcttaattaattaagtaaaagaaaatgcatgcctttttaagtagagtaagtaacatatcaacatatctctactactactactactactactactgatgaaacaagaccaatacaactagcgatgataaaagtacccgtagagatgttgaaccgatttcattcaccgcgggtatttaaccccccagtcaaactatttcaaatttcaccgccaaaagttctgcttcttctccccagctctgttctctcctccatttgctctgttctctcttctcccattcatctcacgctctcctctgctttcttcttccgttctcacgctattctctctgcaatctcaggcatgtttctaacttcaatttatcctattaatttcatagatcacatagataaacttagttttacttttttttttctctctgcaatctcaggcatgtttctaacttgaatttatcctatcaatttcactaagcatttcgtatatactttagtgtgatgttgttgcagaaagaaaatcttgagagaatagaaaatgtataatgttgttgcagaaagaaaatcttgagagaatagaaaatgtataatgttgttgcagaaagaaaatctt

SEQ ID NO: 41791 - DNA, 1688 bp, Cannabis sativa
ctgtattcgtctagcaataatggattaggtaggcaagacattggagaggatactccaccacattgtgacgctccaaaattttataattccatagtttattctatagagcaggagtaatattgcaagtaggagcacgattcaaggcctgcaccagatagacggacttagtagataattaactatttgattctttggtccatacccacttttttctatcttggccagagagtagagagtttactacctttgataatactattagtcatcttaggccaaaaaggtaatgaagtttggacacattctaatttttattgtctgaacgtaaattcattactttttccaaaccctcaggtcggacgtttacaaggtgaggatattatggtcatgtaaaactcagattttctcaaatattagtatccttcccatcctaaacaagtttaggagcttctttcaaaagaattttcttagtcttcacaatattcttccctaacttaaaagttatgacactaaatatttttttcattattattgtaatgtctatacatataatcaggatttaatctcaagaccccacatatgcaccactttaccttctatagacacttgagttaacctcaacaaattatgagactagagtaataagatattaatgtgacttctattgtgggtgaagagttggctgctttgtggtttgcttaagggatgagtccaattaaagaaggggccaatggaccaatcctagtcgtatacgatacgaccgttacaaacaagtacaactttcaaactattctctcctaattaataaacctgagttgtggcgtgagtgcaacgtaataatacaaggagaaaaacagtgaaaaccaaaatataatgtttgccaattgttagtatttagtccctcccactatttggtttgtaataattttcttttgctttaattagtttataattttacacaatacacctatgaataacaagtcaatggcggcgcatttttcagtcaaattcaattgcaaattattagtaattaacaaagaaaaaaaaaaacacaaaacaaaataaaaggtaatggaagaaagaaaccctacaacttgaaaattgtagtgtgggtttagaaaaaaaaaattaaattaataataaacccagcttgcaatgagggagaaaagtcaaggtcaacagtcacgtctccttggttgtatagtgacataatgacgcttaaaggatggtaatttcttttagaataattatcattgaactttttatattatttaattttgtctcctaaaatataaaatttgttaaaaattctttctctttaaaatattaaagttatacaattatgctcttttaataataaaaattagtaattttattttgaagtttgaacaatacaaaatttttctttcttttattaaaagaaaaatttaaattatactcatttctgaaaaaaaaaaataataaaaaattattaaaaaaacgtaataaaaatattaaatttatttaaaaatctaaattatttctaaaaaaatatttttaaattttatattatttataaacatgtatcttaaaaataatactaaaattattgaaaatctaagggaaacttacaaaaatactgaaatttggattaatttttacataaatactgtcacacggaaatctttacaaaaatactgtatttttataaa

SEQ ID NO: 41792 - DNA, 1752 bp, Cannabis sativa
ccgcctcaccagcagccaaggacaataaagctacttttgggcgaagagcccgaggctgtacgacttcccctgccacctcctgggttcctgaatggaccgtcttctccggcaacgatacaggtcctcccaccgtggtcgactccctagactgttcttcccccccccctctttctcttttgcatcttcatcttctaacccttcagtctctaccccatcaccgaaaaccttcccatgatcaaagtcttgataccaacacgtattaaaactgccatggaaacgatagcttaaatcgttaagcttaaaaaatttcagttcaaagcttgtgttatcttgactcatgattatggtctcaggaatgaacccaaattcatctccctgcaactgtaatctcaagtgagacaacatgctagcctcggcagtgtccttatccacatccagtaatcctccgcacctttcaccaatttttctaaatattttcatgttccaaaggttcaaaggcagcccatggacccctatccaggagcccctgcactctacctttacgttgtccatctggtttgccaagctccaagcagaaaaggtgactaatgactgagccccaggaactttcatactatgaatcttcaaaagctccttcctatccttctcatccttgccccataagatacatctatcgtcaaacaattggctaactaccagcttcctctctaactctctagagagattgtaagatattgtaacccaagccgcatgagtgttattcctcgtaaggacaatagccaagctccagtctctaggcagcgccttcgatctcatatattcatagaacttaggctgggtgaatctcttcactggatagaggttctttggtttgaagccaagattaacttcaggatatagatctttccattcaatacttcctctgtcacggttcgcaactgttacctgagtattcaccctgttgtgttgaactttcatcactggtcttaacccttgcttcaccacattggcccaggaacgatgagtcgataccccccctgccttctgaccaaccttcgtttggtagcttcgctcaataagtcttgtcctcttcctttttacaatccctttgaggcattcttttaatgaccaacccttctcgttttcttcttctggtacaattatcatctttaacttgttgtttcttagcactgagattttcaaaaaagatcctttagtatttgcaaaacattccaagaaacaacaaatagtgctgttcctgaaggagcgtttgaggtaggctctttgtgtccctgttttttgaagaagctcttccaaaatgtctatgaaccagtccactgcatcaatcgtaacagccacttcatatccgaacagccttgttctctcgcaaatacggatagaccccccatcatgcgacaatgttagcataaacactttgtgtttagttctgaaactccagtatttttggagagactgatccacagaaggaccagaaggattttgccagccaaaaccagtaggatagtggccttgtttcttcccaaaaccagtggggttctggtgctttccatggccagaagggccaggtagaaccctcgtatgcatgggcacacttctcaaaaagaggagagagaagagagcatttcagagagtttttctatgcactatagtattgtttgaagcacaatataggactaaggtaaatgtttgagcttttcttgataacaaactaaaatcaactttaagaaacag

SEQ ID NO: 41793 - DNA, 1712 bp, Cannabis sativa
agtattaaagaaaaatctaaaatgtaaaaatataaaaaaaaaagagagagcaagtataaatgtttaatattagtaaaaagagttacttagtgtaaatttctctaacaacaaatattctccaaattaagaagtatatgtatatatgtgtatatagtttatgaatattttcaattaaatctttctataaagtttatatatttttcaactaaattaatctctctctctctctcacctggtgacaagagtgcccaaaaccactcgattggcacctcgaacagaatttttgtaggaatttcaatataatatatatgtgactccattaacagtatcgtatcattcttcttaattaatcaagtatatctatacaaaatcgtataatcatgttttggaaaaagaaaacaaaaaaattaactaattaatatgcaaataatacgtacgtgtttggctccaaattactgctagaggccgttttctggaaggtcgtcacaatatgatcagctcttgcagtgcatattttatatatatatatatatatatatgtataggtattgtgtgtgaacatatatatatacatatattctgtttagtactttctgaagaggaatcatcaagtccagttatattcttaagactcaaagaatctttagttattgctttttaacaaattaaaggtagtacagtttaggatgcttgtcactctttcttttcaaattttttatgacaaaattccaaaaggattattgggtcaaactcctcttcttaattatatccacaataataatataattaatctactatatacacagtaccacatgattcttctaatatatataaacaagtaataaaactcactatattagttttatcaaaaaatagaaaaaaaaaaaaagaaaaaaaaactcactatactagtacggtatatatatattttatacaaactaatatatataccccaaaacattatatataatgctataaatacgagttggattttttcacacaacacgagtaggagagaaatgaacacgatctaacacgaataaatatagactaattggatacgacgacaagatattgcaaattggcatggcaccacatgaaaaaaaaaattgacttaagcacaataaatatgaaagcacagcacgtaaacataaataaactaacttaaaagcacatgttaaaattttttataatttaaaaataataatagtatttatgaataattatctaaattctaataattctaattatcttttaatatgattaattgattatgtttaaagtattgttaaacaattatataaaaataattaaaagtataaaaagatacataatttggtaattaacttattaattataaaaaaaaataatggtaaagtagagctcaaattcaaacttgtataaaaaaaatggactaatccatatataaataatagaccggttcaaattagagcacgacatgaaaaatgagcttacaagtcatgtcgagcttaccttttaaaatattagcacgatatgatctatatctttatattggctgacagagcacgtacaacccatatttttttatgagtcagcacaaacaaccatattattatgggctttttaaaatataggccgagtcggttcgacacacacttatttacactattgatattaatagtaccactggtgtaaaaataatctcatctactaaaggatatgtaattgtt

SEQ ID NO: 41794 - DNA, 829 bp, Cannabis sativa
atcttttatttattttattaattattaaaaatttaattagaaaaatagtaaaatacacttttagttggaagagaaaaatgtattacacattcttttattgataaatataaggtttaatttatatttctaaatcaaaaataatattattttaatatgaacctaaacctagtaatctctctccctctcattcattttttccaatcacaaagaagctaaagtgaatgaatattaacccacacttgtgaagatgatactttgaaaattatggaagactgttcatatattagtgtgcaatcgagagaaagaagatctaaatttatcagattacaataccttgctacaaaaagtgattcaaagattagagtaattgaacagaaagtgacgatatattctgctgtatttctaatgtaaaaatcctaatttttatgtgtctaattcgttgcattaaaacatatttcagattttagattacataattataatcaacattatttaattttagtaaaataaattttaataattgacttcaaagtcatagtaatatttactttcattcataattgaacaactttctagaaatgacctttacaaataccttttttagaaaaattataccacaataccataccaattaatcaccgagtactcttctgtagatactatccatgtaagtttcaatagcactgaaaaaagcttcattggaaagatagatgtcatttatattagtgacgtatacaatatttagtccttttataccttttgtgctatttaaataaatttctccattagagttttttttcatgcatgtaataattaataaatctaccaa

SEQ ID NO: 41795 - DNA, 5236 bp, Cannabis sativa
  modified_base (3298)..(3310): a, c, t, g, unknown or other
gtctgtaaccccttacccgaactgagataagaaatttgctattaatagtactacctatataaagtgaatttctaattattataatttataagttattcttcgagttagtaccccttaaatttcctcctcttgtcactattttcgttgctttaatcatatttgaagcctctactatttcttcttgtttgtacattagtcaacagaatatgaaggtggtaagattgcttccacacacacacttcaaatatttataaaatagaaaccatattgattgagacaatatttacaattaaaaaagaaaaatggggatgagcagtccaccaaaaccttaaaaagcttgaaggatttataaaatagccggctgctccctttattgattttggtagtatctctgtggtacacaaatgtcaaaattttctttggtcaaaattttctttggtcaaaattttcttggtattattgcacaaatttatatgtagtttggctgattaggtatgtggactaacttttttggattcaaagtattgatatgcttctatctgctatcattgattttatagttatgtttgaaaattacctttaattttgccaagttaaattgtaagcatattcttaaaagtgaaactttaattatccatttgagaggataagactcctgtgttttaggttgtctgccttccttttgctcttcattccaaatgacaatatcttgatatagtaagaactgattagaaaggttttggaagaggttgaatttataggagcttttcataagaataagaaattagaagtatcagattgtcggaattattcatatatttattgggtgattgatgatctaatgttggattttgttgtcagcttctttatgttttaaatttttatttccgatagtatggaggaactggtgaatttattgaatagtactttaactctaagtcaatcttaacagggaaatttgactcatcatcgggcccttctggaggattgaggagttcagatgtttgtacacctgagatggtaattgtattgacactcactaatatatttactatctcatcttgtgattgttagtacacataagaaccttttgcctttatgttgttgaaaactagagtgtttgatttgtagactacatttgattgtgataacccaaaggagtccgagtctccccgttttcaagccatacttcgtgtaacaagtgcaccaaggaagagatttcctgcagacatcaagagtttctcccatgaattaaattctaaaggtgtacgaccttatccattctataagcctcgaggcttaaacaacctggaggtactgcagtatttcactttattttttatttccttttcagttagtaattttctttttggaatctatatttgttttcaggtactgtattttatgcaggtttttatactcgcattatttgatgtagcttacattgtttcttatcgtcttttattaatacttcctttgtttcttataaaataaaataataaaaataaaaataatgcaggaaatcttggttgtcattcgtggaaaatttgacaaagccaaggaagaagtaaactccgatctggctatttttgcagcagatttggttggtattcttgaaaaaaatgcagatactcatccagaatggcaagaaactattgaggacttgctaattttggctcgtaggtgtgcaatgacaacacctggggagttttggcttcagtgcgaaagtatagttcaagacttagatgataggcgacaagagctttctcctggtatgctgaagcagctgcacactcgtatgcttttcattcttacaaggtgtaccaggctgttgcagttccacaaggaaagtagattggctgaggatgctcatgttcttcaactacgtcaatctagagttcttcattctgtagagcgagttcctccagcattgcctagggatgcaaaaagttctactgttgcaagtgcatcaaaagcagcttcaactagaaaatcatacagccaagagcagcatgggttggagtggaagagagatagcactgttaagcccggaaatcttcttttgccttctgctgacgagacttcaaaaaatttggagtcttctgctgctagggataggatgacatcttggaagaaatttccatcaccaagtgcaaaaactgtgaaagaagctgctgctgtcttgaaagagccgattgatgttaaggttgaacaacctaagcttttaaacaggaaggcagcttctgaagtggatctgactgcagctaagcccctggactcccttgctaaagattctcatgatcattcttccaagcatcgacacaaagcgtcttgggggtactggggagatcaacagcctgtatctgatgataattctatcatttgtcgtatttgtgaggaagaggttccaacttcaaatgtggaagatcattctagaatatgtgcagttgctgaccgatgtgatcagaagggtctaagtgttgatgagcgtcttcttagactttctgatacccttgaaaagttgatggagtcatttgcccaaaaggataatcaacttgcagtaggaagtccagatgttgcgaaagtatcaaattcaagtgtaactgaagagtctgacattttctcaccaaaactgagtgactggtcccgaagaggctctgaggacatgcttgactgtttccctgaagctgataattcagtattcatggacgacctgaaaggtttaccttccatgtcatgtaaaactcgtttcggtcctaagtctgatcagggaatgacaacgtcatctgcaggtagcttgacacctaggtctcctctattgacaccaaggaccagccagattgacttgcttttagcaggcaagggtgcttactctgagcaagaagatcttccccaggtatcttgtagctctttttcaaagaggtcttcaatgacactctaattttgaaagtcattaatataaatatgtatccacattttatcattttaagtttatgatgccagcatctacccattgccttttcagatttcagtcaagaaatattatcttcttaaagcttttgaaaatatttgatgttgttttcatttaatctagaaggatagggagaaatgaactatgaattttgcatgcatgcatggtaaagagtttaagttttaaggaacaatattataaaacaatccgacttttaatttttgttgtcagcgtaaaatactattggcacagtactggtaatatatagtttgaatcaatagaagtatttaaccaagccttaaagtgaataataataataataataannnnnnnnnnnnnaataataataatgaaaaaaaaaactgtgcagttttgatctgctgatgatattattcttaaattgggttctatatgtatattattattgatattggctagccatttttatttgggtgacagatgaacgaactggctgatattgcaagatgtgtagcaaatacacctttggatgatgatcgctccaatccatatctattaacttgccttgaagatttgagagttgtgattgatcgaaggaagtttgatgcactgacagttgagacttttgggacacgcattgagaagctgattaggttcatttgctgctttttcatttgaaatttgtatatctttttttttttggtgtagtacttgtactttcaactttgctttttttcctgttttcttgtaaagttaaaatgtttatttctttattttcagggagaagtatttgcagctttgtgagctagtagaagatgaaaaggttgatttaacaagttctgtgattgatgaagatgctcctctggacgatgatgtggttcgcagcttgagaacaagtcctgtacattcttcaagagatcgtacctcaattgatgattttgagattatcaaaccaatcagtcgcggggcttttggacgggttttcctggctaaaaagagaacaactggggaccttttcgcaataaaggtttcttttctgatttctcattataaaaataaggatcattattctgttattttataacttttcttctaatcgtatttgatcttcttgctaatttctcattttttttgtttttgaattaaaaacccatgagtctctcccatgttgcagtttactctccttgtagttctttatatttcttaaataagcactgaacattgacatcttccaccaattgttcatttgtaccatctgtaacaggttcttaaaaaggctgatatgatccggaaaaatgcagttgaaagtatcttggcggaacgtgatattttgatttcagtccgcaatccctttgtggtgagcaggtctatcttgctaactagttaacctttgcttgatggaaaaatgcttttcttacattttgttaaatatcaggttcgcttcttttattcattcacttgccgagagaatttgtaccttgtgatggagtatttgaatggaggggatttatattcgttgttgagaaatttagggtgcttagaagaagatgttgcacgtgtttatatagccgaagtggtaagttcattgtatcttattttgaaacctatgctactttttgttcaactctgtatctcagcttatgtttgttcttttatgttggcaggtgcttgcgctagaatatttacattcacttcgtgtggttcatcgtgatttgaagccagataatttgttaattgctcatgatggtcatattaaggtaaataccttgtacacgggcacaaatgtattttatgtatgtttttaggctgttctgttctaatctatacacatctcccacattaaaacacatcacctaatgtaggaagccaaaaaaaaaaaaagatatttgaactctttcatcattttcttaacagttgacggattttgggctctcaaaggttggtcttatcaacagtactgatgatttatctggcccagcagtaagtacgacatcactaatggcggaagatgagcctgagttatctttgtctgagcatcagcaagaaagacgaaagaaacgttctgctgttggcacacctgactatttggcaccagagatactgttgggaacaggacatggtttgtatagtcctctttctgtttgaggtgcattgaatttcttcaatttatctctcctgaactccaattaatttagtggcctaaaaggaatactatagttgtctgggagataagtttttttaatccattattatgttgtgatttcattctatgatgtattgaaataa

SEQ ID NO: 41796 - DNA, 741 bp, Cannabis sativa
catgtgaactatgcaacataaaaactatttctgatctttattatttagtaaatctgtttatattgtaatgagttttatttaggacaaagggcagaggattggactcgtcagcccgcgaaggaacaggcttagatgggtccttcgcgtggctagaaatcgacagatagttgggacaggtctttataggggcggagtaggggaccgaaatgaagaggtagagctagaaaggactagctgtagggttttttttacaaagaagggaatcacgctgaattgatggggttagagagagagggagagttatttgattttttttaggttttgaaaaaaaaaaaataaataaatagtaatggtatttttggtaaaaaaatatttttaggttttgaaaaaaaaatggtaagagtattttgggtaaaacaaggagttattatgatagtattagggtatttttgtattagaaatttttattaagtataagaaatgaaattttcttaataatattacagtaaagatagtttgtatttttgtaagaaaaaaaaatttaaaaaaactttaaatctatatttttattattattattattgagtatttataaaaaatattcttcaataaattacaccatcgatcgaacctataagagaattttgagattttttttttaataataattattattatgggattatttcacaaaaacataaaaacaacaaaaaaattgcaaaaatacggttttacggaatt

SEQ ID NO: 41797 - DNA, 740 bp, Cannabis sativa
  modified_base (677)..(692): a, c, t, g, unknown or other
gagagagagccatcactttctattatgaaaaaatgccatatttattataattaagtttacatgccatatatatcaaaactttgattttttttttccatatttttgtaaatagccccttttttattttgttatgatattgaatatgccatatttatatattatgtagatttatcatccaagtaataatttatgagaatttttttttgttagtgttgtataattatttttataatgtttagaataaatccttaatttcagttctaatgataaaattcattacatagaatttagtgtgatttgtgaagtatataattgttccttataagaataagaataacaatacttcagtcactataatatgttcttttttacaattcactataatatgttaaaattattatggaatattataatttagaaaaaaaaaatagagaagagatgagaatttttttagtatttatttcaataggtgatctcttatttatagacatataagagtcaaatattaaaaaactaagaaaaagagaatattgattacaattaatgataataaataaaagatttggacatctatataattattaatatttataacactcctccttggatgtccataattactgcctcattaaaagtctatccgagaaaacccagtgggacaaaattcggtcaaggannnnnnnnnnnnnnnngaaattactccccctcattttggcattcatggagatcctttaatcgac

SEQ ID NO: 41798 - DNA, 6755 bp, Cannabis sativa
  modified_base (6692)..(6714): a, c, t, g, unknown or other
tttatagtttggtttggtttggttttatttttttttttttttttttttgagttttcttttttccggatgttttgttttcctgagaaacatgagaatggaactcggatatgatggggtatgggttttgtcgaatggatcttagttgatatatattgggtaattcagcaaaaaagaaaagaaaagaaaaagagtttataaagtgaagcctgtgaaagcagacatgcatcgtctttttcgatcataaagagttgatatgtagttagcatgttgaaggtctttctgtatattgcgttgtgtttgtggaaccagcaaattttagtttggagagcactatatgagctttcaatgttgtcattttgcttgtgtttttcacctgaaatttccctgtggacgcagttcaggtacgatcctaacggcataggttttgggcacacagtggttttgaaggcctatccagttggtatggtccctgcaatgaatgatgttatagaggatgaaggggagtctagattagaaccatatgtgggattggagtttgattctgcagacgaggcacgagaattctacaatttgtatgctaggcgtgtgggatttaagattcggactggtcaattgtatcgctcaagaacaaacgggacagtttcttctcgaaggtttgtgtgctcgaaggagggatttcagctcaattcaaggacaggatgtccagcattgattaaagtgcagagacgtgattctggaaagtgggtggttgaccttttcttgaaagatcacaatcacgaacttggactagctgctggggaaagtcctcctcctcctccattgctccagaagacttcattaacggcaaagtcagtagttactatgccccataggccaagaacgaagttgattgaggaagctgaggatgggagaccttctccctctggaattatcaatatcaaacgccttaaaagggatggagaggaactgcaacccaaagtcgaaccattttctggtctggagttcaactcagctaatgaagcataccaattttatcaggcttatgcagctagtaaaggatttagtatcaggatcggtcaattgtttcgttcaaagcttgatggatcgatcacatctcggcggtttgtgtgttcaaaggaaggatttcagcacccatcaagacttggctgtggggctttcatgagaattaaaagacaagaatctggaagatgggtagtggaccgtcttcagaaaggccacaaccatgaacttgagcttcaactagaacttcataaaaaaagtgttattgcttcaaaaaggttgttagaggaggagagtggtggactagaaaatgaggacattttcaacataagcaatgctaacattgtcaaaagaagtcgagaaaatcacataggaagtgattggtaccgtgtgcttttagagtattttcaaaccagacaagctgaagatacaagtttcttttatgctgtagaagtggataatggtagttgcatgagtattttctgggctgatggaaggtcaagattttctgctagtcagtttggtgatgctattattcttgatacctcttataggaaaagtatctatttggtgccatttgccacttttattggaattaaccaccacaagcaaccagtacttctcgcatgtgccctaattgctgatgaatctgaagaagcttttacctggttgtttcaaacatggctgagggcagtatcagggctccatccgctttctataatagctgaccaagacaaggccatccagcattctatcaagaaagtatttccaagaacccatcaccgattttcgttgtggcaacttaaggctaaggaaagggaatatctgaatttgatggaaggctctttgcggtacgaatatgaaaagtgcatttaccagagtgagacagtcgatgaatttgaagcctcgtggactatgcttttaagcagatttggcttgatagagaacgcttggctgaaagaaatgtatgaaaagcgacaaagttgggtcccagcatacttacgtagcaccttttttgctggcattactctgaatgataatgttgaatcgttctttggggcattcctgaatgctcaaacacaactagtagaatttgtttcacgatatgaaagaggtgttgagcgacgtcgtgaagaagaaagaaaagaggatttcaattcttataacttgcaggttctcttgcagacaaaagaaccagtagaagaacaatgtagaaggctttatacactttctgtgttcaagatatttcagaaagaacttctacaatcttatggatatcttggtttcaagatttatgaagaaggggccattagcagatatttggtgcgtaagggtgggaatgacaatgagaaatgtgttgtgacctttagtgcaaccaatctcaatgttagttgcagctgtgaaatgtttgaattcgaaggtgtactgtgcagacatatcttgagagtttttcaaatactggacataagagaaatcccatctcgctatgttttgcatcggtggacaagaaatgccgagtacggtactcttcacgatttcgaatcagcaaggagttctcaagaactcaaggctctgatggtatggagtttaagagaaacagcctctaaatacatagaggctggagcagcttcttttgagaagcacaaacttgcctatgagattatgcgagagggtggaagaaagctttgttggcaaaggtaaagtgcttggttgaataaggtcagctatctctccaaggataactttttgtagctgttaactccatatgtgtagctgctctgcttcatggggaccttagttatgtaactgcagaccataaatgtacccatttggtaataattcttgcccttatcaaaaccaagatgttgtatatatagtgcttgatgcggaatacatttcttctacatacccagttctccaaatctcatccaccagtcagtggccagtggccacagtcattttggtgtacttggttgtctttctttctttttttggtccttgtctcccaacagactggagctatatacaattgcaaggcattttagattttcattcttttgtttcattttccttgaaaaaagaagaagaaagaattgctcatttatgatttgtttcttaacagcattatccctgtccaacacacgaaaattttggggctgatataaacacaaaagctagcagtcaagacatgtttaaaatgaactctaaaaatataacaagggcagcatctaaacattgctaatgaccacaattgttaatgtgtttgaactcagatgagaaaaaaatgtaaacaaagaatatgaaattatgtatctcccaagtcctttttatagaccgttctatacttaatggactccaccatggttgccatttccaactaatatgtcactcattcccccaatcatgtcatgctagctcctcatccaacagcccgtgcgagtgtatgttaacaagttgttgaaaccttttttaactctgccaatcaaatttcgagtagatgagacatagaaataagccagaattttctaagataactgttcacttaataataatgatatataagttagtacctcgtgttagttagacaagaagatagtctgagagaacacaagcagcggtaacaccaaccaggcacaacaaagaaataatatctgctctaccaaaggatgattccgataagttataaattgtgtgagacttgctgtctcctctaaagcctctgacaatcattgcctgtcagaaatatcagtacaaaggaatgtaaatgacatttttatgttaagactgtcaaggaaagcgaagagtaaatgctcttaaagccagaagtatgaacaagaacaaatattatgcacaatagatattgcaaacctgtgaaatctgctcagcatggttgaaaatatttttgaaaattcgacggaaataggcaaagaacactgcaacattaaagatcagatggtaaaagcactggaaatatgaatacgattctgagtatacaaagaactagaacttggtaactagtaatctagtatgatacgatatatattaccatgtaattacctctgtaaaattataacagattacaaaacaataagtacaatgtagagccccaattgatagcattaagaacattattcctttgagaaactaaatcctattataagaagacatgattttcataaactaaataagcagcaaatcacaataaaacccttcatgaatgaataatgcattagtgcttacgatcaatggactccaacattgtcaattgatcccaatttatcctacgagatataatccccaatgctacattccgtacctgccaacagacaaattcttcaagaggatgtgtataaacaatgatagttttgttccttccaatcaaagataaggaccaaaatatctttaaagtccaaaaaaagaaaatcatacagaaacagcttaacagaatttcactttcctcgtcaaacactagattgatgaaccttaacgacaacataagggtgagagtaatttcagccactggcacaccaatatgagttaagggaaacataaaccaccgtagggcaaatgcaagttgttcgggggtcgtggttgtcaggcaaaggcttgcactttggaagacctattataaatatatgggatatggttttcagaataagatttgtaaaagaatgacgaggatcgagccaaattaagaaagaagcttaccgtgaaggttaaacaggcagccgtactagctatcgacaaccccttccttgtaaaatccaatggccctagcttcataattgaatatgaataacctactaaagatgaaggaagatttggcaatcccgtcactgaagaaggtggagttcgtgattgaacaagggatggcacgccatctgaacccagccccaacatgatgaacaaaattccagaaagcaaggacactcttcccagttggtcctagaggtgttgacaaaaagagaatacaaaatttttaatttgttattcaaagacaattctatgatttatccaagctaagatggatctattagcatttactaaaactgatatatgattgtggtaaggtttgtttttgaatcaaaccaaagtcctagtagcatcgataaaaagaaccgaagaccagttacaaaaggaaatttatgatgcagaagccaaacaggagttaattaccatccacgtctgtcttggaagaatccatattgacaaaatggccaagaagattactaatccaagtcgtaatattatatgcgcccttgctggtaaaacaactaaggccaatagccatacctgcagcatcaataactttacatatcaagagctagagaaaccatcacagaactagtacttgttgcatataataataacctcttttatcattttccttgtatgtatattgtttgaaaagggttaagccaatttacttttatggcaatgaagtgccaggaactttaacatagtatgtaccgattacagagccaatagttatcaaatctagtaagttaaacatgaagtaaaacacttgatttaataaaatttcctcctgcaaagtgtttttcatcttgaagccatttctttgaataaatgatacttttgtcatcactggttagcaaagattaactaatgatatctttacagaagttgttttctttttttgaaaattctttacagaagttgttaagtacacatatatttgagaaattccttaataatttctatgaacaaattgggctacttcaaatcaaagatgagatactagaacataaaaagtccttaatctcgtactggtcacaaaagcagaaagaatgaacgaaaccaaccttaataaatcatatactttgtactttgaacctcctaaattgcgaatcagtgagaaaacaaattcctaaaaaaaaatgttaacaaatttgatacgagctaccattttcattcatatattccatgaaaagaaaaggatcgtgaatttgagctaaattaataaacaaaggtaaatggtccaacatcaaaacccacaactccagcaattcgaattagaaaactataacaaaaaccaaaaccgataaaggaaaaaaatgaagcataccaatttgattcttgggtcaacagaatgaagaaacgtgaaaggcgaagagacgtactggccaatgggactggaagtggcgccggcaattagtcgaagaaccttatcggcggccaaagctccagtgggcaaccggttgacccagttcctggctccactactatcggtggccgaagctcggactcgaaagcttatgttcttccgaaggtggggtgttttaagagattggttagtgaaacaccgaggtagaagacgaagggttttgggggaagcgaggtttggttttgcagggaaggtaaccgttggtacggtacagtgcgtgcaattcattggtgaggttccccaacagtggagctggagagttcgatgattatatccggttcgggttcttatattttagtttggcgggagtttaacgatttactatcgttggattggttgatcatctaggtgatgaaagctcaggcccatcttgaaatttagataatgattaggggcttttccataaatactactactttttttaggggagttctatttacaccccacaaaataataagtacaccctattattaaaaaaaatataaannnnnnnnnnnnnnnnnnnnnnntcttaatatttttttaaaaaatttttcttatattattttat

SEQ ID NO: 41799 - DNA, 857 bp, Cannabis sativa
caccctatataaatatattgattagttaattttccataattgtaatggaaaagccaaaaggtacataggcgtaataattaaaagcggaagcatttgtattgtagctgtgtagatgtaccactgtgttataatcttatctaacaataatttattgtttatttatgtattttaaagtttaaactttgagtctattagtgcccattacaagaaaaaggtattattgggtgttagtccaaatgacaagaggaaaataataatttaatattttcaaagaaaaaggaaatcttcattagggacagtatatggatggattacaattctatattatttacataaatacatttatatatgaaggtgttttcaatgcatttccattttatttgtttattttgttccttaaaagcctaaaaagaggcactttgttatagagtagttctatgggtaagtatgtcagttgatattataagaccatagaaaataggttaaaggaaaaagtagaaaaccaacaagagtatatctctttttttagacgcataactgaatccattgaaagcaatttcacccgaataaaataatgtttcccacacaaaagtaggaagtgatatactcatatctaaaaacaatatttaactttatatgataatatatttaattggaattaacataattatgtattgtacacaacttgtgccagtataacgtaataaacaatttgtatattgaagtttgaacatttatgtaacgtcccccgcttttagcgccctgacaatcacggaatgataacttttatgcacgagtatgttatgttggttgcttcatggaatgactaattcaccctacacaccaacacgagtatt

SEQ ID NO: 41800 - DNA, 851 bp, Cannabis sativa
acagcagctttcagtgtgctgcattcacagagcatcacagcagaggaatcataatgacagctcatcagtacctgccgaatattccccaatgattcaggaatgattttctaatgattgtacaaatcccaaggctgattttctgttattcattgtcaaattaaatactgccacttgtcacaattacaattgtatccgtttgtaatattctctataaaaggaatgaaatccctcagcataatttgagctgagtttaatttctgcatttatttcttgatttctctctgttttaagtttgtttctttagattttaacctgttttaaatgtgttttttcctctggaattatatcattttggttatggaattttcttgaatactttttatttattataaattaattaatttattcaataaattaatttggaaaaattgttaggttgctcaaaaaattataaaataattttaaatggcttattattatggattataaattgttctagaaggattaaattcaatttttaatcgtttttttagttttaatgaatttatttggttatttagttatttgtagacctcacacttgtatccaaaactgtacaagattggctttcacactctaattatagagggagttaagaaacctcttagcccaagatatgtttccaagaggggggtggattggaaattttaactaatttcataaatttaaaaactccaaatacaattcatgcaaatattcaagtttaatgcaataacaaacataatgacaagtataaacaaataataaacttaaaatgtaaagactttagggataaaaattgcaaactcttgatttttacaaggttcggtaga

SEQ ID NO: 41801 - DNA, 1591 bp, Cannabis sativa
tccttgtttcttgaaaagtcaaaggcattatctaatttcaatagcacagtaatcgtagaaaatgttttatacaattaaggtattgtgaattgaccttgacatcgacattaaaatcaaattgtccaaatcacaagatgcaaattgagattcaataaataaatacttacatggacttagaagattgaaaggattttcgggcagtatctggcggccctccattctcagaggattttttcttcccatgcaatgatgagtttgacatggacagactttttcgagaaccaccgccttgactagccatcttcaccaattttcaacaaagtatctctacaacaaagaaccattatcaatctctatatctccctctgagaaaatattatcaaaatataacttccaacaaaattatcgttaattccatcaaaaaaacttgatataaccaattaaaattagcaaatttcaaccacgccatcttcgatttcattttccgagctcaaaacatttactgcccaattattccaatttcaactaatacaacctgttcttattcaaatctttttaaagacaataaacaaaaaaaaaaaaaaaacagaacgttttccaatcgagttcctccattttcacggcaaccaaacatagcaacacaaaaacaaatattctcaaaacaaagatactcaccaaatccaataccaatacaacctttctctttctcaacttctcctcgtccttatcaacttgtgcttgtttcagtattcagataatagcgatttcaacgaacaaacctgtcgaaattacgacgacgatgattatgacgatgatgatggaagctgatcagaaaattttgtacctctttcccgcaaaataagaacggtcgggaatctaatcggaaaaaaaattccgagagaatacaccgaccggcgggaaagttcgaacgacggaggaagaggttagagagagagacagagatagagagagaaagaagagagagagatagggagagaagaggaaaaccctacaaaatgggaggtaagagaaattcaacgggggattagggaggcaaccaatgagaggcgtgcacgtcaactttctttttttacattttctgttctaatttttatttttttttttctttttatcctttttgtgaattgtgaggacacaaataattttatttaatatctaaattatttttattattatttatttggggtaaagaattaattaatatccgatttatgtgtgtaggaactaattgtgattcattttctatgatcgtgatttgtgactgctaataaataataggtatttggtctatttaattatacatatcttcaattgaccaaaatagccaagtcaaatgatgtttttgctactaatatatatgtgctttacatgatgtagctaatgcctccaatatttaccaaaaagtttacacatgataatagagtttttagtgcactcttctttaaaatagaaattcctaaaaagaaatactaaaaaaaattgaagaatcaaacttaaaaaacactaaactccttcattttgaatttcttcactaaaatttaattattcatactctatatttataaatatt

SEQ ID NO: 41802 - DNA, 1177 bp, Cannabis sativa
ataacttttatttctctaagttagcatgaaatatataattcatattcatgtatacattataactaattttatagttgatgtatatcaaattatacaggacagactctatattttgatcacagaaatttatttcattattcataattttttttaatcaataaaatatgataatactttatatataatcaatggtattttagatagcaaaatgtaaaaaggaacattcgctttattattctaaaaaaaaagacattaacttttactacagaaaaaaaaaaaaaataaataagaccatttgctgatatttctttgaaaattttggttaccttataatttgattgagtgatattgcacaaaataaatattagatatttcacgaaaattgtacacattattattatgtaatttatttaatgatgtattttaaaataattttactcattttttatatttttattttttatatgttttatatgatttacagtggatatattatgttgttaaaaaaaatgaggacatattattatgtacgtttagaatttagataccttgagagagagaaaatgtgacattctcataagattataccataaattcaaacattgtcttataatattttaaactgcctcaaattgacaatttccttaagaaattaaaagttaacatgtgtgtactatgtacatactacgtagaagctaaaaattggattaaaattttgatgtggagaggtggatgtatatcaatagagaaatattaagggacaccttatgatgtcaagcactacaacagacggtcaactgttattagtacaaattaatatcaagtttcacatattttaatttaataaaatatatttaaaaaaaaaaaacctctaaccactagtaacgcgccatatcattatgatgttagacactataaaatacgtatagcattgcttgtatcaataaaatcatgaattatgaataatgaaaaatcaactacaattaattagatttttttattattatttgtatgaatagtttgtttgttttgtggtactaaattagatatgcagcaaaataataatttatgattattatcatgcctattggagaatattgtcccacatggattaaatgtgaaagtattgagccatatataagaaacatgggctactccactcattgccaattggttt

SEQ ID NO: 41803 - DNA, 1951 bp, Cannabis sativa
cacacattttaagtaattattaatgttaataaccattaataattttagcatacttgcatctatatatcaagtaataaactgttatcttctattgcctttgaatttgaactttcttactaccaagcttttaaacataattagttgtaataaaaggagactcatcatcaaataacccaagctttgtcagaatatagaatatcaatggacatttacacattgcctttataactcatcatctggttaatttctctccacattgcatttactcgatcagtgtcatcatctaactttaaaaggagtacactcccatttacatatcctggtattcctatatgttcaaagaaaatatctagagcagagtgtcaatgtctcctaaaaaaaatgacaagtagaataaagatgtggagcactaggaacttatcttatatgggaagagtgatactgattaattaactcagttcttctagctatacatacatattgggctcaaatctttattctaccaaaaaagcttttgaaggatatatagaagctacttgcagatcctttctctggaagggtacacaagatggagcagggtctggtttagtggcttgggactatgtttgcaggcccaagacagcagggggtttaggctttcgaaatgtacaacattggaacatggctaccttagggaggtatgtgtgggatatagctagtaaaaaagattgtctttttgtcaaatggagtcacaatgtttacatcaaggaacaggattggtggagctataatgctccctcggattgcagctgggcatgaaggaaaatagtggctgtcaagaaaaaaaattcttaatactattaaatttaataaaatatttttatattcttaaaatattttattaaactaacgaaaaattgttaagtagatacattttatctataaacattatatgatgaaacttaattaaagtcgtattttgtccctccaaatcattattttttaaaaaataattttgaagagaataaagaccatatattgggacaatccttggatgctttaatttgatcacacgtagtaaaaactaatccatgcatgcatgcacacgttgacacgttaatttagagcaatataaatataatattgtatatgcatgcatgactaacacgttagctttagaaaaaagaaggaaaaaagaaaaagactaacacgttagcctagcttatatataatatagaagaatattgttatgaagtatttatggtatttaacattacgatgaagtgtggctttataatatttagtgattttttataaacgacttgatatatattgagttgcactaataacaatattatatctagggatgtcaaaaaaatttataattggagcgggtcagggctccgatgtgacagattacttctcatccaaaacattcagatacttactgaatctcggattaattgggctccaccccgcctaatttttttttttggatcagatatgatataatttaatccaatttcaatatattaaaaaaaaaattaatccaagattcaaacctcgaacccaaacctcctgagacttaggacctgaactcagaccgaactcgcttgggacccgagaccagacccatactcgaacccgggacccaggcctagacccagacccagacccgaacccggatccaaacacaacatcccgacccgagacccaaacccggactgggatggagactccggagctagactaggactcatgactcggaccgacacctaggactcgaaccagaactcgtccgggtccagtgggtccggtttcggtaccagacccagccccgagactcgggacctgaagccaaaatcggactcagacttggggcccgaaagagactcaaacccgaatccagactcggacccaaacccgggacccaaatttgactcgaagtcgggacccagacccagacctcgat

SEQ ID NO: 41804 - DNA, 2005 bp, Cannabis sativa
  modified_base (816)..(816): a, c, t, g, unknown or other
aattttttgtatgcacgacctcaagttagaattaaaaaaaattatattcgaagagaagagaatatagctgtataaagttaaaaaggtgaccacttaaatatggacaagtgtcgttctacacatttttttttttttttgagagagtctttctacacattttaaattaattgaatttgtcatttttctgaaaacaaaagcaaaactaatcaatcatagtagcaactagaatttagtgcatggaatggtatatattccgatattgatggaaataaatatatgagttaatatttctgtgtgagtgtttatggttagtgattgccgacctatctaggtagagaatttgagagggaaagcttaacatatttgaaccacgagttttgggatttaatatattattgatgatgagaaagcaggaccatatatatcattaatacatgagaaattgattatgtatgcaatgacgtgagaaaaaagtaccagctatggttactaatagtaatccctacacgtatatgttgttgtggtaggcaacaaatctagactacttactgtcatatctatcgtaattaagaacaatgaacctatttaacaagatatataattttccattgttattaaacggtgttcaacatatctttttatatatgtatataatagttattaattagaatataaacttggtgttaaacgaaaccaatatcaatattaatggttgatccaaaatgaattgtcacaaatttattaaatttgctcagctctcaaattaataataactattgaagttaacaattggcatataaatatatatatatatanttttttttttttttgagagagaaacatatatatattacacggtttacaccactactaataattactcatttaatttcatttaataaaaaaacacttattttttttatataaatttcaatcacacctaacactataatccaaatacattcaggtagtaaattcagtagtagatccaatgaaggataaggcggggctttgccggtctatgttcattttggttttcttttattaatgtataaaaaaaaataattaaaataaaaattaattatgtaaaagagaataaattctctaaataaatatacatagttacatttgtatattgtattgttaatgttttatttcaccacaacttgaataaaattttgagtcggtagtaatggtaatgaaataaaaatagtattagaaattaattacaatatttagtttataattaaaattattgtatttagtttggtataaaaatgtattgtaatgacggaatattccaatttttaagtgaatggatcaatcttcaataataaaaaaaattatactttgggagtattatttctgattgtaagatgttgttaaatgacttgggagatgtttatgtcgattttattggacgttttgcaaatagtgttgctcatttcttagctcgagcatcctatttagttgttgatcgtattatcaggagtagggatgttacttcagattttaatcatataattactatggattgcaattaataaagatgatgaatttttttttttttaaaaaaaaaaaagtatatatatattcctattacttatatttttataattatggaatatctaaaataattagtacattattttctttttctttttaacttttataatcattagatgatatttttatttttcttttagttaaaacagggaatcatttttataattgttgctctaattatattttccactttagttaatatttgattattttaataaaatttaataatttgaatttatcaactataaattaattttataaaataataaaaaaatgatagtatttttgaataaaatactattaaaaaaaattaacaaaagaaataaggaactatgtagagagctctttatttttttttccattatagagttttttttttttgcataattagaacttattttttcaagttccctctctattttaaataaatattatattt

SEQ ID NO: 41805 - DNA, 1846 bp, Cannabis sativa
aacatagattaatcttactttataattgtaaatcaggctgcattatttttagttttagttttacactttgatagaatctgatctgattgctggtgtagaagtgttgcatgtatgaattgaagataatcttttggaaactaaagcagagaagtgcagtaatattattctagacttaattagaaattcatttacttttctcaataagaaaaagaaaagagtacaattattgtagtctgtttctgatactagaaatatattattgtagtactgaaagttttgtcacatcataaatatatgaatataaatacttaaaaatataggcataattaaatatatatatatagtgtttattagagctctgttttttgggttattggattcttcatgatatggatggactggaccacaataaaattaacgtatctacatcatatggatggattgataagttatttgtaattttatgccatgaagaacaacatatctcttcttttgagagaaaatgaccattttaagtattttgacttttaagaatatatttttttcaatatataaaggaaggaacatgaattgtcaccactggcaatgtgcttaaattctaaccaaaattataataatattaacaacaataataatatcaattagtacatgtacattataatctgttgtcatggccattaaggatgtatttagaagagagctttgaggatttatacattgctcttataatttatatttatgtatattttcttttattttttcgataagtccattcagtatttttattgaatttggcttatcagacctcgagttagatgtagctcatctaaattttgacaaagcctttttttttcttttaataattaatcaatttcttaatttaaataaatatacagctaacttcagcctaatttcttaattgggactaattgccaccactggcaggtagtgggcttaaatctaaccaaaacccataataataataacaactactaattacataataatttttttgccaatgccattgaagatgtgatcaactgctaaaacatgtttattggaaaaatgaagaacacatgccattttccttcaatttctttccttgaatgaataaaataaacaactaactaataatatattaagactaaagaaattgttgatgttgagtggtgctttgtagggtttttttactagtattttttctctttagagttatatatatatatatatatatatatatatatatgataagaaccttatacatttataaattttctatggatagtgggtggtagggagagggatcaaaagtaactttggctttggaatagcatcaaatctattatcttgttctatcataaatcagcaatggaacctcaacctccttctattcttcatcatttcatctattctctatttctttaactttttcttatagaaaggcaataagaacttgtttggattcaattgatgtcaataaagaaagattctatatcttttaatgcaatacattgtttcttcagaactatgcaactgagtatatacatgtgctgatacatttgacatttttttaagcagtcttcaaagaggtataataaaaaaaaatagtcaaattgacttctattacaacttgaaaaacttacaacaatagttttatctactatatcatcacttagtaaaatagacaagctggtaatattaaaattggtagaagtattataatttgtaaaggttcgagagtccgatcaagggcattttacataaatgtatacattattttaattaattacaaaaaatgtgcaaaaaaaattaattttaaaggtgtatacatttgaaaacattttta

SEQ ID NO: 41806 - DNA, 1519 bp, Cannabis sativa
  modified_base (742)..(749): a, c, t, g, unknown or other
gacagctccgtctagcttgatcgggtaatcagccgctgctgctggggacggtgatgatgatgatgaggtagcgaagagtgttccggcgccgattaggagatttcgacggtcgagagtgaggttgttggagtgatggtgatcgttggattgggaattggacatgattggttttggattgggggaaattgattggattattggtaagtttttggttgtgattttgaaaaaggaagaagaagaagaaatgggtattgaattgagagaatacatttttgtagggtttttgttttgggtttggattttaaagaatgaaaatattgtaattaaataaataatcgggaaatacacgttaatattattgatttaattatttgaatttgacatgtatttattgtatatctttatggctataataattgaactagcggcaaaattttctttatattttaatgtctaattaaaaattttgttttttaaattttaacatgtaataaatcatgtttcatgaattttttttaatcgttaaaaatttctcttgaagtattgagattatcgaatttaagtacttttgtttaatttcattcaattttactaatttagtgattatttatgtactaaatcatgctcttgatactttaatatttatggaattatttctctcgtacttttacatgtgtcaaatcatgctccatgaactttcatccatgttagactttccttactaaaattagacaaaagtccnnnnnnnnaacaatcttaatagtttaggaaaaatttctaacgaccagaaaaatttaggagcatgatttagtgcatgtgaaaattcgagagacaaaaatcttaattagtctattttaatataggtaaatagtggcataactatttaaagttttgggtttataaacggcataaaccaaactatctaatgatttttttagtgacataagtatccaatgtttataaaactgtaatttttctccaattttatcaatagagactctattattgtcttaaacaaggtacatataagattcagaatcaagattatttagtttggacagaaatatatagtatcagttactttcaaatctttttttaataaatttaaaacgaaaatgaagaaattacaattttacaaattggatattgatgccattaaaaaaattatttggatacttatgatgttatttaccattttaatatttatatatactatgagagtttatagctgttttgacatttatgagagttttttttttagtgtaattcgtttttaaaaaaaaaaaattatttatagtattaaaaatacaattaactatttgtgacgattgtaaaaaaaaatagttaattgaatcttaattatacttgaaaactatcaattatgtaaactattctaaaaaaaataaaatttataagtactaataaataagtattactatcacgaaaaagaagtaaagacatttcattaatttagaaagttgaaattagattacaagaatgaagactaaggactatatat

SEQ ID NO: 41807 - DNA, 554 bp, Cannabis sativa
agagtgtcaactcctgtttgaaaagaaccataaaatggagatttctgttcaaagttaagattttggcattattaattcatccaaacatgactttttactatttgaaaaaacttcaaatgaatgatcatcacaaaaatcgagaaaacaggaatgaaaattagtttacaaacaaaattaagagaatttgtcgcataattagtttagttgaattgagaagaaatactcaatctcattcctttagcagtttttaaatttatcataaatatatatatatatatattatctataataacaataaacaaaaatggtggaaacctgggcaaattgcaatgtttgggttgccaacgccacttggtgtattgatgattaggcctactattctcagagcacctgaaacctccatccatgaaaggacaatctggggaattatacaaaggatatgtttcatcccaaacccaatttccatcaaaaatatcacaaccgtctccaccttcatcaagaaagctcacctccttttccaattcttcattattctcaaaactcaacgacgatga

SEQ ID NO: 41808 - DNA, 3568 bp, Cannabis sativa
tttgggacctgcatcagaaagatgaaggacataaatagaatactttaagaactgagagacatctttttttcttgccaaaattgcatgttcgtctttattgatggtgttaattcctgtgagcgtacaacttttatagcattgaatcaagggaaattaagaaccatttttgcaaagtggataaacaatcaataccttttgaaggatgcgagccatgcgctctaggccaagcccagtatctatatttttctgttttaagggttcaagggaaccatcgtcttttttgttgtattgcataaacaccagattgtagaactcgataaaccttgtatcatctccaagatcctaagtttaatttcattgacaattaaaagaactaaactagaaaaacttcaatagacaaccaaagcagcccacatctccctcgaacacattttatttaacacttactgcattttcatatcctctctcaggatggaaatcatagtagagctctgagcagggaccacatggaccagttactccgctggaccaaaagttgtcttcttcacccatcctctttatacgctcaacaggtacacccacctgaagcaaaaataacagttaaaaacttgaattaataccacaaagcaagtctcccgtgtcgtaagaaaattaaccactcagtgctgattctgtcaacactattcatccttttctactaacgcgatacgatccatcagaaataacttgaattaccaatgctattcaagactaaaacccatgacaaaagaatattattatttggtaaagacaacaaagtactctctgctaccacccaatactaaatgaagagaaagagaaaagcatttttttcagaagactttaaaacttagatactattatgtgcatggatcctagtcaaaggacacgcatttgtagcaaaatgaaacaaaaatgaaaagcaaggtgtaaaacttagaagataaatatagaaaatttgccagcctaacctcgtcatgccagatttgaaaagcttcatcatcatcttcataaacactcacccaaactctgtcaactggcaacccaaatctgcatgtaacaacacatagaaatttgtttttatgcattatctagaaattagaaaataaatcaataaacaaggaaattcatggctagggaattgttcaaagaaatgtaaaatatttgaatataacattagcaaatttatgcttttagaaagaaactgctcatattctcatcttactatgcatcagttcaacataaaatgagatagtgagtgaagaaacggtaatatctatatctatagcaaaaaagattcattagtaatgtaatagttctcgcatactctacagttgatagttcccatgcccatctaattgcttccttcttgaagtaatccccaaaactgaagtttccaagcatctcaaaaaaagtatgatgtcgagctgttcgtcctacattttccacatcatttgtgcgtaagcacctttgcgcagttgtagcacaaggcacttgtctaggaacctgattatgcaagaatcatcagtaaaaagtagaaatgatctaaggaaagcagcacacaacgatggtatgtttcactgagaagaaagtgaatttttcaaaattatcctatgtcaaacttttcaagaatcaacatctatatcactatcactatatgatggtcttgttaaaatccaacattaattagttacgggtttggttggtgatttactacttgtgaaccctcctcttatggctagtcttttgagagtgaactctttaccattcaaaattaacttggccaactaagagttggaaattcgcatatacttacatacacacagctacacagaagctaagctatgaagattattcatgaaaaataacaaaagaaaaatggaaaatgagaatagtatcataatctagaaaatggtatttacaatctagcttagcagatacacgatgcaaagaaagtttatatgcatacatggtgttcatcttttattcataaaacggtttctaccatcttgaatgttgagatattcattgtggttatgataccttccccaaaaatataggcttaaattgaagcatccccgcaattgtcaacagaaccgtcggatcatctggtacaagagaggcgcttggaagcaccttgtgacctcgagaagcataaaaatcaagaaaccggcggcgaatggaatctccacttacaaggggatcaatagacttatcctccgtcgattgttctgtcacgggctgtacagatgctgaagattgaagcagtaagaacattatcttacaaaaatataaccataaaaagtaacatataatgaagctcttcaagaaagacatcgtacacaattagctacagcaacctgatgatgtgcttcttctgctaaactgcatgtcccatccttctttcaacgcatgaggtccgttaggaaatatattcggactaaacaactgtatacttcttgtaatgatgcctgcataattccaaaatctactttttaagaacaaatccagtacaccccatttccccacacacctacccccaataaaattatccagatagaagataccataaacaacatagtgaagacaatatagaaatttgaagatgcaaaagcaaaattactcttaaaagcaagccattttttttttctagagattgttattaactttttaatacattatacatatgaagaacattcttattcaagggtgatattctctcagctttaatggttgctaagatataacggaatttggttgaataggaacaagtgtatccatgatagatgctcttataatgttttgcacatggatagtcttatacaaagagatgttaaacttagaaagtggagccttaggaagaagaggctctcaagttttgatcagggtcttatgcattcattgaagagcctgtaaaggttggctgtaattggtagctgctagtgcagctttgtatgggtttagtttgtttgaaacgaaagcttttctttttttccaaaaaaaaagcaagtacttaaatgggagtcactttcttattcttttacttgtcagaggaaatatagaacacatactatccaagtatccattcaaaatgaaatcaagtcctgtcaaaacccattcctacattagatacactgaattcaatttgaacagtaagagaagtctttatcttaaaatcagtgaaatgggttccaccaaaaacaaatttaacatgatatgctaaattggtttactactttataccgcaaagaacacacaaaaatcatcaaaacgagcaataattatatgaaattgacaataagttaacatcgggctcttctcttgtaaaccaaattatgttcagagataagttatttacaaaattaagactaaaactatatagaaaaaggaggagaaaggtgtaccagctgagagcagagaggtgggatgagagtgaagaagaggagattgtgctttgggaaataagactggtgaagtggaaaatggtaggagagtgttacgggtatgaattctgttgagagagtgtgggagcttgaagctgcccatggcc

SEQ ID NO: 41809 - DNA, 1411 bp, Cannabis sativa
agaggttacctgacaactgccgatatccactctcttttcaggtaaatctgcattagattttaacttttagattgggacgacctatcgggtactctagttcgtagacgtctatttattggtcagtgaaactattttttcagaggttaattttgaaacaagcttctgagtgacaaatagagtgagttaaaaccatatatggaagcaaagaaggggaacatccaaaagttgagatgttacctgatacaaccttcctaaagagaatctctgcatctttcctacttgtagtgcttgagcaagatcttcaagtctcaattatgcagggacacaacaactattcttacaactcaaaaatatttaatcattatcttgatcagatcttagaattataggttgcagtcaaaatgaactttgttgctattataattcccatgtgctgaaagcttgtatcttccttccctcttgaaacagagacgtgcatcagaaatggatcgagggtggtaactacgagttgtgcatcgaggatgtaagagacgaaatatgggatatggtgaagccagctgatccgctgaagataacattggcagacttattatcttgcaaacagggtgggacagtggctagcatgcttatagatgtgcgtggtttttgggcacatgacaacagagaaaatcttcttcaagaggaggaagagccagaagaagagtgatggtttgatcaacaacatcattaccctgttaaaacttcttactgaaactaacatcactaattgtgtgggactgcaattcaagtgaagaatctcagttttcactgccatctttattgaatatgtgtgtatgttattgatgtggatttgtaatataggataacgtttttggacaattttctttttctttttttactaaatatatataattaattagttacgtttagcaagtgattgtaattctgactgaatgataagatttcaaagaaatttgcacaaagaagctggccactttttgtttatgcttaagtttatattacaggaaaggaacactccgaaatgaaacctataaaatctaattccacatttaactaaaacatgctgagcttctcttttaaagaatttccagtttctcagtatgttctttgctgttgccataaaatttagagatgccaactagcccaaatgatgcacctctatttgaatggatctcatggatgaatgcattgcaatcactactctgtatattcaatcacagcatcgtatgtttcaattgtaaatgaactctctgcaaaacacctgacgaaatcaaaagaaacttgaattaaaaggagaaacctaaatatttgataaatatgttttagcataaagaaatcaaactagaattatacatggtgcctctactatgagcctatatgacatgcaaac

SEQ ID NO: 41810 - DNA, 6330 bp, Cannabis sativa
aggttttctcaaactcttatgtgtttaatttcattgttttatagaattcatctttaggatgttattcgacatacttgctagtaaatctagatcctggtaaaatattcccaacaaactattcttaggtttagtggcctttaatatacctgagtatccatttaacaattgtccaatgagcatttccaaggttggtcataagtcggctcactacacttagagcatggctaggtctggtctggtgcaaaccatggcatacatcaagcttccaacaatgttggtgtatggcacttgctccatgagcttcttttcagcattggtttggggattctgagattgaaagagcttgaattgaggagccaaaggtgtagatactgcctttcagttgtccatcctaaacttttcaagtgttttctttaagtagtcagtttgtgacaacttgatcattcctttctagctttgatcaatttctatccccaagattttcttagccttgctaagatctttcatattaaactcctcactgagctttcccctgatcttcttgatctcacacttctcttttccaataattagtatgtcatcaacatataaagcaaatatagattttgattcatatacacacaaggatcatagtgactttcagtgaaaccaatgctagtgataaagctgtcaaacatgatattccattgccttggtgcctattttaaacaattcagggaccatttgatcaagtatactttttttggatctccattttcatattcttgtggttgttccatatagatttcttcatctaattatccatgaagaaacactgtcttcacatccatttggtccacctcaaggttgtctttggctgctttggctagcatgactctaatagatgtttgtttacaataggggaaaaaaatctcattaaaatcaaccccttctttctgagtaaatccctttgcaaccagccttgccttgtatcttgcttgttcaactccagggattccttcttttactttcatgatccacttgcagccaattactcttgcatgctttcgtttctttaccatgatccatgttttattcttaatcagagaatccatctcttcatccattgctctcttctaggctgtacttttaggtctggtaagagcttcttggacagtcaaggaatctgaattgatctcttctttagcaacagcaaggcatatgcaatgaagtctgcatatcttaatctttcaggtgctctagtctccgttctttttttgtcccttgctaactggtaactactcagctcactttcagcttcatctggttgaggcaattcactttgattagttgcatcatttggtagtttgtcattatcacctttgccaacttccacttgagttgtggtaggtttagaactattgtctgagttcttagtgatcttcatgggcatctcatcttcttcaaagatcacatcccaactaatgatgcatctcttaaaaccttcttctaaacaccatagcttgtactcctttacaccattggggtatcctctgaacatgcatttgatagctcttggctcgagcttgtcttgtctgatatgggcatatgtagtgcagccaaacacttttaagtgttcataacatggtttcttgccagtccaagcttcttgaggagtcttaaaattcaaagctacagatgaacatctattgatcaagtagttggttgttgtgacaacttctccccataattttctaccaagatttgcaccctttagcatgcaccaaactctctcaaggagagttttgttcatcctctcagcaactccactttgctaagggatttttctcacagttttgtgtctggcaattccaacactgctgcaatacctgtcaaattctttggatcaatattcaagtccattgtcagtcctcagcttcttaaccttcaaataaatttggttttcaatgagagttttccaattaatgaactatatagggctccatccttagatttcaagagcattacccaaacttttcttgagtaatcattaacattgctacatgaatagtttgttccacccaagaatggaaccttggttgctccccataaatcaaagtgaatgtagactagtggggatgttgttttatgtgtgcatttgccaaattttagcctgaaatgcttcccatagatgcattctttacaaaaatctaacttgccactgagtttgccacagaaaaccccctgttttagcaattctgcaatccccctctcactaatgtggccaagcctttgatgccatagctgggtgagatcaatttatttactagaaactaaggctactattccaaccacaggcttaccagtgagaaaataaaggccatttccaaactcacctttgatgacaaccattgctcccttaaaaacattcatgtggatgccctcaatctccacagtacaaccattaaaagctagaactccaattgatagaaagtttcttctcagatcaggtacaaatctcacatttgtagttgttctagcaacaccatcatgcatcctaatgacaacaaaaccaatgtcttgcaccttacaagccttgttgtttcccaacagaattgatcctcgtaaatttcttcaaaactacaaaaaagatctttatttggacacatgtggaaggagcttctagaatccaatattcaatctccattggacacactatttgtaacaaccagcacatcaccagattcatatccatttgacactaaaccagcttctccaacatcagatttactttcttcatttgttttattcttgggaagataacaacgcccttcttttttactgtaattgtagaattttcctagtttgtacttggattttcctttgtgatgattgttgttcttgtggccatcagagttcttgaagttcttggaatcttttctgtcaaatcttcctcaagacaggagtctttctccactggtttctcctttttcttctaatttcttttgaatctccttgcagttgagagcagctttgaattctaccatggttagagtatccttcccatacaatatagtatcaacaaaatattcataggatttagggagagaactaagaagaataataccatgatctttctcatcaatcttcacaccaatattggacatttcaaggatgattctgttgaattcatctaggtgctttctaagctcgtttgtctcttccattctgagggtgtatagctttttcttgagatacaatttgtttgccaaagatttcttgaggtagatcgaggcaagcttgtcccaaagtgcagctccagtctcctcatgtaagacttctctcaaaacttcatctccaaggctcaagatgattgcactgtgtgctttgctctctgtgtccttcttggttttctcatcgttgatgttattcaagtcatctgcattcaaagcttcagagatcccttgatgaacaagaagtgccttcattttaattctccacaaaccaaaataaatttcaccattgaacttgtccacctcgaatcttgcaaatgacatggctgcaattcttgatcttcaaaagtaggttcttgatgtcttttatctccctcagctctgatacaacttgtactgaatgaatcctctcaagaacccaatcaagaaacaatgcatcaatcaaaatgaaacaaaaatgaccaacacagtttgatcacaaattgtgcttataaaaccagcaacttaaggaacaaatcaaagagaaaaattgacaccaagagtacttaaacatagacctttattgatgttgaaaatagtacaagagtgtgttcaatacaatgaagaaatgatgagaagaaattacaatgaacctcaccaatggggaaccaagatcagctacacttggttcccttatacatccctccttttcactctctttattaataaactgaatttacaacataactaaatatgtgtttacaagatctatgtatattatgtaaagttggttgtttattgaaacaataaactcaggcacaaattgtcaaaacagatggtgcacatcagcaaaagataaaacataaaatggttgaactaaacaccacagctttcaatcaaaaattaaacttcctttaaatgttgtatgcaaattaactaaaagcatatatggcttaaaacaagcctcaaatagtagtacgcaaaactcagcaaatatcttttatctagtagttttaaacaatcttattctgatgatactttgtttatcaaacatatcgataatgttttctaggctattctagtgtatgtagatgataattgcttctaataatgatattttttcaatgctttcaaatagaaactgaattctatctttcagttaaaagattccaaccctttttgtttcttttcgggtttaaagataagttactcttttataagaaaatatgtttcttagtgcctttttacactacaattattgtctgatacaagtttttgggggactaaagtggcttccacacccatttatgaggacactaaggctaaagaaacaagtcaagttccagttggcccagtgacgagggcgcgagccaagagtttcaaagaagaactcaacaacatagttaacaaaattttaaaacaagaggagaccgtggtcaacactgaaggtgagcaaaaatttgtgtttctcatcaaagtagactcagtttaggaatctttgtggctgacacctttttcaaggcaaatggcacctttccttttaattttgtttccttttttttctgtcttagagagtcttcaataaggggtgaaatccctttgttttttcattgttttagttctttttttatttaatcttgtttgtaagttggctatttaaagccttgtaaactctttggaaaatcaaattatttttgaataaaattttaagaggttttcttcttgagtccttgaaagaacttttcgaacaaatctatgactttttcttgtggcgttcaacctgacttatcaaacggacttccatccccatttgttgcgtcttccttcataccaaggttcatgcttaactaagcattggttcgcggttccacatcccaaattcgtgagttgttggaggctgccataattggtatcgggtttcatcacaactgtttatgtggttcgtatcatttagtatcagagcttaggatcatcaggtttggcgtatctacattttgtgttttttttctattcaattcatatactcaaatcttgttgaacttgtattctatattcctgtcaattcgtgtttcaactcttcttttttttctttgtgaaatccaaaactgttaaaaccacattctgataaattttcttgtgtcaaacatcgtgtctttactatcattagtttcccttattttttttcttttcttcttaaaaaaatctgaaattaaaaaaatatttgaaaaatcaaagcctagagccataattcaaaatttattagtttcccttatttttctagaaattcgaaatttattgtctagagcccagtttgttattgttgaattccttgttccctatttgtgtcacatatatgtttcctttttttttgtttcttattggtttcccaaattgtttcataaagcttgtctacttagttttcttttttttttctttgtgtcattagcaagtaagaaaattcgaattgcttgaaaaaaaaaagaaaaggaaactaagcaaaagaaaaagagagtctggaaacctctcttcaaattttttttgtattttcttagtctccaaaaatcatcaattttttttagttttcatcggtgtttgtttggtttgtttgttggaattgctgctcgaatcctctcttgtactatttgattagtttttaaaagaacttaaagaagaatacgagtggaaaaaggcagaggtgtgagcttatttgagggtaaaagccatcgaatttgagtgaaaatacaagtgaaattgagtgacaaattattttgagcgaaacacgtgagggagtgtggtgaggtctttctttatttgttctaacattatttttgcagaattcaatcatgtcaaaagttctagaagaaaataccggtaatgaaactacaccatctacggctccaattctacaacttcaagctttgataggggagatgaggaggatgatgagagaggagtgtgaacaaatacatgcaatgttagataggatagaagagggaacacaatggaggccacggaggaatagggttcaccaaagggatgataatgaagtagatggagaagggataatttctgatgacgagtttgatgggttaccagcgggtaaccataggaggtatggtcgagagagagagagagagag

SEQ ID NO: 41811 - DNA, 927 bp, Cannabis sativa
ttttttttttcctgccaatatccaactctcatggcatgtgaactctctgtatattctgatggagatttgattgttggtagcggaaccttattaagttgaatcttgttttctgcaggacaataatggacttttgcaaattgctgatgatgtaagtaatttcactcagatgttttacagtagccattctgttaacatcttattatatattctaatcattgtttagttcgtttaaaggtcaaattctttggctttattaaaaaaatccctggccttgcctcagtcaatgactttcttaatttgaaacaaattgtgatgatttagatgttggtgttgttgtatgttgatgagtgattttatacttgaagaattaagtaacaaaaggtttttattttgggtgtattattggagcattgctattgggtactagtagtgcccaacaccttttatagctggcgccccatgattggctagcgatattctcgaaaaactattttcttaagttatatgggactcgatacttaattacaccaatagctttataacaccgagaagagtgctaggcaccactggtgccttttagcaattctcatattattgagtattttttgctgcatgaaataagtaatatggagtcacatgcacatacctagctagagattgtgaagaaattataagaacatgtaagagttagtgttaggctgctggctttcaataccattggttatttagaccaaacttccaacagatctatctcatgtggtcaatattactgttttttgaggtcatcattatagcaccgaaaatgatcatttttcagcgccatgggcaatggctaatgaagctatgatggtcaaacatctcttcttgggttatcccctgagagctagagaggaagtaaataggtttaatgtctaatacctaggtaat

SEQ ID NO: 41812 - DNA, 769 bp, Cannabis sativa
  modified_base (373)..(376): a, c, t, g, unknown or other
taaaatgaaagcctaagtggttttttcttagtatatgaatctaatttacaaaataaataaatcaattaaaaatatactttaataatcataataaagttatctttaaaattaaaccaacaaaatttgactcatcaataaaatttttggtccattttcttgaagaaaaaaatccaaaccaacaaatttattaaatataaaataaaaatacattgggtggctagactagcccacttggtaattttatataacgctaattagaaattttgttccctaaacttttacatgtaacaaattatgttccctgaatttgtcatgtcgttaaaattttttcccgaactattgaaattattaaatttaagaatttttgtctaannnnattcaattttactaatataacgattgtgcctttaaattttaatatctacagaatcatgttttctgaactttaacatgtaccaaattgtactcttaaaatttttatccaattcaaattttctttaataaaattgaacaaaagtttttaagtctaacaatctcaataatttgagagaaatttttaacaacgtacaaattttagaaaacatgatttgacctaaattaacctttatataatgtcaaaaaagagaaaaacctgagaacgaagtcgtttagatctaaaaagaatcttaaaccacaaaaaccccaaagcggcgtcgtttataagagtaaagaaaaaccaaaaacaacatcgtttataacaaaaagaaaccccaaaacggcgtcgttggaa

SEQ ID NO: 41813 - DNA, 719 bp, Cannabis sativa
atacatacatgcgtgaaattaactcacgaagctttatccccaatttcctttcatcttcttgcatttttcaaatggattaatgggtaattcaaatggttccattccttgagctagaaatgatacaaagattgagattttggattattacatggatcctctcggtggttggaaatgtggagttttcaattttttctagttgtaataattaagatctttgaaatttgaaatctactgaattattatagaaatagaaattaggtgttctcctctcagcccatttcctttttctgggttaaatgctagttggagtaggcttccaatttttgttctttttcttaactttgctatgctctgttttctgattagtagccctcacggtcatggtatcatgatcattataataatttagatcttttagcataagttcaggtataatgttgagatgggaaattacattattatttgttgttctcttttttggtcataatttatgatgttacatatatccgtttgtacgttgagcatagcattccttcctccattttaagacttgtattactagactgttagaatcaaataagatgaaattacgaaatcatatttttgtgttggtggtgatttcatgaaataagagtattctcaggatcttaagagttgaaatcccgcgagttctgtctgtgctccatatttggttagtgtaatttgatgtctttatgttt

SEQ ID NO: 41814 - DNA, 727 bp, Cannabis sativa
aaaacttactaaggtgaaaccgagtaagaagttggtcattgatcattttccaagctatgaatatgtttggaaatacacaatttgtgctaaatagttgttgcatagttaattttttcagtcgagattagggagtgatataaatttctaacttttatttctcccaaatcccaaaatgaaccaaggatgatctgtctatggtattccaaagcttcgaaagcttcttaaaatatcagctgtaattattttttagatgagctagccatatgtcttgatctttgatctttgaggtagatagaataaatttattttacccaaaggttatcttgcttggtcgaaatgacctaaagaaactaggccatcatgacaatattctacttttttaccggtgcgaatttagaaatattcgacacgaatgactgaaccaacatactccaaataaggaacatacatctcaacccaaattgaagggaaagtacctccatagagccctagtctagaggtattcccctatggttcatgcaaacaaattccagacgcagcaaccttaatttttaagacttttttcataaatgtacaacaaaagtaacataattataaaaaatgtacaaaaataaattatttaaaaacttatatattttgaaaacttattacatgacattatacattttaatcattaaataatataaattattaataattaaattaattactacaaatagatttatat

SEQ ID NO: 41815 - DNA, 2620 bp, Cannabis sativa
  modified_base (2568)..(2571): a, c, t, g, unknown or other
ttttgtttcttgttatgctgagacaatatcttatctgcagagtgtaaaacaaatgaagatggaaaatgcaggtggagaaactcaatgtaagcaaagttgaaattactagtttattatcctgtacttgtagtatgctcctgtagcaaataacagctactttttggtctgtagcccagttgtagaaaagcttgaaatcgtacaatgtgacttggagaaaaaagatcagattgtaggagcattaggcaatgcatctgtggttatctgctgcattggtgcaagtgagaaagaagtttttgatatttctggaccgtatcgtattgattatctggctaccaaaaatcttgttgaggctggtaagggatattatttttttcctttttcttgaaagaatcatgagttggtcaccccagcatgggcaaccatagtttattttctagtattcttagcagctatacatagcttgatagtgttcaggaaaggaataatctcttatataagttaacttgtatgaaatttgagcaagccttgatgtgcagcaactgttgccaaagtggaccacttcattttgctaacatctctgggaacaaacaaggttggatttcccgcggcaattctaaagtaagcaaagaagtttccttttcatagcattttgaaggaactttaatttaacaatatagaatctgccaaaatttgattgatttactgaatgtgttttgcttataaagtttattttggggagtgctactatggaaaaggaaggcagaggaagcactgatagccagtggaattccctacacggttagtaacttaaggtctcggtagcagaagacttaattgtaagcaaggtactgataaaatggtaatctctcagatagtgagacctggtggaatggaaaggcctaccgatactttcaaggaaacacataatacaacactctcacagcaagatacgctgtttggtgggcttgtgtcgaatctgcaggtgttcttactgtctgtgctattgtattttaggcttgagcatcactatttacttttggttgagaaacttgaagttcatcctctaacatctatatatatgatgttcaattacttaaacttaggtggcagagcttatggcaagtatggctaaaaatcgtgatctgtcatactgcaaagtagtggaagtcgttgcagagacaactgctccattgactcccgtggaagaacttctgaaaacgataccatctgatcgacctggctcattcccaccgaaggtatctatactcttttcttgtatggagatgatgacattacatgtctaaaaacttgatatgagtataaaatataaccattgtcttttgcacaattcttcttttagtgtgaaaagaattatttctatgtttttatttgcttttgagttagtagtgtcatcaaagtgctcaaccgaaaaatactctcattgcaaaatttaagtctcttggtccctcctatgtcaacaggaatcaggtgtaatggtggagcctgatttaccacctcctaagtctgaggaaccgaaaccttctgctgtgacggaacatgtaaaaccagacgaaattacacctcaaccacagtctccttatactgcgtgagccaatatactcttcactgtcatttgtataagaaaaaacattatctattttaatgttctttttctctatttggccaatgaaaagctatgaagacttgaaaccacctacatctcctactccaaccccaagtactactcctggtgccactcccactgaggcatcaactccaactgcttcagaggaagtctcgaaaactgttatcgaggaagatgtaaagacagaagtgaagaaaggaatgactctctcgccttattcagcgtaaactcatctttagttttcctttttcatgagcattcatagtttcatgacaccaaaatttacaacctctcatattttctgttatttctgtagagggctacaatctgtggatttaagattgtaaaatgcttcaacattatatattgttgaatatctaatattattctatcatcttatttttcagctatgaagatttgaagccgcctagctctccaagcccaacaccacccggtggccgcaaaagcattcctttagatgcctcaaaattaagtgagctcgcttcaccatcttctgaaagcaatgaggttgcagagcttgtgatagatagtgttgctgaaaatggccctcccaagatatcatcttattatctttcaccataccctgcgtaagccttttatgatattccttgtttagtgtttatttacagaatttggtggcccaaaaccaaaaataatttgaagaaaaaaaaaaccaactttgtaatataagttaaaagtagaaccaaaccaaacaagggtgacaagtgtttaataatagggaaaggctccatatttgatgctgtacagtccttagtgaaaggggtccaagcttctttaatttgcctacatttttgaatttaggtgtcgtttggttgggaggaatgaaaatgtaggaataggaatgggaatgcatattggaataggaatggaatagaataaannnnaaaatgcataaaaaaattgataaataaaattattaaattttttcaaatc

SEQ ID NO: 41816 - DNA, 1740 bp, Cannabis sativa
caacaatggaagaacaacttaccagaagtgaaaactcagcagtaccacactcagtaacagagtcagctaagagaagtttgacccacctagaagctgttcaaacccacttcttcgatttcttatctctttcctcagacccagatgtcctttcccaaatgcctccactgcaacgcgcccacgcgctgctcttgttagcaaaaaccatcacaaccctattcactttgaaattgaggtgtaatggagttgacccagatgagcatcaagtcaaatcagaggttgagaggttgtgtttgtatcagaacaaattagaaaagtttgttgggatgagtaaagccccaattagaccttcaacaagtttgaattttgaggctgcaactcgttttattcaacattctttgcctgatcttagtcaagaacagaagaggagtatgatagctattgggaaagagaagaagaagaataagaataagagaaagtttgaatcaagtgagaagagatctgttaagactgctgctaaggagtttttagaaaaagcagctttggagcttcttggtagtgataatgaaggcaaaatcaaggggcctttgcagttgaaaaagggttctgaagatgaagataattcagattgaattagtttatctttggtaaagttttgatttttatgaaattttttgttatgatatatgagtttttaggataagagaacctttgtttgattttattggttttgatcttttcataggttaggatcttgtatttatttgaatattggtttgtgtttatttgatataagagattgttttgttgatactgagccttttactgtttaaatcttaatttgggcactgtaaattgtgctgatttttcaaaaaataagcataatctctagtataattacatttcaaaaataaggagtttttagaaagtaaaaaaagaagctttggagcttcttggtagtgataatgaaggcaaactcaagggacatttgcagttgaaaaggggttctgaagatgaagataattcagattgaattagtttatctttggtaaagttttgatttttatgaatttttgttgttgtgatattgtatttgaatattggttatttgatataagagattgtttgttgattttattggcttgaatgtggtgaaagaagaacctttgaggagtaacaaaacactgaacttttagtctttaaatcctagtttttacactgtaaattattcgaaattttccgaatggaatgcctaatataactatactgccatatgaaaaatgacttttgtatgtgcaaaagtgatatctgcacttaaggatttcacaatgcttgcttaccttgtggtttaagctactaaacttaaactcagaataatgtttggaaaacgagaaaaatgaaattgttgtatgaagacaaactcaagggaccttttacagttaaaatggttctgaagatgaagataattgagattgaattagtttatctttggtaaagttttgatttttatgaattttttgttatgatatgattatattttatgataagagaacctttgtttgatataagagatagttgttgattttattggtttgatattttcatttggtaggatcttgtatttgaatattggtttgtgtttttgatataagagattgttttgttgattttattggggatattggcagcaaacctaaatcaactttatgattaatcacataaactaattttttgacggtaaaa

SEQ ID NO: 41817 - DNA, 790 bp, Cannabis sativa
agttgtgtacgtatacacgtgtacagacaaaattaataaaaaacaaacggtatgctataattaaataaacagtgccaattatgatatttatttcaaaatttggtcactaggcgtaaatttctctaaatattatggctgaaagaattatttgaatttgtagtaaataagtattgggtctgtagccagagttttcaaaaacgccataacatttcttaaaagggaaagtaagcatcttggaaaggtttggtctactgggcctttactagtgggcttaacttaataaattaaggggtttttagaaaaatactgaattatgggaaaaaaattacaattttactgcggggtggaattttttacaataatactgtctttttataaaacgattgtaaaataacaaaacagaataattaaaacaatagtggaacaactaaaaaataactgtggaacaaccgtgaaaacttaacacagtatacagtatttttgaaaataaaaatacagtatttttgaaaaaaaattttgccccacattaaaaaagttaaaaatttcattatgtggtgtaaaaattaattgttcaagggctgaattaattagtgaataattaaaaaaggaatgagaaaataaaagttggtgtttttctaacgaatgtaactaaaagggtttttcccaagttaacatgggagaataggaagggttctttccaaatggaatgtttgggaattaaaagcaaagagttggagcatgtttggtattgttttctgttttttgttttaaaaaattgtttttagaaatg

SEQ ID NO: 41818 - DNA, 1458 bp, Cannabis sativa
aagaagacaagatatgtcactgtcttcctcttgatgtgttgggtttaaggcaacattttctttttatcattttgctattatcaataagtttggccaggtactgccatgattgtgtattggtattgaaaggaaagccatttggtactgaaaagaaagcacggttttggaaacgtttgggggtagttagagacaaataacagggaaggacgagtttttggacagacactcgatttaataaagggtggtgtctacttctagagagttaaaagatcattgatttatttgaattaagcgcaatgtagtacaaactgattatttacaaacataatgaaactaagatatagttaacaccagaataatgtactcgtattcacataaatcagaaagtaatggagcaagcagaaaaagaattaaatattttctatcttcaaaagaatcttaccagtggttttttcatagaattggacaagggaggacagatctttaggaccatgataccggactcttgatgtctgattcaccagaaatactgaaggcaggctatgaattccatatcttgaaaagacactgcaacaaagaaagaaaaggctaaacattataactaacaatatcgctgcaacttcaaaacagacaattctgtgaactttgttaactaaacttgactctcgatcctatttgttgttgttcattaatttttgctttacaagttgctggatataataatgcaatgattggaaacagataaatattccaaggtttatacgcaagttttcactgaaagatcttagggatgatggtttctagttttgccggttttaggatcaagcaaatccctatataagcagaaatacattatctttgaaatccaatgttacttagcttatttgccctctattatttaagtataaaaaacaagcaagtatgttaatacaaatatattatcatcaaattccaagcaggtcaaattaataacacaccttggtgctgctgaagattgttcaactgccaaatgctctatttgagggaacatagagcttagtgcttcaaattttggatatacaccacgcgagaaaggacaccaagaaccataaaagaggacagcagtatatccaattttctctttagatgtcagtgttctgtcaaggaagcctccagtcacctgaagataataaagaaacaagtgactgttaaaagaatataccttcttttatattaaaagcatattattagaactccatgaagcataaagtaatgagtaataacaagagtatgtgaacactggtttatattgacggtaatcacaaagggtcataactctaggctccaccaattaaacctttactagattcaaattctaaatgttatcaatttgcctaccatatatcagaacatttatgtaaagaataaatgaagaattttaggactgtagaaatgttctatcctacatgcataaaatag

SEQ ID NO: 41819 - DNA, 7534 bp, Cannabis sativa
tcacagtactttaaaatttataatttaccaaacactcagttcagtttttttccacaattttgttacaactgttttttctcacagcagaagtacatctatttctctttacaagaagaagagaagtgttgaacaattcaattatatttatgattacaattgtagcactctttcaattgtcaattttgattttctaggtcatttccaataagtccataatttttacaacaaatttcactttttatagggccaaaatattttacatgatttaggttatttagaaagagatcttttcaacaatttgtgacatcaaacataatcaagtataatcatacaaagagaggagatagataattttacttatttatttattttcttgaacaatttatttatttttgttttgataaaaataaattctgagattatagaattatgtatgtttgattaaaagattagttggttgacattgttgatataagaatacttatcactaagagctatatatattgtcatccctaaaataattatgcctacttacaataaaaattataaccactttagtaaatttatttaattttattgaggtttaattattataaaatatagttgtgggtatttttttaccattttactatttaattattaaataaaataaaaaattaattttttaagtataattttttcttcaggggctatagcccttgtgtccatcttattctagtcaaatcatttattgttatttattagctttaaattgtggttaataagtatcgatgtttaacaaatttttttagtatactaagtatatatttgagacttttttatttatattttttataattaattttttatttatttataaaaataaaaataagataactttaaaatggaaacaacataacctaaaaatgaaaacaacttttataaaaataaaataaaaatctaaaaaaaaacataaaaataaaaaatacagtatacatgacaattcccttatatattttcaagctaatgtcccttaaaattaaatcctagttttggtgtggattatcactctacacaacacttcgttccacgattggcgaaaccccttttttcattttcttatgggtgtgaagccaaggtttcagtcgaagtaggaactagatcattgagaatatatgtctttaacatcgagaccaacgaagaaaatcagttatttcaacttcatttactggaagaaaagcgcaatcagaattagattaaaaacgcagcctatcaacaaggcacaacccgttattttaattctaaggttaaagaaagaagtttacaagtaggagacttggtattgcgtaaagtcatgcccaacacacacaactctatgcatggggtattcggtgataattgggatggtccctacctaatcgccaaaaagatcggaaacgcaacttactggttatctgatctcaatgactcaatcttcgatattactatcaatagtacccgcatgtatatacttagccaatttatttataatctaaattatctaagtatagggactataaccatacattgtaccattatactattgattatccaatgaattatctttttttgaaacttatgaattttaattttttttcacatattttgcagttatatgcttagaaaaatttgtggaatttttcaatatgaacatcgaaatgttcatcgcaccaagctgtgaaggatggtcgttataaaacaacatccaggaagataagcgtttaaaagtattgagttgcaattataaatgcataaaaagttcactgtgaactataaaatacttagaagaaaaagaggtatcctcgaaggatacattgttcatacaagagcaacataaaaagataagtataattgtcttaaaaataccaagtacaaaatgcgagtacccgtgtactgctcaaaagaaattcgaaaaacaaaagggaaaaaaaaaaaagcaacatgggcattgagatcttccgcgactttgctattaccatctgcgacttcaaaagtatttgcatcttcagcatcttcaggaaagaggttcacacctaactcctgagtctcagttggaacatggtgcgaaaagcattagccatgtcaacagcctctggtccaaaaactgcgaaggcaaagtctggcagcttggtcagggtggtatagatgtagtcgaagacagcctgattgtaagctttttttcgtgttttccttctcagccttgagattgcgagtaagagtagtattctcttcctccaacttcttattcttatcctctgactgcttggccctctctttcgcctaatctttggccttgccaagatccttgacttccttctcttttgcagcagcgtccaactttgctttcttcaagacttcttgaagagtcgagttttatttcttcaaaaggtcaagatctttgaaacccgcaacaaaggcccccgagtacacagtcgtcatttgggagaaaagttcgatcgaacgggacaaaagatcttagtaggagccccttcgactttggcaacaaagtcttctctcacgaacttctcctgtaagaccatgaagtcgctagctttggtagcaggatccatcatgactttcttccctttatcttgagccactttctggtgtttctttgatgaattaaccccaggattattggtgactttgctcttcctcttttgaggcgttacagtagagggagttgcagtattgaccttcggcttgcaactaaaatagggagcttgcttcagaaaagtcatatttgcaaaaagatacacaaaggtgagaatttgagaaattaagacaacataatcaataatcgtcaaatcacattacctaatacttgtcttgaggtctgttgggaaagatgcttgtctatcttttccttttgtttctcagatggctccttataaattggttctcgctgaagcttagtgttgtctggaatcaaattgtgttctcgcagttttgtagaagtacacaataaacgccagttgtgatcttgaactggaaggctactcaacacttcaacaatttccacacgacttttgtctagtacagatcgagccagtctacctgcaaacatagataaatgtcatcatctgtaaaatagcaggaataaaggttaagtgtgaaggtatgcaacgtacgaggtcaacaattaaagtcaatcctgacccctagcatcttaaacgcataaaatcacttcaacttccaatcccccatattttaaaccgtgtcttctgccctatttatttcagaattgccccattttctaaagcagtagaaaccattatcatgacctacacttttttatatcataaaagtagctaaaatcctcgactgtgggttctcctcgcgtgtattccatatacatcgcatagaatttgagaattatgcgataaatgttaggggtaaattggaagggagaaatatcgtattgcgttaagatggcttttacgaaagggtgaaaaggaaacatcaccccgcaacgaagaatcaaaattgaaactacaatgttttgagttgagatgatcgcagggttagtgaacagaagatgatgttactgcatcgacatggcctttgaggtagcagtgtgaattaaatttagtttctaaaaaaattttaacccgcgaaactaggtcctcgcaagaaaaatgctcgtctaactgggcattgtccactgaatctattttgctgccctcaccctctgcatcatcttcaactttgcgatcaggtaattcaaagtccccacccatctctttgacttccacatttggggcaattcacggataggcgaaattaccttgggcagacttcatggattcgctatcctgcacctctaaggtgacttgttctgctaactcttgtaccatgcgatctatctcatcggtagatagtgagccttctcgagccctatccataggagtctcgtcctcagatggcgaggtgggtatgaagctatcactcttatgagattcgttagtgaaggccccctctcctaaatcgtacatccgatagatcggtcatctgaaagatagaagatcttttcagcgtggagcaagtccaatttgaacagaaagtgttctcactcggacaataagatttcaaataaaaacgcaagaaaagactaaccacatgtctcaagaaatggttgggcatatcccaatatcctaaagggtatgcaattgcatgaacattaagttaatgggatactccaaccatttcgagaactcaagtagtttttcatataaactaaagtgcatatggattaaaaccccaaagttaactggtcacgtatgacctaagagtcgaaactcagagacaatgtctaatagttatgttgggttaaacaatttcaaaaatacgagtatgtaaaatggtatatcataaagatgcgggtattcaagagttcagcatggaaacccgtgagtatttaaatttcaggcacgtatttttcaaaaaaaaaaaaaccatattctgcctaaaatttttaattctctcattagaccttatccatttcatacatttttctatccctaaaacccaaaatgcacgcgaatactcaaggaaaagaaaattactacaagaaggaaagtcactaaccttcaatatgattctttctggaatattcttgtagatgatcgaaccttcaaaattgctttcaattagcaggaattcaaaaatttagaatactctaaagagtttgaaattttgggtaagggaaaaatgagttgtgatctgtttatatccgtggggattaaatagtaatattcttcattcattgggatatggacacgtggcaagagaatgcttaaggtctcccaatccaatggtctccagaaaacacacctgcagataccccgaatggttttgatgacatggcatctcaaagaaataaagtaataattatagccgacttttcgaaaccctcgacaagacaaccaaaagtcatcatctcatgatagcgacttgcctacctctctctaatagtttccttaatgacgtagccgtcagtcgcgaaactagggggcatgtgttgcagtgcgaattttttatctagaaactcgagatcagtctcctatgaaattgacacgtggatccaattcatgagggatggatgagctgttaattaatgactccttgagagttgaccttgcttgacccaaactcgcgagatgatgcgaccttgacagcatctagtcacatattgtgccatgcatagtataaaataagtaggaccaaaatgagtttatacaagttgcgcatgtaccaagatatatgcgataattaggtagccttctccttctattgagtaaagatcgtttctttacataatgaacttgtccaaacgacaattcgatgactcgatagggactcgcatgtctcatgttgtcaacgcgtatgaggtgtccatatatgtgactcaaacataatgcaaacaccttaacacgaggctcgttagccctttctagaaagataaaatgcacccaaagcctgtgagcttgtgtgtgaattaggggtgttcatcaaactgctcaaatcgcctgcactgcaaaaaaatgcggtttgaaattctttgcggtgcggacgcgatttgaatttttcctaaactgcgtaatgcggtgcagtttgcggttttgaattgttaatatgcggttcaaactggactgcactgcatattatagaaatactaatttttatatttatttaggtccaatatgtgaatgttcaactcaaagcccactaattattgtattattaaaacttaattttttcatatttattttcaagccttatggtatttttgataaatgtcgctcaagctttgttgtatttgtgatagtttaattatttggtgatagtctaaaccataaaaactgcaaaaactgcaccgcaccattttttggggtatagtttctgcattttttagtttcacggtgcgggtgcggtttgagaaatttaaaaaattgcatgtgcagaatggtcaaaaatcgcaccacccacaccgcgaacactcttagtgagactatgaacaggcaactcgcactttacaggtcgcatacgttgctatacttattgaaacagatttaaaactgttcttcatttattcttattacttttattctaatttaatgttaatattaattgtaaaatggttctgtaaccggttagttatgtgtaatcaaatggacacttgctttgtatataaaggattgatctaacatgaataaattgaacacaaatcctttgcaacagtgaactaagcagacgtgatctgactgaaccattatacacctttgagttcattatatttttccattttcgttctattgtctaggcagccttgttcgaatacttgctattctaggctgagtactcgttattttttgctaaatattcattatcttggtgatactaatgtatcactaagatagtcaattgaaaaatgaatgttgtgtgaataaggctcttggtaaggcaatctacgattgggtcatatgatagcagtacctcatctccaatatttttccaagcactttgtctaggataaagtgaacatctagttcaatgtgaaaaaatcgttcctatattaaacacaatcaacctcacctaataatagattaacccaaaatttataatatgtgaaaaaaaaaacatattgtgtgcttgtgcataaaattgtattgttttgtatataaaaataataataaatagagaaaatatacttatttaatactttgtgtcttcattttgtatcatgtatttttaataaatatttttaaattatatatatttagtactttaaagtaaaatttaatcaatataattttttcaatttaacaaaccagatctcagttatatataatcaaataattaaatttgaattcaaaatttataaaattttaaaccgtttgtattgattaaatttattcaaaaaaatttaaatttaaattactaaatatgtatgattttaaaatacaacgtaccaaataagtattattaaagacacaaggtatttttgtatttagataaaacacatgataacaaatgtgtagacacccataaataaattactatttttgttctccaaattttattatgtaacaaactatgtcttttagatttgtagttattaaaaattcattttactatcgagattgttggatacaaatatctcagtctaattctatttaattttattaatgtaataattgtctatgtactaactcgtaccctttaatattacaaaaatatgggaaaatgaagatcagttttgatatatatggcataaatacttaattatactaaatatgccattttttttaaaaaaaaacttacaaatatggaaaaaagttatgaggaatgccataaaaaaactttaaatttgtgtttctttttagtatttttttcctttttgaaaaataaaacactaaaataaataaaaaatgatctcaactatagatgctgttttttttttcaaaaattaaacctgtttttttatttagactattgtttgtttattttttttttt

SEQ ID NO: 41820 - DNA, 774 bp, Cannabis sativa
aactttcttcctcagtgagatttaaggtggaatcaaggctatggagtaagggatccatatcaagataaaggaaaagagatgcaaaaaaccagaaaatggtagcagttaacaccaaaagtatgaaggaaaggagaaaaaccgaaagctgagaaaagaaaggggaaaacaaaataattggaaaaaccgttaaaatcctaaaaaagtagataaaatactacaaccgcaacagacccaaacagagcacatagttgttttaatattaaacaaaactagaataaaaattataaagttcatccattaaaaagaccccattaacaaaaaaaaaatacctctaaataatattatataaattgatacttaagttttgtaagttataccaattttacttctctaataactaacatcccaattaacatactctctctctctccctctctctcaaacaccaaaacaccacagtaaagtcccaaccatcgcatgtctgtcttcgcacatccgcctccgcactaaacattggtgctctttctttgtagtttctctcctcaaccaaaaccgcaatgtgggtgaactataaaaatgagagaaaaataaaagcatcaaaaaatcatcgatgaactattaaaaaaggtattgcaaccgtatcaaaaataatcacaataacaaaaaaacataaaacacaaaaaaaaaaatcattgagaagccattcgaaataacttatcgagaagctttcgaaataacacctcagtttaatttttagcataggaaccccaaacc

SEQ ID NO: 41821 - DNA, 1893 bp, Cannabis sativa
agattaaaaaagtgttactaaacggcagataagaataaatcttcagagtaataaaaggtgaaatattaactattttattttttaatatattgaaaaaggcgggcaagacttgactaatatatattagcttctgttcaataaattgtattgaatgtgtaattttaaataagaaatgggtagaaaagggtgtagggtcatgatttttgatattgttgagattattaattaatgtattaaatatataatttgaatgaggaagaaaagagtagagatggatatcacatcgtatctctggtaattaatgttggtggccagagaaactttgtcttttttcttgaatatcttctgcagacggcgatgtatcatttctctctacctaattcatagcctttaaactacgctatacatacacacataaattagtatactatatatacgtaactccacgtaaccttactatatatctccatgatcatcatcatcatgacatcttattacaagtcaagatttacaacaaaacaactactgctagcttcaacatgtcccctttacccactacaccatcattttttgtttttcctcttcttaatcatcacttcaactttttatatattccttactatttcccaggagactatagtataaacaagtaacatatatattcttgtattccataaatttttctaaataattttgtttcaattaatggtgtttgcaccaccctcattaatatatatgctcaaagaaaataatatgtaacaaaaaataattataaaatcacatatatttatttaaattaatttccatgtatgtcagtaatatttttagtgtaagagttcttgctgtatttctcttcattttgtgtatcaatcttgttagtgaaaaagaaatatggaaaccatatgcagcaatatatatttatatagtagtagtagtacgtggtagaagaagaagaagagaaattatgagcatggagcaattattaatgaaaaaaatcatgagtacgaatttgtgccggcaaatttgaccatatcaggtgtgcataaattcttaatgtatacttttttgagtagcttacgatatatgtttaccttttggtcctaataattatttacatcatatatgcagtaccttagcttttctgcattgatgtggaaattatttagcccaagcagatctagatcttggaccacacgtatccctcgtcccatttacataccccaaactatgcagcttgaattatttatacaattatatgaatcaaattaatacttgcatatatattttttagatagaagaagaaaccgtataaagtcaacatatggttggtaaagatatatacgtaaaagtgaatgcgagatcatgggataataattaacatagggtaaggttaaatacgtacgacaatactagacagtacatactactatttatgtttaaaggaacataattatgtttaggtatcgtagcttaacgtgaacataagatcagttaccaaaaaatgcgattaataaaaaaaaggtataaataactttggtattttttttgtgacgcggtgatcgatcaaaatcatacatgattaacaaggcagcaatttacaaacggtagaggcacctcctcgaaccaggatagctcattgtctaactgaagggcatgctttccaaaccatgtgctgcagaattctaatcccgagccacatgggacaaaggacaaaactcaaaactacccactacccccgacccccgaaaatttagacaatcaagttataacgtcttcaaaacagcactacatcacattgaaaaataccttcccattattaataattgtctccagagcagggccggcccaagcattttgggggccttgtgcaaaatttttaaattgggcccttta

SEQ ID NO: 41822 - DNA, 1675 bp, Cannabis sativa
ctctctctctcttaggtctcttgtctgtgaagaaaaaaaaaacaaactctacaatggcgaaagcagttttgttaatggctctttgcttccttccggcgttggctttggcccgtatcatgactgatccttatgaagttcaagggaaggttttctgtgacacttgtcttctcggtttcgagacccctgccactacttacatcgctggtaaccattgctttcaagaagcttttttttttttttttttgtattttcttcttgtgggtttttgtgttttgtggctgctattttcttacattttctgtgaatggttgttaaatctatggaatgtggtgcatctgcgtttatttttagatctaagtctttttgtgctgtattttgatggaaatgcaagtgatcttcttgatctgaatgatttcgactgtgttcgagtaaaaaaagtttggactttataggaatctgattagtgctatgactagggttgaaaatattgatttacaaaacctttgaaaatgataggtacaatttcaaattggaattgggaaaccactaaatgggtggcaaaactgaggagctgattgaatcttgtaaatctttgctttcattttcagtatgaattgaattctgtgtcaaaattctcaattagaaattatctcaaacctctgagcaatcccaaaaaaaacaatttggaaagaaaaaatagaatttattgacagaaagacaatgatttgtgtctaaatttgagttggttgcttgctatattaaattatcttacacattcaagtagaatatgcacttaaccggtttgttctgaaaataggtgccaaggttaaaatagaatgtaaagacaggacctcaaacaagcctgtgtacagtaaggaggccacaacagacaaaagtggatgttacaagatggtcattcctgaggaccatggtgatcaaatctgtgatgcaatggtagtcagcagtcctctgcccgagtgtgccattccatccaaaggccgggactctgctcgtgtcatcctcaccgataacaatggcattgcttctaagcaacgattcgtcaatgcaatggcattcactaggactcagaaactggctgtctgcgaaaacgttctcaagcagtatgagttgactgatgatcaatactagagattggtttgagtgaagttattatgatgatgatataccttggcttggcttatcgttttatatgtatctttttacttactttttcttcttcttcttatggatttgtttgtctgaaattgaaagacctttaatcttatttgttaattgaatctactaagagattatttcagtctctagttgtccctatcttattatttaataaatttattgtattcaattaatctttgctatgagtcttggattccaagtttcatagtaagaaactattgacgtttcttttatataataatgctggagtttatcatggtcggcattttttggttttgaatgatttttagttaaggatataatctctcgatttagccttcttagttcttaaggtctatatatggagttggtgttttcttaggagatacagtacaagggctggcaactttttttcttttaagctatgaaatacttagttggaaaaaaaaaaacttgatactttttttttttgaggaaaacttcatagaacttagaaaat

SEQ ID NO: 41823 - DNA, 1041 bp, Cannabis sativa
tttttttttttgtttgaagtaataaacaatacttgctttagaaaagtcatattgcttaaatttttgaagagtatatagatctatatattcttgataatgcgctcgtgatggtaatggtagggtgtactctatatactagttttgtattttcaataatgttcatatgatactttatttttaatataataatttatgatataaatacttaaatttaatttttaattacaaataaatatttaaatttaattttaacggtaataatacgtaagttatatttctagaacggtacaagtcactatccatttgtcattttcttattggtatatttaaattatttttttaaaaaaaaaaattaatgacttgtaccaatcagaaattaccacgtaacaatttacttaacacttaacagccaaatacatgtaaaagttttagaattataatttaaatattattcccgctaaaaattaaacatgaataattatttgcaatcagcaattaaatttaggtatttatgtcgcaaattactctttttaataaagataattacaattttgaaccctgtattttgtaacattggaccctttgttttattaaataacaaaatagatcctatattttttaaaattgtacaaataagaccctaaaaatgttacaacaaaactatctacattttctatatctgttcattttaaaaattgttttaaagttagttatattaaaaaattaaattgttgaaaattaatttcagtatcctatttttaccattcttaaatatataaaatccattttgtcatttcacaaaacaaagagtccgatcggtaacttttacaaaacacagaatccaaaatgatatttacccattttaataatattcatatagtacttcgtattttaaaataatacaatttcatattcggtacccgaactcaaatttcatcaatcaaattttatcaattatgatagaaactatcttcaattatatgaattttaaattcaaattcaattatttaattatatataactgatagtagtttagttaaa

SEQ ID NO: 41824 - DNA, 998 bp, Cannabis sativa
gctcttccgatctcatgtaagtctatattttcgtgtacgtgctcggatttgtgatgttctttattcgtgctggcttattttttataaatattgtgtcagccatttcttattaaggctcgaattcaagctctacttttttactattttttttttttaaatttatcactaaattaatgtatttttttgtaatttcaacgatttttttaatactttttaatattactttacacataattacataaaaaattaattaaatttattagaattaatgattaaaatttaaatatttattaataaatacatatgctatattattaatatattataagaatttttaaagtattgtttggactagtctattcgcggttacgtacatgccgtcacttaaggcttgtcgtgcttaaccgctcattttttctgtgttgtaccgtgccaattttcagcatcacgttgtgtcctatctaaatcgatccatatttttttgagttaggtcatgctcgtgtgcctcctggactcttgtcgtattaaaaagttcaccctgtatttacaccactatgaatatgtccagcatttgttataaattttatatattagggaaaaaaatcatcataatatttttaagagaattgctaaaaaatactattttagtatattaattttttttttagtgttatagtgttataccgctattaatgtaattagtaagtatcggatttcatataagaaaataacttttaagcaatgtcactatctaatcgtggccacttataaaaagtgaaagtcactattgatactcaatgttcttgtcgtgtattaataatgtcataaatgtattaaataattcgtttattttatatataggccacgaagtagcattattaattaggggttttatatttaggttaattaaatcacctaaatgttttgattaattagtacacccgcacgccttgtttggtatccctttcatgattcactctcttcactatctttttcga

SEQ ID NO: 41825 - DNA, 1011 bp, Cannabis sativa
cctctctcctctttataatgtgtttagctaagctgaatatctactgtatgtgatttgtttcttattaccatgttgcgttacctcttgtataaatttcacaagtaatagcatattattgttgcatatgccgttgtgtttctctcttctgattgggtgttgtcagtaatatttatttctaaatcttgcaaatgttttttattggcagattggaacattgaaaaatgatatatcaaagctttttgacagtattgaaaaatatggtatgtgcatattcctccacgtctattacgctttcatcttttcttctcaatttaaaccagggttttatgctttaattttgagttgtcaaataagttttgaagataggaccatgatatagattttataggtgcctatcaaacattagtgttacattttctttctctcaatcactcgcttgctcgttctcgctcttcttcatttgccatattccaatgaggatataacatattaaaaaaacttgattttacacagctttctgtgatattatttctggtgatgttagtgggaaacttgttgctgaatctaattgcttcttaagctgttttgtaatataatgtcacctgtctgactgacttacatttacaatgtagatgatggtacattttattttgatgaaaaagttgttgaggcacaacatcagggtcctctttcgactacctcttcagttgttcgagggctcacagcatttgcagatgtcacttctggaagtataaaggtgactggaatggaaccacacataaagttgcaggggatatttttatacacacacatatatataaagatgtaattattgagatctattttcttcaaatgctctaattcttggctttgtgtttgcagcttccaggggagaaaatattgggattggcgaaattttttctaggtattggtgttcctggtgatgccaaagacttctttaaccaagtggattcgttagcttgtttggaaaacaataggcaagtgcttatg

SEQ ID NO: 41826 - DNA, 1321 bp, Cannabis sativa
atttaacaagtgagagattttattgtaccttagtgaggatgcagtggggtctattttgtgagaaatccacttgagcttaacacctttgaattgatcagggacttgggagttgtcatctaggcttagaaccatagatttactatctttaacatcagaagccttgagtttttgagctagggttgtggagttgacacttaagtaagtttggatattttcatagagttggcttcgcatgaaactgtcaccactgtactcgtggaaactaattttcacataaggaaagattaggctcatcattttgttggtaaaagtgtgaacatagagttgaatttcatggggaacgaatcgtgtaaatgttgtataaactaagaacaaactagtcaacattgcacttgatttaccaaatgtttctagcatcaaggacaacattgttcttttctagggtacaattacaaattgaagcaataaagtggtacttagcaaagcatttagaatcatctatttatagaggaaaagggatttttggtttcttggtatagaaggataagattggacttgttctttgccttgatatcatattattttatttgtgggtgatgaggggactaatttgtatgtattttctaacacgtttctatagacggcacactaatagattggatcaaagaaaagatttggtaatgaagatatacaataatgttttttattattatatagagtaatttgttgcgtcaattttaagtttaattctcgattgtaaataaatatttaaatttaatttttaacggtaataatatttaagttatatttttgaaacttccgtaggtacttagccattaaatatcaaatcattatccacgtgttattttttattggtaaatttaaattaatttttaaataaaaaataacaatttaatgatgtggaccaatcaaagattgccacgtgataatttacttgatacttaacagccaagtacctacagaagttttaaaattataacttaggtattgttaccgctaaaaattaaatttatgtatttatttacaattgtgagttaaatttatgtatttatttataatttacttgatacttaacagccaaccctccaatttttggagagattcaaaatggaggattaagagagaccaaatccatcaacctattttcttcttcatatacttttttctttgccaaacaagtgaaattaactctcctccttctctttctccctctaatattcagttctacattgggcataagcaggctagacctatgtctagggcccacctagtctaggggtaaaaaaaaattatctccttt

SEQ ID NO: 41827 - DNA, 1425 bp, Cannabis sativa
cgaaaagaacgaccctttccaccccttcagtttattccaaaccttattcttgatgaactcaaaatgttgtttcttcgttcgcccaacaaaggacgggagccccaagtacttcccatagttatcaacaactttcacccccataaaagtagccaactgagtccgaatcgaaggagaaacagagcgcccaaaacacatctcagatttgtgataattgacaagctgaccagaagcaatagaatatttttccaacaactctttgaaacacctacatgcagcttcggtcgcatcaagaaacacaagactatcatccgcaaagaagagatgcgacaccgttactctctgtctgccaaacacaatcccatgtaatctgccttgttgttcagcatgttgaataagacatgaaaaggcttcagcacaaagcaaaaacaaaaaaggtgaaagtggatcaccttgtcgcaaacctcgttgtggaagtatgcgaccttgaatttccccattgatgataaaggaaaactgaacagaagtgaggcaattcatgattttctccacccatagccgattataccccaacctcatcatcatagcttccaaaaaccgccattctaccctatcatacgccttcgccatatccaatttcaatgcaacttttgacccgttccgaaatctatccttccgcatcacatgcaaactttcataccccacaattgcattgtcatggataagacgacccttcaagaaagcactttgtgagtccgaaaccacactaccaagggaaagccgcagcctatttgccaaacacttcgacacaattttgtaaatcacattacaaagactaatcggccgaaactgttccactttttgaggtttatcaacttttggtattaatgccaccaccgtatcattaggacactccaaatcagcccctttattcaatacatttaagcacacagcaacaacatcaagtttcagtttggaccaaaacttttggtaaaaaagtgcaggaagtccatcggcaccaggtgctttagtaggattcatctccttcacggctcggacgacctcctcttctctaaattcagctagcaaattttcgttcatggctgaagaaacctttggctgaactacactaagcacctcatctaggacatcgacattaatgtcagaactcggtagcaagtgagagcttggaaggtttaaacccactaattttatttctttcataatttttactaatcaaggtacacatatattcattcctctatttatatagatatatatatttaatttattattctataaattagttgttaatcaatcctaagagcaatgttgttctctcaaaaaaaaaaaaaatggtttagtatgaggtttacatgatgggaatatgaatataaaatataaattaaatttgaataacaaaatatt

SEQ ID NO: 41828 - DNA, 1542 bp, Cannabis sativa
cgtgtacacagtttacatgtggcataattttattatttcacgtaaataaaaactaaaaaaaaatcagttttttttttctgggtctcttttcttcagtgactctctctccctctcatgcctttgctaatattcacaatctgtttatgctgccactgatttacaaattagtactctacgccataattcatttatcaacacaaattcaaaatttcaaaaaatgatggattcaacaaacttccagattttataaactagaaccccaaatcaataggtatgcactaacactgcagatatatttacacatattcaagacaaaaaatttccctcaatgtactctctcaccaacgaaacaaaaaatataaatgaaattataaaatagttttatcttcaagcttaataccaaacacaaacccatataaataaaagactcacaagctctttttttcaaatccaatctgaagacgagatcagttgggagcttcgttgtggaggttcgcccagagctccgtctcgtcgacttccattagcccaaaccttagtctctcgcccagatcaaagttccttggatctgttaacccagatttgcaaagaagaagacggtggatttcggacttggcttgggctgaggatggtcggagacggtggcgtgttctgggctgaaattagctaaatgctaatagaaagaagttttggaggttttgccgtcaaaaatttaagttttggaagttaataaatactaacaaaataaaaatattagaggttatgccgcacaatttactagtaaatttcttcaaaacaaaggtcttagatgggaaatgagcactgaaaaaccagtgaagcccaattcaggaactaaaatctaacattttggatattctgtagcaaaatatatacatatagaaacagcttaaatgcagttgtgattgttacttcataaaccaaaaataaaaaaacagaaaattgagttatataagttttcatactcacttgaacaatatagctatcactgcatgatctcctcatctcatttctaaactccatagctaacaacctgtaaaagaaaccaccaaaaactgatgagatcagaaacccaaatgtatgaaccacaattcaaatctttaaaaatagtcagaacaacatatcagttaatatacaaatcataagcaagcatgaatacataaattataaatatcaaattatttgactaagtacaactatttttactgctttggcataagcaatttgtaccaataagaataaaaaagacagctttactataatatttttataaaacaaattaaggattaattaatattttcaatgtttaatcaaaagcaaaatatttaaacaatcaacgatttaagcgattaattttgtaaattgatgttacaaacttgatttgaaaccctaatacccaaatttataccccattgataacccaaattcaaaagaaaaagaaaaatcttggtagatgttctaaaagaccatgtacatatttcaattcttcacagcaatcgcgtccaggtgttcctatcttggttg

SEQ ID NO: 41829 - DNA, 2276 bp, Cannabis sativa
aaatatgttttttgctatcgtgccacaaaattgattacaaacacgaagaaaaataaaataaacataatagatgcatccacatgcacacaggaaggaaaagagtatgagcatgtgtacaccacatgaaaacatgtctgaaagagatatctacctgattcatacaatagtcaccacaagggcaaaagtcaggagtgcattctgtgctggtatgtacattcaagcaactctccccacaagcactctcaggatcatctccatcatacttgcattcacatatagcaatatcctcctccttttgcttcctatgtctgaaaaaaatgtagaaggaaaaatggcaacaagaaaaagggggtgttcataacttttatcatttatttgtaatattatttttgtttttcttgtttttgggattttttagctcctgttttttagtgggtggtcctactcacttttttcttgtattttccttctcattgatacaagtctaaggttccaactaaaagcacttgaacaattggtctatactaaaaattgatagatgtaagtatgataagcattttacttggtgaggagaacctatgttagaatgttttatgtacccaagccaacattttagaaagaaagaataaaagagagacaaaaaagccttactttcgatgtaaaaaatcattttgttgaatgtgtatgtactgtggacgttcttctgctggttgagcctgcaagcagaataatgatcacatgaatttaaaaaaaaaaaaaagagctactttcaggacacatcttaagtatgcacatataattcaaattcagaacaataaattttcgaaaagcaacatagaactgcataagaaaaattgaactggtctatgaccacacaaataatttaaactaacgaaattgtatgtaggaaaagagcaactgaacacaatttttgaaaccaaacatacactaaagtgaaagtcaagacacccaaaatttaacatcatcaaataactagacaaaccagtttcccttattagatttacgtattgttgtgtaaagtaattgaactttaattataagaaaaacaatgcacaaaacacatggcaactacctattatatataaactgttaacattttcatgctcctcctaccaacaaacaacattttcatttctcagctaaactagaatttactctgaccaaatatcagccaccaaaaaccaaatatacccaagctcatcacacagatacaacctaatcattttcagaaaataattaattatttgataaaaaaactttacaagaaactttcagcagacgcatcttacaagagtttcccggatctaacaccatcaccaccaacattaccactaatatctactctcatcacaatgttaacaattttttttcaatctcactagtctccattgtcatctatgtccagaaaatgtgactattacaataacacagtatatagcttagttaaatcttgaaatttcaaacaggtttttcgatataaaatatgaagagatttaccatttcaaaaattgatacgaagcaaatgtgaattgagctggagcagtgcctagaaactcttgaatgcggcaatctcacgaaaattgattgctgtaaactccattaaagcttcaaaaattttgaagaagaggaagaagaacccttctgctttggccccctttgtcctcaacttcaaaatcaaaggaaaaaaaaaatatgcagaagaacccttctggaaaaagttaaacgacaacagacatgaaaaacgacaataacgacagtactgtataataaaaggacataaacgacagtaaggtatagaaacgacacaacttttttttgacataaaacgacacttaactttaacaataaataaataacattaaattaaacgtgttaaacgacggtcatactgaaaaacgaccgaaagtgatagtaaactgtaaatatggcatcaaactacaataataagacacttaaaagcggatatcatttggctacaacggaaatttcgtcatctttaggtacaaactacatttacaattgaagattttacattttgcatgaagaggatttcatgaaacgttacttactttggtaggtttatatgatagacacgtgacttcgtacctaaattgctctttttatgggcattttgaaacttcaaatagtcatgtaatattctgacgtgaaggagtccaaaaagtttgacagttattggaatttgagttattagaataattttaatatagtaataaattaaatattttatttgattt

SEQ ID NO: 41830 - DNA, 2562 bp, Cannabis sativa
actgttagttgccttttactacaccaagatactattccagatccaaccatgaagacatatcaagttgttgatcgtcatgtgtcatgatctctagcataatcaacatcgcaatagccaatgatcttaacctcatcatttttcttataaaagagaccatagttaatggtatcttttacgtatctcagtattcgtcgtactatttcttctacaaatttcttccatttctttagaatctggtaatgcttcctttttcggtgaccaccatgatgatgcctcatcgatgactacattccttgatgtataaaacttttcatttgtagggtcgcaatatctccaccctttctgttggctgtcgtatcccacaaagatataccgtatcgccttcttgccaaatttgctacgtatatggcttggcacgaatatgtagcacatacaaccaaatacttaaaagtgacttactgtaagtttacaaccccacagtttctcaaagggcgaaacgaaccctaacttagcttggagaaccctaacgacattagccatactctgcttctttaatctgacttttaactcatctccgggtgacatgtctattttgtccacatgtcacgcatagcggcagccacgtatattgagagtaatctggggcaacagtttagatacatagttctaccataattatcttttaaattaatttggtttatttatttctttttatcaagaaagataatttctattaatcaaccaagccaattacagtcacaaggggattccccttttaaagaaaaacttacaactctttttacatttttaagaataattttatctactatgctagacaacttccttttttcctatataagattaagtctacttttgaaactctctttaatgttactatctatacaactcggatttatacattttttctaatttatattgcacttgctaacacattcttatgaacataatataatttttatggcacattttaatttttttttatatatttaaaattatatgtgtttttttaataataaaaaaataacaaagcccattaacttgccaaaaaaaaaagtctattgatgtatacataagcagtcctctttcttgctatttttatttacatttttttttatataaaatagccgctttttttaacaaaaaaaaaaatcacatatgtacgtacacactactaatctctatttgaatttaattttattggctaaaaaaactaccccataccttgaggtacaaattaagagtcctacaattaaattaccctaacaatatacatgtatggagagctttaaagggaaaaaatccaattacaaatgagtgttaattgagttgaatttcaaggtaagaatttatgcaatttatttactaaaaatgttgtatgatgttagaagaaactaaactaacattatatatattatattatacactgaaggggcatactttgttttataatataatatggtaatatgttaaaaattgatatagatttctattaaatataacttaaagtaaaaatataataataaaaagtttgacttcaatagttaaagtaaagttttttttttttttgctggagaaatatgaaataatttttaattgaaaatatatattataactaattaaaattaatataatttttttttttcaattttttttcgcccataattatacataacttgtttaaactgatcaccaaagtacattaaaataccacactggtgtatatatatgggttatggaaccgaccatgagacattaccatgtttttgggactcaaatataaatggtaaaaagttgaaccaatgtatatttatatttgtatctatattactaagataattagttaattattaattattagtgaagtgagtcgttcaatggaaacatgttttatggtcctatgtctggtgacaagcatattaactaaatttgtccaattttcagtggtggtgatctcagattccctagctagctaataaaacatcaacaagatccaatattcagatcgagttgttaattaattattactaactactacatgagtgaccaccagatcatctcagttcaatcgaagctaccattgactgtgtatatatataaaagtaataatatcaatatatgtactctaaccaattaattgctaataattatgtgttattattattattattatttttcttaacaattatgtgccaatatgctcttttcttcttcttcttcttctttctataacaaagtatagccttctttagttaggtagatagtaaaaaatttaaagtttaaaagcaaatgttttcttgaacgttattaaagttcataatcaaatcgaaaactccatgtatatatgtattcacaattcattaaacaacaccgatcgactgaaacaaacgaataaaatataaaactatgaagaatgtttgaaaatgactaacgaattcaatttgtaaaaaattattaattgttcgtatatacagagcaaatatgtggcaataatacttaaatttattttttggttgcagattattacatatgtcaaaagaaatt

SEQ ID NO: 41831 - DNA, 4914 bp, Cannabis sativa
tctaaacaccattcacaataagctgaatactacaaagaaatgcaaaatcttcaaggcaaagtggcaaacgcaaaactgaaaaccagatgaagaaggctttagaattacaagttgcagaaagcaattgaaactatctttgaaggtgaatacatcttaaattcaactaatacaaaactctcaacatagaagtactgttatagcatctctaaattacaaactacaaattcagtgaaacaaagatgcatagctcaatgagagattaatataatcaatgaaaatagagattaaagcaacaacaatgtcataaacaaactcacctcccagagaactttctacgcttggggctgggattgtatttgtctctatctctatctccatcactggatttcaaaagaaaacaacaaaaaatattaaagcttcacaataagttataaaacacccaaagaaattctaacaaccaaaaacatcatcaaaacacaaaaactcacatccttgaagagaagtttctatgccgaggattagctccatctctaatacccctactacttttctcaattaccaaagctctttccctttccttctcacgtttttctcttcttaaccgttcttccctcagctcttgcaaagtcttctttcccttattcttcttcatcttctcctcttcttcatcagaagaagaagacccattacagtttcttcctctctcactactcaaatcctcaataggtttctcaagataccaaggcaacttcactcctttcccagcaagaccataacccaacctgtacttctcatcttcctcagtcacaaccttaggttcctctttctttatcatcttcctcaatttcttattaaacccatctattttctcagtgtcacctttcttcttatccttattctctaaccctactttaatgggatcaaaaatcctaattccctcaaacagattaatgtgagcagattccttgggttcagattccttgggttcggattccttgggttcagattcggtgggtttgattagaggagctaacccacgagcagtgcgaagctgttcgacacggaattcagtatctcgttttctggattcctcgcgcttaagctgttcttctttagcggcggcttcttcatctttgcggactttctctctgttatcgaagttgtatacattccatcgtttttggggaagaatgttcagacctccatggcctcccatcggatcttaaatccaagctttcacgcttcaattttgaatttttttcagtggaatgaatgtaaattcagaaaccaaaaagaaaaatgagcttaatttgattcgaaaaataaaaattttacagattgcgaattggaaaattagggcttacagagagagagagagagagagatttgcttaagaagatacatgagatgagacggtttgctgaaaaaacgacgaactatatataagttttagatttcatacaaattgtcgttttttccgaatgatgcgtgcctatcgaaagtgtgtcgtttttcataaatgctgtcgtttacatatgttgtttttcccgtgtttcatgaatgtttatgtcgtttctttgaaagtgtcgttttcttggataatgtcgttttttgaagataatgccttagtttatgtcgttttcggaaataatgacttaacttatgtcgttttctttaaaaagtgtcgtttatcagaaataatggcttagctagtatcttccttacatacgtctcgtttctccgaaaagatgtcatttcttcgaaacgctgccgttttcttgaaaaaattgttattctgaaaagatgtcgtttttccgaaaagatggcatttctcccaaatgatgtcgttttattgaaaaatgtcgttttctgaaaaatgtcgttttttctgaaagatgtcgtttttctaaaaaaatgtcgtttttctgataaatcagtaatatttgtgagttaaacttgattgtaagcaaacaacgtctcatcttttttctttttcttttttgaaaggaccaacttctcgtcttcagaggagaaacgaacaattaaattaaagagtaaaaaaacaacaacaacaacaacgaaagagttttcttacaatcatacattgcaaaaacataaccaagagaaaaaggttatgtcgaagtggtcataaattctagtaatacaaacaaaatcaaaaacatatagaacattagatatacattgaattgacatgtatgtgattattaattattgcttcacaatcccaactgcgattgcacttcaagtatggctttagcagagtcattaagcctttgttcctcctcatgtgaaagatggacattagtgacacccaaaacaccacctcttcccaactgggcaggcaagctcaagaacacttggccaccaccaatgccatagaagccggtggcgagtacggtgaccgggtggatcttcctctggtctctgagtatgcttcgagcaagattggctgcagagtaacctatggcccaagatgtgtagcccttgaggcttatgacttcgtatgcactgcctatcacttgtttgtgaatgttttccaatgtttctttctcgtatggaatttgctgcctttctaagaaactaagtacaggcactcctcctacgcttatacttgaccatagtgctactgaactgtccccatgttctccaattatgtaagcctatatacaacataacacaactcaattatttcacaaaaataccaaatttcttattacacctttaaactcaatatagtcaccacagatgataaattcttaaattttcaaactttcccattacattattataacaataagaaattatggctttccaaattttaagaatattactatatataagattatcaattattttaaattaactacatacaaacttgtccattttacaccaaacaaattaaattgtttaatacttatcacttcaatataaaatcatagcctaaaactttagcttcatgtgctgcccattcccaatatgcattattttatttaatacttatcactttcactacaaaactatagtttattttctctttacaattcaataataataataaaaaattatcatttaatattttattttttaaaaaacaaatctaataatacctaccccgaaagtgaccacttaattataaatttttacttatataataatggcattaatataatgtcagcttttaattaaattaggcaaaaaagaaaaagaaaaaagctgacctggacatcttgagcattaacatctagatgatcggcgatgagaaaccgaaaccgagaagagtccagattcgtacccgacccgataacccgattcgaaggaaaccctgataacttccaagacacataagtcaaaacatcgacgggattagatacgattaacagaatagtttccggcgagaatttcgccagcggaggtatgatgtgccggaacagagcaacgttcctctgaagcaaattcagcctcgattcaccggggatctggcgtgcaccggcagtgacaatacatagatcggatccgacggtgacggagtaatcgacggaggcgatgatcttcgtcctcgggagaaaagctgcagcgtgttgaagatctaacatctcgcctcgtaacttatcgggttttgcatcgacgaggactagttcgtcggcgagatcttgggtgaggatagtttgtgctatagccatgcctacgttaccggcgccgatgacggagatcttggtgtggcgtttggttggggaaggtggtgcggcgctgtggattggtctgaagaaggcatttgataggtcgaggcctcctggccctaacgacgaagttgactcactcttctgcatagtagtattgggatatgaaacgacgtagttttagtatggcgttttattagagggttttgtgatttgttgtgatgtgtcgatgtgggactgaacggttatatatacagtttgagaagaagacgtgtgatactttcaacaggtacgatcacgtaaatgatatagtatttcaacttctctctttatataaacgaaacgacgtagttttgaacttcttaaggggttttacaagatgacgtgtgatattttcaacagtcaatgaatccatgtacgtacggtcagtcacgtttatgtgtttgtgaaaagacaagaatagcctcggtttacacttggaattttggaatgtttgtagtgaatatattcgtcatttagcattatataatatctagaaacattttttgcttgggaaccaatccaatttctggagtttagaattttctttattaatttagagctgttttttctttagattgggtgggaataatcaaatcatataataccagaactttttgagtttttggtatgagaaaactaggggtggagaagagaatacagtgaaaccatgtcctaaagctttggaaggctataatttattattctacaccacgtggcattaatatatggacaaccattctatgaaagtagtcaataactcatgtatgaactaattataatatataatgggttatgccaaatgctaattaaggctttattaattaaactagattaataatttaatatatatatagttcaataaacagggtgcgacgaccatttttagccaatagtaatatatagtatatacgtggccatatatcatatattgagaaatgcatgtggactgcatgtagggtacgtaaagagcaaaaaaaatatacttttaatttatttgtcacgtcatattaataagcaaaatatatgatcatataatatttgttatatctagtgttattggtattgatattttcagtaaacacatttctcctttgcatgcgtatatagtaagaggcacctttcatagtgtaatcgataatattaataagaaatccctaactaattacaacattta

SEQ ID NO: 41832 - DNA, 1088 bp, Cannabis sativa
tatttttgtaggaatgtgtgtcccaatttaaatttacttattagctaaaagaatatacacatagcgcgcgcggtgtgtaatattatttttaaagcgtattattactcacgttgttaaatattaatcccagctttaattaaatagtaatgaaatttgggatatggtgtaatatatatgaagggatcgtcttattttgtgttatactcctcttaaaaatccttatatatatttgattttttaacgtgtttggggcggtttatgttactaatctaatgttttcttttttctttcctttaattttactttcaaaacaagtttaagtaccagttttcttatttctattattctattttatttcatatttaaccaaaaaagttaaatatatatatatatacatatgttaacctgaaaatttttcctgatgacgtggatatcaatgtttaacatgtggcatggaggatcgtcacggagtcgaatagacccaaatcatagcattcgatttgggaggggaccctagccttgcgcccaagttaattttaggatctccgagatggaagttcaaactttaatatagcttgaatccaacctactatctttcagtattctgcaccatgaagacattgagcaatctaatccaagctccgagagctaaaattacatgataacctgcaactcgaaagccaacctaggcacctagggtttcatcccgcgccctggttgacattctcaactagggtctcagtttttgaaatcgtcttagtgcaaaatggtcaaaaattgcattggaacatcaacgagatataccatagacatatttaaggcatcagattcagagcaagttaatttttgaggatccgaggccccgaggctttgagcacctaacgcccaagttgacaatttgtcaattgggcgccttccaagtgtctgaccagagatccaaatttttcatcttcttcgtcttcaccaaaaattaggaaataggtcattttagaggaaaaacaacaattcttaagtacaaataacaattactagctattcaacccgcctgcctccacacaagagtcatactatagtgattcatattacta

SEQ ID NO: 41833 - DNA, 3091 bp, Cannabis sativa
tgtgcttttatctcaacttagcttccgagaattcaaaatcacttctgtgagagagcttcatgacttttatcttatgattgcagatccctcctagtcgttccacctataacaacctaataaatgcttgtgggtctagtggaaattggagagaagctcttaaagtttgcaagcaaatgacagataatggagttgggccggatctagtcactcacaatattgtattatctgcatacaaaactggggctgagtattcaaaagcattatcgtattttgaactaatgaaggggacaaacatccgccctgatacaatcaccctcaatattgtgatacattgcttgattaagcttggacagtacgagaaggcggttgaaattttcaattctatgagagataaaagagcagaatgtatccctgacattgtaacattcacaagcatcattcatatgtattctgtgtgtggccagattgaaaattgtagggctgtgtttgatacaatgcttgcagaaggattgaaaccgaacattgtttcatataatgcattattaggagcttatgcttcacatggtatggataaagaggcattgtcggtttttaatgagattaagagaaaaggtttttgccctgatgttgtgtcgtatacatctctacttaatgcttatggaagatcaaagaaacctcaaaaggcattggaagtatttaagatgatgaagaaaaacaagtgcaagccaaatcttgtgacctacaatgcactgatcgatgcctatggatctagtggtttgttagctcaagctgttgaagtgctgcgtgaaatggagcgaaatggactttacccgaacattgtgtcaatatgcacacttttggctgcttgtgggcgatgcggtcaaaaggtgaacattgatactgttctttcagcagctaagctcagaggcatcaaattgaacactattgcatataattcagctattggaagttatatgaatataggggaaaatgagaaagctatcaatttatatagatctatgatgaagaagagaattaaaccagattctgttacttacactcagttgataagtggttgctgtaggatgtctctatacaatgaggcacttggtttttttgatgaaatgatggatttgaaagttcctttatctaaagaggtctgttcatctacaatatgcgcctacagcaaacaggcaagtaatatagccagagtagcctctgaatagactgaagatctgatttgagctaaatctcttaatcacccttcttcttacattaattcagggccaacttacagaagcggaattcgtgttcaacttgatgaaagaagatggatgtattccggatgtagttgcatacacatcaatgctgcatgcatatagctctaccggtaagaaaaagtgttagaagtactaatttgattgcgttaatttcaataagaatataattcaaaataattttttattcttctttctaaatcagaaaattgggacaaggcttgtacactttttgaggaaatgataacaaatggtatccaaccagactctattgcatgttcaactgcaatgagagctcttaataaaggaggccaatcgaccaaagttctaattctcgctgaacatatgaaagaacaagaaattcctttcagtgattcagttttctttgaaattatatctgcttgtagcctgtgagtttcccttcttaccttggttggtttctcatgaatccaaaaggtctaagttcaatttcttgtaacaatactacaaatgctaatctaccgatagcttcgatgcttcctgtcattatttcacttagagactgacaatgggacattggctacagattacgagattggaagacagcaactgacctgattaagatgatggagccctcactccccgtaatctcgagtggcgttataaatcaactcctcctttttcttggacgaagtgggaaagttgatactatgatgaaggtaaattttcaatatatggttaatgatttctctagtttgcttttgctaagcataaactaaactgaaaccctttatttaccaaagatgaaactaattaagatgctggaaatgatgatgtatgggatattatgtttagtcttcctcttcttcttttctatttctttgaagatttcctcttattttatttctcttctcttatatgcagttgttctacaagatagtagcatccggtgctgaaatcaatatcgatacttattcaattttgttgaaaaatcttttgtctgctggaaactggagaaaatatattgaggtaacatatcagtcattttctttagtgttgtatcttttggtgtctggttaaaaaatacaagtgcaaaaatgagtttcaaataaggtgcacatgacattgattctgtagggaccaccaagaaagcctcaaccaatgttgaaaattgtatattaaacaatgataaatcttttccctgtcatgcagtctctgtctctttagcctctctagtttagatactcagtcgaattttacgtgcaggtacttcaatggatggaggatgcaggaattcaaccttcaagtagcatgtatcttgacatatcctcttatgctcggagaactggtggtgctgattatgctgcattcataaaagagagaatcggtatgtatctcttttattaaaaagcaagtgcttttcgttctcttggtactgaaaagtaaaatgatttgaattgtattatttttaacagaatcctttagagggcaagcaaaaagtgaccaagggtcagatacaactaggttgcgggattctacctgggctctcttgtttgattgataagtgaagccgatctacacgttgtagaatcgataatgtcattatccagggcatttagcacattgaaattcgattacatcggcacgatggaacacgcggcattggtatacaccggaaacaaccgatagatgcctgacatgttggatatatcaggtagtatcagtattctttgagatgataaatgcacccaaacattatacaccccagtttaaatatatgtgattggctaaaaaatttagttgcatgctacttgtaaattttgattgccaatgct

SEQ ID NO: 41834 - DNA, 2635 bp, Cannabis sativa
  modified_base (623)..(625): a, c, t, g, unknown or other
  modified_base (1160)..(1161): a, c, t, g, unknown or other
tgtaagtaaacaaatgtaaaaatgattaccttaccattaattctcattacatattagtaaacatgccatatcattcaaaatctatacacaccatcggtagctaatagggttccacacctatagacttaatattctatcctaatatggaaacaaaaattaagtggggactattaattaattactagtaccaacattataattaatacaatttatatttatatgtatatataacttagtctacgaaagtgacatccttttctaactaatatatatattgaagataataatatcttatcatgatcttctcatacatgcatatatagaaaaaattgtagatatatatatttaattaattttcgtgtagatatatagaaaaatgttaaaatactaaaaaaaaaataaataaatacttttagtcacgattaaaggttaaaaagttttcactaattataaattattatttttatactataactaaaaaatctgtggctaaaaatattagtcacaaaaatcacaatttattatgtttttagtcacaatacttattgtgattaaaactagtagcaacttgtatctaaattctatgttttagtcacaagtaatttttattgtgactaaaagtnnnatttaattacaaaaaaattatattataactaaaaaaattgtcactaaaaatggtctttttttgtaatgatatatactattaattagtgtttaatatcttctttgcaattggtataaaaagagtgctacttataaaaaaaaaagtgttaaacactttatattaatacccactaataatttatgtatatatatttattgaatttaattaaaaaactttgcaagtgatagaatttcttggcaaaattttgttgacagccaaacacattttggtgggcgcaatcaattcattgcactataagaagtggggcttgaattgattgtgaaatgcatgaatctgtatacgcgtatatataatatcaacaaatatccctttatatataagtgctagtacaataggtaatgtaatttttacctatattgataggtataatgatttatgagaaatgctaaaagagaccagtagtgtctagcaccctcctatgtgttaatattgttattggtccaactaagtattgggtctcatataatttaatatnntagcttttagggagtatcgctagccaatcgcaacgcgacatgtcgttaagatgctatcactggtgcctaatagtaatgctcatgatttatagccattaatttaatcaaatggcttaaattaacttttggaaactacaccataattaatatttttctatttataattaatttccaactaacaatactccaaatctataatttttcttatttatttaccttataactttttataattttaattaattattttttaattttaaatttatatattaattttatttttccttaagaataattatagctaaaagagtataaaatattcaagttatttaattctaaaataatcaatacaatcaataatataattatagtgtaagtggtaaaattatcttacatcaattacaatatttacattgattattataagttgaacatgttataattttctataagtataattattattttaaaataaatttaataaaaatatatttatgtaaatttaaaatgaaaatatatataattaaaattaaatttttagtagatgtaaaataaaaagtaaaaaaaattatagtttggagttaggttaattaaatcgataattaataatattcaagattaattataaataaagaaatatattaattatagtgtagttttcaagagttaatttgaaccattagattaaatcaaagtctattaaattaaataaaaaattataaattattatccctattgaaagatatttacctaatactataataatcccctttatatatatatataccctttatatatatatatatattggtggtcacaactctacacattcattatgtatacatataaaaataatatgattaagacatgaaagtagatttctccacttggaccagttgtttcttcatttatatataaaaacaaatttaataattacttctgtcatcgtacgtatctctctattctaaattattacttaattttatcatatcatccacttgtttccaacttatatacacattatgctattattgacaagtgtgtgtgtggctttcctaggtagatatcactctttatatataaatatatatatatatatatatattatgtggatattattaaatatttaatcttatataatttaatataataattattaactaaaattatctttttaaggctgatcctgactcgaaagaaaggagctttacgaacaaaaaatgagctttttattatatgaataaataatcactataaaaaataattatttttagtgataattttttaatcacaacataaatattttgtaactaagtgtgagttttagtcacaataaaagttatttgtgattaaaatataatatttagctataagttgttactgatttaattttagtcacaacaagtactattgtaactaaaaacatatttagttacaataaattataatgtttgtgactaatacttttagtcac

SEQ ID NO: 41835 - DNA, 1086 bp, Cannabis sativa
gtgtcctagacaacctgttaatgataaccgacgtcgtttttgtggctgtaagggacacgtttagggctgtggaggctaggagtttggggttggttttgatactctctgcaaaaacagagagcgattcgtaacacaatttgggatagattgtaacgttacatgatgtttttatgtagctaaagtatgttgggtttgggaatattgttggtgttgtttttgtggctgagattggagttgtttggttacatgaatattggaaaacaaacacagctgctaagaaagcatgtgctaagcctgagaatttcatctctaataatataattttactgaggaaaaaaaattggttttggggaagttttagaagataggttaccaatttatagaaaaactacttgtggttctgtttagtttccaaattattttgggacccatgaagggtcaaattttgataattcatattttttattcgtgcatgaaaataagccctacaagagtttttttttttttttttcggataaatagccctacaagaggttttgttcacatacattatataccctaaacatatatagtaatatatttgagatatgtttgaataatataattataaggaatatcatatcatgatgatgagttgatgaaattcgattgttacatatcataatcgatcataatatcatacaataaaatatcgtgcacgtaatttattgcgggtgtgacgagacgaattataacaaagcatttaaaaaatataaagattaattagtatatcataggattataattcaaagaggagtgttacatttttagtaattatgtgtttgaaaacacatgctacaataatttctcttttcatttcttttgttcctaaccgtgttcattttactgttgtaaatttttaaagtctaatacttaaattatttagaattttttaaaaatttataaaaatatattataattataacaaatattattataaaaaaatttgaaaaaaatattctaacatgtaatttcaaaaataaataaaattaattaaaacattgtaatataaaattataattaacactccactaatcgaaatccaaa

SEQ ID NO: 41836 - DNA, 1640 bp, Cannabis sativa
agccatttcattttgattagagtatgctttttgtgcagaagaaagcacttgaggtccgtggagtgcagattgatttggtgttggcaaaattggagactgtgttagcaagggacctaagtttgatcccagtaaagaagatgcagaatatgtcacagaggggagaggttgcacaggttctgattcagaaacagagttattaacaatttgagttccgtgtacgtttaagtcttggccagacgatgtaaatgaaggcatagtcagtgcattagtagtcacaaaagtggaatcagatgaaagagatggaagtgtgggcaaggacgatggtagtggtacttgtggagatgggaagaacttggtatttacagatgtagagggaagatgaagatacaggggtcctgagttctgatatattggttggtcccaaagttgcagatgcctgaatatcaggggattgtatcaactgctgcatggtgaagggatctaacatcactggtgggagttgattagtaacttggtgatgtggattactcaagctactaatggatgttgcattgtatccttgcggatacattgatgtttgagtcacaggggaaagttcaggctgacccagttggacagcagattgatatggaggcaaagcaccagggtatctacttgtcagagaaggggtatcctgccactgagttgattctgtcaaagtgttcttcctcattgatgccagcggtgtagaagtaacgggcatccctgcagaatgtgactaaaaagaaaagtatactcaagtaaatcaatcaagtcaaatcgacaaatttacctgataaagattgtaaagttgaattaaaatgtttatgtatgggtacgataaaatgtgtaagagctaaaatgcacatacctggatgatggcaggatcattgtgaatctcctcttctgtttgaacagcagggggtgacttaacttgcaaatcctaaaattgcaggacagcaatagggtcataatgcgaaatcattaccattatcacaagccatattatcatgtttgtgtgcagcacagaggaaacacaattgcaaaagtttctgtaacacaaacatgattggcaagatagtgtcccaaagaacccgcatcaattgtacaacataagatcatcacatgcacagaaaaatctttacaatgtcgtaatcatacacattagaaagttaatatcctgtaactgatggcatgcccagactgaatcaaagaaagggtgaaattagcctgaaataacgcataacttaaaaatggttcccttacaaaaagagatccaaatgtagagctgaaaaaagacaaaagcatagccaaaaataaaattaaaaaaaaaaacgtgtgttcctaccaatccatttatatcacaaaatcaaatcatcaaacatactcgttaccttgatatcacttcctctaaacagtatgtattcataaaccttctcacttggtagaacttcggcaccatccttcttgcgcccctccgttccaaatgatctaactgcaaactcacaggggatcaacacaaaatgattaatttatataaaccagcaaaaacaacaatattttataagagaggtaatttcaatcctatgcaataacttcatgaattagtataaatatagcat

SEQ ID NO: 41837 - DNA, 3345 bp, Cannabis sativa
gacttggactttaaaaggcaagcaagatgttgagataagggagtgtcaaagttaaagcccattataaagagcacgtattaaagcccattagattaatagttcttgtaagcccatgtgtccagaatcatctacattcaacatgccgttagttgagtaaccaaaatggaagtgatcctcacacgccgactttcgttggcgcgtgatgagtcacgctgctgacattcatatgctacaatatttgagattttttattattattattttgatggcaatacaatatttgagattatcatgagtaaaaagcatttccatgtgatgcaaaattaaattatagtttactcagtagatgatataaatttgagctatttgttttagccaatttgtcggattattttttaaagttatttttcttttgttgttattttttagacaattttacgcttgttttttatgttattttaggttctcaaggtaagctcattgttggtcgcgacgagggtaagatatagtcgtggcgaggagctttggcagaattgatattattgactcactacatttgccgcggtgagactatatctgtggtcatggtgacacctccgagacaagatattttcatcttttctcaattttaagttataaaattgagttttaatagcggagtttcgaatttttaagagactaattcagaaaagaaccttataaacaaaagaagaagactcttggagcgagcgtggtaatctgatcgagttcttcacccagtttctttctcttctttttaatttctttatgttttattttgtttttagtttaaacatagatttgaatattgagattatggactaattattcaatttaaggatatgatgaatttgggatgattttattccaaaagttaatgtgatttgctatttttcctttctagattattgtaattagttcatattcgttttaatacatattttagattgaccacttttaacatgatttatgatcctaatatgaaatttgaaaagtgaatattaagaatgctttaaatgaacaaacataggtttttatgtgaaatgaaagtatttacatagcttatatgtgacttttagattataaattaatgtaaattgtatgttgtactatctcagagatggattagttgacatgcaatttatgacctttatgatatgagaagagagagtttaagttaatttataatctatctatcatcatataggaggaagaagaataatcaattaacattttctcatccataattaaacgacctttattgttatcttgaataatctgtcaattgttactatcccctctcaaagattatttttcaaccaaatagaaacaatgaaacacaagtctaatttagtggtaatcaatttcaattcatgtgggtacttgagacatgctctttgtagtttaataatttttgtaacagacacataataaatattgtgctaaatttgttacaatatttatgatacaaaatttacatcacattattttgtatttatcaatttttattattttattagtatatgttttttttttcaattataaattatttatattatcttttttattattatcttacattttttttgaaaaggatcattattttattaaccttttaacctcagttattaaacaaggcaacaacttgattgggacatccccagaccaaagctacgattagaaagtgaactaaaaacttatacaaactcataagcaactacgttcattgaacgtttaataaaaaccaaagcaacatgcttcaactcaacaagcaaagaaatacaatcttaaatgattaaaccaaaagtagaattcatttgaaatgggttcctaatagcttgtataactagcaagcaatcagattctaaggttgtgttctgccatttattctccttgattcaagcaattattttgtttgccacgtgtgacaaaatttgacagaaaaattaatttacaatactgtgaatagttcagagatcatttttaacgagttaaaaagttcaagggcacaataatacataaatcataattcggggaaaaaaaatatcctaaatagctttaattatttatacaaaatatttatatagtaaattttgttgcacttaacaatttattaaaaataatttatatataaaaatactcacaatattaaatttttaattaatttaatatttaaattctattttcataaatagttaattataaaaatatataataattaggtggggtttggttagagataatgaaatagaattaaatagaaaggaaataattttcattccatttttttttaagaaagtaatcaaactttattaactttcaaattcagcaaccaaacacggaagcaatttagttgggacatctccatactaaaaatacgatcaggataagaaatagcagctttagcaatcgtatgagctactaaatttgctgaccgtttcacaaaagaaatagtaacaccccttaaattcacaagcaagttttgcattccattcttttgtttggttacatattaaaatattggaatatcattctaatagaatgatcttttcattattttggtaaaataactattcaattttgaaatggaaagaaagatcattctaatgcatgatgagaataaatttaataattttatatcaattttttatacattttaaattttattccattctatttttattcctattctcattgtcattgtcattcctattcttatgattattcgtcttattccattcaaacgtcactttagtgttgatatagaaatatggtaaatacgcgctcgcaagattatcgagataagtaatgagttaaatagtaataaagatagacacataaaatttatttatggcaattcataccatgataatagaattagtttttatttctgataagaattaccaaaaaaaattaactaaatatctcaaatgtttagaagaagaaagtagaaaaatgctctcaccttaatttttttttagagagtcaccttaattatttttagttggtagtcttcatttcctttttgaatgagtgaagagagcgtgtagaaaagtgcgcgtgagagtagcgctcactcactcactcactcacttggttctagaaaggtcttttatcgtttgataaaaccttggtttctttctttgctagggcatactaacactatcagaaaagggttttatcttcatcgtcttcactctcccaacccaacctaatcttttacgccaagctcctatttttatttcagcttctaagttctaaggtgtttcttccttctaattttctctattcagattctttcttgctcaatttttcttcatttcctcc

SEQ ID NO: 41838 - DNA, 1151 bp, Cannabis sativa
acaacaacaacaacagcaaaatctaaaaaaataaaatatataataccttttatataataaaaaaatagttgacaaaaaattcagatatttgctttaatattattttaaaaaatgaatattaactatctatagaattaaaaatatgatcatttactcacatttctcaaaagtaaatgtagaatataatttcctcaatataaatagtacttctctttcaaaaaaagttaaatagtacttcaactataaaaatttagaattatatattcgtaattatagtattaatatttttctttctaaaaaagtaattttagtattaatgttaagacattatacttctttttttttttttttttcatatatataaacattgggtattccttaagtgagagtatcacttttgctcttataaataagagcatttttataatccttgattttcaatctaatggctttaattgatttgtttatcataggggtgttgtattagatttttctcaattatcttttttaatagggaaatttgaatgttcatgcttaataaactcataaattggtctcttaaactaatactatgcataatttgtaaaatgggataactttttcctaaactccaaaaaacccctcccatttttccaaccgtccctctctcttcctcttttttccaaaaaattgactgaccatcgggctggccattgggccctatatcgggcctttgtcttcaacccagattcaattttttcatcatgatgcatcaggcctgcatcggacctgcatcaagcttgcctaaaaaatgcattttctaacccaaaaaacacagattcaccaccgccttcaatccagatccatcggactaggtttgcctttgatctccggtggtgttcggccggcgtgcgtgcgtggtggatcgccgatggcggtttggtcgagatgggtatagatgggcgtgggttggtttttgatgtgggtggtgctcgtcgtgcgtgggtggttcgacgaggaggagatgatggttaagggttgggggcggtttcctccgatgcggttttgggcgaagaggcaaagaggtagagagagtttgagggaaggagagagaaagggtttgagtttttgagaggggtatttttggaattttggaaaagtgatcatatatt

SEQ ID NO: 41839 - DNA, 2535 bp, Cannabis sativa
cagagtagcccaaacaactggccaacaaattaggggcacactagtcactgaagttggaactgggactactcttgcatctcaggtgcctgatggaggccctggaaccagctccatagctcattccctaaggccaccaaatgctcctagtactaaattgacgagcagattccacctggagagccacacgtagagttgaaagaccccgaagaggcagatccttgggttgaacagcttagccaaacggtggctgacctacaacaacagatgtgaaactctctcgacaaataacacgagcagtttcaaaacttgttcatggaaaactggcagaacattgagagccaacgagttgattaggaatcgcaaagagttaacttgtcttaacggattagagaagcctaacactctagacacaggactacactccatagaggtctttccaagtttgtaagagagattccccatcgaccaactggtcatgtgggaactagtactcaaggggaaacccttaatgcacaaaacactaataccatgccaagtaaccgtgcaagtactaagaaagcaccaggttctgaggttccccggagggaagcaaactttgagcaagtgtttgaaaggactcacactcgtggatgccaaccaatgggccctccacctaatgtggagcaaccttagaataccgagaaagccaataggactcccccaccaagtcctactcaatgctctcatcagaccaggctctgagaccctacaaagggaaatggacctactactcaaaatgaaaggggaaatcgaaggctttacttcgaggtcagaggctatgagatccagtgagtgaggactcacgagctactccatactcaaaagtacttcctagatgagagaggtgagttatgtcgttactttgcccattgccttgatggccagcaatatgagtacttccctcaagtacatggtgaagagttaagcttgagtaactaattcaattctctctgcacttgtgattcagatggagactactttaagggaagtagccactataatgctctaaatgactgctccaacaacgcatcattccaagatgacctagagttcattccaaaaaaatcaccagtgttaccttcacaacctcgtcgttaggagacattaacaagacccaagtcaactggagtgcatgattggcttggaagaccaaaagacctgcatgacactctaactggaagatggttggtggaagcgaaagcttctgaccctaatcgggtaatagaagatccaactgggacgcagaccaccatccatggtgtgaatagaatagagtttgacaacctagcgaccctagtaaagggaatcatggccccaaagttgtcagagttcgaactcaacaaagagcgataatcaccactccctaattgaattaaagctctaccaatccctctgaagttcaagaacccatactggcatcaatactctgggaaggaagattcactatctcatatccattactttgaggtgcagactgatttgtagggagtaagagatgatgtcaggtgtagaatcttccttgctacactaacaggcctagctcagtggtggtacctcaagcttccccctggatcgatcaactcatggaaagatctagtggatgcttttggcaaccaatttgctccttaccgatagcgctgaattgagcccaatgatttcgtggatgtcaagcaacaggaacgtgaagccttcaaggactatatccattagtccttggaggtagttgctaaaacaaaaatacttagtgaggaagcaagggtaagggcactaatagctagactcaagtagatgagtcctcagtggtctgacattcgtcttaagtcagcctacacaatgaatgaatttcttgataagggtagatggctttatcaagctaagttttcacccaagttaaaggctaaaaaggaaacaaaaagaattcaccatgcttcccatcctctgacattgaagtgcagtgtaatgggaatagatgagacttgaatgcaagcaaaagagccaacaatggtggaatataaggcaactcccctgatggaagaaagccaagactgggggcaagcccatgcgagagtatgagccttgttttaccacctactccattctcttggccccaagagaagagatctatattgccacacaatcaacagtgtcgtaccgtaaacctcttcttttcaaagagttagggaagaaagacatgaatagattctattgttatcacaacaattatggtcatgatacaaatgagtgtaatcaattgcgagatgagatagaatttctcatctgatagaagcatgctgctcttcagtagtatgtatgacctaaagctccagtatgtatgattggaggccctaacctagctaggaattcaaagaaggccttagaaagatatgaaaggtctttgtgacatgagctgagagtcgaagtacttgaggttattgagcatcctcaatgctacaagtgtgatcccatcacagccggagactccgactcctatcatgt

SEQ ID NO: 41840 - DNA, 2545 bp, Cannabis sativa
cccctgcccaccgagacgaacagggggaagagttaggaagccatgaagcgagagcattggtttgtgtaaatgagtttttgagtttgagaagggaatcggtttcggaaagtgaatgagagaaaggaatgaaatagagaagaggaatgaggaagaggagatgagtatgttttggtgatttttggttagattgtttttgttgggtaattggaatgtgtgtcattttttgtgaaagaggaatgggattgaggagttttggctttgagagaagggaccctcaatttcatgcactattctaataatagattttggaaagagaaagatattagattcttgggttgacaactcttgttgaccaattcagcctcattacaaacctttcctcttattaacgatgtgtctcaatctccttcatttccacaactcattttatcaaagcttcttcttttggtgtccaaactataattaagatccttaaaaagaaccaatgaaaaaataaatatgcaagacttgaagaaaagggtcaagccaagagtcaagactcaaaggcattgtcttagatgcttcagtatttagtatttacaatcatagaagaaaagggttgtcgtctatatgattcaacatgccatctactgtgaagtgaaagcttgcccaaaagaatagttattagttttagaacacaaacactaaatacaaaccaaaacaatagttccaacaacaaatgattcaattggccaacgttgttccaggatttaccatgcctgagatgcctctgattccaccatttcagccccctcgccatgttgttgggtcctcctcacagactgctcatcccggtgatgacgacgatgacgatgttgttgttgatttgtagttttctttagtctacagtgtacataatattattgtttatgaactaaaaatatttttatttaatttgtgaagtgtaatataattttataattataatataaattttggttttataatatatttgatattatatttattattattattttaaaaatttattataatattgatggagttcatgctccgacaaagagtaggtgccaatttgtgccgtcgtgttaactcgccgaaaaacccttattattgggacctcagctgacagtcctattgctggcgttgcacttatgccggcaaataaattcgccgggataaagtcttttgccagtgcacttactaggtgccggcaaaagctgctacgccgacgggccattgccagtattctttgctgataagaaaagtcaccggcaaagctgttccggcgagatcctcgttgttttgccaactcgccggcaaaaattgatattcttgtagtgatagttatccatagatataattattatatatttgtttggattggaaatttagtatttttggcacttttttattcttcatatctagctagaatatgcttatttagtctttagtagaatgtgttaatgtgcatgttagagtttttttttttattattattattattattattattgtaaacggtataatttgcttctttctttagtctgctaacaatttaaccatataatgattttgtccgatttcactcattactaaataaaatctttttgagatatacgcataagcttacatttaattatatgtatttgaagttattatctttcaaaactaagttatctaattttttatgcctgcatattataaaaaataaaaaatattggatattgaattttgtgagtgatgattataactgatcaatatattccaagaactttaaattgaaccatttatatatatatatatatatatatatatatatctttttcaagagctagctaagctaataataacacaactcaaaatacatttctctttctcattgaattctcatataaatctctaatattaatggcaactcacccacaaaatacagacaacttagactatagtctatagtattagtaaattatctattttatttatttatttaattattttctatataccttatttttcaccaaacccaatatatataagataatttatctgacgttattatatatattcaacttatattatgtaccaagttcggccacaacacactttgatgtatataaaatcaactttatatcttataattcatgcaaaaaagtcaaaccccttatcaatatacgtatctatatacatctttaatatttgttttcatatatatattagttatatctctgttacgtacactctaaatttctttatttaatttcctttcacacatgcactattcatatacaaatacatatatatacatgtacatatatttaatgcttccattattctccgcaactcttcttactccatcaatcgaatctagctttggggctgagattttaatatatatatatatatatataaggctctgtttattatatatataatttcaatttgcttgaattgaccactaggtccactactcttcctttaatttctcaccaaggtatgatcaattatggcctaatctctctacaaattaatattttgatgcata

SEQ ID NO: 41841 - DNA, 543 bp, Cannabis sativa
agagagagagagagagagtacctagctttgagtttgatgtgagaggcagagagaatagggccctttgctttactttgattttggtttgtgcaagaatggcggcttgtgaggagaggagatggtttttatagcgtgaaattgagaaataagatattagaattagagttggagaaggactattaaaggcggtgctttttcgggatttaatatttaattaaggtcaaaatacacaatataataatatgtgtcttacacgatgggtagttgactatctttactttattacgcttgactaacaacttggctgtttgggcttatcaatccattacgtgaattttcattttatcgttttttgagaaatatttacaaaaatatgatttttttttcaaaaacatatttaaaggaaaaaaataaaagatatgggaatagcaactagttaccttatactatttttaccatattttttaatttttcccataaaataacttttatatttaaaaaaaaaatatttttttgcacagtataaaaatctactaaatctta

SEQ ID NO: 41842 - DNA, 905 bp, Cannabis sativa
  modified_base (43)..(55): a, c, t, g, unknown or other
ttttaaaaacaaaaatttcactttcattttgtgattaaaaaannnnnnnnnnnnngtgttaccaaacggcacctaaatagtttctctaaaatttttatgtagaattctgtaaatatatatataaaaaaactaatttaaagtgtaaaaataaaaatacttttattttttattgtatccattaccatttccctaaactaaaatttagaagtattgtgtaacaagatttatgagtggtgaattttaataagtgaaccaccacaagtacgtgaattttactatgttaaatgaaaattaataacatagtaatcaaaaaggacggtggttggtgaagatattttagccttgtgtttcttatagtaataataagcttctgccacttatttattttgtcctacagttttagttgtaagaatagatagaagttttcgtctttaattaataaatgacttctgtttttaatattaatctttcgaaaggattaaatgagtatttttatgcttcaaaaaaaaaaaagaaagaaagaaaattgagtagtgtgtgatgatcatgtatttctgattgggcacgtgtagtactgcctaaatattatcatggttagaaaaaggactcatggggttttaacagaagaaatatttgtaaatgagcagtacataaaaatattgcaataatatatgtataaattatatattttaagtgattttataaattattattgaaagatgttaagttgatagttattgataagtgtgatttattaaattggaaatttattatctttggcacttttttaattaaaaatgttattagtgtttttaataccattattaaaagtaatatgacttgcctatttgttgattttgcttttttgagtgatataacgttgtataaaaaagaatgaaggactg

SEQ ID NO: 41843 - DNA, 1506 bp, Cannabis sativa
ttaagatagaatagatatatagctgattttatgcagcagaatttttctattggaaagctttactaaaagctttattcaaggagccatgaaaagaagtggaatgcaagtatttgaagtagaatgaatactccaaaacacatgatgatagcttagcttgctatgtgagaaatacttccaactagagactggttattgaaatttgattgtatcaaaaagaactactgcatgatttgtgatagtaaaattgaatctcatgagcatctcttcttcaagtgcgattacagttagaaaatagtgaagatattgatgcaatgggcatcctatacttgtaaaaaagtgtaaacattcatgtgattgtaaagtaaataatttgtttggaacaataaaattcatctggccaactattaataattccattttataattaaattataaataataggaaaatttattattttacatacattacaatttattttttagaaattacatacattacgaaattttattacactatatatatatatatattctattattgttgtgttttatttatttttttatgacttaataattgaattcatttatttttatttcattttaatatatactaaattgtttgcttaattgtgaaatgtacttaattttttaaattgtttattatattaattaataaataatattttcttaaaaaaataattaataatatttggtaattatttttagagaattaccccatgtactttttttaatttttttttttaatttacagtttgggttgctccggtagtttttatgtgggttgctatatagattttgattgtgattttagttgctctgttagttggcatgaaggtttctatgtagatttctgtaaaaatacaaaaaaaaaaatatttttaagtattaaaatgaaaaaatccttttttttttctaatccatatttaatttttataaacaaaattcattcattaacccaaaaaattacaaaaaaaatgactcatcagctcaaaaagcttaacgaacacaaggaggtaaaactccaatccacatagtactagttagatttggagataacaaagcttgattagctaaaatgtgagccacatagttggctctctaaaaataaaagataatcccataagagaaggatgtaaaagtaattctctgatttgaagtagcagctcattaatgtcccaacatctatttttcatgcgtgattttaaagatagactattatatatggaaaattgtaatataattaaaaaaagtaaaaattacactataaatctactttttattttttagtgtaaatgtcattttagaccctgtgttttgtaaaagttacagattgaaccatttgttttgttaaataacaaaatagaccttgtatttccaaaatagtaaaaataataccctgaactaaatttttgcaactttttttttaatgtaaccaacttgaagataatttctaacacgaataaatacagaaaatgtaaacagttt

SEQ ID NO: 41844 - DNA, 565 bp, Cannabis sativa
aagtttcatccaataaaattgtaaaatagactccattaaattactaaatatatttattttttaaagaccgaaaaaaattctcacacacgtgattcagacactgataatcacgagattaattaacatgagttaaaacaagaacagaagaatcatcacataattcactaataataatataatatatttatagcaatattatggttttggttgattctataaatgcaatatactttattataccaagaaaacctttctcttgattccatactacaatgtattgactaataaaaaaaaggtttacattataccttaatattgtttaataaaaaagcacttatcacaatatatctatctatttttttctttttttgtttgaaatggacatgttatctaatttcattgggaaatttacaattaatgggtaaaatcaaatcaatttaaatttaatcaacaaataattaacaataacaaaattaataattcacaaaaaataatcaaagataaaataggaatgaacacaatcaaactagaaacgattcaagcaataaaacaataaaatcaacac

SEQ ID NO: 41845 - DNA, 3065 bp, Cannabis sativa
  modified_base (86)..(86): a, c, t, g, unknown or other
atgtaattttcttattgttttcaaattgttttatatggaaaatcgtaaaaatgtaaaaaaaaaattctttaaacataaaaatatanttttttttacaaaaaatagtaattatccctttaataaataaactaatgagagattaagagagtctattaaaaaatgcaaaattgagaaacttgaaaaggaatgtataaaagtctttaggtatgaaagtttgaaacaaaagttgatgagagcaaatttatttagtaagaaaattataacgtggttatttaactattaaaactggtatttttttttttttttttttttgaaaagggattaaaactggtattagtaagaagaagaagaaaaaaagaaatagaataacaaaaggcatttgtggccattacgtatgttggtgtaagtttttgtttcttatgctatggagaagtaaggggtgaaatactattgggcgttgttttgtaattgaattttttttcttgacatttttacatcacaaatggaaattttttattttttttttcatatttattatagggcagaattttttaaaaaaatactgtggaaattttatattgtataatgtgttaagttttcacggttgttttatggttatttttaagttgttctactgttgttttaattattctgttatcttgttttattttatagttgttgtaagttgttttataaaaagattgtatttttgtaaaaaattattttttttcctaaataatttgtagttgaatgttagactaagtccattaatataatatgaatatgaggactatcaggatcgggccaagcctattggggtcttgggtagaaaattatgattggacctaattataagaaaatgatgtgattttaaaaattttaaatatggtattgttgaaaaataaactcagctctttttctttaataaaatacaacatcttaaaaaataattttgggaatttttaagaaaacaatgtatttttttcttttgaacaaaaaagtatataaatttattcaaatcaacaaaacaaaacagaactcctggaccaagctaaacacagcaacagcacagggccaacactagaagtctttgactacattcccaataagcttttcctcactcttaagcctacgtaaattcattcccaaaactctagctttgacagctctttgaccctcaaacaaatgtaattgacattataacaggtacatcaaaaatacatttattcctattaaaccaaaaaaataaatgatagttgtcatgatcgaattcaataagcacacctgtaaattgtgtagagttttagtgcaccaattctgccacttcatgccgtcattaggccaatgcaggaagccaaaccagctactgatcacaacaagcactttcatagcaaaaacacacttgaaaaagagatgaaaatgagtctcattttctgaatcacaaacagagcatttggtggaggggagagccaaaatagagctaagatgatccctagttaaaagctggttgttaattgcatgtcgaacagataaatcggtacttgggaacaatcagtttatgccaaactttgggagcataattttagataaataattgtgcttttattatatactaaaatatggtattttcggacgtattgatataatttaaattaatgcgatgatttgtgtgattattttttaattatatttagttaaacaagtaattaatttttgaactaataattagaacggttcaattgaaaagaaaaaaggacttgtcttttgacatgttagaaagttgagttttgtttttttctggtgagctattcgtgagtttgttgactgtgctatggcttcaagtagcagtttgaatgtggggttggaagaccagtatgatcggttacatttggaagaggaagaaaaagggatcttgataacaggggacgatgaggaagaggcgataatctttgatgatagatggtgcttggtgggtaagtttttaacgggacgaacgatggacttcgatgctatgcgacatatgatgggatcgctttggcaacccggcaaaggtgtgttcatcaaagaactggatactaatagatacatattccaattttatcatgaactggatgttcaggctgtgatagatgggagtccttggacttttaacagagtccctcttgtgtttcatcgactacagaaaggggaagatccatggagtgtgcgtctccataagcttgacatgtgggtgcagattcatgattcacgatctggctttatgatggataaggtggtccgaagtgcaggggcgtatgttggtacgtatgttaagtcggatccgaaaaaattttaacggaatatggagggactatctccgagttcggtctactatcgacatcgagaagccgttaaaacgacgtatgaaactgagtaaggaatcgggtgaatggctttgggctaatttcaaatatgaataccttccaactttttgttttgtgtgtggaatcattggtcactccgagcgattttgtccgaaacgatttgagcaacctatagcagaacttgcaaagccttatgagatcgggttacgtgctgttatgaagaagaagaattatttaattggggcccaatggcttcgttctgggagggaggaggagatggcgacagagggaggtgttcacggtcagcccagcactggcggcaaggcagttaatttgccaaaaattatggagattgacagagatattcctggcgtgattggctctggtgctatctttggaaaggaagatcatcccattaatgctacgatgtccagggagaatatgaaagctggtggtgatgataatcttgtggatgatactaatatggaaagtcaacttcagcaagatattgtttgtgtattggataataaaaaaaggcgcatggaggaaagtgtggggaaaggtatatgtgtgaatgacatggctgaggtggatcaggtggttattggttcggttgggccaaaaaatgtgcaacaggtgggccttggtttccaagcccaccagacattatgagtgttttagcttggaattgccatgggcttg

SEQ ID NO: 41846 - DNA, 4029 bp, Cannabis sativa
  modified_base (3942)..(3972): a, c, t, g, unknown or other
tgactagaaatattagagccaaacgtacacatgcaacaaataacatacaatcacaacgaaatgccatacgtacgtacgtaccaactagaaacacttatcttgtaaaaatagagtgagaaaaaggtacaacttgaatattaattaagaagcaccaaacacgatatgaagaataggagaaagaagtactcaacacttacaggtccttctcaaaccaaaacatatatataaaccaacaaacaacgtagctagacaatattacgagtacacattaataaacataataataaaactaaaaatggtagctgtagctctctctagcttattaattagccagttccaccaagaacaccctttagctttttaatctgagcaacgtctaagaaagtagtggctgccaccaactcggtgggaagatcgttcttgaacaaagcaaaatcagtgatttgaagacccgggtttggactattgaacccaacaatgaacaatgcttcaccttttcctgaattgagttggaaatgaagaagcccttgtgggaaaaccattacatcacctttgttaagtgtcttgaaaaacacttggttcgccgagcttgacacgaaaccggcacaaagcgttccttctagcacaattaggatctccgagccaccggggtgcgtgtggaacgggataacaccgccaggggccaagtcagcacgtgccatagagattccaaggccatttacacccgggaattgggcgtcaaaggcgggagttaccgcggccttgatgatgttggtggtgtttcccttgacacccaggccatggtagacgaaatcgtctaccgtaaccttggtcttgcaggagtatcctgcagggctttggggacctttgaggtctcctacgcaaaaatcttgaacggctcccaaagaagaggagaaaaggagagaaagtgtgaagaagacgagaacactgttagtagtattcattttcactactattgttcttttattttttttgagagtgattttgatagggaatttggtagtgttatatataggtggggtgatataaaatatctagataatatttattaccgttgtgtgattagtatttggaatatatatgctcatgcatggagagagtcacatgtgtggcaatatattttgaacgataaatttatatatttaaaaccatattgagatgatgagataagattcataagaatgctacatagatatttgtttgccatgcatgtgagtaatgggatatcgttttctcatataccaacaataacactctttttttcttttttttcttgcaaggaacaataacactctttcttggtctcaatatgaattttgaaacgctcgatccatcccaacttttaggtgttgtctattttataacagaaaagtttctttaaccttataataaccttaattactttagatatttttgtaaggtatactttttcaaagtaaaaactgaacctagctagctagggcaaccattccaaattatatatacttaattgagtattgttacctctgcatatattttaaagaaatattcaacttcctatgaactctaatatataatactgatttttttcttactgtttcgcgagtatagttaatttaatttaggtatacaaaatcatggtatgattagaaccatcaatatataagtctgtagatagtagccaaatggccaggattaacacaaaaaattcaattatactaaaggaaaaaagaagtttcactaaatacatagagaaaaagggagcgtacaaaaatgttaaagaggatatattttgtggaccatgatgatcacatgggccgggaaggtagatttgaggtcacaacaagacacaaaagacagctcaaaattagcagtagtctaaggtgaacttcgtcttatattatatgcttgagagatatcttctttttgaagattagccataaaattgtgtggacgtctccaattccccattttctagggttgtctatctctttggcccaagctatacaataaaaattcaaagtagttttttttttctttttatctactgggtttcaactatattatcttctacaataatttatataacccccaaattatagttgatattaaggtattttttttaatatagagatgaatatcattcaacatggaaaaaataagttcttaaaaggtttggcaaagaaaaatccgcacaaatctcataaagagatgaccaaacaacgacactctacgacaatactctaggagaggggaaatacctacaaaaatggcctaaagccaatgtcacaataaacaaggtgataaacaccaaaattacaccaaaaaaagatttaataccttctaaagttatatagatatttagatttttgtcatttggaaaatactattagtttgtacaaaaagatttagagtaatgaaacatacttaattcattaaaaaaaacaccaaaattacaacttaagaaaggaaaactaatataaaaaacaagaaaacaacataaacctgcacaatgtgttgaagttcctacccatggatgaaaaacaaccaagtagaatagagagagaaaggaagaagaagaaagaaagacatagattattgaaaaaagagtctcattaattaataatgatgtgtgttacagcttatatactagctcattataagagatttaataacataatccataacaaactaacacgagctaatagacacgtgcttaactaactctaacaaccctctaactatattaatagttttcaacacctcccctcaaactcataattgaacgatcttcaattttgagtttgtgcctaaattcagcaaatctttgacttgatatatatatatagatttagttaatccatatgctaattgttcataggaagagaggtgtttaatatgaatagttttattaagcaccttttctctgaagtacaggacgagctttatgtgttttgttctttggtgaagcacatgattctgagtgagcattatggtacttagattatcacaccatatagtacgaggttgagagagttgtatttgaagttcagagaacagatattgcaaccaagtcagttcagctgtaacactgatagcactcctatattcaacttcaatgcttgatcgagaaatggtctattactttttacattttcaagcatttaaattcaagccaagaaagatagcaaaacctgtagttgaccttctatcatctggatccgatgcccaatctgcatcacagtaggctataagatcaagagtggctagtttttacagatgcagcccatactttgttgtaccactgatgtagcgaagtatttgtttaacagatgaccaatgtgtagacaaaggtttttgcataaattggaaaactttatttacactgaaggaaagttcaagccttgtgatggtcagatattgcaaggctccaacaactgacctatacagttgaacatcttccaatggttccccctagtaagttaataaacgaatattacttgtcattagagtgggtgtaggcttggcattactcatttgggcctttacaagtagatctttagcatacatggctgcatcagtttgtgtcacttcaataccaaggaagcatctgagagagcctagatctttcagagcaaactgtctatttagagttgtgataatagcttccattgtagtgtgaccacttcctgtgatcaatatatcatcaacatagactaatataagtgtaacattggaaatatgttgaataaacagtgagtgaccagatttagatgaagtgaaaccaagagacaacatacagttttgaagcttctcaaaccaagctctaggggcttgtttaaggccatagagagcattgtttaatttgcatactaggtctattttttaaggatctcaaatcctgaggttgcaccatgtacaccttgttggaaattattttannnnnnnnnnnnnnnnnnnnnnnnnnnnnnngattaacaccctaaatatgaactcataaaacaattataaaataaacacatataaagt

SEQ ID NO: 41847 - DNA, 2196 bp, Cannabis sativa
ggggaaatgagtgttgatttatgtggagtgagtggtcattttcgtagaaaaatatatgaacaaaattacaatttagtattagttggcaaaattattcataatagcatttaactgctacttagtttttgtcaaaggcaccaactctcaacatggccccatccctaattaacccaatcccacggcaatttccagatattatatttgaaaatgaagctcatatacaaacaaacaaataatatatacacaccgttaaagtttagagtttgtttagtgttgtatcatcaacaataaatgccaaaaagaaaccaatgtatttacttgacaaaaataaatttgataatttattcccataattcttttctccttaaaaatcatcttacgacttcatagaaaaataactaaaaggaaaaatagtacaaagcgatattattgttattttcattctcataattactagttaaaagaaaaataattgacattattatttcttatttctatatccactttcttttttctttctttcttttattttttctttttgaggttagataagagaaatatagacttgaagcctaaaaagtggtatttagactatgtttataaatacaatattatatttactaaattaaatgtttaatttgtaaaaatatataattttacttaattaaattgttagatgagcttggcaatcagttttgaattaaaagcaaacagatacaatacaaatattgtttgtaaatattatgagacaacctcagaaatatcaagaatatattccataaaactataatttgtttaaaaaaaataattcaaaattttggagattagcagttgaagaaatatcagatattcacaattgatctcctatatttcggtgaaaattccttttaatatatcaatattattatccagctaatttatatatttaaataaacattcataaccataatttgcggtcaccaaaacaaaataataattttgtatgaaaaatattccttccccttcaaaatctgaaaattacaaaaattatttattaaaaaataaaatagaaaatttacaactgtgcactccaacaaaaacattttatcctatttacaaaccaaaaaatatatatatatttaaaggaaacgtaaatgttgaaatcttaagtttccttttaccgttaacgaaagagttgggcaaaccgtcaattgaacgtgccacgtcacctaacgagaattttaaaatggaattgggtcccacacagactgccaatcacgaccatctttcaactaactttggctccaacgggtcccacaggcacgcgcgcgccatcgacgccgcaagtaaacgattctcacccaatcagattacgccacgtggataccagaagaatcaccgacccaagaactagatcttcgtccagacgcgaaccgattcataccgcccaaaccgggggcttcgatttccacgctccgcctcggatgagactcgaacgacggcgcgtcgatatcaactcccgagaaatcgtgatttctcgtcgatacgctatctcccgagtgagagtcggaaatcggtatcggcctccagcttccgtcgtctgctttttctcggcaaccggttctgaatatggcgcgaaaagtcgcgaagaatccggtttttcgtctctccaccggtttaacgttctccaccgccggttcggacgatgatttcagcgatctttggcgattcttcctccagcgacgctttcggtctcttttcgatctcacacgtcccatacacgagaccttcggcgacgaaggttcgatcatcggaccgtccgatttcccggttgatgcagatcgcttagggaaaagcctggcgttccctgctttacagttcttccgatttttcgcttcgacgaaatgcgtcttctgaggcttcggaagaccgataattgccgccttcgatttcaaattcatcgagaatcgctgcgaattcgagtttgatcctggattcaaattcggatttaggttcgtcgagtgtgaatttcctttctgagattctttacgctcgtagaatacattacggtctaaccagtcgtactctgcatccttcgagagccaaaaagactccggagggaaatccggcggtacctccggttcaccagagtcttgctccggtggttttacggcggtgtcggcaagtgtctcgcaggcgattttccgatccatggaa

SEQ ID NO: 41848 - DNA, 1153 bp, Cannabis sativa
aagtaaacaaatgtaagggaataattaccttactattgattcctattacttattagtaaacatgccattagttctttggttaaaattcttctttcatgaacggttacacattacaaattttatttttttgttttaactttttttataggaatttaattaagtatctacggtagttaatgcttcatattggtccgtattggtctaagaaaaaaatcaaatgcgtagataagatctagctagcttttatatcattaaatttattggatgatatttttctattatgattttttttaggttctcttagtataatgataagctcttgttttctgatattagattttattgccaatttttttggattatttattctcatgttagttgcaactctaacattgtaattcataaatgctagctattgtgtaacattcttacattttttttttaccttttcaaggttaatactacaaaagaaaataaataataataataaaaaaaaaattgaatagaataggaggaattttacaaaatgcatatattttttttaaaatatataaataaatcatacaaaaatatgaattttatttttgtaaacaacattgataaatatttattataaaacaatgcaaattggtaaaataaaatacattatttttgtaattaaatagttttaactataaaaaaattattaaaagttaagtttttctcaaaattgtgtagacataatatttttaggataaatactattttaaactttttactctgtaaaagttattgattggaacttgtattttgttaatgacaaattagacctatattttataaaatagtacatcctaaatttattttttcttatcaaaataaaacttaatacttgttaatccagaacttttttttggtggcgtggacatcaatgtttcatggcataaatgatgacgtcatggagttgagtagacccgagtcatcacagtcaacctaggaggggaccctagccttgcgcccaagttgatttcgagatctccgggatggaatctcggacttcaataacttgcagtggagttcttgttagattattttaccaggatcttaaatctactcacaagtatgttgaataacaacctaaatatgaacttctaaaacgaatataaataaacac

SEQ ID NO: 41849 - DNA, 1355 bp, Cannabis sativa
gtggagcaattgatctcgaggacatgggtgcgatgtatacttggtctaatgggcaggattggaacagtcttgttcgtgaaaagctggatcgggtgctttcctcaacaaattggttatctcagttccctaaggcaagttttaaaaatctatctatcagacactttgatcatgcaactttagtacggaatacggtgatagatggaactccgatcaaagcccttttctgatatcttgatgcctggaataagaatgaaggatgcgaagttgttattcaacaggcttgaaactttgatatttctagatatcatagtttcattctttgttttaagcttcatttgacggcaacgactttgaaaaaatggaatagggagagctatggtttttacaagaaaaagttaaagctgttggaacagttactgattgaggttcagaactgtgatcagaaccgtgctccttctttggagaatgtccaaattgaaagtgcgtttgtgcttgaaattgaggaagtggaagctcaacaagaagctatatggaaacaaaaatcaagagaactctagttaagaacagtgaccgtaactcttgcttcttccatgcatctatcatggtaagaaggaaaaggaattttatatgggctgttatggaagatgaatctcattggattgaggaccgggatcttatggctgatttctttagaagcaaattcttagagacattcaattcgactaaccctgagatagatgaggagcttttcactcttgtggagtcgtgtgtctcttgggggagttagaaaagtaatttgggatattccttagttgaaatctcgaagtctggatggattttcagctaagttttatagagatcacagggccaatattggaagggagacgactagctttgttcaggagttttttttgtgtggtaagtttactaaagaaatcaatcatacttttattgttttgatcccaaaaagaggcaatgcttgcaagtttgatgattttattagcttatgaaatgtgagttataaaattatcgctaagattttggctaataggattcgtccagttctggagaatattatcagccctttccaatcttcttttgtgaaaggaagatggattgtggagaattccatcattgcaagtgagattgttcacgatatgggcaagagacaggggaaaaatgcttttgtggggattaagtgcgatatgtctaaggcttatgatagattggagtgaagttttatggatcttgtgctcaaagcttttggttttggagattgggtgaggggtatgattcttcattgtatttcttcaatgagttttcaggttctcctaaatgggggtctaactaaatct

SEQ ID NO: 41850 - DNA, 2246 bp, Cannabis sativa
atttttaacagcctaaaaaattcaaagagcatgatttagtacatgtcaaaatttagggacaaaaatcctaattacattttataaaattattagaagaaaaaactatattatacacaataataagggtatgtttttcattaatgactcatactcaaacaaatattgcatcatctttcacaaaagcatacttctagctagacaaaataaaaccctacaattatttgttgttttccaataaaaaaaatgatattggttgatttttctttctattttgtcaaaaacaattttcaaggacaaaaatgtaaccttttaatcttcaagaacaaattataatgtatatttggcaatgtaattaattcagtataagattccacatggttaggatagaattggaaggtgcaaacaaactttaatagaaaattatacaacaaaaaagatggctaatttttatgggatttttctttaataaatatatatttattttgttgtgctttaagagccattggtatgttacttttattcattggatctagttggatttccactaagcacatgaaaaatattccatttattcattggaaaaaggagaggttcttaattatatatagtgcaattaactttcccatgtataggagcacatgataagtagaatcacacatcatttgacttcttttttatttatttatttattatataaaataaaagacataattcaagaaaaacaatgagtcttattattgattaaatgtttgattgtattacttatatttatttagttataaattattttattatatgttactcaacaatagacagctctcttctattatataatttatattttaagaattagacccgtgctaattaaattacaatcaaaaacactttttatatttatgtatgtaatagaatattctacaaattaaaattgcaaataaaaaaagaaattgtcacatggagacaagtattacttttcaattttttttttttttttttgaaaagagtgcaaattactactacatcattttttttaaatgattaagctttgagtttaagaaactcaataaatttatgtacatatataatttattaaaaactaagtaaatccaagattatgattggttaggaaacttccttctacatcaaaccaaaatatcattatgtaactaagtaacaaatctttctcatcataggaagtatcccattacatatatgtgtcatttttatagatagagaaccactataaattccaataatatatgtgtacaaaaattagtgtaaatatttgttttaaattctaaatattgtaagtgtaattttttttttccagcaaaaaattgtattttttttatttatttaaaaacttagtttatgtccttatataacattaggaaaatttgtggtaattacacactttgaaaacttattttaaaaagtaataatttagtgttatcataattattacatcaattagtgtccacttcctatcaattaatttcatgtccattcaccagatttggctttgatttttagtcctttatattggtatgaaatcacaccaacttttattattattattataatattaataaaaatcattatttatttatttttaattggagtacattatattattttggtgaaatcggtaaatattttatctttttctaattagtcatacactcatggtttttcaataattttttttaccacctgctcaaaccctacaattgattatatctattataaattgaatttgtgagataaattaaattattagaatactttcaaatctagctatattttcaacttactatatataggtatattttttttgtaaattcaggaatgtaaaaaaaaaaaatgaaaatttgtggattaatatattttaggagggattttggagagaaattaatcaaaataaatgacatcataatgttttaatgttttatgaacaatcttactactcacatttcataatatccactcatgtgcttaaacatgtgggttgtttctctttggtattaaatacatattaaaatgggaaccaaaaagtaagagaatttttcattctcttattttgtagcttaattgatgattttatttatttatttatttataatcactttatatcctttacatgattaaaatgaaatccactacaggtgacttttttacattatctaaaacatgtgagcccataatctttacttaatatgatgtttattagattgtcttacacttag

SEQ ID NO: 41851 - DNA, 6505 bp, Cannabis sativa
cgttaatccaaatggcatcaccaaaaactcgtagtgtccctcatgagtgcgaaacactatcttctccacatcttgaggtgccattctaatctagtggtatcccgatttcaaatcaattttagagaagactgcggctccatggagcttgtctaaaagctcatcaattaccgaaatgggaaacttgtccgttattgtctctcaattaagagcccggtagtccacacaaaattgccaactaccatctctcttcttcacgagcaaaactgggcttgtactaggttgaacgattccaactcgaaacatttctcggaccatatactctatttcgctcttctgtatctgagcatatctatagggtcgaagagagatgggttcgatgccaggtttcaaggtgatggcgtgttcttaagagcgaatggggggtaagattggtggcattttgaagacctcagtatacttctctagaagatcaacgataagctctggaagtggcgactgatcatctaattcgtcattggatatggcattcaattggacccaatacccttctcctcctttttccactgcagaatcatagcctttagtgatatgggagacttacacaaactgggatcaccttgtcgtgtcacccatgttcctgccgtttcgaacttcattaccattgtctttcaattcacttgcatattcccaagtgtctccaaccacttaattcccatgatgatgtctacacttcctagttcaaggggaagaaaatcagtgatgacttgctcaacgccccaatccaactcaacttgcgcacaaatccccatgttcggactttctcgcttgttcccaataagatatcatagcaggtggttgcggtgataggcaatccaattgttgttaccacctccattgacacaattatgggtggctccgctatcgattagcaccgtcgttggttgctttttgatgtgaccagcaagcttcatcgtgtgagcggtggatatgccaactaaagaatttagagagagagagagttgctaaggtctcttctgtggctcgaaaatctgttgatagaggtgggttttcgtcaggaagttcagactcttcgtcggcggtaagtgtgatctggagaagcttgtgctcacactcatgttccgaacggaatttcttgcacatttaaaacaaagcccccgagaccgtttgtcttggtattcctactcagtaagtcgcttaaaggagttcgtggtggttgatcggttgatgctggccttggacgtcgtcgtggccatggaattcgaagggaagctctgagatctggtttgtgttgtcaagtgataagatcgtgaagtaaatgggttgtaactgggtcaggtagggaaaatggggctctaattaggtttggctgtattaggctttgaggttggcccattaaatgatggccctcttcttccataatttggaccaaatctttggtttgtaatatgtgcaaagtagccttaatctcctgcttaaggaataaaatttccttctaggatgtgatcaggtacattagaaacacgagaggctagcacctcctaacgaacgcggtaatctttcacggtatcagactgaaccactgacagaaactcctctgaaatcaatcccactggtacctcaggaaaacgaagaactatgacatgatggttcgcctctgattctcccactgaaaccaggatagagcatctccgtgaagacccactatagcaatatccaacatcatggttttcgtcatctttgttatcaaaaagtatcgctcaacgcgatagatccatccattgggattttcaccattgaacaatggtatctccattcgaggtagtctgaagtctggaccatgcggctgtcttggagaaaacaatctgagttgaatcggtgccatcgtcgacactgtattaggagggtaggtccctgttggttggacgaatggctgttggggagctattggaacgcttgcagaactgtgttcccccatcaaagatccattcccctctgtcgcacgtcgaaacgggtttgctctagctgatgtagcttttggtgatgtcttttccctgtggtagaaacagttgagagagctgggagatctgactcaccacgggttccaactgtttggctacgatttgagtgacgacgccctgaaactcctcttgcatcttcgccaatccctaagtcaccttttgagcatccacacgaaggttataaaccttttcactcactttctcttcgatgagttctaccattgaatctttctttggccccatggaaagttactgctctgataccaatttgataggaatttttcttgggcaaattaatatgcagtaggaaaatatgataaaatagcaagctaggaaggaaattggaattgtattgatagaaaacccaggtattcgagagcctggatccttcttacaaagagttttactcaaaatgttacacaccatttcatacagaaaccaactaatatttatagctaatcctcatgaggcttatcatacacctcagtactacccaaaccattctcacaaaacagaattgtaaggcagatttaattcccagctgctaccccatccttagctttcctagtcttctttgtagcatatacaaaagtggaggcctatcagagtctcagttcaaccaaataatcttttcagccaaatcccttcacaaacactaagtgctagagctctaagttctgcttcagctgaactcttacaaaccacttattgtttcttacttctccgtgttactagattgccccaaacaaaagaaaagtatcctgaagtactccttttattattatttacatctcctgcccaatgctatcacttttcttgaatagaacaccattcccaggattcatcttgaggtaccttaggattctagtaacaacttccatgtgttattcagttggatcattcatgtactgcttaacactgatcgagaacccaatgtcaggttttgtatgagataatcagatcaagcatccaacaggctttgatctccctctgtccactgctgtcctgtctatttttgaaccaactttcttgctggaatccatcgaagttgaggccagtttgcatcctagcattcctgttttttttggtgagtctaaaacatacttatgttgtgagacaaagatgaagttcttttttttgaaaaagagagaggcttttgtctaagactgacccctcccccgttatatatagataacctcacttgtggcggaggaataccatgattacaagtgctatatcagaagatatttaaaataaaagtcattccaaccattcataagacacatcaggacctattaaacaacattgcataacagtctccaatctctattcaaatctaagaatgaaaactgctcaaaattcttggttttgtaaacccaaacagctgtccagaatctgactttttcccataagtcttcagctgaagcttcaattccttcaaaaatcctgttattcctttcaagccaaataacccaaatgattgctagaacagctgtcctccatagacatgatctacccttactaccccctaccttgctcaccatcattagagggactgatccgggtattacccattggatctcaaaggcgttcagcaactttatccgaagtctttgcgcaagacaacaccccaaaaacaaatgtatcacttcttcactacttttcttacaacaaacacactaacccggggacaagcaaataaatgaacgccttttttgcatcataggatgcacattaatttttcctaatgccaccagctcggtcaatttccatgtcaagaaaatatctaacagcccaagatctttaatctcgaattccttagataagaagtcttttaatctttccatctcctaataatcacccatcagtattatctcatccatataaacagatagatatcctcttatctgacgagaattagacgaattacgtatgatttgtttgacattgagtgtagcagccattctgaatggacttggtaaatttaacaaaccttcggggagactgttaaggccatataaagattttttgagtttgcgaatcggtggaatgtccatataacaggaatgcaatttcacattgagttggtgtagagaccagtttttattagcagcaagagataacagtacgtgtaccatatttagtttagtaatgggtacaaacttttcttgataatcaattttgtcaaactaagtagtgaagcctttagcaacaaggcaagctttaaatctctcaatgcgaccatcagatttatgtttagttggtaaagactcatttgcgacccatgaatctcttcccaggaggtagatttgtgattgtccaagtactgtttttcaccaaggcattcatctcattttctacagcctctttccaacgagaatcaatcagtgcctcttgaatggtgtggggaatctatatgttatcaattagagtgtaggataagccacctctcacttgtgtctacgcttggaagagcaggaacaggggattagaactagtagctattagaataaaaggctgtactgaggagagaagggtgttgagtatgttgtcaggtttaatacatctttgggagagaaccaagctctcattttgctaccatttatccatatttaacaggaaattcctatcactctcatggtgctctctgcctctcgggttccttattgctgttgtgaaatattgtttctattttgcacccatatgatgaatcttcttgctgaatgattgttttatgcagatgcacatctattacctgttgagctgcctgagataatatcactgacaaataggtaaaatatataatttgggaataagtttacttgtttatatatataaatatgtatacacagaaacctctatataaaaataactttgagaccaaacttaaaggtttaggtgttacttgtcagtgtcttgtatgtcttgtacagtaatgcgatgcacttacagattatagatatcaaacattgatatgcgacatatcttgcgatttatcttctgtcccactttcattttattttctctttcagtcaggggattgatagaataacatgggatgcttctggggagcggttagctgtatcgtacaaagggggtgatgatttatacaggggtctgatcgccgtttatgatgttaggaggactccgttgatctctgcatcacttatgtgagtgcaagaagtattcttatttattcttcttttggttaaatagttactgcatattgaataaagagtaataatatatgcacacataaatcacatacaaacttgacaatgacatacacctatgttgacattacttgccacagtgagtgccaagtctttgtttgatttgattaaattgagtttcttttgcttattaatggaaccttatagacgttttaccttgaatactataatttgatgcagtgggtttatcagaggtcctggtggcaatccaaagccagcatcaatgacatttcacaacaaatttaaacagggaccgttgctgtctgtggtaaattttgtcaaattcattggcatcctgccttttctatttcggtctagagacctgtttatatttgtttgaagagggtagatagatataaaattcactgagatgggtatgattttaaaacaaacttggaatcctactaagatggagtatgcttgttttaaattcagcttttgctacattaaaaatacattcgtactaacaagctacttatttctgcagtgttggagtagtggattttgctgtacctaccctctcatattccgttcccatattttgccataaattggggtgcaagtattcaattgattaagggctagtttggtggcccacataagagttttattgtattaaatagcaagaaaaactatatttggataaaatttcgtattgtattagttattacgaccataaattttaatacaatacgaatcgaattatttaacataacaaataatttgtattagtttgtgttataatatttagaaactcggaccttggctttgaactctagattcagactcggactttgaacccgaacccgtcctagacttggatccggactcggtccaaggccaaggtcgggattggggttgaatttttaataaagataatattagtttacttaagtaattaatgcaagtcaatactaaacatagtattatattaaattatactaatataacataatataacataatactatacaactcaatacaatacgacatagtgtaccaaacgagcagtctaagttgactattttactcttcattgtttatattgtagaagatattaactttcaagcaagagaaatttgaagttaaattctattatgggaaattttattcaccccaaagggctcaattggtaagttgtattgtattaaataataaaaaacattatgtttggattaagcaatgtattgtattaattattacgactaaattttttaatacaatgtatgttgt

SEQ ID NO: 41852 - DNA, 2906 bp, Cannabis sativa
attttattttattttttttcagagaaggagaagatactattctgacacatgtcagtcacattccattagaaaataatcagaagattattgaatcaaccaaccaatgtcattaaatatacacttgttagatgatagttagtggggttcacatgattagcaataaaataacaaagggttaggaaatttagatttagcaaagatctttggtaaccaaacactttaaaagcaataataataatactgtaaaaaaaaagtatatacaagaagagagagagacagagaaagaaaaatatggaaggagtatgcaatgggtggaccagaggagccaacagtggacccctccttcttgctagatgtttacagtacaagcaaggtccctctcctctgccatctttgttccattatttctaagcttttcaattactgtttgcttgtatgtatgaggctgcaatttaatgttgatttttattatatcaaaataatagatattagaaaaataaggtttttttttttcacttggtttggacagctctaccatttttttttctttgtcactctttaaaaaaggaatagaatggtatttaatgcttttggtacttttggagttttttgttggcccagtagctttgcttgccagtatgattgtattggattatagttggcattgataatacactactgccctgccctttaatttcatactaaaatacaacaataaaattggtcataaagtatagatattgaactcaacacaccacaacattaaaaagtggaagtatgtattatgaatcatgttaacaaaaattgggtcttgtacttactataaaaaaaagtgaaggagatgaaaatatatccacaaaaaaaataaatggaaaagaaaaggaccgttagatttgaatttcaaaagtttcacaacctataattgggtgagtgagttcttttgtcttttatagcttggtcttttatataagagaaggctgataaagcaaactaaggcttcatcaccaactagatagggttggcgccaaaaaatctctataatacctcagttttatgccaaaaccatcaaactaataaggtttcattttaagttcatctctttgttcttacatagtcacctgtgaagggttcaatgcatttgaagcaataaatcataatatatgacactaaattaaaatgggttcttatcatcttactaattacatagttgttaagctagtttgttatgatgttgatagggtacaattacaaaattaacatattggtgagtgattaattatatccacatgattaagcttacctacctaccattgaaaataaaatattgggaagtcttacttaatattaatcttggtataacaaatgacttgttgagcacaaaaacaaacacacaaacgtaatggttatggatatcattgtcctatgtccatcattctcagtattgttgtctagggatgttttgtaatggtaagcaaatgtattattaaatgttggtagattaagcaaagttccaaactaaacccgtgaggagattcctccctatattggtgtatgtgttggaaaaacaagcaaagcattaatgatttctgaggtagtctttgcaggccaaatgtcattactacatattttgaaaatgataacaaaaaaaaaagttcaaatgtgttgtgtatactattttgtgagatgtaattaaaatctagaaaatgactgaaggtattaaagggtaaagggtattgtttaactggggaatctctcttttgtgactgacattttggaaaaggtctcaaataatgcctattatttctttcttcacatggaaagaagtgaaaagctcaaagattgctagtgtcctctctctacagtgtttggtagtctacaaagtggaaatatattattgattaatgtttacccaaaattgggtatttgtttctttgggcatttgacttggtcaatttctgttaaaagaagttcccatctttttagtcagttcgattaaagattcccgttttccattgatttgtttgtttttggcgtttatattatgagatgaccacttcagtacatttgatcatagattaatttaatttgttcagtttttgaggcacaactcgactcaactttcaattaataaggatcacatcatcatagttttagatcgtaaaaggttctgtggtcacaattagagtttcttgggttttgcataaatatcctctttgtttcaaaccgatttccctcaaaatcatctaaacacctttccattcaaaagggctagtcgtctgaagatgtttttgaaggaaatacttgactaaattataataatatctcttatattgggatattattaaaaataaataaataaattatttttaaaaattacttttaatatttttttttaaaaaaaattcacattatttatattaattttaatacttattttattttattttcatgcctttttttttttctaaaccatatatatttttaatttttttttctaagaaaatatcatgtataaacccgtttatgggaaaattactatgtgtattgtatttttcattttgtttcattttgagattatattatttttatttataaaagtataaataaaaaaacctattttttatttcaatttttttgtcagtatatttttttaagaatataaataggaagaataaaaattaaaaacacttaatataattaaaatataaattttatgtaaattaaaaattattaaaataggactatatataaaaaatttcttaattttttttaaatgaaactaaatagctatttttaaatattttattttatttttaatataagatcccccagtgaccccaccactcaaatattgatttttaaattcaaaaaaaaaaaaaagaaaaacttatttattgcatataact

SEQ ID NO: 41853 - DNA, 2506 bp, Cannabis sativa
aattgggatgttttagattgggatatgcaacaaaacaaaacccttaatctagttttgtaaacagtcaaatgatgtattttttttttttggaagaaattatttccttctaacattgaataaatgtaaaatattgagccaaatattgaaccgtgtataagaacatggactactctacttatcaccaattgattttaagatagaaccccatgattctcaacatcttcctatcctaaatacttttcctcgtttttggtgcagcctcgagactgtccgactgaatcaactcaaaatgacagagtttcttcaggttcatgtcctgattatgtcagcttaccattatacgtgccattaggtaagtttcttaattgcagattctgttatgctgtaactttttattcctttgttaagtccatgaattgcttttgttcatataccattaatttgtgcccctagcatgtgatgtagtttttttagtttttatgtttgtggctttgtcctctacctctgtagatttatgtatctttttgatagaccattggtgaaatacacccatttgaggagaaagaataagggggaggtgactcaagagaggtagctcaaatggtcaggcatgtgttttgttcccacaaggtctgaggttcgagtccctctttgagtacttacattagttacatagcaattgctatagtttgctggtccccaaatattgtaggattaggcgggcatcctagtctcaaaaaaaaaaacaagaataaaggcgaggtgagtgacgtgtaaaggagagagcgagagagagagaccattcttgggaacttggtagtaaatttggagagaccattcttggaggttttccttttcttttctttgtattttcctactgtttgatcaatacaagctgagttgttggaactaatttctagtttcagcttctttttttcctgtctgttctggttaattgctgcaattttggattaattactactggaaacctatcactttgatgcttttacacattgtcttaccaccatctttgatatttccatgacaagtggtagttgggatttatcattagtcacaataagagatttttatctgtcaaagaaactgtttctaggtagttttgtttcaaagggagaacattcaatgaatgaaaatttgttgtgacagaaggaaacagatgaaagtaacaaaaataccgatgaaaatgaacggtgaatcatcgttgatatgtacgaatttattaatctatatttcatttgagttttaaaaagaaaagggtatgattctctgctcctatttaaacttgtttaccttctatttcatttggtaaattcaggggttggaaatggcattgctgaaactcctattccattggttcatgaagctgttgaagaatttgaaagcatgtaaatgagaagatctcaattgtaaaactcagaaaatgttgtgagtattacaatgatgtaatttagtttccaattcacaacaattgaaaatggtatgaacaattttgagtacatttatcattactcaaacatgaatatgtaaaatactagtattttccaactttacttgtgtttcacacttgtattattagttaattgtttctttctgtatattgcactacaaattcagtacagaagattcaaaaataaaattgccttttttaaaaagatatattattgatattgtttcataaatatatacaactgtgattttggctcatatgtcaactaataatcttggtcctatctctatatcactatctcctccccccattacagatctcagaagaaatttatatataaaggaaaaacataaagaaagagtaaagaattggtgtaggcaaggctggtttattctattcctaaaattcataaacaataagtagaccaaacaagagaggctgggttggcttttgcttaaatttgacctgttggaccacaaaattattcatgttgtgttgtgtgtggtgtgatctgtgtagtactaatagtgcaacatcacattcacattggctgctttatttttattattattcattcttcaccagttccattttctccaatcaaacatatgtataattatattcaatataaaattattgggaattttttgggtggcattacttgggttccaattcgtgttcgcgggtcgtatttgtgttgtgtcaaatatatgattgacttgaatacaacttgtttataattatgttgatatgatatgacccgtataattcgtttataaacatattttatgtaaacatgtcaactaataatatgtttatgacatgttaaagtactaaaataattttaaactggttattaataagtcaatttcgtattaaccgtgtcaactcaaattcgattcgtttattaaacaggttagatgagtcaattcgaacccatttaagggaaacccaaagctactaactctcgtgcggatttcaaatcgtgttatatcttgtctgatctgttttgctgaccctagaaccattaccataggg

SEQ ID NO: 41854 - DNA, 918 bp, Cannabis sativa
tcttcaaggatattcagatgcggactgggctggctgtagcgacgacagaaaatccacatcaggctattgcatgttcttaggctcgaatctaataagctggtgttccaaaaagcaatcggttgtagctcgctccagtactgagtccgaatatagagctcttgctcttgccacatctgagttaatttggttggaatccattctccaagaactgtccattggtactgccacaactcctattctatggtgtgataatttaggagctggctcattggcttccaaccccgtttaccacgcccgcacaaaacatatcgagatagatgtgcattttgtccgaaatagagtgctggaaaataagcttgaagttcgatatgtggactcaacctatcaagttgctgatattcttacaaaacctcttcacaatcctcaattcacttttctaagggacaagttaacactcaagtcaaatgagtgtaacttgaggggggatgttagagatataaaacagagttagttataactgtattagttttctgttatcaagcttaggcagttagttagaattgggctttagttgtatctttctgttataccagttgtaactaactgcatatataaatatcagctcctcactctgtttcaatcagagcttcacaattcagttgttcattcatcttcttcacttcatttcataacatggtatcagatgcttaggcttcaatggcgtccaaagaaacccagtctacagcacgtagtgatacaccagaagctctctcagctgaagctgcagtaccacaaatccttcccaacaacaatctcctcccactcaatcttcgattagatcgaaccaactacaccttttggcgttcgcttgttcttgctgccgttcgtgcgtacaatctcgatggattcatcctcggc

SEQ ID NO: 41855 - DNA, 1980 bp, Cannabis sativa
  modified_base (43)..(49): a, c, t, g, unknown or other
tttatatgtgtttatttcatcggtttagaaagttcatatttannnnnnnaatcaacatacttgtgagtagacataagatcctggtaaaataatttccaacagtatctcattcgactgttcagactgagtcatatgaacgagacctccacataatataacactagatcccagagaccaccacattattattaaataaatatacaaaatcaaattctcgtatatttagtttatccatccttttatttcctctaggttcactttatttgattaatcacttaatattctcaatattaaatgtaggtatttatttaaaattttagttttgaaattgattaatctagaaccgtctattagtcacatctatctaattctattaattatgataattaatgaattcaataaatcctatggctaatcaagttggatgtttagaatgaattttttttatttcacatccttattagtctttgatgacttgtcataactaatgtgattctttttggttaagattatataattaataagaatatttattttttgtttcgtaaatgatactataatatatattcttcaaatcaattatctctcataattttaaattccaataaattttttaaaaatagattcacctcttgaatggtcttttaaatacactctcagtatgtttaatactctcactcaattagacagtttcttatgaatagtcttttaaatatgcttcaagtatacttaatactcctactcaattagacaattacttatttgtccattgtcgatgatcatttttattaagactattcttaattcatgatctgaaatttattacttgtttaatctcattgtacaagtattcataaatttcaacaattaaacaattatgatattcaaaacttgtatctcatactttgaacatctattttaaattgtttatccaatactttaataacatcccctatttccatattgtattattagtaattattaatgatagatatctatcactatattatccaagaatttcaaatatctaataattactaatttattatattatttgaattcaatctcattgttattcaaatctaaatataataatttaagttaatgacctagtcatcattctctttatggatatttaactgaactatcttatataccattttattgattactctaatcaatacaattttaataacgttaaaatttcttaattataaaaattcatcgttcaaaatcatcttagtgtattgaataattcaatgagactattaatgcatgattattgaataatcatatttcgactccaaagttcgaaattagaaagaattaactttttcactaaggctgtgatattccatatatcaaaatatttactaatttaaactagttagattttcaaacctttccttggtatatcttgtattttgataaatctcattcattgaaatctttatagttccattagaaatcatgatttagaagcactaattgttgttatgaagaacaatctagttttctcaaaatcatcttgtattttaatgagtagtatactcccactaaaatactttattattgctgaatttaattgatggtcatgattattaaaatttaattttgactctttaaaattatccttattttaattgtcatctttattgagattcaattgtatgaattctttctatcaattattctcaatgtagtccaaccactttcattaaaactcttttcatgtatttaaatcatatcttaaattgatttaaatagttagttacaatctattacaattaataaactcaactattgaatgtttaattgtgagttcatttcaattagactatctatttaaatgaaaatgcttctactaataattccttaatgaatcattgattatacatgattggaatggaattccatatctatgtatatgttataataataatttaaactttcaatttaaatctcatttaatttttaagt

SEQ ID NO: 41856 - DNA, 521 bp, Cannabis sativa
agtcaaatacatcctctatttctaacataaaaaaattgtatccatacttttttaataaaaaatataggcagctggaattaatatttgaaaaattggataatatcattttcacttactagatctttcacatagtaaatcttaaactattatttcacaaattaatttttcaagtatatgcctccacgtgcccaaaaacagtctttgaaatttatatcaagattaataatgagacccaacacaaacccaaaccccaaacccctaacgattaatatttgtttgctcaaggaaatttgattttctatacttagaaaatcttaaatttttccctaaatacatacttaataatattggtcatatgtgaccacattcctaatatcccacaaatacccctcccatttgaaaaaaatcaaaaactcaaattatccatccatgggtgcctcatcccgaacctctctctccctctcgctgaccacggcttcagcgcccgaccaccacgcccggccaccgacgactacccacca

SEQ ID NO: 41857 - DNA, 7230 bp, Cannabis sativa
ttgaggatacttcaatggtttcctcgcttttatcttccccttctgtaaaggactctctagcgatttccgtggcagtgtcaaacatcaaaggatgatgactctccttatttgcctcatcgaggcatggactctgctttgtacacagagcataacagataatttgttaaatacaaattatgtgaatgtataaactatgtgtgcataaatggatgattcttacctcagtcgaagttggctctacttcatcttcaatttcactgttgtttacatcatccacattgtcctgagatacaaaattattcgaaccatcttagtcaacattttgaagactgcgaatgtgaatatctggcataacattaactgaaatacaaacctcagtagaaatcgaccataattctttttcgctgtcgttagcatcatccatagagtcctgatacatgaaattattagaaaaatcagaatgaatttgaagattggtatgtagatgtctaaattaggggcatcatttagtgaaggttctaacctcagcagaaactgactgtagttcatcttccccctcactgttgtttacatcttccaagaagtcctgaaattcataaattttaaaattaaaatttagaaagttggtatgtgattatataactatgtgtagcttttagccggtgattctaacctcagaagaaatcgactctagttcatcttctgtctcactgttttccgcatccacagagtcctgagatgcaaaaaaatttaaaatataaaattatcagattgacatgtgaatatgtgaatatctgaagcaggtaaacattaactgatgactctaacctgagaagatattgaaagtaattcatcttctttttcgctgtaattcacatccagagagtcctgagatgcaaaaagtattcgtcagtgaaaaatatgaagattgatatatgaatgacttgcataggtcattggcaggagctagggggattggggtggtcacagtcccctaacatccttttttctacattttaggataatatattttgaaaaattaatattaatgtgtataaatttatattggcccccactaaagttttctttttttaaaaaaaatgagcctctcttatacattaatctttacttagtcaattgagagataatactaacctcagtagaagttgactttacaccattttttctttctctttctctttcctttgcaccttccacagtgtcctgataatcaaaattatttgagccaagttaaaattagaagcttgattagtagtgagaggtcttagtctcaccaatattgcttacctcagtaatgtttgattgcacttcttcactttctttgttttggcccacacctttgaggttgtcattggcaactgactgaggcatggtatttatctgtagacgcaatcttcttaaagaatctccttgagatataaaattatctgaacttggttctggttgagattcacgggtcctgatcttgattccagtcccagaaccaagatcaccattgggattaacatcactctcctcagctttgaagaccttaacaaaagaataaacaaagtcaaatttggcaaaaagttgtatcatcagaatttcatgaatagctacatcttttatgatccgacctcagtagcagttgactgtacttcctcttcttcatggctcttacttctgtcacacccaatgtcatttgcagttgattcatgtgatgaatttacattcaagcggagtcttcttccagcaatgccctgagtgttattaaaaccataacttggtcgttgaggctgacgaggcttaaatttgatttcaggtcgaccgatatgactgtattgataatcaggaagattcctactgatcgattcttctaaattattgtacatagaataatcaccagcaacagacacttgacccacaaaattacccccaggggcacccagatttcccgttacaaactcctggttattaagtggctcatcaactcgagaaggtccgaattgggttggcatcagcaacatgtctttagcatccatttgcccattataccaagtagaagctcttgtatcaacgtcgtgctagcaaacaattaaaagcactagattactatacagaacttgcaaatgaacatactgttcttctcatacaagtataaacattttgttaagtacaagctacatatgggaactccaaagattaacaggcacgattattacaagtaatcagatacatataatcattaatccactacccttacctggttcatattagctcccatattgttgtatggaccattgtataagctccttggtggtatgttctgcaatgactgtgcttgagcatataaatgggtctcctttccaacagttgagttcttctgagagtccaacttctcatcatggctctggaagacctcatccagcaaatcggtgagagatatatcttgctcagcagtaccatccataaaaggaattacattatcatcattgccaaagtcacaggcaaaaggtgaatcagcatagagtggttgctcaatttgtgagttaaaagaggagattgctgcataatcagtgagagcattaacctcactgaactttgagttttcttccatcatgggcacctagtgcaaagaaacaatgagaacattaaattttctggggctgcaactgatttattacaataattacaacacatacaaaaatcacagcgcctcacctccagaggagtttcatctattacatggtcttccacatcagatgtcatataactagtggaaccactttcaacaggtgcctgagcactttgggtcatcttgtctgactgatcagttaaccacctgtttataacttctgactcctctccagctgccatatttgatgtagctgattcttgaagcaaatccgatgaggtatcatccggagaagacttggttgcagtgggtgataatccagtctgatccacctcatcatactttggagcatcaggcttctcttcagtctttcggaataagcgacagagaacataggcatcctgcaacataagaatcaaacagaagctcatattatgcacggtcaattaattataaagttatagcatttacaaaactgataaccattgttaacatttacaaaatctttccatgattcatatcaacataatagaaccatttttaatcacacgaatatctacaccgtgctcataaaggcgccataaatagggagaagtcatcctcaagcatttcatcaaaacaacattacatttacaatcaagtataaattttactacagttatagaaaaagaaatttagtataaatccactactagcaaagaaaaatctaagctagaatcattaagacaaaatctctactaccaaaaacataaaatctcagaaacagagctaaaatttcaagtaccatttcataaaaagaccacaaaatgtatggaaatgaaaaaagaagaaatcttgaatggagtttctaatttggattatattacctgaccaggaccagtaccatcaaggtccttcagcgtgggacgatactcgtgcatgatccagtgagttcgcacccctttaggagctctgcctctatagaagacaagagtcttcttcataccgatcgccccggtggtattagtcgccgacctatagctccgggacctgatcgtccggtcctttccggtggctttccaataaccagcactagtagcccggttcgacctctgaccatttgggtacttccgatcacgtggacaaaagaaaaaccactctggatcatccgtctttatcactgacaaccctgtaaaaagctcaaaaacttagacccagttccaaaaatggcttccactacataacccattttttaaaaaaaaaacaaaaaagaaattgtatttatttattcatgtttccatatttttaatttaagaaagaatggaatcttatgagtgatctccagtaacgaataattcccaattcattttaggtggtgggaataaaggaaatccaaaccttatacccacaaacacacaccacacacatataaattacacgtaccaggcaaatccgaaggctcccatttacagacatcgatttcagggatgacctcaacctcagagtgacgaccattaatcttaagtctcaaataatgattgataagctcttcgtcagttggccggaaccggaaccccaacggcaacttctcaaacgacacctctcccatctcaaacgacaataatcctcttcttcctcctcttcctcccccttcttcttcttcttcaactttttttaatttaattaaattaaatattttttgttctcagagctttcagacgatttctttttacttcagctttacttgtttgtgtgatcgttggagaaaacccaactgtgtgttgtgtgtttgttttttgtttttgggatatttttgtcgttttagaaacaaatggttgactttagtaaatagtaattgtatgctcggattctgattggttaaaaatttgtagttagtgtggattcgtacgtattgtataattatttggagaattccttatcctccaagttttcttacgcctttttatgtgtttttttcgcccgtacatgccgcgttgctgccttaaaaggtgaaagtgaaacccacgcgcgacccactattttgtgttccgcccacgctcctataactattcatattagtcatcaccaaaccaacatttttgtcttttataaaaacaacaacaaaattaattttgtgaaaatagatttttttttaaaaaaaatttttgaacaaaacaatatccaatgattttgaatatttaattggaggaaaaaataacggatcaaatttatcagaagtactgttttcttatgttatgtttggattttttggaaactgttagatgcatccttaattggattatttgaaaattagttactgtcgttgaagtctacctagttttagttccataaatttcttctaattttagaagtacagtcaaattatgagactttttataattgaacacatccaattttcaaaaaaaaaaaaaaaatactactaaccaatggagttctccaatatttgtttttaaaattttgaatttgtaaagaaataatagaaagaaaaaaacatcttcccttcaaatatggtgtaattttttttttatagaaagataaataactgatagaactattgaagttgaatcaagatttcttgttaaaaaatagtgtctcatactgtgttaaattaatctaagtttgacacctcaattaattttttatttattaaaaaattaattatttatgcgtttttttccttaaaatgttcaaattaattgatgtgtcataatgagattggtttaatacactatgaaacacaatcttttagcagaagatcttgattcattgaagttggaacctttatcttttaaaaggggagttttatgacccaaaatttataaatgtacatattttaataatttttattttgcataaaatatatatttttaattatattagtttttttccttaatttatattcttaaaaaatatacttatcaaataaaaataaattatattataaatattataaaaaatttaaaataaaaaattatatgaaattctattaaaaaaattatacatgatttaaaaataattagattaaattaagtatcaaaatttaacacaaaataatatgagaattttttttaaaataatcttaaaagtggtttttaaaaattattttaagtttaattttttaaaattttaaggtatatatacttattatttttttgggtccaagaactccattttaaaaaagagttttttttacaaaaatgtcccttcaatttcttgtgtttgagaattaatattttttagttaattttttaataaaattgtaatctattttttttttttttcatatagatagtttgagtttgacatttttctaatattatcctttttttttccttacatatttatataaaataattatgtttgttacttagattgtattttatcttattgatatatattggtaaaagtttgtttatatgataagataaatcatccacaataatataataataaatcaaggtttttccagaacatgcaaaatatctatgcatcgtcatattactcccactataattactcgtttcacatcaatttggagagacgtgaagtaagtgggcataagtagaaactaaaatattatatacctaataataataatcataaagtgttaaagtactaataataatgcaaaccaaaattctaataaaaagcatgccactcacgtgccaacccaaataataccattataacgtttacgtgtcgccttaaagttaaagtactatttaactccacaaaaagtgttcagaaaaaaactttcaaaaagagaaaaagttatagtggaatcttttaaaggtgaagggtcaaaaatggaaactcaccaaccaaaggaagaaaaataaaggacacttatactttcactcttaatatttaaagaaatttaagtttaaaataattttaaaaaattactcttaatattattttaagaaatttttttacattattttaattttattttcataatttttttaacttatatatattttttgtttttttctaataaaattttatatttttttattataatatttcaaatataatttatttttgtttgatgtgtattttttaaaaaaatataagttgaaagaaaaaattaaaaaaatatataattaaaaatatatattatatataaaataaaaaatgattgaaataggacactatgtgcaaatatactatgtgcttagcttcttgtaaaaataggtttacgtccctaagcctaacccacattcaaaacccagtagccttattctctagcacatggttactgacagtacacactactgaaagcaaaatatcaaacccttccttctactttatcatcatgcatcatatatagctccaatcaatactttattgataaataaagagaaaaaaacttaatattttaaagtggtgaaaatcaaattaagtaattatttaaattttattttgatattataaacaatgattgtaagtactacaatgtacataattattaaaaagaaaatcactctcttcatttagagaatgtactaatgatttttcccatagtttatttgtttatttattaatacagtataagaaaataatataatacccaacactcacttttattaaat

SEQ ID NO: 41858 - DNA, 1934 bp, Cannabis sativa
taaacttactgttatatctttctaagtcaatatcaatggttgatcttaggtctatgaatcttaatcttgatcttgaggagaccctcattttgatggacacgaaggagagaggataacccttcagcacagagaagaaaaaggtaaggggatgatggatccccctgcctaagacccctagaaagtttaacagaacctttgacaaccccattaatcaaaaggaaagcctagaagtagtcacaagtttcataataagagagacaaatttgataaggatattaaaatgcaacataatgctctctagataataccaattaactctcccaaacgtcttagccatatcaagctttaaggcagcccaactacgtttaccatttttcctagagttaatagcatggataacttcctgggcaataagtatatgatcaaaaatgactcttccagacacaaaaatactttgcaaaggagagataattttatcaagtaccattttaagtttattagccaacactttgaaaataaccttataaaaggtaatgcaaagactgataggcctaaaatctttgagagtacaggctctttgttttttagggattaggactaaaatagaattaacctcaaaaaaatcggcatcattgttcaaacaatctagtacggcattaacaaaatccgtaccaacagttttccaataacctttcatgtttcattaaatgatttctaaacaagagaatgatttgtgggtttataattaatttttatagtagagacctaaatttctaaatttaaaatgattttggcatcttagatttgaagaaaagcgaaagagagggtagagaagcttgctactataaatttacaactaaaaaaaaaagatgaatactaataaagaagaagatgagtagtaatgaaaactaaaaaaatgaaattatcttttcttaaacaatgaaaagtacgaacaacttttaacaaaaaaaaaaaaaaaacattctaaaaaattttgaaatgcaaaatagaaaataatttagagcatgtttggtattgttttctgtttttgttttcaaacaattgtttttagaaatgaaaacaaaaaatagtttttgaagtttttaaaaacaagtcatgtttgattagtattttttaaaaacaagtcttgtttgttgtaactttgttttttgaaaactgttttcaaaaaacaaaagccaaacaagccaaattgttttcaaaaataattttctatttttataaacatttctgttttttaaaaaaaaaaaacagttttttagttatgatgccaaacattatttctctactttataaaattcacacttattaactcatgtgtcgtatttttattaactattcaacacgccaatattgtccaacatatacataaatatttttgagtgtagtataaatattacattttattaataacttaagagtttgggattgaaactcatgtcctctccctattttgtatccctaagtttatgtgaagcatcgaataaaagtttatttccaaataaataaaaagccttttctgagttttcaaaaaaaaaaaaaaaaaaaaaaacaaggagtttcgaaatttcttgaccaattgtttaaaatatttttttattcttaaaacgacattgagttcttacatttttattttatttttcttataaagaatatatctagtacgttgtttactaaaattatatgtgaaagaaataataataattttatcttgtttacaaacgaaatcaaaaaatactaaattactttctttagtagaatataatataaggtagtcatatggtaaattatatattaaaagacaatcatcatttaataaattaaaattattaccattgatattctttaggaaattggagggagaaatatttccgttttttttttttaactttttttaactaattctctcattcttt

SEQ ID NO: 41859 - DNA, 2303 bp, Cannabis sativa
aaaaaaaaaaaaaaacatgttgaacgcaatggtttgtgtgttctagtaattaatgttgttctaacaaatattataatttttgatataataaagcccattttttttaattagctaggtttctaataagatctttctatttatctttatttctaagaagctgattttgatggagattactaaacgacaatggagaatggtggaatttttctacccaattttgttatcatcagttttgattttgaattatggcactattatggctacagcagcaggtgaaggaaaaacaagtggtggtggtggcgggaaaaagacttacattgtgtatgtgaaaagaccagataatatgcaacctctttcatcaggacgcaaccctttagatccatattatcaaacatttttaccttctactatttctacaatgagcacagacggcggcgaaagtagtggtggcgccgttttccatggctttggcagcggtggtggagtggggtccgggggcacggaccagcgcatggttcacacgtaccacactgtggccaccggcttcgcagccactttgacggaggaggaagctaagcaagtggcttctaaagacggtgtcatctcagccgcaccggaaaaagtctactctttgcacaccactaggagtcctgactttttgggattgcgccaagggctgggattgtgggacacggctaagttgggagcgggtatcacgatcggtgttcttgacaccggaataaagccggaccacccttctttcggtgacgaagggatgcttcctccgccgctaaaatggaaaggcaggtgccattttcccggtcgtcacgtctgcaacaagaagttgatcggagctatgaatttggtgagcgatgactcaacaggaaagcgtttagcagtggctccttcagacgatgaaggacacggcacgcacacggcgagtacggctgccggaaactttgttaagggagcaaacgtgtttggaaacgctaacggaacggcggcaggaatggctccgcgtgcgcacgtggcggcttataaagtgtgcggagtggagggttgtaaagagagtgacattttggccgggatagaagccgccataaacgacggcgttgatgttctctcaatgtcaatcggtggaggagatgttgaacctttccacgctaacgccgtagccatcggttctttctcagcaatccgaaagggtgttttcgtcagtgtctctgctggtaattccggcccggatcattacacattgtcaaacgaagctccttggcttctcactgtcggagcctcaacaatcgaccggaaattcaaagcttcggttaaaatcggtaacggagagtcgttagaaggacagtcattaaatcaaccaaagtcattaaactcggcagctatggtaccgttagtttacggcggatcaagtaaagttaacggatcaaatttctgcgacaacaatacgctaacgagcgacgtcgtttcaggaaaaatcgtggcttgtgacagaggtgggatcctggggagagtaatgaaaggagtggaagtaaaaagagcaggaggtgtaggaatgattttaatgaatagaaaacaggatggggcagttacttcagctgatgctcacgtgctaccagcaagtcacgtgagttatgctgaaggtcaaaaactgatggcttatataaagtcaacaacttcaccaacagcttccattttgtttgagggaacagtgattggagataagaatgcaccagctgttgctgctttttcatcgagaggtcccagcaaaactagtgctggtattctgaaacctgatataataggccctggtgttgatattttggctgcctggccaacctctattgacaattcaagtgcagttgttacgtttaacactgcttctggtacttctatgtcttgccctcatcttagtggagttgctgctttgcttaaaagcgctcaccccgagtggtctccggccgccgttaagtccgccatgatgacaactgcctacggcatcaacactgggggaaaacccatccctgactcaaccgtaagtactacaaaaaaacaaaaatatatactacaagttttttttcttttacatattacatctactataaatataggaataatgcacaacacacaaactactagtaaaaatagatttgtttctttttaatctataatatttttcacacaaatatatatttttctaagaaatatttgcaccaataactattattattaaattatttaagaatttacccttacctattttaatactcacaatttaggtatttcttttt

SEQ ID NO: 41860 - DNA, 4583 bp, Cannabis sativa
tttaaatatttgtaacgaaacatgcctcaacggctcagcctcaatttcaaattacgatattgcccctgtttatgaaaaatattgacaaaagcctaaagtcactcgtcaataacttcatatgtttcgttttcttaagctctgatactgaaagggcctctgatcctccctccttcgattctctacggaccatcctatgataaccaccgacgcaatcccatacaccccacgttaaccccttcaatcagcattgagggaagcctcgaaactccatatccgagctctctctggtagaccctcggaatttgattttagttaattattgaaattcttcgtccgtagcgaagatgattcacctgctgttcacggtggtgttctcggagatggcgatgataattttgatgtcgttcaaaacccctttgcggaaactgattattatgggcttggatcgggtgaagcgtggccgtgggcctattgtggtgaagaccgttgcggcgacggtcgttttcttgctcgcttcgagcgtctacagcatggttaagatccagaaccgttggatcgaagacgctgcctctaatcccacagatcaaatccttatggctaagcatcttcttgaagccactctcatgggtatatttcagtttctcaatctattttaatcgaattattaatttttgattctgggcattcatcgttcttaaaattgagcataattgttaaatgaacttttataattttaatctgctggattttagtgaattgcctcaactttggatacttgatatagatcgaaatgtgtttgatttgagtttttgatgaatagtgttttgtgttttttttcctcttcaaaaacattattttgctgatcttgagaatgagatatggatattattttcggtgctaagagcactgtttcattctatctgacttgcaaaacaagttacctgtaatttgcccgatcataattgatttttttctggaattttaattctcatatgttgagcattataattggggatctaattgtgattacagggagtgatatgaattcgttgtttgtacttatatgcatattaaagtgctaacattaagttcctcattatccaacaaacatggtatttgatttactctgttgtaaaatacagcctgtctcatttcccttttataccatttccttccatatcttccaattgattatgaaatttgaaaagtagattgttaaagctgcagtgctatgtggcctgttgaattgagtttgtttgtttttaaccacaggtctccatgaaaatcaaaactttcatattagattgtaggagtaagtcatttttcttcatggtgaaagtacaaagattcaaaagctacatattgttcattatctctaggacatcgttttaatgtttgattattatactttcatattcaatgatgttggccattattagatctattaatttagtacttttggatatgaagcttgaagattgttattgtttgctttcaattctgttgttggaaatttgaattttttcttaattttgggcgaaactacttgcagtgtcagcactcttccttgctctcatgatagatagactacatcactacattagagaacttcggatacgaagaaagacaatggaggctgttaagaaacagaaccaaggatttgaggatgctaaagccagtggttttgacgaaatcaaagccaaggaagaagagatggcaaccctgcgggaaaaactcaaggagctagaatctgatattgaggcgaagaacaaggatgtacatgctgcagaagctaatgcagttgctttaaggaaacaatcagagggatttcttctcgaatatgatcgtctactagaagaaaaccaaaatttacgcaaccggttacgagctttggatcaaagcttgtcacgctcgggtagcaagaaaaatacttgaagaaaaaagaaaaggaaatactgacgtcttgaaaattatatttctttcaaattcccctccctctttgaaattgttacattttatagtattggttgtgagttcaatgatggattgattgattagatttcaattttcatctttgcgtcattgtaagtgtggagaaattaaaggaacaaacagaacatagggctttttaccttttttctttttttgtgttcaattcaacttgagttggaactgaagtagaatattgaatcaattgtagaatatagaaagcttctactgcttatattggtatgtttgtggacagactgttgtttcatgtgaagtcagactaaataccaaacgattattcctaacaccaaatgactaaacgtctatatgtaattttaaatttttgccaaattctaccattaatgtgttgtttaatagaaaagggacttttttatatatacatatttatatattgtcgtctgagtacaagcatggtatccaagcgagttacattacatgcctctaggcttgattaaacaagggaatcatttattactatgtggttactcaatctgggttctcttaacccaagttcttattattattcttttctttttctttaaatcattagtaaaattcagtagtggaataccttgtgaacaaaagactgtttgtgttcagcgcagtgagcatcatcaggccaagaaagacgaatattgaaagcattgacagcacaagcattaacgcagaagccatgtgatttttctctgtctgtacgtactttgaagaagccaaagcaacgaaggttagaggaaacgagtaagcccaccacactacattgaacctcctcattgatttcttgaacatggctggtctacaagcctgttccaaagcagagtaaaaacgctttaactataaatatatatatacatataaatataaaataattactaattacacttaccagagacataaagagaaacaatgagagaaagaagagcatcttggaaagtgtatcaggacttccactgatggaggtccaagtgaaactggccaagcttggtgcagctgagaacaagaaaaatgaagggcgcatcatagcaggaaacctactcctcccagctaacctctgataaagagttacaaagagcacaaaataatgtgccatacccaatgagaacatgaaaagtgcagtctctttccaccccatctgggctgcagccaaggctccagctaagttgcccatcacagaaatctggcttgttgggttagccaccatggacaagaaccttttctctgtggtgaaccactgtccatagattttaaggtccaaaacaattatagggatagtgaatagccaccagaggacttggtataaaaggcttgttggaagtataacaggggcggattgaagcagaagaagccatgaaatccatggtgcgtacaagtagttgactcctatgtggtgcaagaactctgctttaaccatgttgaaatggaagaaacatctaagaaggtagagaaaagatagtgaaagtaatgtgaaaagtgagagtgtccaaagcaagagaaaggcaaaagatggaaacattcgaaatatgtgataaataggttggtaagagtattcctctgtagaggtagtaagtctaagactctcaaatagcagagcttgggccccaagagagagagttattctgaaataacctgcatggatgatagtcaagatggatgaatatggttgttgcacattaccactactctctttgctctcatctacttgagagaattcgcagtttttagctactacttggctcgatgtgatatcgatggttacatcagatttttcagctgatttggtttctgtgttgtctcccaatcccatgctcttcatttctaaaataatagttataataataatatgtaacaacaattcgaatttctttcgattgatattatagcttatccgtgaaagatgatatgtgtttcagctgatttttgcatggtttgtgtggttatataaaggtaaaaaaaaggtatacattaatagtcaatataatataaaatgaatattatttaatctgagttggtgtattgtgtatacataacatacatctacaatataataatcaacagtttacattatcactaacgtactacacataatagaataattgctagaggttaatctttttctataattgttttatatatgatctaatttccttggttataagagctgattgggctagaaaacactttaaatagttgaataacacccagctttttatccaataataatgtctgtcgttatcgtagttaacatgttcctgcctagttatttaattagtacttatgtcagtatatccaaatgaggattaatcacatcaatttatttttcccaaagaaatcaccagtatctgctttatatataaccatattgaaacaagaaggagaaaaaaatgtaccaagtgtttctaatatctacaggtttttacattgggatgatcaaatgcaatattaattattcaagtacagagacttttctaacaaaggaaattatttatatatatatgagaaatgctaaagggcaccactggttgcctagcaccctcctacgtgtcaatatcgctattggtgcaattaagtatcgggtc

SEQ ID NO: 41861 - DNA, 505 bp, Cannabis sativa
tgataatttagtacctgagaccaaatagaccaaagagctgttctaagtgttgaaatatgagattgcaataatgggtacacaattgttgcaccaattccaatcacagcacttactccacgccctattccaatctcaaatgctgcaattccttcccattctaaggctgctgtcattaatgttccaaaactacatttacacaaacacatacacacacataaataaataaaatgaaaagaaaaaaatgactattgctattagacattagcgatgtctagcacttttagatatatctctttgaaagttattacattaaactatacggatatgatacttaattaaactaatagtgatattaacacataagagagtgtcagatactactagtgccttttagcatttttcaaacaaaaattgcattataatgatttaatctcaccttaggacagtgaagaataacaaagccagagctattccaggtagaacagtgtcctgtttcaaataaact

SEQ ID NO: 41862 - DNA, 891 bp, Cannabis sativa
ggtcgctcctcgttcttcttcttatggtggtttgtttagttggtggataaagatatggtctcttgatcttcctccaaagattggactatttacttgactagcgtcccataattggattcctacaaaaatcaatctagctcgtcatggtctgttaactgatggattatgccctttgtgtgggttaaagaagataatactcatcatgctctttaggggtattcttcgttgttacattgcagaaaactttgtgagtttgtgttaggaaatctgcttgttcattgtgtgaattttcttcactttatttataaatttgttgatacccgttctcaggagatgattgaattggttttggtgattttgtagagcatctgattcaaacataataaaacggtccataacaacattgaattacctcttgtgctcattgtgcattaggcttgtgattaccttgggatgttttacaacaaatagacttcagcggtgtctccttccacctgtcagtcggtggtggacgtctctattgatagcttagtgcctcagatactccctccttatgtgtatccaaaatggaaatcctctcgcttggttttctcaaagtcaatacagatgttaattgttctcttaacaattgtagtggcttgagtatggtgattcgtgatcagtttggaaattagctttggcaaattggcatttggatggttgctttgttcttgaagtagctaaagccttagttatccacaacgcgcttctttaatgcatcttctttgagtatgggcatattattattgagtctgactactcaagtattatgattaaactaaaaaataagacttctattattacttctttatgacttgttttagatgacattatcaatctttgtattaagtt

SEQ ID NO: 41863 - DNA, 669 bp, Cannabis sativa
aatatacatttaatttattaaattataaaatatatttaattaaaatattaattatttatatattttttaaatacgtgtaaattaaattaaatcaataacttttacgtgtcaatcaacattattaaaatttttaatttaatgtaatacacacaaggatgaatatccttactagaaattgtgaacatccctactagaaattgtgtaggaacaaaagtgtgggaaagtgatcaaatcatcaatcagcaccaccgttctaacaattatatatctatatgactatatgtggttcttgatttttattattattttttcatattttcatttaaatgcctaactaacatgtatatttaaccgttggcttccatgcatgtcatatcactctttttctatacaaatatgatgatttttagaaagaatattattatttttttgaacaaaaaaaaaatattattattgggtactaataattgttaacattttctataaatagtattttacaattaattattatattctctaaaaattattattttttttttgactaattagtaattttccctcgaactttgacatatactaaattatacccttgaatttttttggccattataaattccccctaaactattaagattgttagatttaaggacttttgtctaattttaataa

SEQ ID NO: 41864 - DNA, 1386 bp, Cannabis sativa
agagaaatgattatccatatttacatcaaggcccaattttgtattgctttcttttgaagtttttcataccaattttgtatgacaataatactaaaactattggtgattttggtttggtaatattggtggggttttcctaaatacatgttttctacaacgttcaaaaatgctgtcatatatcatatcaaactggactcctgctctctctctgttcacaatgaacagaatatgatcaccttccacaatcttgtagtacctgcattcaacaggggtcccactcttcaaaattatagtgattgaaaattttgatactaggatgaaaatgcttagtaaccacagcaattagcaacaatatgatctgcttatgttagtagagaactagatgttatatgcatagaagtattactgaccagatgcccggttccataggttggcaatctgattcattttcaacaaagcgattaggatgctcgataggaagacgagggtgtgtcatggatatggtattgagtgctccatcattgtcctgccaatcctcatccctgcatatgcaaaataaccaataaacgaattgaaaactcgatatctagagttaaattaggtgattgtgttaacaaagaaaaaccagtgtaagcctacctgtatcctttgaaaggaggagaaacgtctgggggatgacgccattggctcatctgcaatactctaatgaaaagcattggatgaattccaagtatcccagaagggactgtgattccaaagatcttcttagtacgcttggtagcatagctgaagtagtaggtgttgggaaatgtatgtaagtgactattcaatcttatcgatccttgaattgtaaggtcgggcaggatccaatcaccggaagcaaatggacctgaataccctaacaggcaatcaaggagaccccaaataccggttttcttccaagacatgttgaagtgatcgaaaccgaagttgtaataggccttcagccatggaatatcaaaccagtcataaataataacacctaaacgacatagctgcagcaaacatatagctttcatggacctcccatcttctggcctggaacaaatagaaaccagtaactactttttagtagcaagaaaagggaagaatcaacactcaacaagataatacgtaattgaataattctttgaaaacttctagtatgatatcatcaactcagatattagttaatttagaatttgattatgctaatagtattaacaaatgaatgaaactcactgcatcccatctaagtaggtccttgtggttccattgaaagctccagacaaggaagtaatgctcaatacccaattctcattggtgttctcaaatcccttaaatgcctgaaacaaaacataacaatag

SEQ ID NO: 41865 - DNA, 3627 bp, Cannabis sativa
gtaatgcctcatattgctcttccatgttgatcaaataatgccaaaatcaccagactgtgaagacaatgaaccaccaaacaccaaacttaaaaaaatataatctcagacaaaacaaaccagcacgaacggatcaatcaaaacaggccaaccatgtcatttgacaagacttaatcctgaatgaatgttttagttattattctaagtaaaatattttgacaattaattaaaattaatgttgtagttattattacatgacaacttgtttgttcttctaggtgtattagtattcacttcacttctaggaaagccaatatggactctcacactttgcaatgaaactttataattctattgttaggaatgggattgtgcctttggtttcatggcattcctcattagatgacttctctattccctctataatccattcttttgtgaatgaagttttttattttaaaaaatatatattatttaataatttatattttaaattattagtaacaatttttcattttttttatgggttgaaaaacaaaggacttgcattgtgcatacccttttcaatccatttggttattttgacaatctcgaaaatcacttaccaactataaattatatttcagtctatcttaattaagttatcgataaatactataagaatttcattcaagatggcaccacctacaataattagcctttaagggtcaagtttttttatctctttcaaaagaaattgtaataaatttcaaacctttaatccaaataaaaaaaaatatgtcagtaaaaacaatcgctaccactacaagacatattatgtaataatttctcaaatttacttatgatgaatttttataatctaagcaaaaatgattataggggataacatgacaataaatttgagaagacatgcaccaataagtgatgacttttgtgccatacataattataaaagacaatattttatttttattgtatatttttctaaattttaaaaaaataaaaataaaagcatgtccatcatttatgccaataacttgtacggcaaaaaaagaataattccatagagaaaaaaagaatattacaaatatctcttctcacgttacaattgataaaatcccgaaaattaacaatatatcatctcgcgatatattgaaaatggccacgtcattttgcattggataccctttgtcagtggccaggtggaaagtacatttacatttttattttcttctatttttcattatattattctttaaaattttaatattctaaaatatttatgtaattatttaattaagataagatttagccttgtccaatatcttaaataatttatcaatttaattatttttcagttaggttactatgatgttgtggttaaaacatattattaaagaattgttaagcttcttaatataaatatttttatttagtagaattttttttcgtaatcgctcaacgaatttaattgctcataacctttaaaataactctttttataaatatgacaagaatttagtagtcgagataacttacattaaaaaagccaacccacaaatttacaggagccaatatatataaaaaataaaaaaaatatttgggggcagaggcaacggcaccttcggccccctttggctggttacttgaatttgtataagtttttaatttatatttggcaaatgactaatgaagcaatttattctataaaaaaaaatattttttttttcaaaaattaaaataaattaaaaaaaaaaagtattattgcatgaatgtgtagcattgtagggttagggtaccttatataacaaggccaatcttttttttttctttatttatttctgtgaataataaatgttaccctttattgagagagtgacatccattcactctaccttaaataggtaagtttttttaaaaataaaataaaataaaaattatttggcaagctagaaaaatctcaaaataataataataataataaaagacaagtggttgtggctatgttgacagtctaccaaattggaaagtgattgaatattttgtgaaacaaaaacttgcctagaaagctatgaatattatcccatcaaaattttatttatttatttattttgaatagttaaataaataaaatttggtaaaataaaatataaatagggtggaatgagtagtacttatcttcttaactatataaactataaaaactgaataaccagtcctctatttggggctcctattttacagtcacatctacaaaatattactacttttttctatttttttttaaatatatataaaatgaaaaaaagaattaggtttaaattgtttttagtttttgtattgattttctatttttggagaattagtatatgcatttattaggagtgaggatgcctagaagacatagatagctagatagggtcttcaatgcaataattctcatttatgtcatgaggtaattaacacttttaaatgtttgcttttggttatttaaaaaaaatccaataaaatgttttgttattatgtttaataaaatttttagaggtattccatttaaaataactatattgaggtttttgtttcataactttcaaaaatttatattagtaagagtaagtggtgatccaataattttttagggataaaagtttctagaattagtaaagtatggaaataaaaaagttaaaaaaataaaattaatactattttaaagaaaccaaacaacatcaaaatacagtaatagaagaaacaaaaaattgtaactccctcctcgaaatataatcaaaatggttataattataaaaggtaactcgcaacaaaatagtgtttaaagtgcttcaacataaattttaagaaagtaacacactgaactatgaacataaattaaactaaaaaattaatataaaattaattaaagtcatgtctttttcataaacaaatatatataatccaaaatcattggtgtccactacttcttaacataccctaacctaatcaccactctccaacctccttggtacgaccatgaaatgaaggggatagattattatgaagttgtataaaaattcatgtcaaagactagtcattccatatattggaggttcaatgggtcacaatctaaattgaatagtctatcttcattttattaagttagttccacattgataatgtgtggatataaattgtgatgtataagatgaatagactactcttctcatgccaattggttttgagatggaacccaagtcaccttattctctaaattctaacatagtattagagctacttatgatctgctgtgagcccaaattgccactggtccaaactgaatcttccgctatctctcctttaacctccatttgggacctttcggccaatgtgtgccaatttccagtgttggggtctttgacttgtttcaaaaatccacaaattttggtcatgtagtctcttaaagatcgttcgttacacccacacttttcaagcccaaatgtgaggagggtgtattaagagttagtcctacattgctaatatgtggatataaattgtgatacataagatgaatgagctactcctcccataaccaattagttttgagatggaactattagaatatttctaattaaggaaata

SEQ ID NO: 41866 - DNA, 2577 bp, Cannabis sativa
tagacttcagaaagtattagcccgtctgtgcttagggtcgaacctgtgcttaactaattctccaaatccaatcacccaaaatagtataattggtgaaaatcaaccatattcactatgtaaaatgaccttcttttgataattttcttttgttgcaaaaatagcattccaaatagggtgttgagaaggttaatttgttacaaaattatcaaaataaagttattgtgcaaagtaactagtggtgtcttaaattatgtaatatgatatgcaatttaggtgttgctagacactactaatactttttaacattttgcaatgtgtctagaagatcatttttgcaagtagttgtaaacaaaacaagaagaaagttattttctaattttatcttaactagggtgtgttgtgaatgtgaatggtacgcccaaaaaagaaagaaggtttaaaagggcattgggtgccattgagggggacctctagtttgtcatagttactttactattccaatgttcattcatatatgatatcccaagctggagtagggtcaccaatcaatgattctttaaaaagctctttttactcttaatcacacgcaaactcatttttatatgagagtattgttattgattattagtagtctccaacattttttataagtagtgtcttataattagttaacgatattctttaaaagttatactttaagttataggagactttatacttaattattctaataacaatacgtcactgaaaagtgtactagacactaataatacattttagtatttatctttttatattattatattcatttgagagtagacattgaactaaaaaataatacttaatcgaaaggtgccatatgacttgtaattttccaagtcttcatcagtggaccattcatgtttgcttatcacctcacaatttatgacatccaattgtcaatttgtatcttggaaataaactcaataaaactttatcttaattatgtattacttcctccccattaaattggaacatcacatttattcatattatatgtcacatttgctttcttgtaaaacagaaaccaataaatgtcatctttcaaaaagtgacatcctttcaagtttaataaaaaaattgtcacttatagtaagaaaaaatcgtattaagaagaaaaataacaagcctaaaccctaaaaaaaaccgaaatgagtaaaattatcataattactaacaaaataaattcattcactgcgttgagtaatcgaaaattgggctcaagatgacttaacgaaagtgttatagaataatgcaaaaaatgttcatattgagaaaacatatatagaaaatgaaatgttataaaagagagatgtctatggtcctacttattttgagctgtttttattagctagcaatgaacaatatatatataaatggtgaccaccatattaataatcaatatgataagctgtgtccaacttacaaaaacaactattcataaaagaaaagcaatgacttttgaattaataatatagtatgattattagcttagcttagcttagcttattatatatatggtcaaataaatagaaaaaacaaagcatttgattgaattagataatgtgggttttgttgttctaaagcaaaacattattatttgtgtcatctcatctacagttgaagttgtagtataagctccatacaaactttcctatcaaagaacactttatgttcttaaaattaattttattatgagttgagaaataaataatatatttttataataataataataaatattttgtgggagtggattttgacattttgttgcgtgagggaatgtattctatttacactaattatttttacacgtttaattttttaattttatatatttttatatatatgatattctataaaaataatatagtatgaaaataataaaaaaaaaaatacataaaaataacagaaaaataatatttaaatttaaatattatacaaataataaacaaataacaacaaaacaacaataaaataataaaagtacaatataaaaaattattatgaaaacatcaaaaaccatttttctataaataaaatcttaaaaacttttaaaaatatttaaaatttcaattgtatttgtacaactttttattgtttttatatatttataaaataatcccttaagttaattcaacagttgttaattatattggaagccaaaacatatcaaatcatgaaagtacacatagaatacattttattttttattaaacaaaaaataatatttttgatcttgtattttgtaaacgttattgattagactttttgttttgttaaataacaaaatagactctatctttttcaaaatagtacaaacaagaccatgaactgatttttttgtcaaaataaaatttaataataacttaatctagatgtgttatgataaaactggtttctttttttacatctattagtgttaggaattgtcttcaagttggttatattgaaaaacataattatcgaaaattgagttcaaggtcttatttgtactattttaaaaaaatacattatctattttatcatttaacaaaa

SEQ ID NO: 41867 - DNA, 643 bp, Cannabis sativa
acgagtttagggggttttaccactaaaattttagaattgggagttagttgtaaaaacttgaccacttcaggaggttataccgcaaataactctaaaaaatataacaccactaacgctagcaaactatataaggaaactctagatgtatagaatccctatataatcctagctactctaattagttaaccccttactcctactcatcttaagattcaccacacgaaatctagatattttagtacagctatagccgacgtcgacgagtttatggagacacccacttcgtacaattcctatgactcaccttgttatttcttttaggagaaatttgcagcataaatattatatgttttcaattttatacactttaatactatattttttttttggcagatttaataccaaacgttgtattttgggtctctccgttactactattctgttagttgtgactcaatgtacacgtgtaaggcccagattaaatccctatttttttttaaatgtttagttaaaattaaaatcttaactttttaatctaatacatctaacttaaattttatttccataaaaatattttaaagaattaaaataaaaaaaattaaaaaagaaatacgaaagggtttttttttttgggggggggggg

SEQ ID NO: 41868 - DNA, 768 bp, Cannabis sativa
ggcaaggaatgaaaaaggtgtagaaaagaatgtcttccaatgcctattctcttcatgcatttgtcattacttatcttgatcaataaaaagttgctcaagttttaaatttagagacatcatagacaggtttaatcgctagtgatggggtcgagcggtggtgtgcgcttcatgcaaacaacatcaagattaatgtttatgcatctatttttggaggtgtgcaagggtatggttttggtatagtggctagaaaagagtatggttttgctagagggtattactcatttttaccaagggattgtttggcctgaattagcagaggcaattagtgtaagagaaggcactaaattggattaaaaaaaaaaaggcttgcaacaggtagccttagaaattgattgcttggtatagtggcggacccagaatttaagttgaggtgggacgacacttttttttttttataagtgagggtgcatctttttttttttctgcattgcataacatgttaaaaattaatataaatttatattttagtattaaatacattataaagtaaaaaaagtaacaatattaaagtaaacatgtttttattgagattagaactcatgacctcttttacatatatgaaatgactttaccactatactaaagcttattttatttttatgtgtatatattttatttttatttataaatatatattgtaactaactaaaatgcatatatattttttcccgatttttttttttcaggtgggcgactgccccacctcgc

SEQ ID NO: 41869 - DNA, 1187 bp, Cannabis sativa
  modified_base (46)..(85): a, c, t, g, unknown or other
atcatgtgaaccatgcaacattgaatgttatttctgatctatattnnnnnnnnnnnnnnnnnnnnnnnnnnnnnnnnnnnnnnnnggcataaaacccaacaatatataaattaatagtataaaatggtggcaaagttctttatatgatactagtttttttttagttttgtatatcaaaatctaatgcattcacgtgtacatgttttgatgatttaaatgtagctcagagaacttaaattttaacattattaagatgtgagaaaactccatttattgatcctctacctgaacgaaggctacaaagaaacaaaaaaaaaggtcttgcttcacagtaacgacgacgacggtagttgcaaaagagtgagtcacaacaatgacgatcgaagactattgaagtgaaaataatgaaataatctcctacacttgctccaacaaaatttttatacattctatttctttaagctctgattggttcaatttgttaccctatagtatgaggaagaaacaagcaattctaccccagaattcccctatatatattacttaagttgaaattaataattggaattatgaacttaaatggtaatgctttttgaacaaaaaataatatatttgagtcatctctcaaaattaaatgaagatgcttttacctatgtatatgatgggatgaaagaaaattaactttaaacactactatataatcatccctaataaaattagtgagatttactgcataatataggtaccttgagaactgtaggatacgactgtagtgtttctgggataattatatccaaattaaagctttttcaatgcaaaccaactacaaaagagacaaaagaaagattagaaacttaaaaagagagagtagagaatgagaagccagaaaaaaataatcttaaattaatatttgatagataaatattgttatttatattatttaaaaaataattatgtcgctaaggtgtgcgtatagtttgttatatttatttgatttttttaaagggatttgattttttttttcttgacaaaaaaggaatttaatttttttggttaacgtgtttaagaagaatttatttgtttggcatttataatcaatgaatttaattttagagtttttttatttttacacttcaaaataattttctttgcattttacgaaattctacatagaaatccctattgca

SEQ ID NO: 41870 - DNA, 2843 bp, Cannabis sativa
aaaaaaaacaacaatttacagtcattctaatgtcattaatcaacaattccatagattaaattttaaccatctgtttcttactctgcaatcggccaccctttcaaattaataaagcttagagcttcttttatgcccatgggttcaaccatctgtggagcaaaggtaccttatactagaagcaattatatcttgattcatttataaataagccaccacctacaatcatttttttttttaggttgggtttagctggaagtaatagaatagaatggaaaagaattaatttttatttcatttatatttatttgattgtattttaatgtattaggtcaacatcattttaataaaataatttttttactatttttgatagattactattctaaaaaaaatattttcaatgcaatataaatatatatataataatttaatttttaaattttatttcattcatatttcgtgtttttaaacttttttattacttaaatcaaacgtgcctaacaatttaggcttaaccaaccgctctttcctttccccaatggcccaataccactcaaattatggggagaaaacaattaattttcctttaggagcaacgcaatgagaattttttttttttttttttgcatattgtttatttatttatggaaatggagtgtgtcacacattatttttattttaaaaaaaaatcgttttcaattgtttagttttaacaaatgtattttgtataatgaagggggtaactaacgggtcacaaaccaatcaagttgattgagcaagggaattttcaaaatacccaaaaactaaaaaaatattaaaaatacaaattttatttataaaagtatgaaatgaattttgttaaaaaaatacaaattacaaatttgtaaataacttttacatgtttgtaaacaatttttaaatatttgtatacaaaaatgttgtcctacacccataaatggattttttggtagatttttttatctgttttgatatttaaaaaaagttttttaatctaattttttctcataattgcgtagattatagttatttaggataatttataaatttttacaaaattcagaataaattaaaatgccgaaaataaaatttaaacaattaattactacgcgtacaagaaaaaataatcgcgagtacaaaaaaaaatactttaattttatttttaatattgtaaattattcagaatttatttacacctaaatataattttaaatataattgttgggtgtacttactcaacaatttttacacgtttgtaataattatttatatatttgtaagtatcttttacgaaatatttattgtatattagtaataaattgtttttgttataaaataggattttttttttggagaagttgaagaatactatttttttaatgttaaccaaatttatctctgaatataatttaattgaaatatacttctaattatgagtattgtacctaaattattctcacacactcacactcgtataactaacacataatttcaaacatgtgtgttctttgtagatggatgtgtagatttgtaggaaagttgaaaaaaaaaattgattagagaagaataaaaattgtcgtgaagtgatagattttgaaagaggggataaaaattaaaggtatcaagctaaaaggagtaagtaatgtaattttttttgtttgtggaaaatgtaatttttcactaacagtcatgaaacaggcccaatacaattcattcagtccaagcctaatttgtgaaacccatatcaatcttggtgctcttatcaaaatggcccaaagcagttttctagactttactatagggtggatggatacatataggtgtgtatatataaggaaatttatatagtatactttgtttctttacaaaaatattacggtaaaatttacttttttattgtgtattttttataagttttatattgcagtatactgtatttattttttattttttatttgttttagtgttattttacggttgtttatcataatttatttttttaagatgtgtggttcttttaagttttctaagtgagaatataatatatgtatatctgcttattgtttttctaagtagttatatctgcttatttttttacatttatttttgtattgttttagtagtttttttgttctattttttaagattgggattacaaatataagtgttattacattgggtattgaggatgtgcagaatattttttacttttttttaatcgtgttttcctttcttttgtttgatttgttttagtgtgttttacagttattttgccgtgattatttatttgacgtcgatttcattgtattttttttttcttaatctcaccgaaattaatggttgttttccaattgttctagtgttcctgtggtggttttgtccgtggatgtggaaaatagatgcctcattttttttttgtttacagtataaaagaaaaaaaaaatcgaccaagattgtaaaacagaaatttatgtcgtgtggctgtacttttgtaaagataggagaaaaaaaatcagtatttttgtaaatttctctatatgtgtataaaagaaagtggtattcttcaagaaaattacattgtatatccattttactttatttgtttatatttttaccttcatttccatattctttaagatatacccatttttatagatgatgttcctattataccccttagattaatgtaaatcatgtgctacacttaagtggggggtaaggatatattaggcaacccattcataaaagtgggtatattttaataaaatatgagggtatttttgattaatggatacaaaaaagagttatttctcaacttatctcta

SEQ ID NO: 41871 - DNA, 1654 bp, Cannabis sativa
tcccatataatttaatgtaatagcttttagagagtatcgctaaccaatcgcaacgcgacatatcgagaaagtgctaagcaccactggtgcctaatagcaatgctctttttcataaaatgatcatatatacatatggatctttatcttattcatcgaatgtacgaataataattacttgataatatatatattactaatcatcatcaccacttaatatatttgtcagtgcaatgcaaataataatatccgtacgtatacgtatgtataaatatacagattcttatatactatactactatatatatatagcaataatataataatgatattttggaatatatatatgggggcgtgagaatgaaacagttcgagttatggttgttatattggagagactatatatctatatatctatctatataaatatatatagagagagtgatatatatatggaccagtgccgtacagcaatagactactactatagtttttctttcggcaatatttatataacacagatctgatttattccccatacccatcacatgattatgattatgatcatatgtatatctttttgagatttatatagtatcaatatatatgcaatattgttagttggtggtctctatctttattatattattgttattattattacttttctccttttcgaaaaatcccaacttatttcgtccacgttagctactttttctttttctttgtttcccataaaaggaaaacatcttcacccaaaagtcatatacagaatatgtgtttgggttattactcatctttctttggatcactacttcaccactacacacgttcataaaatgtagagataagtgcacatcatatatatatatacacattattgtatattaattgtgaatatgtatacctactaccaaactcaccacatatcattaattatagcttacatgactactatatattatatttatctaatcataattaacatttatggtcagttctcttatgtatctacatatatatcgaaaattctatagtacaatcctatgtatatatatatctgtcattttatacggtgttaatactatagttaacgtacattcaataaatctaagataatttatattgttgaatcagttaaacgtaacaaaaaatcttacttttaattataataaaattagtgcgtgactaattatgtataatcaaatcataatttattataaataaatatatttttagtcataatatttattttaactaaaactaaattagttacaatttatatttaaatgaatattttagtcacaaataattttttattgtgattaaaaatcacatttagtaacaaaaaatttacgttgtaactaaaatattatcagtaaaagtaatttttttttcttttataatataagttaatccagtcaccacacattcctaaagcatcaacactttatacaatcaagaacattggacaaaggctaacctgaaagtatgagactttgctcattttattaaagtgaatctgtatggctaagttcattataatgcattacaaatgactatgcaagcccaattaatataacgggcacttaagcaaagtcctaacggctaataataactaactaatgttctaaatagagctagacacacctgacaa

SEQ ID NO: 41872 - DNA, 1709 bp, Cannabis sativa
aacagccgtgatattgagaagataaacatattccatggcatgtttagcagttgggtattcattggtgtgatgtttatcacagtagctttccaagtgataattgttgagtttctgggggcatttgccagtactgtaccactgagctggcaactatggctactcagcatcggaatcggatcaatcagcttgatagttgcagttttcctgaaatgcattcctgtcgaaaagaaaattaacattaagcatcatgatggctatgaagcactcccaagtggtccagagcttgcttaaacatccctaaggtgagaaaaagactattatattttcttttcctactttagtgattggaaaaagaaaaaaaaaagtatataaaaaatattagtgattactactacgctgactgatacaattactatgagggtatattgtatgaagttgggattcatttccatttttggctggagagaatcagaagaattaaaaaaatgttggataggatgattgtatttttcttgtcaaacttttgaaaattttcttgattttcaatcttttagtagtggtttagaattttaattgaattttcttgctttcttttgggttcgaaattgatgaggttgtttttgttatgcaaaattatttccaacttgtgaaatacacatatgttcttcaattccttttttttttgtcttttttttttcttgggttgaataataacactaaatgcatcttcaataggggcaacacctatagttatcaaaatacacacatcaacttaaaatatatattttttttttattctctctcatttacataagatttgataaattttcatacaaaaattactctaatagttgacaactctaaaagttgtctaccattctcacatgctaccatttaaatgattaaattttattaaatataataaaataatactataaaataatttttttaatggaaaatgaattttattaaccaatataatctgttaccaaacaatgtaacaacttggtaagaatagattttacattgaaataataactaggatataaaatagaagctcgtacaaagttgtgagttaccacattagctgatcgcttaacaaaaagaacggaaatattttttaactcaaaagagagttgtttacattcagtaacgatttgtccaaataatgagatcatttgagctgagttatggagagcttgaaccattgtcagataagcagttgatgatcactcgttgccagttatgttctttaatccagcttaaaactttacggactccaatcgtctcagctatttttggtgttgcaaatataaataatggtattgataaaattacattggaaatgataaccacattgtatatgtgacaaaaataactccataaacaaaagatgctctaataaataataacatgtccaaagagctagaaagataacccaagtaccggctaattaacctcgttacataggtaatatgaacaagacattaaaaataggtggggttttcttttaaacgtctaacaattatgctatggtgatccctattgtgaattagcaacatgacctaacatgaaaatagagacgaaatcaaactattactaaagtaataatgattgagacaaatacacagacatgtaattaatatgaaccactcaactaaaagtgatgtgatgttgtccatttaaaaatatataaattgattatactc

SEQ ID NO: 41873 - DNA, 501 bp, Cannabis sativa
aataggccctttgtaatcattctttggcagccttgtaataaaacattttttagtgcaatacaatttaatttagaaccgaaaagtttccattgttttctctcgagttaatttctataattgtgtgatctaagtgaacttaagttgaatgtttatgctagattgaaagaaggcatcagcattaacaagtggtatcggagctcgaatactcaagaaattcaaaggtggatcttgatctttgaaatagaatcttaatttgtatcaaaggttcaagactctgctggatttgcgaatatgaagatgggaaatgccaagtttgatcttgaaaagtttttggcagaaatgactttagattatggagggtaaagatgagagctatgctagttcaacaaatgctcggcagctctaatgggagagggcaaacttccagtaggactgttctagaagaaaaagatcgagatgcttgaaaaggctcatagtgctataattctcaaccttggggat

SEQ ID NO: 41874 - DNA, 777 bp, Cannabis sativa
ctgctactgcggcggctgctgaggtggataaatgtgatttggtgggaattggatggttgtgatcgcaagcgtaggtgattatgagctttgtggggtccacacggcttctctccacttgttttctagcggggcaacccttcgaactactacatcgataatatcccctgtaaataaaataaacatttaataattatatattttctcgaaaataataattattctcagataggatcatatgatataagaagataatccaaactggagaagttaatttctacacaacagtttgaaatttacaacccaacaacggcgcgtgtaattctacgctccaattaatgtatttggataaatttgtcttttcctaatttatacacgtgagcatttaggtatggggggaagagaagattcggtagcattatgatggaacgttattctcacacgttgtgttggagcgtgagaactcatccaatgttcccccaacaactccttcaaagcgcattttagcatagccgcctccagattcaaaagatcaatcaacttgccggcacacacattacctggcggcgattatagattctaaccttaacgggagcaccaccacccatccagctcacgttagtacagatctttatttttaatttctattttcttaaaattaaagcagaaaaaaaaaatcaattatttttttgatagaaaaaaaaagatcaaatttaattaaggtgtgtcaaacgaaatttaaatagccagaaaaagaaaaacagatttacctgggataag

SEQ ID NO: 41875 - DNA, 1343 bp, Cannabis sativa
tgatataaactcgctctagtccttaattctctagctaaccaaccagcaagggacgaattattaagtttttcttttactttgaatttcagactagcgcatcattgaaattcacagttctgaatcctaagggaagaatctggactatggtagctggaggaggtgcaagtgtcatatatgcagacacggtatcacttctgggtctaagaagtttacctaattaaattagcatggctccctcccattaccatgtgatgaattaattatcattctttgttcaggttggagatcttggctatgctaatgaactcggaaactatgctgaatacagcggtgcacccaacgaggaggaggtactgcagtacgcaagggttgtcattgatgtaagatctttctccctcattgtcattctcattatgtacttaaccagaataaccaagtttcttcaatactacccttgtaagactcttgcacacacattgtcttactaatgattcaattccttgtccacagtgtgccactgctgaccctgatggccgcaagagagccctggtcgttggaggtggaatagctaactttactgatgttgctgccacatttaatggcataatcagagccttcaaagagaaggtgagcttattcgtgttcaatcttaaattcagtctcctcatttcctcaatttgtaattttgattaatgtggtattgttgctgctgcaattacttaggaatcaaaacttaaagcagcaagaatgcacatttatgtgagaagaggaggccccaactaccagagaggtcttgcgaaaatgcgggcactcggagacgaaattggcattcctattgaggtactacttatattattactatctaatctgcattctgaaacattttataaagtgaacatgcacaagaactctgaaatttgttattctttttgtgttgtgttataggtttacgggcccgaagcaacgatgactggcatatgcaaagaagcaattcagtgcatcactgctgctgcataagcttctaattcttaggatgtcttcttccctctgtattctttccactacgttttttatttcttaaatttttgtgtcgttttaactttcgttgtactgaaaacctcagaagaatcaaaatgtagtttttattatatccatgagtcaccattaatggagacccctggaatcgatgtatctgtttcacgataataaagatttttaagtgggaattggttaatgttattgactgttctgataagtcttgattaagctggtacaataccagtagctaaaacaagaacaatagcaagaaaatagagggaacttgtgtatgtattgatactaaa

SEQ ID NO: 41876 - DNA, 674 bp, Cannabis sativa
aattaaaaaataaaaatgttaccaaacggcaccttaaatagttatttgatttaaatttgaaatttaaaatatttagatatgttaaaaaggcgggattagtttgttaatgtttaaaataattactaaagttaaatatatgcggagttaaaagacacgtgtgctatatgtttgagttttggttcaacacttagattcaattgggtaactagagctgaaggaagcacgcccaatgtccctgcctataaataaagaacccttacattcaattgggtataaattcttgaccacactaacttatcgatactctactgaattgcttctccaagaaaatatatctccaaatcttgaattgccgaagaaagacaagtcatcgtcggtctatgaggaattgaggaatgaagtagggatgttatttatgataaagtaatgttattgggcactaataatgcctaacaactctaaatatgtcattttgcgattgaatatcaatactttttaaaaattattacgtttaattatataaaacttaaaattaatattaataatctatatattaatataaaagaatgcacaaagcattctaagtggtattttatatgaagttttttcctaattctttgttatctctatttttcacatttatttaatttttaaattactttttcattcaatta

SEQ ID NO: 41877 - DNA, 5323 bp, Cannabis sativa
aataataataacattaaaaaacaaaataaaataatgaaggttttacacttatttgggttggcatttccatgtgaaatcttaaagtatatgatttcttttgcttatttttctcatagagtgaagtgaaataccaaaattttatataagcttaaaagagtagtattaattgcactttggggttgatgccaaggtttcttctatgaagtcaaccagctagaaaaagggctttgtctttcatgacaaaatcttttataacaaaaacaacttttttctgcaattatttttgtttttctcctctctttaagatttgccatgaatgggattaattgacagtttcaaattcttatctaatgatctgtaaatctcatttaattttcttcaatatgggtagatttatttggctactcattttgaattctcatctctgtcaccattaatttccaccttacacaaaaaaaaaccctttctttcaagtctctctctttttctctttccatctctttctctcttacaccaatttgactttgcagcttcatcttaaaccaaaagagaattaagattcgaacccattacagtctccatcaaaaaggtcttgcctttttctattttccaaaacaattacaaaccagcattagataattttgcttaattattagctttctcctttcttcttccattctggatttggattttgtctctactgttttctttctccaaaaatcttcaaatggggttccataaaaaagtccattcaatctaaagattcaatctttttctgttttccaaaacaattacaaaccagcatttgaaaattttcctttctattctgggtttgtattgtatctttccaaaatcttcaaatggggttccataaaaaagtctaaagattcaatctttattgaaaaaacaatgtctagaattctactccaaagtgatgtaaagccttttctttctccaacagcagaagaatcttacttcttttctcaaccaccaccaccacctttaaacaataatcaaccagataatttcaacttcaatagcaaagtcagtccaagtatacttctcatcattgtaatcttagctataatcttctttgtctctggtttacttcatcttcttgttaggtttctgttaagacctccaaatagagatacagatgatctggaaagtgttagtgctcttcaaggccaacttcaacaactatttcatctccatgatgctggtgttgatcaatcctttatagacactttaccagtgtttaattacaaagcaattattggtttgaaaaacccatttgattgtgctgtttgtttgtgtgaatttgaaccagatgataagcttagattgttacctaaatgtagccatgcttttcatatggagtgtatagatacatggcttctttctcactcaacttgtccactttgcagagcaagtttgctccaagatttctcatcaaacacaaactgttccactcccattgttcttgttcttgaatctgggagtgaaagctctagagaaataatcacagacagagatgtctctagagataatcacagcagcttaagtgttcgacaaaatgccccaatgagttttcgcgaagaagaagaagaagaggacattgattattcatctgctaaatcaaccgagatcccacctaaaaatgaagataaccccattgattcaaccgaaaaagttgtcactgtaaagctcggaaaattcagaaacgtcgacggggttgtcgccggcgaaggaagcagtactactaacaccattgccggcgatggcggcgatgcaagaaggtgtttctcaatgggatcatttgcttatgtaatggatgaaaattcttctcttcaagtaccaattaggacaccattgaagaaacaatcaagcaagaacaagaaaccaaatcttccattgaagccgggacacagagcagctatatcagaatgtgattgcgattcccggagagaatttgagttcaccaccggagtagtagtagaagagagttctcgtaacatagttgagagcaagagaagagagagtttctccatatcaaagatctggcttcgttcaggaaacagagctgttggttcatcttcttcaagaagagctttctcattccggtttcccattcccaggaataatcataacggtaataacggataataataatcataataataatgtagtggttgtttcagatgaggatttgaagagcaagaacaatgcttttcctagaagaacagtttcagaaattgatgttggaagatgggaaaatggaagaagtgaattgggtttggatcaagatgaaaatcagagctgtaatagtttggattcatctcaatcaaatcatccatcttttgctagaaaaactcttctttggcttatgggaagacaaaacaaggttgttcattcatcttttgatcctaatattttttttttaatttttaattataattattctattttcaacacacaaaatttttagaagaacatgttctgtaacttgcaaggaaaaaaaattaggaaagataattgaaaaaagaaaaaaaatgttcattttattattggaaattgaaaaatgtttgtgtggaaatatagatttattcttttacatttgttttgtatgatattataatttatttaattattacatgtatttgtagacttgtattttagtttatttttgttcatatttagtcttttttttttcttttataaaatatatattttgaaagaataatgtcttttggtatttctagttgtttaattatgattatggagttgaggtgtttgttgacctagaaaatttttgagcttttattttgcatggttttctggtatataatactgaggagatgaaatggtgaataataaatatgtttttttagagaaaaataataaatatggttaaacgtacaagttggattcttttattttaatattattattatatatgatattgtatttataattatgaagcataataataaatgtaaagagaggtagctaggtttcaaattcaaattttaaaatcaatccattatatgctttattaattagtgtctctattattttcttaactttgatgtaggtagggtcattttttaatttaattatttattcaaaatgtaacaaactaataagaattattaatggtattaattatttgttttcttgtttttaatttgtatttgaaaatagttaattgtattaaaataaaacttgttcaaaattaatttatgcaaggtcatcaatcattcatataatccatttagtagaatttgatattttaatatcaaaataaaataaaaaagaataaatgaattaagtgtgggaatggagtggagggtgttgagggctaaaagaagtcattaaaggctgtgtttactgtttagtacagttgggttgggtgccattgtctagcttttataaggggcacctaacatttctctatctatttatgattacaagtaaataatctcttacatattaattttattgtccctacttaatttattgaactaaagattaatgaccaaaataactccctctactttatggatttttttctttttttttttggggttgaatattcatttgaaattttgtgttttattattttttgtaaaaaagaaaatttgtgttttattaaaatataaatttagtacttatgtttttaataatgctcctttagtatgatgtgtgtttgtctaaatacttacagctcatttggtttggtgtaattaactttggaatggaatgaaagtttccattccaatatttagtttatattattatggtgtgcccacacacactaacactaacactctcaaacggacgatcaccaaagctactgattgtagttaaatgactctataggagtattccatcaaacggacgatcaccaaagctactgattgtaactttggactttcaatagttgttctctgcaaaagattttcgttccccatggcagacaacactctcagccatctctttgaggaggcagtgcaagtgactaccgaagatttaacctacaggcttgacccaggagaaattgatactcaagaaccgcaaggtaaaatacttcttggtaaacttatttgcaaaggaaaacttgggagaactgcaattgcaggaactctcaaaaaggcttgggcttcattcaaaggttggagttggaaagaggatgatgacggcattatccacttcacctttgctacgaaagaagatgcttggaacgttttacaacggcgtccgtggattatttgtggagccttgctcgttattatgccatggccgtcctggctagctccatcagaagtaaagttcgacaagactcccatctgggttagaattagcagcattcctccgttctattggaataaaaccaatcttgaagaacttgctgctaaagtttctccaaattataagctacctaggtacattgactttgagagaggctccttcggcatgggctcagttagattccgtgccaccatcgacattgacaaacccctattctcaggcttcttcatgaaacgggaaaccataaaagacctttggatgcaattcaaatatgaaaagctacccaaactttgcctcaaatgcggcatcatatcccaccctcaaaagttctgcttcaaacctcctactgttatcaaggattcccaaggagcatacttccctatgtttggtacctggatgaagcatgaggagccagcgagatcacccttttcttgcccgcttccatcttggttcgaagaatggatcattctaaaacgcctcacggtggatcaaaagtttaaacaacaatggaagatgaatacctctctccagattgctggttcctgggaggcacgggagacaaggcgccaactccccggaaagagacgattggtggaacaggtcgtggaagagctaccggagacgaatgaactaagggtaactcgatttccgatggtcaccctgccgggagttggtgaagtttgcccccttgaggatactgacaccctggtagtttgcaaaaaccctgaaaacttaccaattccggatccacaaaaggacaagaatgatggcgactccaccatcgacccccagacatcgaattctgaacacggtggtaccatcgcatgcgcttctactgatcaagcctctgaggaagctctccaggtgcaggcacaggttcttaccccttcaagctcatcacactctgattccctccctactgaacctgcctttcgccccaaacccccaacggataattctactctcaaccttattccaaatcctttgagtttgggccgaggaggaaaggccc

SEQ ID NO: 41878 - DNA, 4106 bp, Cannabis sativa
ataaaatgatttctgatcttttattaataagtaaatctgattatattaaaataagttttatttaaggcacaaaacccaacaatattgcctataacatcgcaaattttttcaacattagtcgagaaaactcttcatgtgtcgccaatttttgttcagtctcttccagttttgtggacatcttaacgaccttagggtttggttcatggtgctcatctctcttattgacatcatcatcttcttgatccataggatctaaatccttagacttgttttcttcttctccttcatcgataagtttatcgtgaatgtttgtttcatcacgttgatatgtccctttttggcgactggtcaccttagtgggatcttcgtcgagctcaattttagtatttagatcaacatcatcttggtaacgaagaccaaattttgtccgggtgagtaccataatttcaaaacgtaatctttgatagtaccactgctttctttagttctcaatgaaagcatcaaaatatttaccgaattttttaaaaaaccaattattaaatataggagctcaagaaaatactactaagaatggaatatatgaagaagacactcaatgtttttacgtggttggggtgttaatgagcacaagtcaatattattacgaagttagctaagaaaggcctttgggattacaataagtatgagcactctattcttttcctgagtaagtaagtcaagacttttcaaccctttgcatgaaggatttcaatgagtatttatagtattatagaggtcatactagttaccattttccctctaatggggagtttacaaataatacattgacttcgggcttaacggtgaagcccagcccatgagacaccttgtgtttgctgacgtggaagccttatcacgaagctagctgttcatactgtgtcatatattcatgggtagttaatgacatattaattacctgatttccaattatatagtttccttttttagcaagatattattctctgcctgagatttaaggaaaataattccttattttgtgcgagacagtaaatgggaggctatattaggcttctggatacacactaaagatctcttccagatacacggagatataccttttcggatgctaacttggcttgactgaacctcacttggacgagttgtattgatgttttctcataaggcaaaatagatcctgggcttagcctagtttatattatttggactcatcgatgggccttaagcttatatttagaatccacgtgtcccttactggaaacccggataacaggtataagtttagtttagtcttgtcaaagtgatttgcatagtacattagaatttataagttcaaagtttgactcactaacttgagcgacaatttaattttcaaaaatgacgtataatttttttttaaattgaattttaagattattcatctcttaactaaaagaacgcaattaaaatttttaaaatcgaataaacgagctaagagttatgtgcgatttaagtaaaaaaattgtattttgccactgtgcctaaatggttaaccgttggcccaagaaacagttacccatttgtaaaacgatgaaccgtatttcgttgtcccagatttgcatggatttaaagactaatgaacttataaaaaaatgtgagcttaaagactattaccgttatttttagagattaagtactaatccacttcaaaataaatttattttttaaagacttttgcctcaaatttctaaaataaataaataaaatattggaggtacttttgacaatttgaatatgaattggcgctacaaataaataagcttaagtacatttattgggtacataacattgtcaactttactttaggacatttaggaaatgactaaaatgtctccttttcccggatttactaccaccaaaccaacataggcatttcgtacttcgttggtataaacgtactttaagtaacaaatcagtcatttcacatacgaatagatttacaaatattgcatttgaagttaaacgctctcaactccacaccctgactctactttccccaccaaagaagaagaaaagaaaatcaccagaagatcatatcattccttgtcagtttttttttgacagaaatggtgagttgggtaatctctgtatctatcctcatcgatctctttctttgcttttcaaatcttgttctaagctggatctattgttttttttctcctcttccatttagatggaagatccagtttcgtacatctaaccagatagggtttcagaattttgaaatgctcaaatgtggtttctgttttctaattcaattggttatgatttcttcgaaccacaatgcaatgtcttcccagaaattttatcggttctacagctaatcttaaattcaagccattcattagtagtcttttttcttctctttcttgggttattctgtttatgaactagtagtatggaaacaattgatctattaaacaattggtatatgttaatgtttggttacgttttgtcgtttgcgcttaagtattgcatgtgatttgtttcgattattaatcttgtcaggacggtcacaattcagaggatacaaaggagagtaccgcggacatgtctgcttttgtgagtaccttatttctttatgaagttggaactttgttgttgagcaattctgtgtcagttagaattcgttaaattttaccttatcaatcttttgtcagattgggattacatacaatgttatcaccacaatacccttaaattgtaaaatacttatcatgcatttaataatcattggattaacattgatatagttggtgcctattgcaaggatgttgttagccataaaacatgtaccaaactcatatgcatacctccctttacgtgcttccatgaagtatcaaagccatatgaagtgtctttttcgtatgaaatgccttcctccttgaactattcaccaacacctgtatataaatagaacaagaacataatttaattctcaatcacacatagacttttacatggtataaggatttgaatcccaaattttctttttcatacatctttttcctctgaaatgtttgtctatatgatcgtttgttatagtcatctttagattaattcctttcccatcaatgttttgtttgtttactcgcttgtttgttcactcattttacccaagaggggtagctcaaatggtcgacatgtggtttgctcccacaaggtctgagatttgagtccctttttgggtacctacatagcaattgctatagtttcttggtccccaaatattgtagggttaggcgggaatcctagttaaaaaaaaaaaagaaagaaaaatcaaggatcaaattcaatcagatattgagatttttttagcatctgaatatgtagtttgggatatggctcaataacataactattttgtgtgttgaactcagtaaaacagaagataggttagtataatagtatgtacatgaattttgttgtaaaaggacatttatttggaacaacttttttgagactgtatacttgtatcaaaatgctcaaatggcatgctataagtggaagcacacgagggatgtatttcaatgtggtttggagcaatgtacttcatattgaaaatgaatgactagataaaataacgtttaacaaactaatgacaacaaacactcatacctaaaataacagagtaactaacgacactagttattgctgtcttgacaaatggatttgtcacatgctttatagctaacatatccccttgagttaaacacttgctgcctatctgagttcaaccattccaaatgccatataggcttttatatggtcgcagcagctgcagaagaatttgaatctcaattttttttttcgtatttgactctgtttgataatttttattatcatattgattaattattttttcatcattgttcctttattcactcatttgttttatttgagttattcatcatatcaaagataaaattctttagttaaaatattgggtccaaaaaagaaacgaaaaatgataagattgtatatttttgttgaatgtgcttttgaattaacaatttaacagtatatcaaggattgacttgcatatatat

SEQ ID NO: 41879 - DNA, 1298 bp, Cannabis sativa
  modified_base (242)..(262): a, c, t, g, unknown or other
tactcaataataagttcaataagggtttcaaaaaataaataaataataagttcaataagaaagtctattattattattattattattattatgaaaattttcacaaacttgctaaaaaaatttaagaataaaaataacataaaaaagtgaaaagattatatttttaataaataaaatttaaaaatttgtaaaaatatttaaaattttgtacaattttatatttgtattattattattattannnnnnnnnnnnnnnnnnnnnttattattattattttttgtatatttttaaaataattccttattattattgttatagaataatatatgtccaacacacaataacatgacagatattttcaatatgtattgatatttttacacattattgtatacattattatttctcatttatgatgatactttgacacaactttacttaagtaatacattaattaattatccaacatgtttggttggaggagtccacatgtctacttggacacgtcaacgtagggtctttaataagcatttgaaagaaaaccaaaacatttatataaagattaagagcccctaagattaatgatagtttacacatatattgatatttgtatgaaaaagttagaggtttttctattttttactttgaagtaattattattttttttacgaaaatttatatagaaattcatataataattaatgaaacaatttaaattgtaactaaaatacacaaatcaatctatataaaaatgacaggaacaacttataacggaacaactcaaatgtaaattaaaaaaataattaaaaaataatatttaaagtaattccctattcttaattagtagaactcatctcaaataaatacaattaattaaaaaaaataactacttaagtgtgtattaataattttttattgtctacatatcattacttttaattaaataaacaatgcacacttaaattatataaattttcttacatattatataattattgattttatgtttgttgatctttagtgagccataacaaaatctcgttacttatttagaaaaaataataatatttttaaaaattaataaaacatatgtatttttaaaaagaaaatttttagagagtccctaaactaaatagaccttaaggccaagtttaatttatttatgctcataactaaatctgatattgaaataaatgacaacgacctttgtaaaaaatatgtgccttagggcattagtggatgatgaccgcgaggtctatttatttgttgtaatttttctcatgttagtaggacttgt

SEQ ID NO: 41880 - DNA, 1363 bp, Cannabis sativa
aatgataacatcaaccacaaaacgtactcacttagtttattgctccatgtcaaacctaaaagtttagtaacacaattactcaacattcaatataatatatatcgactacaactgacaacaaatagttttgaaataatatgcaattatatctttttgatatataaattttttaatttctaattttatctttactataatattggaagatatttttgtaaattttttatatttttacgttcatttttttaaaaatatttttacggtacgtattatataaaaatataaaaaaataacatataagttacaaaaaaaacaacataaaaaataatatacaaacaacaaaataataagagtataacagaaaaatatactaaaaaccgtattttatgtaaataaaatgtaaaaaatcgtaatttttgtaattttttttttgttgtttttgtgttttttttgaagttatcttttttttttactttcttttttagataaaaatttgtgtgatgttgtttgtaagatttttatatgttaaactaatatctaatgtatttttttttttatatagaaattcaaaagaaaagttaatatttaagatttatgaattaaatttaatatattttaccttttattatttaaaaaacataattttttttccttcattatattgtttaacaatttccttttctaattttattgacgtaacgatcactaagcaaaatacaactgcatgcaaaattcaatttgtttcagtttttaacataatttggattaatttctgaaaaaaaaaacaagacagatacgcttacctttgattttgatccaaacaaaagatgtcattgccaacaagtcactatattttacagttgagatctatatgagacatttttaacacagaggtattagctcagaatttgttttataaatatatgtattataaacaaacagatcaataactggaaaaataaaatagagtatatatgattatttgctaatatataataagtggacgtagctaatatatatttgtaactaatcaatttaaatatatcttatattgaataaaaatttacagtaaaattaacatgttaaaaaaataaatttatttaaagaagcacccatctcttaactgagactgaaattgataaagaaagaaaaaaggaaatgagatattaattcttacagaatttggaaagaagataataagagatagatacaatgaaatattatggctaggaatcgatccaacttagacaaagaaaactaatcatatgatgtagtgatattaaaacccattaattattatatgactaatatattttcgggaaattctataatgcacctatttgaaaggaatatatcgatacat

SEQ ID NO: 41881 - DNA, 4779 bp, Cannabis sativa
taattctctctcaattctgtctaaattgcattcgagttccttggataggttcagttgttgaacctgagtctgttctggtgcatgaaagagacacctactggtgtgatcaaattggtgtttgctcaacaaaagggataaaaaattaacaaatatacgaatacatggagaaatgaacttttatacggtattaaataattaaattacataatatacggtgttttcatcttagacacttttgttattctctgcccaaagaatgacagagacgctaatgttcttgggcaaagctttttgaaacaaaaaattaacagcaacacaaagaaaaatcctaaaaaaaacatgcctattcgattagtaaggttgacaaaaacaaaaaaaaaatatcaaaatatgtcaatcgatcaacaacaaaatctcatagaataaatctgcttaaaaacatgtatgatacatctgaaacacaaatttcgaaatgaactgagtaagatctatacaacataatttgaaattatcatttcaatgttgtagatcatacaataaagagttgaaaaattattaatctaagcttcctactaaattaaaatttatattcaaaatagatatgaaacatcagaagcacagaaatcgaaataaatgggctaagatctatactacttaacctataattgttgtttaaatattacaaatcatactagaatgacttgaaaaattattgatcagagctccctgtcaaattcaaaaacagttacaaggtattagattactacataatatataaattaatttgataattactaactggataatatgcagaggattgcttgctaatgattgaaaaatttgatttgaaaaaatgaaagaaacatatataataacgaatgtttattgttgattaattgtttaatttatgtaatttatttgtatctactcatgtataatatatataattgagttttatatatcttgaaacgttaatttgttttggtcatataaacatataaattgttgatttattgttaataatttagaacaaaattgatttccttaattacctgttagtaattataaattttgttttgataaattttttaaaaaaaataataattttattgttgattgattggttaatttatgtaattaaattatttttatatatgaaaaaaaaacaatttaatttaagtttcataaaaaatgttgagttgatttgcaaaaaactagaatcaatatttattctagttcaaagtaatagatattgggatgagaacaatcagtacattggtttcgaagctactgggatatgcatccaagaaaactacaaatatacaaaattagtgtacaaactgtttagaaagcataactgtaacagaaacacaactaacctacaaatgcagtttcaggtacaatctagatatccaacattaaagatcacggatgatgaaaggctagagttttacttgcagttataatcaagagaacaagacatgacaaaatatcctttgtacataaacatggtccccaacacaaataccacttttactgattgacagaggggaagaagtccacatgcttgaatatgatactcaattagggggaacaccaacacatcaacaaaaagaaaacacaaaagaagataatgatgcattgactttgttgactatgcacaaatagttgctgcagaaatgatacaaaaactaacaagacagacaactaatcaacaagaaatcaacgatgaagaagcattggtcatcacagataaacaacatccaaaaattgaaaaaggagagatgtacaaagataaagaaacttcgaagagcgtcctcagctactttgcaataaaataacaatttcaatacaaggtaaaaaaaatattgcacaaaagaatttcaaattgagtgtttggataaagattttaagtggtcactaagagcgtcaaggaatggtgcaacagataatttcgttttaaggaaataaaatgaaaaacacattttctcactaagcatcaaatttggggatcaaaggcaagcttctgcaaagatataagggactgtgttaaatacaagtttttgaacataaaaacaacaaccacaccagcaaatattagatttgagatgaatgataaatatgggttacaattaaattacatgaaggtgtggaggagtagaaaatatgctcttaacatagttagaggaaaagtaaaagagtcttataagttgctgcctagttatttctatatgctccaaaaaaacaaacccaggatctgtagtgcacatggaaactgaaagaaacaataacttcttattttgtatcatggaactagacacttcactgaaagcgtggaaaaatgcggacctataattgtagtagatggaacttttctaaaagctacatatgggtaacactactaacagctagtgcacaagatgcagtaagtaaaatattcccactagcttttcgtgtggcagattcagaaaatgatatcccatgggaatggttctttgaaaaattaagagcatcatttggtgttagacaggaacagtgtgttatattgatagacaaaaaagtataatcaaagcagtccaacaaatcttccctgaagtagaacatggattttgtgtgtatcacctactcaacaacctgaaaacaacaataaaaaattgcaaggttctttgaaaatcccttttctcgtacagcaaaggcatacacggctcaaaaatttgaaaatcacatgaaagagctcgacgccttagacaaacgggtcaacaatatctacaaaatattaggtatgagaaatggtcaagatattattctaaaaacaaaagatacagtaccatgacatcaaatgttgttgaatcattaaatgcagcaaacctagcaactagagaactaccaataacaacactaatggaggctttgaggactttactccaagagtggacatccaaaaacaggaaaatgacacaaggaacattcacaaaattgactctagctgtagagatgaaaatgaggggaaactacaaagctgctttgaaattaaaggtacatgattttcaggaatcataattacatcatgttgtattaatattttttctatgtttcaatgataagatatacacaaaatatatttgttttcatgttagagcatcaaatgaacacatatttaaagtgtacaaagtaaaaaagataatgggtggtgaatctagaagaaaaaatatacacatgtaataggtttcaaatcgatgaaatgtcatgtgcgcatgcttttgcagtgatgaaagagatgtatctcgacccacacaattactattcagaatactatatgacaaacaactggctcagaacctatgaagcaatcgtatacccagtaagaaatcagcgcaattggaacattccacaagaaattaaagatattgaaatattaccaccacttgaaaggatgaaagtgagaagaccaaaaaagaaaagaacaagatcaatttgggagacaaaaacacaaaacaaatacacaaaatgtggaagaaaagggcacaatagaaggacatgcaagaacccagctctagactgaatcaacaccagcaacaaaatactacaacaataaaaaagaaacatgaatacaatatttttatagttacaaagagcatacaatagaaacaataaattttaaagagtgattgctattgaattgattaattgtgaatttgaatacaattgaattgataaactgtgaattttattttatatgaattaatttgatattggataggttaactgtgaattttatcaaaggacttgaatactgttgcaaaaacatgaaaatttggtgttaatgttgtttactttaaacatattttatatgatatggaattttttttctttttgagtttaagaacaaaattataagtcacctcgaaatcggtgttcagttactgtgtgcttgagtaaaactttaagcttaatttagctataagcatgtaaaaaaagtattaggaaatagagaacatgttgattttttgtttttaagttgtataaaaaatattgataatcatttaaaatgctaacaaaaaataataaacagttattcataactatacataaaatctacattatataaaatattaagattccataagaaaccaacattgttgtagttcaggctaaacaacacaaaaaacataaaaatagtcatgagtaagaaaccaacattcgttttaagttttggctaaacaacataaaaaaagcctacagcaagttatcaacatatgttattatattctggctaaacaataaaaaataaacataaacaattttgcttggctttaaatcgcttggtttttctttcgctttcactctcgctttcgccttactcttctttggagacttaggtgggctttctgacttacttacaacattcttaacctgtttcattactctaaacttgtttagcaacacaaaaagccttaggcgatactcttccatatcaaagtcagcaggaatattctttccttcaataaaatactcagcaaaagcagcaacaaacgccccataatcactaggagaaacaaaaacaagaagcaacataagacataataaataacactaaaaatataaaagaaacaataaaatcacatacttatccacttgtttatgaagtacttcagcattgacaatagggaaaggagcagtaggattcacagatgttggtaaagaataaagaagctcattataaatatccaacagagagaaaaactatggcaacatgacagaataaggttccaaagcaag

SEQ ID NO: 41882 - DNA, 1042 bp, Cannabis sativa
agaaatttgggttgtgagggtttaatgaaaccaaaacgaaaatattgggggttttgccgccatttaccttagtttgtattataatatatacaaagggtatggggttggggacctcgaccccagtcccgaaccccagactaagtctcgtaccttggaccccaacctagacccgaccctagtctcgaaccccagacctagccccgaaccttgaacctggccccaaaccctgacacaacactggaccccgaatcctgaaccctaacccgaccttgaacccaagtcccatccctaaactccaaatccagacccgacaccgaacccaaacccaacctcagactcaaaatctaaacctcatacccagaccccgaacctcgacctagtcccaatctcggacttgaaccccgacatgggcccagaccctagacccgaccccagacctggacttggacgggagtcggagttcgggttgaatttattgtaaagataatatttttctcacttattaatacaagttaataacaaatataatattgtattagatactattaatacaatacaataccatacaacataatacaatacaatacaaccaaacaggggcagacctacatagaggcaaggtggggcagtcgctcccctaaaaaaatcagaaaaaaaatatatatgcattttagctagttacaacatatatttataaatgaaagtgatagttacatattactttagtatataatggagtttatgagtctaatcccaaatctagcatgtttactttagtatttacatattactttttgaacctctaccaataaaacttacatttagtgtgaacccaatatttttattgttattattttactttatactatatttaatattaatatataaatttatattaatttttaacatgttatacaatgtagaaaaaaaaagacgatcccctcacttaaaaaaaaaaaaattgccccattcaacttaaattctgagtccgccactgcaaccaatcgagctctctaattgatttttaatttaaggttaatta

SEQ ID NO: 41883 - DNA, 1365 bp, Cannabis sativa
aaaatatttaattttatcacaatctatataattatttatcactagagtactactataatttaataatttttgaaaactttaaaattgtatacgtacattaatttataataatacatatgttataaaattcaaaaccaaatcgtgtttaatatgtatatgtatttaaacaaatgcgtttagacatttgtagtcatataaagattgatccgacccattaaatcaatagttttatttaggtcctaaactcagtactactactccttttcaacagaatatattggacagtaatgattaatggtctagaaaataataataccacaaatttgttggctgttggggaagaaaaattgaggatacaaatttttttgaactgacgttgaatatttctttatttgattattgtaatataatcaaatgaagtctattgaatgattcaggagatcgatcaacactaacatctcattattatttgtatttgaagaagtcaaaaaggattatcattattcaacactatatatatcttttaagtcattagatcagaaggtcaatttcaaatcacaaacatgtttgccaatttattagagttagatatatggaatggataatatatctcatctcatataaattataatataaacttttttttttttttatatattattgttattgttatatcatttattcttaaatttacctcactaaaactttatgagtaaactcgctaagaaaaatctcaaaataataaaaaaagtatcaaaataatattactaatcaataaaagtccgtctacaaatagatactaatataactggagttgccatataaatggaattgcttattgctactaataagtgggcaacactattagtaggataatcaaaaatcaaaagaaaattaataaattagttacaaatagaattacaatattatgatgattagattgtatgagaaaatttacattatattgaaaatcttatgtaataaggattctattacaaatgattaaataaattaaagttaagataactataatattctctctttatataaattttgaaaaataaaataaagacaattttaattatttattacttatttcaatatttattccaacaacaaataaaatataataatcaatttacattactattttttatttttatttttttttggtaaaaattcacattactatttttattctattacattactattattattatcattaccattatatatcactaaaccaaacacctaaattagtaacaataagagaaattattgttatatcatcttaaatttccattcttcctcaaactctcaatcaaaagacttcttagctataaaaacaaaagaaaaattatt

SEQ ID NO: 41884 - DNA, 1467 bp, Cannabis sativa
gattggattggatcggatactttgtgaacacccctaggctgatctacttattttaccctagctactatttgtcacacatgtgcaacctatattttttatcatgtgaaaaaataaaatatactctttctttggccatatcaaataagataagactcacatatataattggatcccaccaaatagtattttttctattttcttttttcattttttgtttctgttttttttcctaagtggggtcacaccttatgagtaatagtatgaatttgaccaataatattttctttttcaatctttgggggtccagacccttaaatgggcaagagataagtaccacttaggcatcaacttgaccaataatattgttctttttttcaatgaatattttcttttgtttttgttttataattcttggaataagttggggccctatgtttagctactacactgacatgcaatggcataataataataatggaccatagttggaccatttatttattcaatttattatcttttgtgaatatttttttggtaaattaaaaaaaaattacaaaaatacaattatataaaattataaatatttttatatatatattttttataattttatttaaaaaaatcggcattttaatatatttttatattgtactcttattaatttattattgattttttgttatttttttattattgtatgaatgttattttccaattatttttatatagttttcttattatttttataaaaaatcttaaaaatataaaaaaaaatctttaaacgtaactttatgtaattattcttcaatttctatactattggacaggtagtttcaaatgaagcaagggcaatgtacaatgtagggttagctgggttaacattctggtcgccaaatattaacatatttagagaccctagatggggaagaggccaagagacacctggagaagaccctctcctctctagcaaatacgccgccggatatgttagaggcctacaacaaaccggtggcaaagaccctaacgggctcaaggttgccgcgtgttgcaagcattacactgcttatgatttggacaattggaaaggcattgatcgctaccacttcaatgcaaaggtaataaaaaagtgtatcacattttatggcattactattatgcattagtggtgcccaatactaccacgaagtagtgtattgtgaataactaacgatttttcatcatattttttatataattatttgattaatattgaaataatactttattattattgttttatttttgttttttcattcaattataggtttcaaagcaagatttggatgacactttccaacccccattcaagagttgtgttatggatgggaatgttgctagtgtcatgtgctcttacaaccaagttaatgggaagccaacctgtgctgaccctgaccttctctctggtgtcattagaggagaatggaaatt

SEQ ID NO: 41885 - DNA, 3832 bp, Cannabis sativa
tgaccttggctttagagggtgccaatttacttggaaaataaccgtttctcaggtatttttactagagaaaggctcgattggtgtggcgtcagatgattggcttacttcctaccctaattctgaggtaactaatttccctatatctgtttctgatcatgggtttattttggtggttacttgtgagggtaagaagcgaagattcaaaccttttaagttttttgaggcttggaatagggacccttcatgtgaggaggtgattcgaagggcttaggattctagtggtcaaaatgattcgcgagggattgttctaaaatgcaatgctactaggagagcgttgcaggtttagaggaaaaattcctttggtgattgtgatttgaaaattgctgagttggaagaaagattggcatgggttcaaaaccaaccaatcactactgctctatccatagaagaagtttctatctgtaggaatttcaaagaactttggcttaggaaggagagtgtttggagacagaagtttagatagattttacttaaaatggaggacaagaactcaaaattctttgacacctccactgtcattagaagtagatggaataggatcttggagattaaagatcaagatggtaattgggtgtggcaagagattaggatcagagctgtgtttaataatttttttgaagttctgtacaagtctgccaatccctgcatttctttggatgaaaatagggaaattggcaaagtccctttggcggatgatattactagtattattgttgatatgctttttctgaaacctccaagaccggataggcaaccaggttgctcttatcgaaggtattagaacaatattggagactgtgtaatcgatatgattcagaattttttctcttcaaggaggcttgatcataatctcaactacacctacacatttgtttgattccaaaggtgactattgcagacttggtggataaatttaggcctattagtctgtgcaacttaggctacaagatttcctctaaaatcattgctactagattgcgagtggttatggataaactgatcttgccagttcaatctgcctttattcttagttggtgaattgctaagtcttttgtgctttgtcaaaaactagtcaataccattaagaagaagatagaaagggagggtttgatggctttaaggatcgatatgcacaaggtatttgacaagattgagtgaaattttttggatcgggttttgagggcaaacgattttgatggtcatgtttgaaaaatgatcatacttgtatgtctatggtctcatactctgttttgataaatgatatccctcaaaaaaagttttctcgaaggagaggtcttaagcaaggggatcctttgtcccctatcatgtttctcttttgcaatgaagttcttgcaaagttgttttctaaggaacaagcagaggggaatctccacaatattaagatctcaaggaatgccccatcgattagtcatcttatgtttgtaaatgacacgatcctttttgctcgtgccaatgctaataatgccgaagtgattaataagtacatcaacacctatgaagcttggtcaggacaagagtgtagtaaactaaaatccaatgtttgttgtccccgaatatgggcatttgtaggaaggaggagatcctaaaagtcttaggagtccaggagagctcaagttacaaaaagcacttggaaaatctctttgttttcaaaagaaggaaaagagaagagtataataggttgaaagatattgtgctaaaaaagcttgagagttggaaaatcaaactcctctctttcccaggtcactttgttagttagtggcattgaatattcccctgtacaccatgtccacttgtaaagtccccatgtacagagttggatgccttatttaggaagttttagtggactagggatatgaaaaaagagagatctaaagtcacattaagatgagataagatgtgtcgtcctaagagtcttggtggcttggggtttagaagattggaagacaccaataaggctctgctttcgaaatcagcgtggcacttggccaacgattatgatatgacaaattatgggtgaaatgtttggctgccatgtattgtaacaaaaagtcttcttgggatactaaggtttgtgaaaatgattattctttgtggaaatgtattctaccatctcgagatattttgagaattggtagcatgatgattctaggaaagggtgacaaaattgacgtgtggaaacaaccatggatcccatggcttagttttaacgtgtttgctgaccttatggaaagggttagaccgtgtttccctagtatgaaaacggtggcagatctcttggttaatagttctgaatggaatatggctagatgggaagaaatttttgaaccagagttgggagaaaagattggcttaatcaaaaggctttcaagttcgtataaagactctttggtgtggaagaatgcagctgatgggtgcttctccactaagagagctaattatttggaaagcttaagattagcaggggatcttggtagcaggttttagaagctaatttggaataacaatattcattttagactctccattttgctttggagagtgtttgccaggagtcttcctactagggataagttggactttattctatataagtcttgcgtgctgtgtgaaacagaaatggaaacccctctacatttgttttgggagtgcccatttgtaaaagctctttggttctctggccctttcctgaatggtgtgcctattatgagcaagatagagttaaaatatatagttcaggaggggctacttttggatgacaagtggaaattcttcacctatgctggctatctttttgagaatatttgggatgcaagaaattacttctttaaaagtaacatactagatattatgacatgtagattaagagttaatttaagatttgaggagtccttatcaattcagagtattattgcagaagatcagtttgttgtaggaaactcaattactttgcttatttcaaagatcccgtccacttctagttctatatatatgtttgactgatgcttcttggaaagatggggtggcgggccttgcagtggggaggctagagaagatgccattgcctcagatgccctagtggtggtgaaggccttagagaagatgcagttccctccttgttggaaagctagacccctgattttagaaatttggaatcttgcttgtttttttttttttttttatgtctgtaattgtttttattaaagagaattgacaatcaatctacggatagtgtagcaaaagtgaccaggagtaatggtcattttaatgctgtttaccatatagggagaggtcacgtgttgtgatagttatctcttcaactgaactgtttgttctttcaaaaaaaaaaaaaagaaagaaaattccaagtacaataacataaatttctccgaaattgacatttcacaaatgtaacaaagtcaattggtctgcacaaaacaacaaaatcgcatctacaaagcttaaggctaaaagataatattatcataagtagatatagaaaatgaatgctttcatccggtttgaaacaattcacaagttaagttgccataacataattactgttaactgaggtgaactaattagttgtctgatttaatttttttttccttttgttataaagtatcttgacaattgctcgtgacatcaggtcagaatactgtcatttccctaaaatcattgtttgaacctgaatgttcctaaagttttaactaattacaactcatttcactatacagttttaaataaacgaaaa

SEQ ID NO: 41886 - DNA, 1082 bp, Cannabis sativa
  modified_base (32)..(36): a, c, t, g, unknown or other
ataaaaatttatttatataaaatatctatatnnnnnttatttttaaatatatataatattttaaaattaataaagaatattctgttaaataataagatattctgttaaaactaacgtacagccaacacttcgtataaaatagataagaaactggactcgtgttacatacacttcacaaaaatacaaaaatattggggacatagggatcttttgtgctataatattgttgttgtcttggacacaagtgaggagccgtacatataatgagaataaacgtctaatattgaattaccaaaataacattggtctcaaaattgctttaaatttaacaaatccaaaactacacaccttcaacttttttttttcttgaaaaacacaccttcaaccttttgattgtttgacaaaagtaactaactctacatgggcgtaagtgagtagctgatactggttgttctttgttcttttgagtggtttcttcataacctcaacctaaaaaagcagcaaaattttttattatacaaccaatctaaccaaaatacttcaagggggttgaggttagaaattaacatggctataataattaacaaaaaaaaaaattacttaatacccataattaacaaaatattgtactaaatactcacaagataacatatacacaaatccaatgcaataaaagaaactccctctttcaatttcattttagctaaaaaaaaaaagaaaaaaatacttatctacacatttatacatatttcttaaatataatgtgtatatacagacatatatatttttttattttctaattgtttaaaaacaaaaggaaagtaataaaaagagcataaaagtatgattttatgagttgagtttgtgaaatatgaaagataaacactcatatatgttaaagtatttctagagaaacataaacactcgtaagcaccttttttttgtttttgtatttaaagaatattaaattataatttttttagatgttaagacaaataattaactagtgttcttttgtatataattagtttattattctattatatttttgtgtgtacatagaccccacttggtctcctttg

SEQ ID NO: 41887 - DNA, 3330 bp, Cannabis sativa
tgaaagtaaatgatggtgtagctgccaaggatattaatgcggaaatggtaattgttttagggagttcttatgttttgaattatgagctataagatcgattcgataatgtaaggtgttattttcttttggtgtagtttaataaggaagcagggcacattgtcgaggaatgcaaattgagagtggtttatgtttctcctcctcaaccaccgtctccggtggcagaaggttcggaagagggatcttcaccgaggggatctgttacggagaatggaaattctaatggtgctgagttttccaatgttagtggtgctctagtcaaatatttttgggatgagttgttatgttttgtttctcatattaaaagataattaatgaattcattccttttactggtgatcacaggctgcaagggcattggctgatcggcctgagtttcaagaaaaatctttagaggtaaacttaagaggagagaaagaagattattggaatttgtaaaattatttttggtttatatttttcaagcaaaaactcaaattctttgcatatgggcaagcaaaattacacaccagacacatacatattaatatagagaatcggtatttattgtggtaatcttcttctttctgtttaatgccatttttctttttgagtatgactttgacagtgacagaaaacatgattattccatttattttaattagctgagtgttttcacctttttttttcttttcaaaattggctttaataggtaatggctgatttgttcatcatcacaagtagtatttttatgttttaactttcctgtaaatggggaaacttttgaaaatgaaattattgcatgttaagtggtaactctattgaagctgctacatcagcatagatgaagaagtatgtgtagttctcataatttaccgtagcttttcgtctttggcgtagcatattttaatgtgttgctagagtggttagtatacagcatacttctagggagatgctgctgcttttttgcagtttcatttgtgctctgtattttatttttaataatgtgctacacgatattgttttgtttacaattgtttacgtaaattgcaggcaaaagctcttatttcgagattgactgaggaaaagaacaatgcagttcaacaaaataacaagcttcgccaggaactggtgaggccctattatgcatattcttttgaagaggattatacatgattaatatatttctcgaaatggctaaattatacttgtttatttcttcctaagaacgggtttagattgtcaatgttatggtagaatcaagccaacagatacaacttgggcaatctgcataagaaatacaagtatcatgtcttgttactcctgtaagaaaatttgggagggattttttttgtttagtggcatatattttttccaagcactggtttactgttgtagatcatgaactatttcattgggtaaagggaagtggagaaggttaatcggagtgtcacatccatctggtattgcatctgagaatatgtaatactttaatacatgcttctttctagttaccgtatgcccatttgatttactagtaaattgtcctttctttcaatatatcttcagattattccttggtttgggtcgtttttttgacaagattactgtgtgtgtaggaacttctgagacgtgaaagcagcaaaagcagcagtggtggtatttcaatcatgtttgtcatctttattggcttgcttggcataattttgggatatcttatgaagaggacgtaagcaagcgactactactataaatggtttggcatactatttccttatcgattccttttctgaccccaaaatcattgaagaatgaagaggggaccgagtagaaagtaatcgaagaggaagggtggtgctttgtgttagttattagccatgtgaaagtaacaagtttaggtgggttcatcatcatcaccatcatcaccatcatcaccatcatggggtattattgtagttgctgctgaaatttgcaagtagtagtgcattgttaacttatggtcttcggtaacattccattctctttttgtaacttaaaaaaaaaagattgatttttcattttgcttctttctttcatcgttcaactagggaggtcctggtaacagtatctcttgtgactgttaataaatttatatacattttctgtgtgctgcaaattagtagcttcatttcctaataattttgattctttactcattggtttctattctatggtagcaagaaagttattgtatggattacataagaataaaccaacatgagaaatgaatgaattgttacaaataatgctgaagagtaaaacaacagtttaaaaggtcaacaacagccaggataatttaacaaaattcacaaacacattcttccataatttcattcataaatgaggggtgcaaatcaccttaaatatgcattcacgtaaaagggtgtgctccaatttcacaaaaatgtacaaatgtgtacaacttaatcaaaaaaaaaattacagttgttccttctccatggaaggggacaaggacaagcttgctctatacgtttcattttaactgtttggttaagagttatggctctactacgtaagacgctcatggaacatcaggctgataaagacagtctttacttggaaaggaacctgatgaaagtatctcttgtctgtttacaagattcaccatcaccagacgcgtgttcttcatcttcttccactatttctacataaacaaggagcttgtgaatcgcccaaagtatgcagcatctaaaaagtgtgctcaaacaacaggaaaatgtacaattttctacagcttaatcaataaatgcagttgttccttctccatggaatgtactcggggagctttcagacggaagaaactacagcctgcactagtttcccgtattcccggtctccttcaaactcttatatcacaccctgtagcaaagacgaagagcagaaatatgttatattaattcatagaaacgtttaagaggacagaatgttaagtttcatcaatctactaacaatcaagaaactaaaagttctctaagaaaacataaattgccaaaatttgttcatgaatgagtaactgcagaatttgtcacattcttcgttgacagcttcaatacattttgcctcttagttcatctaaaaaaatgatatcttattgtgtcaaccctacccaaaaaagaactaatcactctttgcccctttgtatcactaaaagtttctcaaactcaaaccaagcattccatcactaatcaaggtaatcacccctgtcatgtaaagaacctcctctaaacaccattc

SEQ ID NO: 41888 - DNA, 6180 bp, Cannabis sativa
ttgaatgaaattagacaaagtcttaaaatctaacaatctcaataattcaaggagcatttttaacgaccttaaaagtttagagaccataattttgtacatgttaaattttaagagcaaaaataataattagcctaataataattataaatacctctcctcggagctgagggtcagctggttttgtgaggagaacagcttctggataagcaagaggttggccattaagccgatccttcattgttggcattactcttttcctattgtccgaaatagccatgtagcgaaacctacacaattaattaaaaaaaaaaaaaaaattaaacaatggagacattgatttttatttaaattactatattacacaattgaaaatgaaaaaaaaaaatgttactataatatacttacttgtcgtctcgaagcttgtaaacgatccgaacttggccaatttcagatgcaggccatccttctaaacgttcaagtaccgtatatgtgtaaaaccctggatagttacgcaacattatgtacctataattttttcagtaaattatgtattataaaaaagtctcaataacaaaaattatattcgaaatattaaataaatatataaaaaaaattgttagtataacgaaattggaatagctattgagaccttttgtctatatttaatggaactgttttgccacttgtggaaacattccatgttctgcggaatgaaatttctgctccatccttatctgcctttataacctcaaattttgctccttgtaatctgcaaatgaattagattaatcagaatcaaaattgaaaaggtttgtacatacataatagttaatgctaataatatacaagttacaagagtggagaaattttttacgtgtcaatattgatagtcttgtctcctggcttcgagtcccagacgatgtcccagtacctaaatttataaatatatgtatgttttgttaagttagcttctatagcatttaaaaagattttgaattaattagttaaaagaaaattgtattatgtaccctctgttcttttcttcattctctgtttcaagcaagttgtctattccattgtattgtattccaattacatcacctcctggtttcgaaaatgtgagtcgaacaaggccattgtctaatataacaacctgttgatgattatatacttaattagccgaaatggtaatttattacgttcaaaacaattttgggtatttttttaaaggtctcataattatcaaaatttaatgacctatgggagcagtgtattttttttttgtttttattccttactttgtgtaacaaagcatgatatgggtaaatttaaatgagtacttcattatagtttaaaggcttataatggttatgggttcagtcagtttttcaattatctagtatgtaataatactaaatgcccatgtggatgattttcataagcaatgttataaaattaatgaagattgtttttatcaaacagaagtgtatttaacaaagctaaaatataatataggcataaatattgaagctaacctgtcgagccctactggcttgtagctgaacatcgagtgaatatcctacactccttaatgctcttctgtaattaaataaatatatgcatgaatgtgttaatcaactcatttccgtgaatttatgtttttcttttgaacataagaattcaaatcaagtatataaatttgtatttaatttacaacatcaaatgatatttaataaactatatctagctaacactacttttagccctctctatatactgtatatttatagttgctataacttaccaaaagtaaaataaagagaggaaaagaaaaaatgagtagcaactactccaaacaaaaacgaactctatctatagaattttttatttatgttttaaaaaaaaatgtaattgatgctgaagagtaggtgaaaaaaagtgagggaagggcatgcgttcatccttttcgaaatgatgaaataaatagtatagtgtcttcatttctataataattgttcacatggagtttcttgtatattaacctcaataaaatttacattattgtaagttggttatctaccaatggcccattattgtactaatcaatacattaaatgaaagaaaggggtataaatcattgtactacttactaattacggagagtgactactttctaaaagaaaaaattaatgttgaaactcactaaagcctatttgaaaaacagagacactttcttggtttttaaaagggaggttgaaaatgggacaaaacctcatcttattctttgtataggacttcgaatttatttggtactatattattcactcgtgaatgttggaggtgttggaggtgttggaggtacaccatatatgaatattgctaaaacgacaaagaaagccgaaagctttttttttttttttttaaaccttccacaacaaataaaattttgacatgccatcataacccatatgccatatgtaaaaaaaaaccttagaaagtagtacccacgccaaattccaaggccaagtcatgactcacgagcctaaacattcagctcaaaaatattcatttacacataaaaaaaatgacatatatactcacgagccacaaatttccgctgcctttaggtaaccagacatcatactcatcatgtcagccttatgtttggctcaactggccaattaataatatacctatgcttcccattaatattaaatagactatatcgattctcttctcaaaatataatggagcaaaaagtgaaaaaagaaaagaagaaaaacgataataagtcaaaaacttatttataagcttgttgaagcactctgttctgggttttaaataacagcacagctcaaaaccacattctatattaatgcctttactgtttttgtttatgtgtatatgaatgtaataatctaataaattataagctgattaaatcataagtttgggattagaaaataatcacctgacaacataagtactcttaatctcagagcaaccattgataaagaagaagaagaagaacagtactaaacccgccatggctgacgaccaaagtagccaacgccattgttttctcaactgttgcttctccatattttcttatttttataagtataaacctgaacaagcgaaacacataaaaaggaaagtcttgagctttatggaactagaaacgataatgacaacatttttggcggcaaaagggaacaagtagaaatgtctcgatcgagagagagagaacattcttgtttatttgttttcaatgtatgataattttgaaagaagagaacaatgggtttggtttattaatatataattattacctttggttcaaggaaaactaagagagtagttgtgtagttaatcggaaaagcaaaggagaagaaaggtagatagttacacaaagcacaatttatagcaatgttatatgggtttctcttaatgtaaaagtatgcttttcttctctctctctattgtccttttaagttttgaggtggtttttatacttaaggttctattttcgaaaccttcacagctttaaaaaccgtaccaaaagatttgtaatggaaagtgaatgaggtttactaaggctttaaatagtgatccaataacttcaattttttttattattatttttatttattaggtatacatttgactttataatatactcttgatatgtttattactaaaattttggtcttttgtggtaatattaacatgttctttacgaaaaatttaattaaaatgaagaaatcatattaggactctttgtctttggtcaccaattagtctaagagaagaaaattccatttctatgatgatatgtattaatttgaccaattatagctaccacacgttatacgttatagtataattaagacatatgtgtatgtgtatattaatttaggacaacataacttgaccatatacaacagaaggaatataataatgaaattaaagcatggtacagggaagaataaggttaactaattgtgccaactttttgacaagtgcaaaacatgttaacagaaacattgaattttttgtattttattacttttttatttaacatttgttctatctttgggggcttgttgtgtagatacaccagaattgggcgaaggatgtagtaatattttataatttatatacatatatattattatttattacatgctgtatatatctctaatatttgtgggcgtcaattggttgaacatctagatatttgcatgaaaattatatggcgtgcagggttattttgtaagcttaattttcgtaaacaaaatgttatactgccatttaaacattaacatgcatatatgcatatagaggttgtatgattatatgagtaataatttatatgcatttaacttattgacatgcattaatatgtataagactatttttttagctaaaaatctaaaattggtaatcatttttattttttgttactccaatattatttctacttttaaatagtatttgattattttaataatattttataatttaaatttatcaaatataaattaattttataaaacaacaaaaaattaataatatttttaattaaaatgctattaaaaatatttagcaaaaaaatagagaattaattccttatatatatttagaaaactccatatccattctctattaatggagcattattttttttcaagtcactccttattttaactaaggagtatgtttaaaaaacatgattatggatgctctaactaaattaattatatgtaattttatatttttgtttttataaaaattattatagttatatatataaatttgaaagtggtaggtacattaatttatatattcaaactagtcgattcggattctggattttggtaaaatgaaagtcaaagagttggttaattaacgagaaaaaaaatgaatgacagaagttcaaagagttgttttgtaaatcgcatgagatcaagttgaattggctaattaaacttcatgtgtcttatattatagttgtcagtattggaaaactccaataactcttgggaaaatggtggctttataatgagttaattaacacgttcattttaaactaattagtctgcaaatattcattaattgatgtttaagaaacttcttaatatttttactttggttgagagaaagtacgtacgtagcttcttcgcaacgacaaagtagtacttgatcacaatataacgttcaaagttagaattctcatcttcttttttcttttctttttcagcaaaaagattcaaatgtactgtataccgccttgtcttcttttcatcatttattcgtttttttttaaaaaaatatatattatatatgtatatcattgttcttatatataaactgtacacatagatatagatatatcgttactcataaaatacgtttatgtagtcaaacacgacaattattgtacaaataattaatatgatagactaagaattatatatgactctatttctgtaaattatgactaattttggtggtgtgatcgtcctaaggagggaatggaaattaattaatttaacacagatgtatttatgagattgggttattttctaaagtcgatgaaaaccgtactaatgatgccttcgtaaaaaaatttattagagcactcaccaacaattatagtactaactaaaagttaaaaaattaaagaatcatccactaaacatttttcatcaaagtgagctaaaaatggctaaaaaacctacctaaacactattcattcatattatttatttttcaaacttattttattactatttatattctattttctccatttctctatctttctctcttgtatttttcatttaaataaataaataaataaataataattaaattatataaagtgaaaatatataaatattgatgtatggtataataatttgaaataaaatagggcaaataagatttcgggaagtatcttaaaaaaataaagtaaaaggagctgatgagatttttctctgataatacattgtcatcgtaattaaactaacctatatatattaaaaggttttttcctaatttaaatttttagaaggaaaaattaaaatatatatacgcaatagtgttagattgaatactatgaacaaattattatatataaataaaaacagaattgtgtaccttcaatatacttat

SEQ ID NO: 41889 - DNA, 2984 bp, Cannabis sativa
caaacggcaactaattgattaattatatatgatcaacttgcgtactagtgaaaaaaaaaacttcctgacaataaataaataaacttaacaatatgagaaattatgtgcactcctctagctataccaaattaaatgatatttatagcaaatcatatatttaattactaaactgaccattaattcttagcaaaagattacaaaaatgtgacttctttctctttgtaagcataagaatgccaatcactgatcaggagtatacttatggttcattcataccaatatatatatacatcatcattggcaataattagatcgatccactaaacaaaaaagtatataaacaaatgttaatttcatcaatacttttttttttctatttttttttatcggaatatataaaaagaacatacaaagtacttaatattatgttatttcatatataccagtaacatcattacctaccactaccagcactaatccacaattcccagaaactaatgtaatatatattctgtacgaacaaataattaattattaatacaaaataatgagtaataatcaaaggggtttaaccctgaagacgttgggcttggaggagtgtttggtaatccaatcctcaaaatccttggctccacaagggatcctcaaaaccccatcattagaaaagccatattcttcagccgatctatagagcaactctgagaaatgggcatcgccaaataaggccgtccggaccataaatcgcttagttaactcatcttctaatccaacacaaatcggcacataacctcttggtgtcaatggaagtggagaccctctcagtcgaagtcgttttagtgatcctttaccttctatcaactttcccaacttgcttcctctcattcccatcaccaaactctctctctctctctctctctaatgagcagtactaattacaattacaagtagtatggtaatatataaatatatatatatattataattaataagttaattaaggacatgtagtttagagaagggattattattaattattttgtcaataaacaaggccgtgcgtaccttactgtccttgttacacacaacaattaatattaattatctatgattatgtagtttgtccaaccaaattcaccaaacgacatttttattatgataattaattaaaataatttagataagggttaatattgttttggaatttgtatttttgtaaaaattattgattagattatttattttattaaatgataaaataaattatgtattttttaaaatggtataaataaaatcttgaggttccatttttaattttttttttctaatataactaatttgaaaatatttcatgaaaccaataggtacagaaacaccaattttattataatatctctacattaagttattattaataagacaaaattaatttataatacaatttagtactattttaaaaatacaagatgaaatttgtcatttaacttgcaaaataatattaacattttataaaataataggtatatatgtttatttatttttgtcttccccgttttatgtgatggagatgtttatatacattatttatatattataattaagattctccactggtaatgggattgaagagtgcattccgtggccactaagttgacaactacccaattaatttaagaactaattaatcgatctatattaatgtttgggtttgggttcatctacatatatgtgtatataaatataattatgtataggaaataacatggattctttgaataacttttgcatgtaaggaatgatgaaaaccataaagctttataatttatatatttttctagaatagaaggttttagtgtacgtacttattcacctgttaataatcataatattacgagtcaatgtcgtaaaagtcacgtttatatataagataatatctaaagtaattatgattataattaattgaataattttagtacgtaccaatagaaggataccctttgtactgtcactgagttgcgaattgctccacggcaacctgaaaattattgagtccccttctttaatggaaattaatgtagctttgagacctctgaaaaaaaatgcatctacaactagagcctagaggctcttgttggatataggatattaataatcaaaccacagaaaataagtattacgacatcatttaatcaataatactaacaatatatttcttttttatatatatatagggagctattatatgaggcgcacaaaaaatatcttagagtataatctattaattgaggtatttaaaatatacattttcttataaaaaaattatgacgatatatattcattgtagtcacgcaacaggcttcttgtatttttcttttttagaaatttcagctaatttatatggcttgaatcaaaattcaaacgctttgttatgggcaattattttctctcatacaagtaaagaataatggaggtaaccacgatgcattctcttaaaaaggatgatgcacctaaatttattttggtatttagaaaaaaaaaaattaatctctatttttttttttatactaagtacgttatagttatttgaaatattctataaaattttgagaaattcaaaattatttacaatataaaacagtctatttcacatgcgtataaaataaaataatcacatgtgtaacacataactataacgtacacgacctattttcaacatgttaaatttttttaaatttttttaaaattttgcagtaagtcttaaataaatgtaacgtacacgactatgagaaaaattagactaaatttttttttcgaatatcgaaataaataggagtacaccaatacactcctttagcagagtacattgtaaaatttttcaaaaataatagtcaactttgatttggatatgataaattaatgcaaaaatttattaacattctaataagatcacaatgaacactatcataagtaataataataataataat

SEQ ID NO: 41890 - DNA, 4995 bp, Cannabis sativa
ggatggtatgaggtcatttgtagtagtcaacatgtttatttaaaagggtatgtgaattaattatttgcttactaaatattataataggataagttagtggggcacatttaaatttatttataatctaactactttatttttatttttattttattaattaaaaagtataaagataaacatgttcttcaaaaaaagttaaaaataaaaaataattatattttttaataatgacaatttagtcaaattttatcatttcgattactttttttatttatgtaaatgaaataaaataattttattttatttttttgcgaataatttatgaaacaacattataaaatattgtttatgattattttgtatttttaactcatttatgtttctaattaattattttgatttaaattacagtttagtaaatgtacgcttataatatttttgtattttagtagattgtctaattcaaatgtacgtttgaaactaattcaaaagaaacaaaaaaaaatgtaaatattatattaaatttaattggtaaattaaaatatttcttgcttttaaaatttaatttagtctaatatttgtatcccaatttatttttttccttctaattacaaaattactagtaaataccattttagatcacgtattttataaaaattaccaattgaactctgttaaaatgagaaattaaaacttatattttcctaaatagtacaaaataatacctaaactaatttttttgtcaaaataaaaattaataataataattcgatctaattatgataaaactaagtacattttctacatctattcgtggtaaaaattatctacaagttggttatattaaaaattgagttcgaaatactatattgtactgttttaaaaaatacaagatctaaaatattaacccctaaaattataacactaccaaaatctaaaaactgttctagaaatgctcttactcgaaattgagaaacgaaaggaagaataagaaagaaaaagaagaaagttgaagtcaaataataatatgttggtagcataccacttttgaattttcaacgaaatgtgatgatttttataataaataatgttaatgcattttactcataataaacttcattctctttacattagccatcatcgccactaatcttaatttgtaatgattagtctaactacataataaatgcactcatatatttgacttaaagttgactcaagttaatcacttaatgtatacaataagaaaaaatgctaagtgtaagtactcaaaatttggataggtaacctcaaatacaaaaatggttaccatccctgtcctgtaatggcgatgatcatcaactcatttctcgacttgcaactctaaacagtgaaaaatttgatgatgatgacgacgatgatgatggatggaggcgaaagaatattcacaacggccaagattacccgagaatacacacccactaatgatgtctacttcaagattaaaagataatcataggtccagcaactgtcttaactttttttccattacaatgcattagtagacaagaagacagttattaacatgcatatgcaattggattcattgcaatggaaatatgaacttttcatgattaaaattatgctttcatgatacataaaaccattagtgatgttacaaatatataaattgttcaagtattcaaacaaagctaagtgaagcattgaaaattttatacctcttgggaaaagaaggtagaagctcctcagtcactctaacaatggttgccccatcagattctttccgtgaatgcattccttttttgccttgataactaggttgtgcccctaatggggaagaagaattgcaatctaaaacaatagatcaaggttagttcccataataataataataataataataataatagataaagaataattagcaatggaagataccttgagaatcttcttcttcatgttctgcacaaccacctctgagatacaaagtactgaaccaatccatatccagacctcccttttgttcaaactccttcatcattcgaccgattagattgtaggcaaacatgcttgtctcatcacagatttcttggattccaaggtattggttcttatgtgtttgcttgttattcatttcttttgccgtctcagcagaacaattaaagttatccacaccactagagatctctggttctaacctatgttctggttcgacggggtgagtgtcttcagcagtaggcaaattcacattaaatggtacaaaatccgctgtactttcaacttcactatcatcatcttgatcccttccatcatcaacataactgcaatcatcctcactttcagacagatcgtgcatatatgcgtcagtaaaatcatctccgaaatcatgtgcaggcagcaaatccaaaaaaatttgttttgtgtgagcactaacatccaatatacattctacttcttcatcaattgcatctttcaaatggaacccttctggtgtgcttcgagattttccgttaattatagtaagagctttgtgtaaaaaacttggaattgaatccaaatcactgcactgcagaaggtactgaactaaaaaatttgaaatttttttccgcaaaaacttgtttgatactttagcatttggatccaccaagttctttatgttcttcagctctggtactttgacatttgttctaactaaccagatagcctttattagctcattctggagggcttttatctcagctgagaattggcaaaactctgttgtgaatgaattgtgaaaacccggcgctagctttagtgccaagcatgctattgccaaggctttagataatggttcttgtagctgatctcctttaccaagttgtgaaagcatcttctcacaaactattctcacttccttaaccagatattctcgattccatccacatcggtcgggttgtaactgaggcatcttttgtttgtatccctttagcttcctatacatcacaatcaaggtctctgttgaaaagctctcaagtaaattcaataactttgtagcgacagcacgctgaattgtagattttgaaatgaaaaatggcacaagattatctcggaaatttccagggtcattaagaagttgaattagatgtccagaaatttccattatatgacaaggacgtttataattttggcctccaaaaatgactgaaacagattctgtcacaatctttttcatcttccatcgtgttttctcaaactccactcgaccttgtgtgagtatcttggcaagaaggtaaagacccttggtggtcaaattatcaatgcaagataaaatgacctttgttatattattgggcatgtgaagaaatcccaagtcatctatatcaacttcaatatcattccttgttacagcagggcgcactccaaatgcttcttccacacgtgattttacagtatcgtagaatatctaagcaaaggaaagacatgtcaagaagacctaacaccatatttgaagacattcataaataaaaaagggcaggtattagaaagaggcttaaaaaacttacatcatcttctctaaggaaagattcaggcaatgacctgggaaaacaatagaatacaaacttatcagatgaaaaattgaggttgattatatatataaggcatgaaggagttggagttctcagccacacaccttgtttgcaaaatcttggtctttttagatcggtttggttcagcttcagatgagggaagacccaataaccacctgcacccacacatcaaaaccaaaatcagaagaacttctttaacctaaaagttacaaacttaggattttacaaacataaacaaaactatatatacatttaatgaaacctgtgcacagaccttcttttcaattgaagctgcttctcttcgtatttgattgtagacaagattgagtgacaatcagattgaagaaagttgggtttttccatatccgtatccatctagttactaacagagagtcagggacatgaaattagggattagtgctaggtatgacatttgaatttaggtcttcagaagttgcctataacaaactcaaacgtctcagcagctaactaagctgaaacacctgcactagtgaaaataaagtcttaatcagacattatattacacaacacactatctctttgagacatttcatcaaacagttctcttgcattgtaattgcaaccactttcagcatacaaactcattaaacttactttcttgtgaacttgttttaccaaatttacattgttcaatcaaaccattagcactagcacagacacatgccaatcacaacacatgagatagatataaaaaaaatatatatgatatcattagcaaactgttaaaaagaagacctctcatcaaacaaatcaagaacacaaagactccttgtggcttaataccaagttacaagcatgtcagtgaaggttgttgaataaaattgaatacatttataaatatatacaaatataaaattatatatatcttacctcttaacagtttttgttgtgtcttttaaaagaaagtgttcacttcaaccaaaaaaattaacagaaaaacaaatgcttcttctcaccagaaaaaatacagacattcgaaattgtagatacaatacaaataaacaaaagtcataattatcatataaattctgagaacttaatcatcttctttcttcttgtgaactatttctctaagaaatcatctcagtaagtttaacagagcgttaattcaaaatcctataccatatattattcaaacattgcaaagagtagaacaaataatggaaggagttggtggtaaaataattcgaaaaaccgaacctgttagaatgtccaatctctaagttctcaggtttggagcgtgatggtggccggaggtggtattctcagtctcaacggagaggaagaaacaatagagcggtggtggtggtggttacagccgaggaggtggaggtggaggctacggaggtggtggtggctacag

SEQ ID NO: 41891 - DNA, 1437 bp, Cannabis sativa
tatagtgagtacctttttcacataatatctttagaaaaacccaaattcgaagttacttcttgagactgccacgaataccagggcggggcttggagctctcgacggcgggaacggtggagtgacgattcacaagcttatcctcttcgaatgggatcttcgggtggcgagcctcgtgatgaatctgcatcgatttcaaatcaggtacggtcgtcttacagagtgggcactcaaacttagcgtgaccacccttttcgatgccggagcgatcggctagccctgccttgccgccgccgcggttggttgtggctgcatcgatcttagcggcgatttccttcgttgtgtgtttctttggcttcgcctttccagtcatggtaaatatgatcggatcttagagaagggtttttgtagatttctgatcagggatgataatttttcccaaaaaaaaaaaaaaaaacagagaaagaccaagatttgaaaccctaatgaaatcgaagatagagttatagctaaattgaacgatacacgacaaaataaattcatttctctttacttcactaaagttaaatggtaatattataatattattaaatatgacaattgcactaaaacaatcactctcaaagtaggcaatatccttgtagcatcatttgagagcctctaaaactaaaatccctaaaagttcaggtagaaggggaaaatggtgagcttgaagttgagctgtgaagaactaaaccaaccccactctcctatcatcacagataattgcaccaaaatcgaagagtccatggctggtggagatagccgcatctacgttcatcttccagagaccaggcgagggataacatacattcacattgggccgaaaatattctgaccaaaaaatttaatcacaaattttgtgtgtaagaaagttgtgattaaaatgtctctcaataaaaataaaattgcgtccaaaactcattttagtcacaactaatctttgtgactaataaatgttatgattctctacaattagtcacaaccacaatgtaatcacaacttatttatcttgtgttcgtgatggggatgatgtagtttttgactatttttttaaactaatctgcaaatgcgattattttaattttctaaactgcactctcactgcgaaactataaaactgcaaaaattgtaccgcaaaaaatcttgcagtgcgatgcagtttttgtgatttctgcggtttggattatcactaaataattaaactatcacaaatataacaaaacttgaacaacatttgtcaaaaataccataaggcttgagaataaatatgaaaaaaaattaagtttcaaaaatacaataattagtagattttggtaggggtgagcatcagtcggtttggtcggtttttttctatataaaaatctaaaattcagtttttcggtttggattggtgcaatc

SEQ ID NO: 41892 - DNA, 1144 bp, Cannabis sativa
cagacctttaattttcttgtcaaatgtattctcaattctataaatgcatttaaagcatcttcctcgaatttgagtggatacaaccaggtgtatctattgtaatcatccacaaaatgtatataaaatctgtgatttgtattagcgttaattggagttggaccccatagatccatatgtaaaagttcaaggacaaattcgactctaagactggcatgcatcatagaaattgttcatttcattcttggaaagctttacatgacttggctctaagactttactcacaacacaaaagaaagggtgaccaaaccttctgtgccaaacattaattctaggaactagactcttatcaggtgtaacctaatttacattagaaaaaccttactattagtagtagtggacacaatgcacggcttggactaagattgtaaactaaaacatgatggaaggtggtttgtgaactaaaattttaaaggaacaagctgttacaaaccatctctaagaacctcttgaagcagcatcctctttgttttttttttccttcatcaaacaatggatagattgaaactcaattagtacattattataggtcgtaagcttatatacactaattaagtttcttgcaattttaggaacaagaagtatttctttgaacatcaaataattcccatttttgatattcaaagagccattgccaatatgagaaattataagcttattaccattgctcacaacaacagtctctttaccattatattcttgttttttattctggttggatgcctcggaggtgatgtgattacttgcaccactgtctgcaaacaagttatcactgtccaagaatttatggagtatctatgaaggcattgtgatttccttgtctagttttagtctgcgcgctaaggggttgtttggatctgttcccataaaattctcatcaaaacgattataacacactgcaatagagtaaccatacttgccacagacttggcaagttggtcttggaccattaatgcgaccccttcctagagatcttccaagacttccttgactacctgagaaacgtcctccaccattgaagctttagttctaaaacctacaaccacgataagatgagcttcctaggtttgtcttggcagtcatattt

SEQ ID NO: 41893 - DNA, 554 bp, Cannabis sativa
aacgatttatttatgaaaaaacgaaataaatgtagatcagatcataaacgaatggttgttattttatgtgaccatttgatttggacattttcctaaaaaaatattagattttatttttcaactaaattatttgtaggaaaaaaatatggtgaactcaaatttacttgtgtcgaatcaattttggaaatttatgttttaattcagacagtatttaattattagaggactgtctttagttaccgaagtaactaagaataattaaaaataaatattttttcatcaattttaataaatgtaacactgttttaaaaattaaaaatattattgcatatttgacatcataactaaaaaactgttttttagttttaaaagcagaaaattattttttgaaaactggcttgtttgcccttgttttttgaaaaccgttttcagaaaacaaagttacaaaaaacaacaaattgttgttttctgttgtaaaaatcaattcactcttagtcaatattatttttaaaaaacactaaccaaacataacttgtttttaaaaactttaaaaa

SEQ ID NO: 41894 - DNA, 1231 bp, Cannabis sativa
tatattatatatgtaccatacgtcatagcataatatatatacatgtatatctaattaagatatattctaatctaagtcatttattgtgtatgtataaggctagtttggtacagaattagattagactaatttctctaatttagtattttggcatgctagaagtcttcatgattaatccaactaattttatgtatttgaaattatttatcccatctgataaataatcttatacaagtgatattttttttatgatttttttttaaaattttttattttgttaatatattttaaatttaataagaattttaatagagtaatcgttacaaatttatttataaattttttattaaaaacttatttattaaatttaataaaaatatataatttggaattatcatatattaacttttaaaatttaaaataatattaattaaataatagttacttaaattgattctaaaagaaataatataatataattatatatttttttaaaaattattagaaaatttatatcattattttaggaaatgaatatttgtattaaattagtggttaaaatgaataattttatattatacaaatatttttattgtaattacttattaactataaatatgataaattattttattgtatatttaacatttttactttatttttttttattaaaaacaacttaagtatgcatttttttttttaaaaaagagaacttttaaaagtaagtgtgaattgtaagaaatttttttaaaataataataattctatattattttcttatatttagtttaatttgataaaatattcctatcatatataaataattggacatattttacttactctttgagaatgtctttgagtactgtactcttgccagctcccatgccgccgcccatgagcaggagcaccggactccgctcgctcagagcagccggcaccatgatgtccgtacattggccatctttattcctagggcttcctccaatggctttcatttcttccaccaatgtagagaacaacctagttacctttaggtctctggttactctctcaaacctttgtttcctatttaccaatatacaataaattactaattattagattcaatttaacatgcaccttgttatatataataatatatattttataatattatacatatgtatagtatagaaaaagaagaaaaacaatttcatgttctaagattatagtgcctcaattattgaga

SEQ ID NO: 41895 - DNA, 2469 bp, Cannabis sativa
  modified_base (1293)..(1303): a, c, t, g, unknown or other
atatatatatatataataattcaacagtggtcctcattataatatctctggaacccacataattataatcgataatatgatattctctcaatattaataatataacatggacgtgagtaacgacctataaatatatatattgcaaaattataaatataaatgtggaaatatagaaagtgtactactgctccagtttttattattattataattattattattttccatctagaaaattgaaagaattgcttttttctcatctttttgattactaatataataaatttgttaattatgaaaacaaatgaaagaacaatttattaatttttttttgaaaaaagtaagaatatgcatgtatgttataaacaaagggaagaaaacaaattaaaagagacgttttttttttatcatattcgtaaaatcattggttggtggatttggatcatgggatcagagatagcaagaacttattattattattagaaacaaaagcatatatcgcagtccaaaccaggcagagtgagagggccactctacgtcgttttatatatacattatacatatatatatataaatcactatttatatgtacagagagagaattgagttaaggctgccaaagaatatagaaatggaaatcacggtcgccccacctttttttttctccctcgtcttgtcacaatccacttttcttttccccgtaattctctcgaaattttttgcactaaattaactaaaaaaaataaacaatgtatatgtaaaaataggaaacaattgtattggttttcgatcaccgtagtattactaataatttgattatatgatatctccttaatcattatattatatagtatatgtagaattgacaggaccaaaatggttgtcattatttataatgtcttatagttgttgttgttaaatattgtatccgtttcccaccatgggtactagtgctatacatacgtacatgtacatgtacatgtatagtgaatgtgtatacatacatacatacatgtacgtactcactgtacatatatatgtgtatatatatatgtatatgtatagacacatgcactcacacgcagagagacagagaagcagagatgatgatggtactctctctgagtgcatgtcagcacgtcccgtcagacgtctctcttctctgattggctgtttttgctcatgatcacatgaaaactttgctttgcttaatttcttcatcaccatatctattaattataattatatctatctattattatggttaccagaataataataataataataatnnnnnnnnnnnttttttttttttttataaacaccaaaataataatagtaataattaatatacattacatatgtgttttttctcgtaaaggcaacaaaacaatatatttgtgtagtcttattagtttgtggtgcattctgttattattgtgcaaaaaatgtgatataaattgctttgcaaatcctaactcaattctcagaatatgaattctcatcaaccatcgaggttgaaattaattatgtatgtaacctgattttatgctagcttgatatacactttttataacactttttttttttaacaaaagaaacttaaaagaaattgttttcttctagacaattactaaaaggtagccttctaaggcaacatttaaattacaagtaatatcttttgagcctccctgagaggtctccgagcctcaccattagccgcctggtctaagaagtaatttgaaattgccctttccatccattcctttgaagccccttctatgttttcgagtcgtctccagtgccgagatcctttctcctagggtggtgttagggttgacctggctcagagatttcttctctttgtcaatttcttcttttagggcttggattcgatatcctccttctctcgacctggcactacaacaaatatatatgttaaccataaaaaatcacccctaacgactatagatgcaacaagtcgcccctaaaaaatcgtctctaataattcgcgtctaaaagtactattaagggcgacagaaaagtcgcctgtaatttgtcgcccctaaaagtaatctaagaaattataattttatttttaggggtgacaattttcgctcctaaaaagccttattgtagaatggttttcaaggctgtagctttgttatttgtaactacacagagtttatttgtattgtttatacataaatatttgcatagatagatcatttaggccttcatttgaagatgctaaataggttgtaaattgatattttggagtaataaagttcattggttgaccaaaaaaaaacatttaggggtgacataaaagtttttaaattaaaaaaaaaataatttatcatatataaatatatatttacatatacacaaaagtaaatatatatactcacatacacatcatatatatatatagtactcaaacaaacaatatatacaaatatatatata

SEQ ID NO: 41896 - DNA, 1207 bp, Cannabis sativa
aaatttttagtggcctgaaaagtttagaaggcaaaaatcgcaatagttcatttcttttatttatttttttaatgaaccatttaagttgttttagtaatgtactaattgacatattgaaatttataattaaaaataaaaaactttataaaaaactattaatttgatactgtgatatatataaattgaatagaaaaaattgtatggccactaatttatatttataactactaatcaaacaataaaattataattaatttagtgtataaccaaaagtaatatttattttctaaaataattttcttgtgatttttaaatgagaatataaataattataattaaaaataatcactaaaattataaaataataataaaattattgttaaatataattaattctttttaaaatatacctataaattgattgtgatgtttatcaattttaaattataattttatattaattaaaagaaaatatctacataaatttaataagatttttttaataaaaaagccacaagagaaatgtgaaattgcacataaaaaaaaatagtatataaatatatttatttatataaaagtcttctatataggcccttcatttcattgtcttgctcttcttttctttttaaattatcttcacacaccagcaaatcaatttgttgtcttttacatcaccaatcaaattcgttaatatttataataacatcaaaatacatatcaaagttacatctggtcaatttttttaactctttatttattgataaatattgcacgaggcggcttaacattgacattaatttatatcacgaatttttctctccttttttttttttttgttatctcattcgcttaatactttttccaatttttatcttagaatttagataaagtgggattaaagtatatgaaattctatttcaaaattaattgttaataggaagaataattatttatcttatatattctattatcttttcacacattagtaatgcgggactgtctaatatcctctctcaaaatggtagctatttttattttctcactattttggacaactcaattataaacaattcttttttagctcacttcacctaattacaagtagttcttttgctttattttttggattggtattttttattggatttttggtattttttttttttttggctcactatcctcgaattgttaggtttttttttttttt

SEQ ID NO: 41897 - DNA, 925 bp, Cannabis sativa
caggtaataatatgtaaaattctatcattattgttagactaattaagatttttggtccccgaaattaaacatataccaaatcgtgtctcttaataaactttttcagacggttagagatttcctcaaactatttctaattttactaactgacgcttgatgtggatgaaagtttagagagtaagattttgttgatttaatcgattcaattcaatccgttgtaggccatggaaatgatgaagtttacaacaagctcaccttatatgaagaacacaggttaccaaaattactttgaagcctttgttgaaaaaaaatctaactacccaattaaagatgttgaagatgatgatgtagttggttcattgagtcaaactctaccatatatatttttacttgtttcacccatttttctggttttgttcattgctgtacaaaagagaatataataaatgaattgaaaatatagagaataatagtatggattgtatgacaagtataatcatcaattacttcaacactttgtgttatgtataatgttgtaattcattcaacccatttgtactaaatgaataaataataataataaaaagaaagcttgttatataatatgattgaatatataagcaattgatatatatatgcttgaattttagtacttgtcaaaatgatctggaatcaattcttaaaaattatttaatagattttatattgtaatcacttgtcccactttataaaatcacaaaataaacaaaacataatattcccttaattcccacttttatgtgtttttatgcatgttactagtttttatttttgaagttttattagtgtatattcttttttttaagtgaaaaacaaaaaatttgattaaggtggcaatttaggttagatatgacaatacaactcgaaatcaacacgaaagaaatgg

SEQ ID NO: 41898 - DNA, 757 bp, Cannabis sativa
  modified_base (707)..(717): a, c, t, g, unknown or other
ttatatatatacatatatattttataataattatttatttattatatatatctttgactcgttcaaaatcgagtctttacaccatgttcttatatacaatgtccacaatattatctcttaaaatggtggttatttttgctcacattcttaaacagtatcggagtggacatggtccacttacctgcaagggatatgactctaatatcatattgagaattatagagtttcattttaaaaccaattagtgataagtatagtaactcatagttttatatatagctcattactctaccatttattctaattgtacaatattatagcactaaaccaaccattcatattattaggaacacatagaataacgatatatatatattattatatatattgaatccgctaatatatatttgttagggacactagtgtaattaaagacatatatcccagcaaatattaattaaattctgtattatacaattacttaattagctattatcataacttacataaagttattacgtatatacttaataagaaaaaaggtttgcatgcatctagctatggtagttattaattttgatcagctcagaattaatcttcttcttatattattattttagatatatataatatatatagagttgcatatctattcttataactgaaattcttggtttatgaggaattcatgggtgactttttatttnnnnnnnnnnnaataataaaatattatttatataataataaaataataata

SEQ ID NO: 41899 - DNA, 1386 bp, Cannabis sativa
ccaaattctaataatataattattgataggtgtaatttgttacaaattctttattaaattgaatatctaatattcttttagcttttatcttatttatttacttatttttgaatgatatattatcgtgtaatatattattatctaagcctatcaatataaatttctatttttctctcaaaaatattctaatttatttttctccatcaatttaagtagtaataacaaaacaaaataaagaaacatatcgaatctgctatttcataaggactagtcatgtctttacacatgaaaataaaattctttctatcaaatctatatattttcatataaatatataaatatttttttaaaaaataaaactccagaactttatcctttttaaaagtgggttgataattgggagagttaggggccatacataatacatatatatacacctgagtgaaaattcagtagtgaaaacgaaattattgagagccgcagccaatattaattatgtactaggatttaattaaaaaggattaattagctaggtgaatatatatcatcatcaaatatcataaattctcaattttacttttgaatatgaaatgatatttgctttttaattattgtcaaaaacaagtgtttaaaatgatccatattactaaatataatttaagggattattaatcggaagttgatgattaattagtaataagattatggagaacatatactagaccaatttatatcattgaattattttgaaaattagatttttccatcgtgatcattcttgttgactatatgtgtgaaacataaataaataaataaacagagttgtgatatatatgtttcaattaatgtaatattgtttattaaaatataaatgaagaaaaggatagctaagtattttttaaatgataatatctatatggataagattttatatgaaattaggaagaaagaggtataaagaaagaaaaagaaaattaggccccccttcacacttcgaaatacaaaataggttgaagagattacaagttaattaattaatgggaggaatgatatgtgtacacagattatgtaaggaaaaattgattttattatatgcatggctaacacttttgctgtcacttaggtgttagttacagttagttaaacttttttttgttacaactgttttctaacagtttctttattgtaataaacttgtatataagttgtatttttttaatcaatgaaatcaagtcttttgcttcctcttctttctctcttcaaaattcaagctctactttcttttgctttacatggtatcagaagtctttgactcacgtccatgtcgtcttcaacctcggatcctagccctgccacagctcccatggcttctgccactgctccacc

SEQ ID NO: 41900 - DNA, 1757 bp, Cannabis sativa
ataacaataacatagatcattttcatttcccccaaattttccaattacactactctaccatcaaaagaagagatgtattgtatatcacatatctttgttcccactggctatgtatgtggacctaagtatccacccagcttagctttctcttctccattattcataatccctccaaatccactaaattttacgtcttatactttattttcaatacaattaatttattcaatttttttttcattcttcggagaaaattttgggtgattagtagggaacaaaattgtctttaaaagtcataattattgagatagaaccgaatctcaacacgtaagtaaatagcttattattagcttggattggatagtgttatgttacatatgtgaaattgattagtataaattctagtctataactttgcctagtaaaataagaataataaagaaaaaggctatatcattatagctggctagtagtgtagtgctacatatatgtgtggaatatatgacttatatagagaaattaaatttgaaatggaacctgggtacgttgggccaactttggttgacttaataaattttgttctagaattatgctccctttagacaaaaacctccaattacagaatccaacaattagtttttagccaaattcccagttgaaggaatattattaacttggttttttgcacattaaacataaatttgtataataataataatataatactatgtgtgtcttcccgaccagcaccaccacacatttccaagttgtattattccctaatgtttatgctcttaaaaattgaaattgttggtatataaacattaactttggaatgagaaaagaggaataaataataattatttgtaataaaaaagagatggatgataaatatacattaatgtgtcagtttgtaaggtctcaattggctcaggcagagttcaaaagatatatatgtctggattctcccactcatctctcttttcaataccaaactttctttttcttttaatttctttttgtattttgtttcactgtctatactcaatattctttatcagaaataatcagagagagagagaggggttggaatgattttcttctgtatagactatagagcctcaaaaataaataaacaaaatacaagtttgtcacatgtatgaatatgagatatatatagtataatacatcttatcaaatcatgtcatcgataaaactattccttcctttttttttcgaaatgaactattccttcctaataatatgtcttaataagtaagaaacagtgtctgtcatttccttttttcactcaacaataattgtaattttgttaaatttgattatatatgtaaccaagcttacactgtatagagaagactttgtaatatactatagtatatatgaaaatatctcatagctcatttgatggacaggacaacttttgtagcattatattctctctctctctacataaaaaagaagaagtgggaggaatatgtggtgtttaaagagacaaaggtcattttataagaaaaaaataatttactaagttattatttttaaagttttcaggagttaaaccttcctaagaggactcatcataacttctctaaatatatatataaagaacccaaatgttatattacttttaaataatataatttatagattaaatatatataataaattaattaataatatgtaagatatgaaaatatatattagttgtcatcattttgtaatatatagtgaagtta

SEQ ID NO: 41901 - DNA, 2682 bp, Cannabis sativa
aaaaaactgccaaaatcgccaaaaatcatcaaaatttaccaaactgaaaaagcataaaaaaccgtatggtcagtttatatagttttactttctaaacgatcggtcacgatttttataaaataaaaattgtaaccaaccagacggctataagattagtaaaattgaccataacataccgaattttatccctatttggaggttatgggaactgtgagaaagtatctcattgtcaaaaaaatgttcaaataataaagtttttcaaaataattattttttttatcaatatttattttacattttttctcacatcacatcttctcattacttttccttcttagttttcctctcattagtttcccatctctcaccatttctctctcctcacattatctcttatatgggtttgaagtctaagttcgagtttggattcaagtcgagtaaaaaaaaaactcacttgttcaatttggaaaacaacaaaatttgttttctcatttttgagaaaataattgtaaaaaaataatgctaaacaacctactaattttgagaaaatcctacattcaaattcaaacttaaaacaaaagagagtccacaatgtttgttgaaaaatatatttactttagtctagagaattgttagaagaatgacgtagcacatgatgaaactataaattaaaatgtaatatgaaaccattaggtcttggcagttcgtctaaacaatgggccccatgactaagacatgggcccaaaaatttcaattatttttaatcgatctctggcccgtattccttgttttcttttgttttcctatctaaaagactaaagggtcataatttttctgaaaaaagcaaaaaacattttcaatttaattgctttaattatcacacaaaaattcactctaattatttttccaagaacttggcttctaaaacattagttctttactaatcttttattcttttcatagtttaatctctcttaatttttagctcacacctaacatactcaaacttaacctaacttccctttttgcaaaaataagtaacccaaattgatttttaaaggtatcacaatgactgcctagtattctttctgggagttgtctgtaataatttagtgatacttttttttctatctttttctaatactattttgataaatgccttttttcatgaaaaaaggtttcaaaaagttagaccaaatcatggttaggtactattttgctcttattgccattagccattatacaattacaaatcaaagtatatagtattatatatataattatcatcttcaatcattttaatctcaatggggtttggtataagttggacctactctgtttttatttattaaagtagaaaccacatacaaataattccatgttctactgcctcttggcataagttgaattgagtggaaaagtcattcttgctgagagactcaaacaaaataccaaaggaatcagctttctcttcttgttggcccactgccgcccacatacaatcaacaacttcttttcttatttgtctatttatttatttttattattatttttttttttttaaaataaagatcaaatttttagaactcaaatagcaatatatagttctagggtagtgtagagtggggaattaaaatttgaccatatcacattacttaatggggacatgataatagccctcaaattttcatataattcataaattatttaaaaaataatcccactgttaaatatgcatgaaataggataagttttaatccaacctacagtctagcattactaataggtttttttaaataatactaaatatactttggatgagtctaagtataccctcaaacaatatgctttagtacagttattttctttttaggatattttagtttaatgttttaagaaattttactaaataattacttattacacctataaaagaaaatagtcaagtgtataattttttagcacgataaattatttaaaatttcataaaattttataagtgacttcttaaataattacacaatattcattagaaacgaaaaaaaaaaaaaaagagaactaaaaaactatgccaaaacaaataatgggtgtgcaagaatatcatgttggaagtgttactatagtgctttccatctatctatttctaaattatgtattttgtttgaatcactttgtttatgagactttggcatatgtatgtccattttggtagatctttcctcttagtcaattcaccctttgaatacatttgatttgaaacattattattgattgtaatttttcaaaaaagtgaagtacaattatgtgtgacctatgaggggtcatgatcgatttacactctcttattctctattatcgtgttatgtttgtatatggcattgtttgtagggggtgattttgttctattattagaatcggtagtttgagcattgctcaaatctgccaaaccacatattcactgtgattgttgatgaagaaaaagagtgagagtttcaattggtttaagtctaaactataatctctattgttatcttacttttgtacattatgtaatggtatagagttttaggagctaattagaattattattttgagattgagagcttgagaaaacacaaattttctcttttatatagataaaaaaaggtagataaaaaattttcccctaacatgccctaccat

SEQ ID NO: 41902 - DNA, 4122 bp, Cannabis sativa
tttaacatagtattatataaaaatataatatataattcaattcaatataatacaatacaatacgatacgacctaatacagcgttccaaacgagcccaatgtattattatgtgtggaataatgtattgcttgtccaccaaattgttcctttaattttttagtgaataataaaccatttctttttttctttaattggtaaatattataaccaaatactactacaattttggcctttaattagatgtgatttcttggagcttataatgttaattttggtaaaattcgttaccgaacattgttctgaacaatgctaaaggggtacgaaataattgtcaccataaagaccctattgcgtcaattattttaaaataactgatgtcataagcccctatagcgacgcttattattaaataatcgatgacataagaacttcctatgtttttttttttttattttagcattttgtggtttaacataattttcttaatttttattaaaaatctaattttttttcatatatattattttattattaataaaattaaattaactgtgaattatatataataagtataaataaaaattaaattggaaagttaaataaatacacattaatattattttacgtctttgtatattagctatttttttattaatattttatattttttataatatatatgtgtaaactttataatatatgggttaatatttttctaatatattagtatcatttttataattttttaagttatattttgtataataattagtatatttaataataaataatatgtaatatttttatttttatgcaatttaaaaattttatatatttaatttttttaaaaaaaaaactttactctaagtaattttattacactaatattattttaaaattacttttagtatatttaagagttatctaaatatgaaaaaaaaaaatattcttgtaaaagtaggttaaagaaaacatatctcataccaaatgataatgtgtgtacgagagttcaaaagaaacattgtactaaaatttaagtagaattaaaaaataagttatatgcaatgatgagaaaaatttaagcttttcgtagaataacagaagatgacatataaaaaaaggttatgtagtgcgaatgagttaggatgcagattttagtttgaatatatgattggatctagaaactaagttgagtagagagcagttagtagcttgaaaatgacataattttttttatatcttaactaattttgtaatgtgaccacttatttttatataattttcgagatcaatacaatgaaacaataagtgaaggcacaaaataaatgaaaaaaaaaatcaaagaaagaccgagaatatacatgagttttttaaaaactttaaagaaataacttttggtctggttgtccgtttgagacaattttttttttaaaacttaagtagtttttttgcatcctacacatcccaaatagcctacgacagcttggccaattattttctctaaaaattgctattttttccattgaattcatattatgcacccctttgatcgaattgtttgtgttttgatttgctattttactacacataaactagtgaaatttgtatgatatgtattagaatcaatatttatgatgtattttctaattctactacagtaaaatgtacaatactaatttctttttatatctcatctaatatttaaataaaaatgtagtagctaagttgtaataaattagtcttttagaaagatggtaagcaatgaaaaatttaatatgcatgtcaaaggttcaaatctcaataaagcattttttattctttgttattttcttttttgtttaccctacaacatctattctcataaaaggaaaccaaaaataagcatactaaacattgcaactaactcaaaaaggatatcatcagcgacaccttgggaatctcagctttattgcataaggaaaagtatcatggaaatcctctccttgtctcggtcagaaaaagggaggacttctcttttctaaaggcgaaggtcctaagtcggctagaaggatggaaagccaaatgcctatctcaagctggtagacttaccttggtcaaattggttctttaagaccaccatgttacacaatgtcaacgttttgaataccggtgtcaatctgcaaagagcttgatagtatcgtgtcttgattctggtggaagggaagccctcagaagaattcaagcaaccattacctggccctgaaatgttggttagagatttgccagcctaaaaggaatggaggacttggtttgagaagattcagagacataaacttggcattgcttgctaaatttgtgtggagtctgctcatcaatgacaatcgtccgtgggtcaaaatcctcactgagctaagtattgtgttgattgggatttttagacaattgaaagacatggaaatgaatccttcctttggaaaggaattctggaggctcgtaagttatgtgttactggtgtaggaattctcacaggtaatggagaaactaatatttggaccaagcctgtggtcccggggtccagtccggaggaggttagacgcaatttctcctttgcaattacccacaaattcaccattgtttcagacttgtttcttccagggacgcgctcatggaatgtcaacctgataagagcttgcttctcccatgatgttgctgaagcaattcttcatatcaagcctttgacgatgatggcgatatagtgttttggagagccagtgacaaggggaaattcacagtcaaaaattcctactggttgtctcaaagccatcggttcaagaaagaaaaggactgctggaagaaacttttgaagctgaagctacatcctcgccactccttgctactttggaaagctatgggcggttgtttggcccttaaaacaaatttgatctttcccaattcgcaagaaaggatgtgtggcctatgcaacaatgaactgggaactgatatccgtcttttttgggagtgcaacttcacccgtggtctttggttctagagcccctggggcctgctaactaggaaccaacgttttgactctgtcgaaaatctcttcacctggctttgcaaccttggtgataacaagttgttgtgctttactgcttgtgcattcgaaggaatttggcaatgtagaaatgatcagtgtttccaaaatgctccctctgatattgttgctacatccttcagagtgttgagatggttcgaagagttttattctagtgtggaattggtccactctcgtgtccaggaggagcctgtcatcaacttggaccacttcgaggcttttttcatggtcaatgcttctgtggtgggtcactctgggggtcttggattgtccaagttggaactgatgatgaaagagttattacttgtcaagcagtctgcagtgttaacagtgttctggaagcggagttggaggccattcatcttgctatggtggtggctattgaagagcgtgtttcctcggtgcaaatcatctctgactcggctattgttgttcaggctttgaaggtccaagagctccctcttgcgtggggctcctatcctatctttcgacaatgtgtgtctttgtttcagtccttttcttgtattacgtttaattttacccctcgtgtggaaaactctgttgttgataggcttgcctatttggctagagtaaacaatgtgtgcaaaaaaatggttgtaagggaggcagttccccttgtggctactctttaagttttttttttttcaataaagaatttacttatcaaaaaaaacaaaacattgcaactaactattaactaatcctattctaaattactaactagtaactaattgtagtatactatgttactaagtagtaactaaacctaattctactaaaattttagcaacataatagctataattgaacgtttcaaaaaagtaaaaacaataaagttattaataacaacaaaatatagtataaaacaatcacaacaacatttagcaatacaaaaattttcacacatgtgactacagtaatgtattcacaaaacttatttcactacctatgaatatttaagatattcaaactcatccacatgcatgttgtgttggaaattattttac

SEQ ID NO: 41903 - DNA, 1144 bp, Cannabis sativa
cagatttttacttcgaccctttgaattaaagcttatgaatttcgtttaaagattgtatttttgagcagagattgaactaatggcggaaaagaactctaaaacatttacgacaatacctcaacacaaaaacgacaatttatgagataaacgacatgaattgaatacgacactgaaaaaacgacaatttatgagacgaacgacaggaatccagaacacaacgttgacaaaaacgacatcatttttaaaacgacaatttatgagatgaacgacatgaattgaaaatacgacattgagaaaacgacatcatatttaaaacgacaatatttactgaaaacgacaatctatgagaccagcgacatgaattgagaatacgacattgataaaaacgacaatatttaccgaaacgacaatttatgagagaaacgacataaatccagaacacaacattgaaaaacgacagcatttagaaaacgataatttatgagaaaaacgacattatatgaaaacgacaatatttactaaaaacgacaatttatgatacaaacgacataaatcaagaatacaacattgataaaaacgacatcatttgtaaaactcaatatttaccgaaaacgacaatttatgagacgaacgacaatacaacattgataaaaacgacattatttgtgaaacgagaatatctactgaaaacaacaaatagatgataagaaattgacaaaaacgacactatttgtaaaacgacaattttactgaaaaacaacaattgaggtgttttttttttttttgaaggaaacaattgaggtgttaattgtcacgtttcttaagtaagtgattatattatcaaagctagtcacttttgtaataaatttggcttgaaatttactcattctttctaatttctttcattattacatacaaatgactatttctttataattctcataaacctagttaacattattttagaattctatattttacaaaaattactattacattctcttattttactaaataacaaatcaaacaatgtaattttaaaatagcataaaatattactctttatacatattaaactaaaactaaaacaccaagttattattattattattgattccttttcttaaaaaaaaattaaaaaaaa

SEQ ID NO: 41904 - DNA, 3115 bp, Cannabis sativa
  modified_base (1399)..(1403): a, c, t, g, unknown or other
  modified_base (2879)..(2881): a, c, t, g, unknown or other
  modified_base (3049)..(3052): a, c, t, g, unknown or other
taataataaagtgctttgaaggtgagtgtaattgatagcaagcaccacaaagagatcacaaaaagagttaggtaggattttcgtattaaattagtttgaaattgatgctaagatatgataattaattggctctccaagtaaaatgtttgattttgaagagccataaaataatggagacatttgaatcaaagtcggggttagactaaggcgaattaggcctatgatgtgctttaagacttactcagccccaagaggctcaaagcggaaaaaaaaaaaaaaaaatcattttaaagctaataattttgttgctacctaaaatccaataaatttcaaagttggtcctaatagaaatagtaaaaacaaaatcaacaatttcaattgccaaataagtcttaagtttgtttatatctttgaaaaatgaaattattcatgaaataaatgtgtgatggggcattcaataattataaatagtaatgatatttacatttataaattacacataaattttacacgtatttatgggtaagtaatttcaacttattaaagtgattagcctaatccctatttatgtaggaaagtctcttcccaaaattaattttgttaagtgaagatagactagaaaccattcattattaatgcatcccaaaatcaaatttaactttaagaagtttggccaaaaaagaatgatggggattggtaaatttggcatcctacattgtaaacattacttcattgaaatggattatagataaataaaatcttaaatccccaatggacttagaagcacacaaggccaaccaattttccaaatcatccattttatattctttaccaaaagaatacttctaaaactttgccattaaaaattcaatttatttatgatacaatttataacataagaaataattaattaactaaataacatgtactcttaagcaaaacttccatcctaattctagagaaaaacttacccttccaattatttatatttaagtaaaatcctacattatttaaattaataaaatcgaaaatagtttcttagaccatatctcttggttgcactattttttgtatacacttttttattattaatttgatataaaatgtactattttttagggataaatactattttagaccctgtgttttgcaaaagttaccaatttgaccctctgttttgttaaatgacaaaatggaccttgtattttttaaaatggtaaaataggactccgagcttaatttttgacaacttttttttaatataaccaacttaaagacaattcctaatacgaacagatacaaaaaatgtaaatattttgtcataacacatttagatcagattattattaagttatattttgataaaaaaaagtcagttcagggtcctatttgtaccatnnnnnaaaatacagggtccattttattatttaacaaaatagatggtctaattagtaatttttgcaaaacacatgatctaaaataacatttatcctatttttcagtgtaacaactctagtgatccaacatcaaatgtgacatttaataaaaatatgttgcttatatcattatgaaccgcatcttttattattattattttattatatcatatctatttatattataaagtttaaaaatcaatttattttgtcaatattaatttgtaagatatcaaaaattattatatttaaataaatttttatatatttttattaatattgcacatattaaagtattacaaatttaaacacattttttttgtcgtgtatgtaatattttttctctctgtaatctttatttcaccatatgtaatgatatttttaatttatcaatcatgaataatttatggcattattatcatacaattaattagtgtagttttatttttatctaagaataattaatttaacataataaatgtgattattttaataaactaatataataataaaaatgatattttattttatttaaaaaatatataataataaagaataatagttttgggtgaaaaacttattattaggacttaagacttaaagacacactaacatgttatgtatgtctcatctttgatagaatctatcatgaaaaagaagaagctatcattagtaatagatgagaaatacattgagataaggattgaatatgacaaaattataccaacattttcaatattaatgttatcaagaatattattattgttgtttgattaatttttttcaacatcctttctaattttatcacaaaaattacattgtaaatttatcaaaatccattccatttattctctctgaaagtgacattaaaaaattcaaattaattcaacaccaattatgatttttttgggacaaaattgttattaataatttaatgaaaatactacttaattaaattattacatttagtcactttaatttatgggttatgtacacaaagtgtctaacattagttctactaataccaattacgatttttttaggacaaaattgttattgataatttaatgaaaatactacttaattaaattattacatttaatcactttaatttatgggttatgtacacaaagtgtctaacattagttctactaatactattatacttttttttaataaaaaaaatattggctcattcaaatctcataaataaacttagtgggaaaaatctggaaacgaatactaagataatatcattaatcaataagaatcagccttgtaaggaagcattaatagaggtgggcatccacacacatttatttatcatacacttaatatatattattcacgtaataataatgtatattaccaaattttaatctacatattattatattaaaaataaggctaattaataattttccccccgaactattgagattnnnaaatttaaggatttttgtctaaaaaattctaacatggatgagacttcaagggacatgattttagtacatactacatatcaaggggcatgatttagtagatatcaaagtttagggagcatggtttagtatgtaaataatcaattaaataataaaattgaatgaaattannnnaaagtccttaaatttaataatctcaatagttcggggagaatttctaacggccagaaaagttca

SEQ ID NO: 41905 - DNA, 555 bp, Cannabis sativa
tagagtggtgttctcgatatacctaaacaaatggtgtgattattactgtttctccctttaaatttttactctttccaggagtagaaaactcctgtgctgtttctattttttttctttctcaaatcatccatataccaagtaatttgcaactgcaatgttgagcattaacctttgtttttgttatcttaatcagataaatgacaaatatattaggcttttgtttataatctccgccgtgtggattttcatggctggcttaaatctctccgtacggcatcatttgtccacactgtactcgataaattgtctttgcgtggttacagaggaaactcaatcattactaatctcaacttaaaaacgacaagaaatatcttataaaatcattcctttgacaactttagtttatatatcaagtaaatgggaccaaaggggtgcttataaaagcatcgagcgagatttcaaataaacaacattatataatgagcagatattatgtttcctcaatttttgcataaactgcctaagggtatgccaaagcagatataaattgcaggc

SEQ ID NO: 41906 - DNA, 1507 bp, Cannabis sativa
tcaatccaaaagagctataaccagtaacaaacctaatttatcactagtgaaacagaaagaattctcaaaacaaaagcaaacacagccatgaaaaatctcaacactctgacaagaagaaatcttactctcgaagaagttgatgttcctgcttcagctgtgccaactccatcagagctcttactttttcatttgtaacctaaaccaataaaaaaattacagtcaagaaatgaagtcaacatattaatttacaaatgaagaagcatatgcaaattgattcatgaatgagcaccagaaaactggtgcaaatagacagcttatcaaagcattgagcaattacatacataatgaaaatcatgtgtaaaaattgggtttctgaaaatggaacttgaaaccctaatatcagagaagaaagctagaaagaaacaaacactgtaaaaagtaaaacacctgaagtaggtttctgtgaagttcctctatcttcttttgaagagcagcattcacatttctgtccagcaaatacctttcttcttgctgtgacaaaagcaataatgttgcaacctgaaaaatttacgaaagagaccgtatttataattcttacacaaatccatgcaatgctgtaaccaaacaaataatgaagactgtatttatgatttgcacaaacaaaactttaaaatagtgaaaagggaaaaaaccttatcctgcaatgcttgtgctagagcttcagaagcatcactcttcctatcaatcgttacgtcaggactatccctctgtaaaggattagttggaattaaaatttcagaatccccaaatatcaacaatattaaatgtcaggagttacatcataattcagtttggaaaagcacattccaatttcaaaagtcatattaaattaattatttaacttaccgtagatagtaaatcatgatccacgtcagtatttatgtgtacgtctcgacattcattttcatcatgattatcttctcttgataaaggctccaaaatgtgtggttctcttgtctcaaattgcctaatcttttcatctatcgcatctgcaactgatttgataaaggatgttccatcatcaagtaaattcacgacttgaactcgagactcagaatgacaaaggcgtaactcttcgatactctttttcatcattttatctgtataaatctgcacccaagccaattagatttcaagatgcactaaggacataacaacatggtaaacatctctttctgaaataaagacttaccatctttttttctaattcacgaactctcctcttcaaatgattttcaatttccaaaccctacaggccaaacacaatcaacccgtgaacatttgttaaaatattcaattttgcatgaaaagaaaggagcagtatggtattcataccactcgcagcttatgttggaaactatctgcacacttcctcaccatctccaattctgattccaaggcactctgtctgaagagaagttacttgatggcatgtgaataaaaaacc

SEQ ID NO: 41907 - DNA, 928 bp, Cannabis sativa
acattaaaatcgatctctttttacattaaacaaattaagctccattaattattcttatatcctctccttttttcccttggttaatagaaaaaaaaaacatacatacatcactactaattaatacggtgcatgcatgcatacatgcatatataagtacgtacatacgtaaaagtaataagtatttatatacgtatatatatatgtctatacatttatgaggccagaagtgtagggaactccagtagccttaatccaagcatcaccccttataaaccttgaagcagtatactgagtagctctagtggttggaacattcttaattcctttccacttgacccgtcgaaccttattggatccggggccccgattcgaaatctcagtatagaaacaagtattaatagcaaatgttccagcccaaggcaaccaaccttcgggagctataatatcatcaatttgtgaattcataataatggtcctcgaatactccttccatggtcttcccaaataagccttgttcttgttcttgttgggtagataaagcgggtcgccggcaatggtgcagttttggaggactaatccagtggcctcgcgcttgtcggttcggccttgggcggtgacgatacagaactggttttctagaggctttcggacaaccattttgcagttttggaagagggcggcggcgtcaccgaaaatgaagtcgattgtgccggagatggtgcagtctctgtagaattgacggtgggcgtgagtgtagagagtgtcttgataaccgtccatgtggcagttgtagaagactgacatgtcggagtttgctcggagggctactgcttggtgctttgttggtcctgctgtgttctcaaatcccatgtcttttgctatgaagttgtttccaacaatggctgcattattcatccaattattgtat

SEQ ID NO: 41908 - DNA, 720 bp, Cannabis sativa
aaaacctgttgatggcttaacactcgtttcaagtcctcaagttgaacaccatgattggctagtaaacaatgccggactgcgaatttcacttcccctacaatatgtaagttgtggcgaagtaaaagatcatagtttcggtgtatacttccacctaatgaattctcaattggcaaaactgctctgtccacaagccatcgctcaactgcctgcaagttgcaacacaaggagaatgaaaagccatcaatttttcaatccattaagaaaaagaaaaagaaaaacaatcaaacaagaagcaaaagcatcctagtcaaagacaaaaaccacattgtcctctcgtaactccctcccccacaaaatcaatctgaattaaagctcaatgtaagtaaatcattcaagagactcaataactaagtccataataagagatgagaaaatagccaaatcaatcatctaatcgttataagcctgacaaccccatcaaaatatacacatgcaagtggtttaggcaaacacaattaaccattaaaaagactttctttaccaataacattttgttaaaaagagaaaacgggccataagtaattacttcaaaagcggtatcgaactgttcacaaggcactgcttcacaatttgggtacgccttctctgcagccgactcactatacgccccacgaacaccctaatattccagcaacatcaatcaaaacaaaacagagacta

SEQ ID NO: 41909 - DNA, 909 bp, Cannabis sativa
ttggttttaaagaaggagatcagaatagcaagtttttttatatggctacttctaatcagaagacaaaataacattcagagtcttaaaaatgaccaaggtgtgtggcttgaatggaacaatggactgtcgaatgttgttattgattatctctccttgttatttttggcttcaaatgttgatttcactgaggtggtgaatgaggttactcagttagtttttgaggagatgaatattaagttgcttcaactggttacaactaaagaagtttggaatgtcgtttttcaaatgtatctttataaaagctccaagccggatggtatgacaccagctttctaccagaaatgttgggctattgtaggtgaggatgtggtgaaagttgtcaatgatttttttcttaatggtgatttagtctctaattgtggaagtgcgattgttgtgttggtaccagaaaagaaaaaaccagaaagtatgagtgacctttgacctatcgccctgtgtaatgtcctttataaggtgatatcgaaggtgatgatgaatcagatgaagcctatgataagtagtattgtttcggaagcccaaagtgcgtttatcccgggtcgtcttatctcatacaatattatagtttcctttgaggttctccactaccttaagaggaaaaaccaagggttaaatggtttcatggctttgaaattggacatgagcaagacttacgatcaaattgagtagtgttttttggaagctatgctctgtaaattaggctttgcgaataagtgggttaatttagtgctaaattgtgtctcttatgccaagtactctgtgattcataggggtcgcataatgggaccgatcactccttcccggggaattagacaaggagacctgttccccttatttgttcattctttgtgc

SEQ ID NO: 41910 - DNA, 3565 bp, Cannabis sativa
tacacattttctattgttttgctattgttctactcctattattgctactgtttcattgtgttcttgagtttagagatctcggggcttatcaccttcacttttggcttctgctcttccacactcttcccaaccaaattctcacctataaatatgaagtagataaacattggttattcttaagaatatagtgaaaaacaaacaatgattcatatttttctttgaagacttaaaaatttaccagcattaacatgattattgggattaactgcactgtccatcaaattcctagtcaaaggactaggattcttgaaagatatgcttcgaatttcatggcgaatcgcctcaagttgagacattgtttcttgaagctcttcgtgaacctaaacaaaatcaaaatataagaaaaattcaaactcaaacacatctctaatttcataacaaaaattaccactatccaatcatgaaatttcttcatgccattggtacctggcgagcttgggactggtgcatgacattttcaaattgcccacgaaccaattgtacatatccaattgaacgacccgcaaatctcccaagagttctggctataattggaagatcctttggccgtaaaacaaaaaataaacacaaacccaattcagctttggtcttttaaagttaggaaaaacgatagaaagagaggttaccttaccaacaagtgcagcggtggctccaatcaataggaagagctctccgtaagaaatggccaacatttgtgcttcttgaaacgattaaaggattggaggagtacagggctttaagaccacagcagagtacgggatggagatccggcaatggacgctgtcgctgaccacctaggccttcgtttgcaggcagcctttgtccaataaattaacaccctaaaatctgttagaacttcttaaccaattgttgtgcttgaaaacattttcaaaaatattttgattgtggtattcattatagttagctacaatttcatactttttaaaatttcgaatagcttacgatatcaaaaatcgatttgaagttaagtttttgatactagtataaattatttggaatttttttgagaaatttactagaaggtctcacctaaagtgtcttacggttatgcaagaattttatggcctattagtttatctatgagctttgtgcttcttaattctttcttctttctttcgagtgtaagcatcaacttcagcattcagtcttttgaaatgatatttatgattttatagctctcttaaacactttatgactatgcagcaaagaaagatgatttggcaattcagttttcagcattctcttaactgaaatgagttgtcatttttctaatttgattatttgaatgatagaaaagacattttattgtgtttaattaaaatattttaatataattaatattgagaaaattacatctgccaacgtaaagttaaaatttattataaatataacgatgattgttttattaccgagtttgtgaatttatttggtccacgtgtatactactttcttctcccaagtgttcagttcttatatatagaattttgttatagttcattaattaataaaagtaaaaacttcttttcaaaaaaaaaaaaaaaaaaccatacatcatgtattttcctttttatttttctttttctacctatataatatatctttaatatttaaaaattatttatatttatctttattctttaatatttaagaaatacttttggctcaacagataattatttggtattaaaaattatacaattgtaatctacactatttgaagcgatcattttaatatgttagaagcacatatttttcaactaccgaagaatgtctagaaccaaaagtaacattttagtttcttttatatttaattaagcaagtaattaatttttgaacttaaacaaaatttaatatatcaatcaattttatgggtttgcttttcaaaaaaaaaacttattaattattaaaaaatattttcttatttaccattagattctacaagatatattctaaataattttattttatataataattttagtagttcataaaataatttgtaaggaaatcaaataatgtctatgagttatattaaaaatacaaaaacaaactttacaaaaaaaattaaatataccaaccacatttcatggattaataaaaaatattttgttattcaataaataaaagtaactaaattgtatttattctaaaataacttaccaagaaataatttaaaaataattctagctacaccgctagtcgtttgagatcaagattagtaccaatatgatctatttttcgagttgatcattttgatatgtgaaaagagagatattttcactattaccgaataaatatttagaatcaaaagtaactttaccgtctattttaaattttattaactaagaaaaaagtaactaataaaattcaatattcaatatgtcaactatttttttaggttactaaaaatatttgttatttcatatctaaaagttaccatatgacatgtattttatataagttttatttcaataaatttctaaaaaaaaaattatataaaaaaagcaaatgatatcttatatatcataaaaaaaatttatatatattacaaaaatttatacatattttgcttatgagctatatggtaattttttgtaacttattgtagctcagtatattcgaaggtaacataaaagttgctataaaaataaaaaataaaaagttacgtacatgtatcttgatcaacaacattatataattaaaaaaaataaaatgacgtaaatgtatcttgatcgacaatattatactatctcaaataaagtttattaaaataaaaccaattagtatcttattagtaattttttttattaacatctattaaattttaatatatttcttttgttaacagaatataatataaactacagtggttttcattttaaatatttgataacagttaaaaattatatatgttttccatccattaaaatagaccacattaaaaactaaattgtgatgatgctgttcttaatcctaaataattatgatacaactataatttttttcaaaagtataataaaaaaaaattaaagttgctgataaaaataaatataagaaagaagaataaaaataaaaacttaaaaagagagaaaaagtcaaaagtgaggctgacaaaaaaaaatctatggtgtattagaaatttttttttaaaagaataaaaaaactaaaataattgatgactagacaaccaaaaaaaaaaaagaaaaaataaaataaaatttgatacacaagtaatagagaagtaaaagagggtgggtatatattaatttttgtacatgcgtattaatagacgtattggtatttggtatgatttaaataagtgtggtgatttgtgtgattattttctaattgaggtatattaatgaaaaattccctaaaatgaatgtactcattttattattaattggttttgtgatggaacctgcactttcattctaaattttaagatagtatcagagccgcttgtgattcgttataaactcaa

SEQ ID NO: 41911 - DNA, 1437 bp, Cannabis sativa
atatatagtttctcacttccaattaaatataggaatgaccactctctcaaattaatatgacaggacagcctacctagcttggtggccatctcatgttctactctctatttcaaagattattaatagtttgattttgttgataatattttatttaatgtttttaataattaattggtatatatatatatatactactcttcttaattcatagctagaacatgtaaccatgattttgcaacagtaatgagatatatagataaagaaaaggccgtttcaaatatcatgaagagtgaatcattgattgatattaaaagagaaatatatatacagtgttatatgtattaattcattattataaaagcctgctacacagaattaataaattaattagtgaactatagtctacatgtgaaaactggaagtagtaacacgtatagaatagtagctatatgtacgtactacatatatgtatgtctttatattattaattgtgtacgtacgtagtttcataatcatatggtttcgttttgaattttcaaaaaagctagcttatttatagctaggtttgttttgtcagtactagatctcatatataattagtaaatttatatacaccaccctggtaaatatatataaagacagtacgtagtagtggtggtccaacacaaacaatttacagattctggaaaagattgaatgaatgaatgatcagcaatctatagtggtaattaatagtgtaaagattacctctaactgattcagttaaatagttagtttagtttcttgtttttattataagagtagttaatactcttttttatacaactgcattttgcctatgcaacaccgactatataaataatagttattcataaattggtgattaagctttattaaactatcatcatttttaggtttttacagaaattttctgtttctgtttctcaatttctacatggtatcagttgctgcttactaacgtcatcaatggcttccaccgatcctgtggctatcgaagctccgaagactattccggcaacaacatcggattgaccctataaaccggccaatacatgtgtttccagcatgctttatcctcgcacacttcttgggaaattaaacttcccaggaggtcacctgaaattgctctaggttaaacacgcttaactgtggagttctttcgtgatgggctaccaaaaaaaagatacaccttattgttatataagtagtactaatcaatccatttaagccatcttcaactatctagtcccatacctacatcgtctcagaatcatcacacatgacattccccaagcgatgtgagattgcatagctcccagtctttccccttcagatcacagggctttgactgtcacaatcactcccttttgggggtccaacgtccttgtcgaccacacttctggctgggtcaaagct

SEQ ID NO: 41912 - DNA, 1723 bp, Cannabis sativa
gtctgatggatagatggagaaaggaaatgagaagagagaggcagcgttgagcgaatccatagggaagacagtagcttagagttctaggggtttttggggtctagaagcaccatggtggtgtcaggttcattattagtattgatttttgttttgttttttatatcaataataaatgatgaagataatgatgtttatccaacaatgataattagtttaatttttgtaatttaacaaataaattattaatttttattattaatacttttctctatttgtttttagagtcttacgtagttgatcttgatgattagaatatatattgttttattattactttttttattattaatataatttattattagtaatatgagtaattgatatttgaactttaattcaactcaactcaaagctgttaacccaaaaactttccccagtgacaagaaagataacatctcagagttgagtagtctcgagtcatagcagtcgacattagagggtttcatagccctatgcccaagttaactctaggaactctaaaatggatgttttgatcccgccaagttattttcaactcactatctttcagtaatttgtatcatgaatacatgaagcatccaagttcatgtcttaggagctcaaaatacacaaaacaacacctcaaaaatcaacctaggcacctagggtttcacccagcgcctaagttgccaacccaactagggtttcagacttttagtttttaggaccgtcttagtgcaaatggttaaaatttgcactaggacatgaactagacatactacgaacatatttgaggcatcaaaattatatttggagaacttttatttttgagcacttggagcaccaagtgcccgggcacccaatgcccaggttgacaatttgttaacctgggccactttcaagcattaaactgaaaatctgactcatgcatcttctttgtcttcatcaaaaaatgggaagtgctatttggggaaataggccaaattgggggcgaaaataagggacaagcccctaggttgacacctggtgttggcccaacacctaggttgacattttgtccacctggggcaactccgaggagttttttcaaaatgtcttccgagaatattctccattttcatcaaagattaagattcaactatttttaggggagaaaatagaattatctaagggccttaaattgcacctagcgcccaagttaacacctggcactgggcctagcacccaggttgacatattatcaacctgggctatttccaatcaattttttgaagaagtgttttgggcctttctctgtcattataaataacaaagatacaagtaaacttagggagaaaacgacaaatctaggggcttcaaaattgagcccaacgcccaacttgaaaatcatcatggttcgctggttttgcacccaaatgcaaattctacttcaatcattctctctgaaatggtcaaaaatgggataagagacctcgttcatgatattaagaaccttgaaagttctaaaaagacaacccggatgcttcgaaaagagcaccgatcgcccaggttgacatatgacttggtgcgttaggttctgcttatccgattttgattctgtctcaactgtttgtctagtttttcatagtaactgagagctataaagtcagaagagttaaattcacgacttcatatattttttacttttctggcaaagtgacttatt

SEQ ID NO: 41913 - DNA, 940 bp, Cannabis sativa
catgagaataggacaaccaaaaaaacactactgacctaattttggcaacataaatacagtatagaggaatgcaacatatggttggttaattaagttttgtaatcaacatttaaacccggatatacttgatataatagaaaatttatttttttttccttcccacaaaacatgacatcctaagatagttatcaacgtgtttcaccactttaccctaaaaatcccagcttagttggagaacgcattggtgttaactctacatccaaatatcatttcagagttactataattaccttttggcctgtcgtgattgagtaagcatgaaaaatgtatcgctcaatacaatcataggactcagacatagcaactcaagcattattttaccccaacttcaacattattttctccacaaactttcactcaacacaatcataggactcaaacatatctaatttcaagcagattttactaccattgtcaaactcattatttttcatacagtgttttcctttgaacctaataattgcattgttgtgaatcaatttgtcgctcacaaaagcacatggaaaagcaaagattgccatccccatcgttggtttcagtcttttgcaaagacatttcgagactatcgatcttgtaacgccctgactctcagagacgttacgtgtgtgctttttcaaacatatttcatattaatctattagtttaggaaaagtgtggtttaaattaaaatcctttccagattttaaattacaataaaacttccatacaaagtactagtataatatagggatcccctgtttatatataaaaaattcttttataacaaatttacaaaactgctattataaaatcaaggttacatttttagaaaaaggggtcgatcctgcttctcggaagccaagacaccatgacaaatatgtacattgctgggagacctctg

SEQ ID NO: 41914 - DNA, 1120 bp, Cannabis sativa
aaaataagttttaaagaatctgttgcacgagtcacttttttattttatatgtgtacgaaatagacggtttgaacactaaattctatattataaattattttaaatttcttaaaattttacaggatgttttaaataattataacatatacgactaaagaaaaaaaattaaactaaaaatttattttgtatgatgaaagaattaagggtaaaattactagtgggatacattataaaaataccttataatttatattgaacacacaccaaggcaggcaacactttatatcaaaacaaaacatcatgaatcatttcggtcacgaataaccactccaaaaaagaaagaaaaagaaaaaaaaatccttatctatatatacacaagcattgaagcatcacgattaagaaaacgtatcaattcaataatgttttacatgataaatcgtgtaatatcccataatatgccattacatatatatatataattatttttaaaaaaaaaacaggtatatgccaaggatataccattacaatagttctcacaattaagttgttcttcgaatccataataacgataatgtgttaattggaaattatacatacgtggaggggtttcaatgtatacacagtatatatacttctcatttggaaattattttttaattacgaatgcatgcaatacgtacgtatagaattacatgaagagtttatatatatatatatatatattttcctattcgtataagaattaaatagtatggtatttgtgatctaaaatgatacaatatatatttaatgaaatgtagtaatgtataatatatttagggtaaatatattattttgaatcttatattttgcaaaaattattagttggacttttattaaatgacaaaataaatcttatattttccaaaatgataaaaatatgatcctgaactcaatttttaacaattttacattttaatataaccaactttaagataatttcttatactgaataaagaaaatataagtagttttctcataacatctttagattggattattattaaattttattttgataaaaaatcagttcagaatcctatttttacaattttgtaaaatacaaagtttattttatcat

SEQ ID NO: 41915 - DNA, 1065 bp, Cannabis sativa
cattgaaagagtacttcaagatcagttacatatgatagtttgattaattcacatttttctcattttcttttaattttttatttacaactatgtttttgcttattaaggtgagacagcctggagtaatggagaagcttctcctgctagagagaaatagatgtctgagtttgtattactatagtctatagcctccttgtactgtaaattctagtattcattgttttctaataataaaattgagaactcatatcatataatttttataaataatacttattcttgagattatggaatgccttattgcagcttctaacatcatttatataaatcccttatcagacttttagattttggttgtgttgtggggtggtttgtaattttatttctggtgacattttgtgtagattatgatttcatagtttgaacaaattcctgattacatttcaaaagtagcttcatacatggaaatgataactaaatgagttgttccagtataattgctgctatatcttgtaatatcttgtgtaatatcttgttcattcctataaaagctgtgtatatttatattagtaaatgaccattgtaaatatgtagactttgccaagcagttgaaatgaactgactcatgagttttgtaaagatcagtagtcttttggttggtttatgaatttgggatgaaaaaaaatggtgaattaaatcatcttatattaatatgttgtaatataaaagggtggacttagttaccaaggggaaaaagcatcataaaataatcatatgctgaaaaaaccccaaggcactatccatacattcattcatcaaaccatgaaatcataatacaataacgtcatcagaaataaaaaaacacaaaccaaacaaaaccacacaacacaataatgacattattacaaactcaatagaaggctctctgcacaaaccccatacaaccaaaaaaacaaacataaagattactaaacaaccaatgagagaatccaagaaagaagcatgtgaagcaagaacaccaaccaagcgattcctcctgaaaatatatgaagaaaaaaaaaatta

SEQ ID NO: 41916 - DNA, 696 bp, Cannabis sativa
gaaattactttataccttctggttgatccaaagaggatttaatgaatgacacaatattagattctgagctaaatttattaggcaatttcgaagcagatgagaacctgaaaaagactgtcttttagaagttaggaaagatacaaaagctaaaaatctacattagcccattcaatttagaatcaaatggaagaaaccccagataagaacaccacaaaattggattataattaccgttgaaattgaaattggcttggtaaaacacttctgctaactctatccgaatcatgcgtttgaggaactctatataaagcccgaaaatttttagctgttctacattttttgtaatcatcacctgaacaaacccataaatcattaggttcatattgaagaaacaatgcttaaggtaatgcatacaaaaagcttaacggtgaaatttgaagaaggagaacctgagaaacttcgggtaaaaaacctcgaggtttctctcaatcggcgaaaccgcaaggccattttcttcagaaatgattttcaaggaaatgaagaatttcttccagcggaggagcttgacgcctgagattttccttctccggcgttgagtcggaagttcaggatttgattgttggacttggggtttaggcctactggcttagggttttactcttatgggcccggcccattcacaagcccactttatta

SEQ ID NO: 41917 - DNA, 742 bp, Cannabis sativa
ttttccgagctgcgccagtcgagtaagcatcccgaagttgtgggaggttagcttctccgacccttccccaaaccctcgcaggtagtgtcaaaattgtttggtgaacttttgctgttttacctcaaaccatattccattaagaacttttggtatggttctcattgaaaatagtctaagggcatatctgtagcattatttttggaatgacaaatctgtagctaatctctccctcttctacacttgttgtgttttttattgcaaaaattagcaactatacggtttgttcctcttgtccactttgtcgacagagaaaaaagaaccagagctcgagaaaaggttggcttatcgaccaaacagcatacccgcctctcttgtcggcaatgtctttccttctctggcgtctccttttagctccggtgactttcagtcttcattacattgaacacaaagtggatgttgtttctttatgtcaatattgcaacaagttgtatcggtaccggaggagcaccgatctacggaggcagaaggggtttcaaggcgcagtttccaaagagagaacaaccagcatcggtaccggagcaatggaaacgacagattcttcgaggggagagggaggaagaactgggttggggtttctgaggaagggaaatccatttatgggatctgtttggggcaaagctcatctatcgagatgagggagtccgacaatttctccttgaaggaaaaaggaaagtctcagatt

SEQ ID NO: 41918 - DNA, 3980 bp, Cannabis sativa
gcagaggctgtccccgcctctgacatagcggatatagagtgggattgagctatattggaggcaactactccgttttcagtggctgatccaccagctttctccaaattagcagatgaggtctctgttttctccgtctgatcagctggaagccggcttgtagaaggattgggattgatctgaaccgttaaaaaggaagatttggtcatttcttcatacttagagtcacccttaaccagtcgaggcttttttctcttgggtgctgcaaattcggaaaaaaaacaaattatcagcttaatcgtttccatcaagattcaagaacagtcataaacgaccaaggcggtactctgttttgctttctgagaaaccacaaggaagaaagtggaaaaggaaactaggaatccaactacgaggcccaaacttccattttcttttttcctttcctttccagtttctcagaagtcaagcggagcatttttgaggtagaaaatacaacatagtgaatagcaaaaattgagctctacaagagctcaaatttagacccaccaacacaaaacgcccaagcgggcaccgcaccttcaactgcagtcagagatgaacgagacgatgattgaggaattccgtattgctgtgagcccgagatcggagatgaaactctggatttggagtcaccagaggatttgtttgcttcacttgttgatttgtggttcgtttctcttgattcaaattttattgaatcggaagccatgatatcttgcttcgtgggtccttgtggctgcctcatcattccatacaagacctcggcgatctctatctcgatctcgtcctgagctgaagaaggcgacttagacgaagacgtcgtcgtttttggttgtcggagttttggtccattagacttctacaacagcagagaagtcgtcagtaaaatcggaagctaacaaaatccacggaaaaactagaattgagagaagaaaccaagacccaccagcttcttccgaaccgaagcattggaagaagacggtgagacgggagtttgacaccccacagtcggcaccgccgaaacgctcggtcggactggagatgtcgaagcctgccggtgaacttgttcaccaacaataccaatcgctgagctccattcgtgcgacctcttagtagaaactgaaaaaaaaaaatcagaatctcaatgtcaaactcatatctcaacagacaaaaaatcccatagagcaattaaaactcaaatctcctccgccgctctacctgaccgtgcttttctgggtaccgacacaccaatcatctcgtctgcaaccttccacgccggcgctcctctaaaattcttcgccggtgggaagctcttccgctgatgatgaagcatggaggaggttgataaagacgctggtgggttcgtgggaggaagcatccttaaggagccactaccaccgccaacaccacctccgtcttcatcttcgtcctcttcttcatcgtttacgctttcctcagagctatcatccacaccatcttctctgttgccgtgcatcatcctatcccctcttctcctcttgctccggcttaaacgatctctttctcggtctctatcacggtctcgctctcgttcacgctctcgatcccgatcacgatctcgatctttcttcccactccctcgatcccttagtctcgccgtttcttgtaactcgactggtccatcttcctctgaaaaaaaaataaataacattagagaataaaaaatcgagtcgctttattaaacttcaaaaactgggtatttttttcaaagcacttagatctagtaaatttccaacctggagagtctctcaaactcccagttctgtgtctacgtcttgacaagccatttgtggccgccatggatgctcttcttgcttctctatttctatccatccctggttttactttctctttccaaatcaaatatacccagataactaatcccaactctcatcaccggaaacctaacataaattatccggatatggagtcacgaccaccggtattaaaagaaaccaatctattgcaacaaaagaagaatttgattcaatcagccctgaagatcttcctccttacttccccgaagaaagatcttagtttttcacttatcttcttccctcttctcctcctccttccctctctctctatctctttttcttttcgttttttttccctatctctctctacccaactccctctgtcttccttttgtgctcacatctcatcatcttttcgctatttcactatcagcgaaacccactccgaaccctaacggacggctgagatctagacctagattatcatctttcaatctagaccgtccttttaagacttatccaacggctgtcaatagctcaaaccgacatggcaatatctcaaccctatattattttactctaagcgactctcaaccttttatgtcagtactgccacgtgtcaactcatttcttccccatcaagcttccatgtctactcactaccgatttggtactaaatataatagaatatatccatagataaattattatatactaaaaaatattaaattactcatttttttaaaaaaagtgagaacactgtagtacacgaaccaataatcaatgcttttaaaaaataaaaataaaaagtaaaaattatttattagtattataatgtggtgaaccggctatacccggttgcaaagaccttggtaaaagcaacatgacgatcacaaggaatctaggtgaccgcaaaaaaatatcatttcaaccggtcaaattcattattttcattccacgttttgtattttatttttaggattcttaaccaaaaaaaaaattatcagcaacgatatctatttaatattcctataattggactttgtagggcccaaatgaaaagcatttaattaaaaaataattgaacgaactagatatttctcttactcgtcacacgaacatttactggccgttggatgcttgatgacgtggcattatttatttccgaaccagatatccgaacctacctggtgccgaaccaagtggcccttgcgcgtcgatcagcgcgcctcatcgagaccgttaatatcggctgatcgtacgactgagattaagcaaaagcagggagcaaactcgtgtcgcggtcacggaacttcagagaagtgtgggtcccgcttttagctgccgatctagaaattatttcctcgcgttggcctatttgtcacgttcgtgggatgtggcacctatgatgacgtgtactgggtcccaccctttgttcgtttgttttttttaatgaattaaagtgaacaacctactcttccggtcaatttttacagctctagttaaaataatataatttttcctatgcaacgaaaaatgaagtttcagttttaaaacaataaaaaatgaaaagaagggctattctgctttctcgcttttactccacgcgcctatagcgggattcacattattattatcctgactattaaatgaattattatattttagtaatattttattttatttgcacaaacaaaatgtaaatatttttattaaaaaaatgttccagcgtggcggtgtctttttcaccacgtgtcataatcatctgacgtggacacacaatgcactattcacttgccgattcgtcgcctcggatcttgttattcccttctgaaagaaaaattaaaactcccttccgcttttcctcgcagtcggtaaatatctatagatgagagatttctctaaaatcacagggaggtgacctatatcttataaataggagattttcattggctaaaaagtcattttccgtttcgcaacactccatttcctttctttttgctgtcgcgggtgaaaagtctccgtcacgggatggtcaatcaaacagccctcctcattaaaataatgtattttctagagagaccagagtggacacgtcagattattgggcccaccttaacttggttgacccaccaaaatgaatccttt

SEQ ID NO: 41919 - DNA, 1057 bp, Cannabis sativa
atatatgaagcaattttaattttaatttttattatgttattggcacatctcatgccgtcaaaaatgagattttatattaataaagtattatgatgattatatatggtttaatttgtgggagactaatgtttttttattgatctttattaattaacaacatatagtatctcaataatcattgcattctttaaattaatcactcctttatatttttaaatacttttgtagacgacaatttaaacctgtttgataacaaaagtaataatatacatataaattatacacatttttttatctacacacatctatatgacttccttaataagtaaagatgttctctttttcacaataaaaaagataattgcattaggaaaatttgataaagaggttacagtgttttgaatcaaatttgggagagaagatatgtcctttcatttatgcttaattttgttcaccaagacttggcaatctgacataaagttaaagggaactttactgcagcacaccagttgagagcattggaaagagcttgtgcttctgcataaatagggggaagaacacttggaagagaataataacagccagccacaacatcccctttactattttgaaccacaacaccaaaaccaaaccacaatttatccttacaaatggtagcatcagtgctgggtagagattgaagaagctgaagtagaacttggatcaaaactagtaatgagcgctgcattttggaaagcattgtgttgtacattggagtaatcttgcagcaaagagacactccaggtttccatatctacaatatgatcatgattagaattaaagatagtattatttcgtccattccagatagtcctgagtacgtcaaaaaacaaagagagatctcctttgctgaaagtatcacataacagagaaaatctttaatatcacaattgttggataaattcctatactaatgtcccataaataaagttacaaggaaaataaattagacctctttataaagcctcaacagaccattataactcatagagttgtcggttctgttttcctaggctta

SEQ ID NO: 41920 - DNA, 2268 bp, Cannabis sativa
atttaaattaaaaattacttagtttaaaaatttataatatcgttttattaaattttaaattacatattgaaattaatttataattttatttcatttataatttaaattaaaaatgacttattttctaaaatttataatatcactttattaaacattaaattatatattgatattattaaataattataattttatttttttatttgttatttaaattgaaaattatttattgtaaaatttataatataactttattaaattttaaattatatatcaaatattatgattagggtataactttctttaattaatatttcaattacaattaattttctttaatttataatatcattttaattcaattttaaattacacattttatattaaaattaatatatatttttatctcatttattattttagtttacccagaattaatttattattaattaataattatttttattacatttaaaccattaattacttatattaagatttataattgaaaataatataatgtaatatttaacataaatttaacaacttattattttgaaaatagagttttttgtgttattaaattgtaatttaactttttccctattctattatttctactgaaatttcggtagcataatggctttaaaatcataaattcaaaatttttaaaacttacaaagacataaacaaatattccagtttagtatatacacataaaaaaattaatcaatccatctgaccgcagtacatttaatcacaaaatctacttcattatggattaataataagatatattcaaaatctactaataatcatttttaagtaaatccatagcttggtatatttgcaaataaagtgtacaacaattttgttctatggtgtatgtgcaagtataccaaagctatgtgcgtgttatgttcattgtcgtgttatgaggcacatggtcacgtgaaaaataagttcattgttactcggatggttagaaggctgaccttggcttagagaaataaaggtgtcgtactggtgttccactgccttaaatggtgagcacgtaacagttggtatcagagctaagttcatctcaatgggagatgaacctggttggcctatcctagaagggatgtaggcgtgtggaaggatcgagatggtctgaatgctggaacaagatggcgttgagccagttagtctcctaaattagattagtaaactgagatggagttgagattaggttacttttcttcatgggaatagtggacatcctagagaggagatgatcacggttgcttcaaattaagttcagggatgctagaaagaaaactaccacttgtaattgtagagaggcgcaacagaatgtataaaacttgttggcgtagtacaaggtttgattgagtggtccatactgtaagtttggcacactaggttgattttgcctgagtgacatcataagccgtaaaaggcttttttgttgaaaagaaaacttgttggaatgggtgtagaagtattgcaggggccgtcagattcttgttagttatgacagtagtcgagagagttgatgatcaagatagttcaaaatgggatagacattgaatgcttcagttgctacatgtgtgtgtcaagagggacgcacatggagaccaaggagcagatgttacaatcgtgaggatgattgtacttggaggtatttgcatgtgacttttatttgatccatatgggaagcactgagacaattgagtgggatgtgttggcttgtaaaagtgccagtaggcgtaaggcacacaaaagcattgatagagatgcagagttgtggaataaatgcattgaagaagccagtaggcctaaaagaccgagcacaagcattaagatggcgctaaagtttgagtggaggctagagggctgtgctagtgagacttagtagtcatgtgagcctgcgaaggtcaagaggggtgctagagtttgcatgaaggccagagggttgcatcattggaacttagtacatcaagggaacctataagggcgtgatgttagtgcaaagttagttagatggttgagtggacatggcatacatatataaatagacaagggtgatatataagatagttaactcgagagtcatatcctgcgagatgcacatttagatggaatggtgtcaatgaagagttgggtagtttgacattcatgtgtgggcttgttgttgaggacgcaaacagatgaagtgggggagagaccctcatggttcagtcgacagactaggtattcattacaagc

SEQ ID NO: 41921 - DNA, 5912 bp, Cannabis sativa
  modified_base (46)..(55): a, c, t, g, unknown or other
gttttagaagttcatatttaggaacaacatacttgtgagtagatcnnnnnnnnnngtaaaataaattccaacagtgtttaggagctaccaagattgtttctgggctgaagcaaatgaaatgctgaagggatcaaacatgcttcctctggaaatgttggtgagaagcctccttagagacatgtccaaggtattttttgatcccttatacgttttgtgcaaattatttcgtgaaacttatcttgacttgcattatgccttagttgctcaagccactgcagacaaagccaagtcaaaaaaagttcaggacgaggtcaagaatgaagaagcttccttgggcgatgtcaacaagtggctttatgattccaacaaaaggtcgaggtcttaaaaaaagagcttcccgaggtaccttttgtgaagatattgcaagaagacctataggctgaaataaagagggccaatgagctaattgaggaaaggaccaaccttcgaaccatcttgcaaagctttgagaaatagaataaagacctagtatagcatgtcaaagatctgaatgatcgtgccactgtttataagtttgtggaactagactcatatgtggagcttgccacaaacattttttatcgattctcgttagccaacccaaatgctagtttttcttatatgaagccagtggattgtgatgccatgctgatgagatgcaagaagatgaagggcgagaaggaggtccaagtagctaaggctaaagagtctgatcctccagttgagggggttactggtggcagtgttgaacaagctgatgaggaccccaacttctcaatcgacagatttgaactcaggcactttgattgagttttagcctttttttttggcctttgggctataaccttaagacatccatccaagtgaaatttaatattggttttatttttattttttttaagataaacgactgattggatagcctttaagctcagaattttatttagctttttgctttattttcatgcatatatgtacactttgcttttctttttttctttcaagaattttttactcaagtctttaccatggttcttaccaattttgtgcgggtggaggtgccctcaagtgaccgagcagactttggactcttgatcaattaccattaacttaagtatccttatttgtctgttcaatccttgtacctggacggatcattttgcaaacatgttaggtagttatgtgacttaagaataaaccaataaaattttgcaagtaataatttataaattgaccccacttcaaagataattaatcgctttattagtttattggtcgacatgtgttgttaccaaatcaatatacatttaaattgtgaataataaaaatttattacatgatatgttcagataagataggaaaaacttctaaatgatatattccatccaaaagactttattgaagagcaatgaatgtttagatattgtattttagaggtggtcattcgggccttaacataagtatttttctaagccctttgaacggtaaccatccacacgatcattacgtaagagtgatagaggtggtgtggtgattgacctcaagtgatgttttagaattatgcaattacgtggtcttcagaactgtggacttattggtagtattttcttagattttcaccattctaataccgtggtacttgaactagctccatatttccatcacaccgacccaatctgtatgctccttattttgtaacattagttacttggtatggcccttcccaattaggcccgagcacaactgttgcaccatctttggagttaaggaatactattctatgtaccaagtctcccacaaaattttttctttctttgacttgcttgttgaagtgtctagctaatttttgttgataagcttgtagcttcaggtttgctagatctcttcattcttcaatcttgtccagtgattctgttaggagagcacaatttgtttcttagtcatacatcaaccttttgtgggatagatattccaattctacaggcaacattgtttcatagccataggccatagcaaaaggtatttttctagtgctcgtccgttttgttgttctgtaagaccagagcaccttgggaaactcttcaggccaattgactttggcttcttcgagattttcttcagagtaaccttaagagttttattaactacttctacctgacaatttccttgagggtgtgcagctgttgaaaagctctgcacaatcccatttgtcgtgtaaaagtcgatgaacatttagctgtcaaattattttccattatgtaaaaaaaaattctgcgggagtctttactgacaaataatgttctttattgtaacgtctaaaaattacttgaaatttatagttgctagtggttcggcttccgtccactttataaaataatcaacaatcatgattgcgtattgcactccacctttttcttttggtagttgtccaataaggtctatcccttatatagaaaatggccaaggactttttattttgattatcattggtcgaaatcctaggcactttggagaacctttggcacttatcacattttttcatgtaaacttttgaatcttcaatcttggtttgccaaaaatatccttgacaaaatatctttttagacaaactttgcccctaacatgattaccgcaaaacccctcgtgaacttcaataaggagtcatgcaacttcttctttagtgatgcatcttagcagtgacatcgagaaacctattatgtacatcactccatgtgtgattaagtaccgtgcaacctttctcatcatctttcgaatttctatcacttggaagcttttcaatttataaatagcctgcaattggggtcattcatgtaggagtattgtacaacatttcaatttctttcatgcaagtgatgttatgttctttcagaaactgaattgggattaagttttccttgttagccatagtgttgcttgccaaccatgccaaagcataaacagttacattttcctcttttgggatatgcctaaggttaaatcctttgaattgtgtgggaaagtcttgaattttacttaaatacgccatcatttttaccctcgagccatgtattcccccaaaatgtgattgatgaccaactaagaatcgttgcagatgtctaggtactcagcatgtacttcctgagcaagttttagaccggctatgagtgctttatactccatttcattattggttgttgtgaagccaaactttatcactccgtgtagggattgcctccaaagtgtaatgaaagttattcctgcacctaatagttggtcagtggatgattcgtccacatgcaatttccatattgatttatcatcatcgttttcttctagtgtgtacacttttccttgttatttttttggctcggtgttctcctatgaacttgttgtttcttctcttgtacattcagccacaaagtctggcaaggcttgaccttttattattttcaaggctgataagtaatttcatattgtcctagctcactttcccatttaagtagcccaccagaagcatcaggcttttgcagtacttggcataatggttggtcggtatagactctaatggggtgagctaggaaatatgggtgaaacttcctagatgccaggaataagcaataggtcaatttttcgattagaggatattgaattttagcatcaattaacctttttctaagagagtagaccgaatattgggtattgttttcttctctgatcagcatgacactgacaacatattgagtcattgtaagatatattcccaattcttattcgtccaaatgttttaataggataggggatgtgcaagttgcttctttagttcttgaaaagctctttcacactcggttcattcaaacttcttatttcctcaaaggatgttgaaggaaggaacacattaatctgttgacttggatacaaatttgctcagtgcggctatctgactagtaaagctttgaaattccttgacttcttttggcaatttcatatccaaaagggcttgaattttctttgggttggcttctattccccaagcactgataataaaactaagaaatttacctgagctaaccccaaaggaatacttaagcggattgagtttcatgtgatatttcttgagggtcttgaagcattcatacaggtcctctctattaccccagccttattggatttgacaagcatgttatctacgcacacctctacattacgtttgatctggtctttgaacatcctattgactggtcactggtaggtatcctcaaaattctttagtccaaacaacataactttatagcagtacaagccaaaatctgtttggaagctagtgtgttcttggttgggtggatacattgttatttgattataccctgagtaggcatcgatgaagcttaggatttaatgacctattgtagcatccacaagttagtcgatccttggaagtgaaaaatagtccttcagacacgctttattgaggttagtgaaattgatgcacaaccaccatttcttgttccgcttgggtactagtatagggttggctacccaggccgggtagaaggcctcaattatgaatctatctgttatgagcctttctaacccttcttttaatgcttgtgcatgctttttacccctcaatctcctttttttccagaggggacaaaagttgagattaatgttgagggcgtgagaaatgatagttggatcgatcccgaccatgtcttcatgtgaccaggcaaaaatgtcaagattttctcttaaaatttttatcaaagattattttattttgagcaacaaacctttaccaattttgagtttcctggtcggcatggcaggatcaatttgaacttcttcaagttctttgactagcctaacatttttacttgggtccccaaggcgggaatccatgtcttcatccccacattgggcagatccctatttagcaatacttttagctttctctaaactcttgctggatgtctcttcttttttggccttagtcgaagcaaggttgtagcattctcgtgcagttctttgagtgccttccagataacctactccatttctggtcaaaatttttacatacatgtggtaaattgaggttactgccttcaaatcatataaggcttgtcaggccaacatgatgtttaatgaagaaggaacatcaattaccaaaaattgtgtcatgattgtattagcatttggagctttcccttttgtgagtagaaggtaagtgtgtcctagaggaacaatacattggccggattaaacatatacgagttgcgtgtaaggaacctagtctttgagttgaaactcaatcttttcatatgtagttttgaaaagaatatttaaagacgtcctattgttaattattgtcgaagtgactggcatatttgcaatttgtacttctacgactaaggggtcattatgatggtagatgacatggtcaaagtcttcttcactgtatgaaatgattggttcttgtctacatgactattttggatttctttcttgtatttcatttttctacacgtattgcagggtctgcatacttctctctacatttggagtccctagcaatatgagggcctccaataatcacttgtagatgttcgtccactagtggaggcatcaattgattctaagtattatcttgttgggcgaccctttgttcctggtcgaccttaatgtacctttgtatgtgcggtttatttttcctgatgaggaattctatttcttgtttcaggttattacactcattgggatcatggtcgtagtccgcataaaagcaaaaatatttggtggtatccctcttgcttatatctttcttgattggcggggggggggggggggcttttgtacggcaccacagactgagttat

SEQ ID NO: 41922 - DNA, 1673 bp, Cannabis sativa
  modified_base (507)..(515): a, c, t, g, unknown or other
acaaagaacaaaattttgacgaacagaacaccacagggtgaaccacttgtgcaacatgatgcatggtttacttgttagatatcttcatcatgcttgggactattcgtatagaatgataatagtactctattggtcatacgtactcacaattcacataagatattccaagaatgtgtattgggtatagtatttaaatataatatatatatatatatattaatatatatgcctcttgaatccatgcaaacataatttgaaaaatctaatatacacccatcttatggtcatagaaattctaaccttaattcaacctttttttttttatttgtatggaaaccttaattcaactttagtgcccactaactttcatctattataggaatgagaatgagaattaaaataagaatggaatgtaataaaatttaaaatgcataaaaaaaattgataaaaattattaaattttttcaaaccttgcattagaatagtctttccttccatttcaaaatnnnnnnnnnattccaccaaaatgatggaaagacaattatatgaaatgaaatgagattgttttttttttccatttcattacctccaaccaaacaccaccttagttcttaaggcctaccctagtaccatttgccccatacggaatgtcttggggcaaactcagaaatttttttaaaaaaatcatattgaaactcgacaagaaaatataaaccagagggttgcctttctttgttctacattgattcatttaaattgttttaacattccacattataagtttttaaaagaataattataaacagttacgagtatcgcgattatctaatcttagctatcagtaaaatttattaaaactaattaaacaatagcgctttgaattttgctttttcactttgcaagatcttctaatagtcttgctctctatcaccaagtgggctggtgtttcgaattcctctagttgtttcaattttggggagttgctccctttgtagtaactttggcttagtccattttgaatgaatttctactttgcaaaaaaaaaaaaatcagttataatttcttttttgttttttttttgttcaagatatagttttaggttatagtgggctaaacaaatgaccaacataatttataatgacattcttggaccgttggtggagcttgaaagcatatggagctaattatctcttatttttgcttttattttttttcaaacaaagagtgtgagacataatcattcacatccatggaagaattattaaaaaaaccaaatcttagtcgatcttttagattcatataattgaaccatatactaaaatctcctagacgtcaaatcacaaaacaagagtagctattgatgaagctcattttagaactaacttatttcttttcacttaaaatatacaaagttggtgttttaccattttagagagaaaacagctctcttattttcagtatatgcagccaaaaatgtggctgtagaatatgtaatgtgtagcgtttatttacaataaaaagtgtatatatacacagtaaaagaaaggcccaatgggtcgggattgggccaagtaaacaaataaagcaattctaatacccccttcaagatgaactgtacaagtttcttaagttcatcttggttacaagtgtataaaaatagggaaatttacatg

SEQ ID NO: 41923 - DNA, 857 bp, Cannabis sativa
ctattgtttttgtcatttagctcgtgtagttatattgagtgacaaatgatgtttatctttcttttaatatctttttagatcgattccatgggcgtaatacatacaataactaaagacatggactgtattttccactttcatcaattttccaagagaggaatatttacctcaaacatccttatgggttaacttttgcatgattgttagcaagtacatggtcgtgaaataacacaaaaaaaatgtatatatatttatgaatataaatttatatgtatatataaatcaagaagcaaaatacttttaagagaattttgacccacgtatgctatatataatgtgatcatgtgatccttccttgaatagactcactaatgaaaaagtgacaaaaggaaagaacaaactaaataataagagtgctagagatatttctcttggcctggaaataaatatagagtctacatttatatattaatattagtattgttataataaaaaaaaatctaaaaaattgcacatacccaccataacataacatgtcatgtggcgcattctcttataatttactactccaaatcatacatcttatccaatgcattgtgctcaatttgacataatattccaacgatctccattcaaagcatttttattagtgaaatttaaatttttatgagattttgcagataatctttttcttttttctcgaggttatattcattcagttaagctcatgttgagaatttttatataatttttctaagacctcgagtttgcaagctaatgttagtaaaacaacagtttattgttttggtataaaatgagaatgttcaacatactttagattgtttgggatatgttag

SEQ ID NO: 41924 - DNA, 941 bp, Cannabis sativa
taagattaagaactcataaatttcagtacatatcaacttaggaaaaaacatctaaatatgttcatcatatagtagaatcatccttgaatgctagaatcttcaataaaacccaagcattgcaacaaatcttcatataacaaaaacaaacaaccccccaaaaaagtaccccactatttagaattagctcaaaaccataaaaatccaatcttggtttgttcaaattaacttaaaaattgggttattaatttacctattcctcttcctctatagggtttgatgacaacaagcatggcaatgtatcctctaaacgtatttcgatgctcccccatcttgcaaaccactgttcccacacattttcctctatgaaacgcctttaagaaaaagaagataaagaaaacccattaacacatattcaatcaatagaagaagattaccaagaataaaagattaccaagaaagagagctggggccagagatagacgaagtatcgataggtgaaaatggaatagggctcgctgagttcggaatcgacgagtcccatgatgaggggtaagtgatgctctcctccataactgacgtagtcgatctctgatgcctggaatttgagattttcttcttcctcttcttggttttctactgtgttcttattggtctcctccatattgaaaaactctgttaagatgttacttgtggacattcactcttcactataattttgggaaaaagaaatgattataggcaacaacaattgttcctagcaacctctttgtttaattgtttgtttaagtatctttataatttaatctaataatttctatgtaaatactattttagacgatgtgttttgtaaaagttattaattggaccttctgttttattaaatgacaaaatggactttgtattttctaaaattgtataaatatgatcctgaattgattttt

SEQ ID NO: 41925 - DNA, 1304 bp, Cannabis sativa
taacatagtattatacaaaaatataatgtataatccaattcaatataatacaatataatacaatacaatctaatacgacattccaaactagctctaatagaattattatgggaaaaatttcactagaaatcaccaaggaaatgtatacaaggaaaagggagagcttcatatatatggagagagaaagggtagtgaaaacaattgaaatttttacatcattgagtatgccattgatgacacattgacactaacaaatcgtttatgtagtttattaattatacatagtttcacataactgcaatttaccacacttatataaattacagattactcacaaaatagtcacatagcagattataatatatggatacagattcttttagtttgatccacaattttggcgaagcatagcccaccatactttattctaccaatagtgcgtatgtaatgtataaacatgacattttaactaaaattattttgaatgaatgttaattgttcaaaaaaaatataaacatgacatatgaataattgaatgattctcaccatttaaattatataaaatatttaatttatttctaatttaatttgcggtataaatatttaagtttaacttattattataaatacttaagtttagtttttgatgataataatacttattgcaacgtctataactatttgaccattaggtattaagtctttattcacttgttattttcttattagtatatttaaattaatttttaaataaaaaataaaaatttaatgtcatggactaataaagaattgtcacatgacaatttacttgacattcaacagccagatacctatagatgttctagaattataacttagatatcattttcgtcaaaaattaaagttaagtatttatttacagctgcgagttaatcttaaatatttataccgtaaattaactatacacttaaattattgggtaagcatgcataccttgaaaaggttactgtagtagacacataggacggacttgagaatatataggccgcgatttaaattttaggactgttatttttagaaatatacagaaaaaatattgaagaagagtgttatggactcaaacccataccattatatgtgtcatacatgccaaccaactaagctataaatatttattttttatagtacacttaattttttcaaataaaaagctttttatttggaaaatttacaccccatgcttaaattatcacttttattacatttatattgttacacggtataatttacttttatactgtatatatttttcatttatactgtat

SEQ ID NO: 41926 - DNA, 1179 bp, Cannabis sativa
ttattatgaatattattacccctatttatgattcttcttcactcttcctttttgttcgttatctttaaccatttctttttgtataaaatatgaatgtataaaggggaagtgaaatgatttgtgattattaactttgttttttcttctgtatatgcctttattaagaaaaacatgaatggatatttctcaatgaataaatttattaatttataatttgattatatttatcattataatctattaatggaggggtaataactttggccaaggcaacagaaatgattatatttttgaacaatgcaaactatgatcatggcaccgaaagtatcccatagtagaatcatataattccaccccctatacaaaaaagagagaaagaagaaaagaaaaaacacttttactgcttgggcatttggcgctcttaattattaatcaagctttacttttaccttttatcatttcaatccaactttatctttgtataccaaggtttatgagataccaaggaagaaatagaagatgatcataaataaaactaagagacatttacaattacaactttatcaaaaacttacaaggataaaaaaaaattaaataaattaagtattataactcaaaacataaaatacaagtaaataaaagaaatagaaaattatagttacaactcaaagaacatacacataaatataaaaataatgtaaaaatatctatgatatatagctataatataataaatatatatgagtgactattcaattgttacatttttattataccaatcatggttacaatttttttgacgtgtaatagcatgttactaataggtaaacattccttttttagaattaattatttaaatatttaaaaagatctcttttagcaattaattaatagttataaataatttttttatttatatttaaattattactttaattattttaacaatgaagccatttaattataatatttataataaaatgtatttttttacaaaagttaaacttctttttacacaaattaaaattttcttcttataataaatttttaaataattaattatttttttaaaaaaatcatttaacttattttactttttactttttaaatatttaaataaaaaaattaagtaattaagtgtaataatttaaaattaaaattacaagtataataaaattt

SEQ ID NO: 41927 - DNA, 2299 bp, Cannabis sativa
tttaaataaaaaataaaatttaatgacctgaagcaatcgtgaactgtcacatagctattaacttgacacttcaatagtcacgtacttataacttaagtattattactatcaaaaattaaactaaagtatctatctaaaatcgaaagttaaggattaaacttaagtatttataccgcaaattactctttatataatagtataattttttttaactaacaaaacaatctaccataaaccataataggagatagttcattacttaaaaacagaaataaatcaaataaaatcataataatttaatataatttatgttttattgataacaaaaccattagtacagagttacaataataaaagtaaccatttttacttacaaacaccaaaatatcatataaaacatagcaagtttctatatatatatatatatatatatatatatatatgagtgtggctagttttgaagatcagctgggcgaggaacactgtgccatccagtacagtgttgaacatggtgtttcagagcatctgtgggtggtgccacggtccatttcgggtaatattcactaggatgaaacatgccatttccgccgctctctgtctcggccatcagccctgcctgagttccacacatgaataagtctccttgggatcttatgcagccacttactgctacttccctgtctgtcgcctgcgaatttcatcacaacaagttcaacagcccatcagtctcactttttttacatgtaaaaaaaaatggtttctttatctccttgtacatggcaaagttgtttttgggcttctgaaactccaaaaatacttttgttgttgctaggactgaacatcgagcgaatttactgagtttcgggttagtgaaaaaactcttataaaaagcagaaaaaaatgcttaaccaaacaaggccttaaacatgttataagggaatgaaacaaaaaaagaagacaaaataccttctctgtaagatacttgaaagctactttcttctgcccagcctcatatatattacattcagagtatatctatttgtggaagccaagaaataagacacaaaaacagactattatcagatgaaatcctcaaaaaccaaaaacaaacacagaatgatttgagttatattatcctcacctgagattctacactggcacaaacagcatatatgccccagtttctggtgtagttattgtaaagatgaacttttccgaatctaacacgagggtgtcgctgtcgagtcccatcaaagaaacaatggtgaatcgtaacacgaatgcatctatcgcttacatgagaaggatctgctccgatcagcattgtcttgtcatgctgcgcgaaatgacacctaaaaaaagccaatggtttaaaaacaaagagctgaaagagtgaactttggggttcaatatctcaccttgagatggttatatcagtgctttcgcgggttatatctataagtccgtcatcataatcgcgaaggctgcatctatcgatccaaatatgttgtgatttcggttttatctgaatgccatcaacatcaggccctctaccaccttcaaactccaaattgcatacaatgacatgttcacattccttcaatctcaaaccttttccagtaagttttatcctttggcctcggccatcaattgtcttaaacgatgaaacactcaagtaggatgaaagatgaattgtgccggacacttcaaacacaatccaaagtggctctttcttacgacatccatctcggagtgatccaggaccatcatctacagcaacacaaacagtaatgaatctcctaaacgtaacaaaatttcattaaaattcgacaaatgctcttaactcaatatacaaaaacttctatgaaaatcactgcactcgaatgtcaatcacaatcaccccaacataacaaaaatctcccaaattcgaaaacagaacattgacatgaagatcacttcattcaaatttaaatcacacaaacagtaatgaatgtcctaaacataacaaaatatctttgaaattcgacaaatgcccataactcaaaacacaaaaacgttttctatgaaaatcactaacatccaaattttaatcacactcacctcaacataacaaaaatctcccaaatttgaaaacaaaacattgacatgaagatcactacattcgaatttaaatcacacaaacagtaatgaatctcctaaacataacaaaatttctttgaaattcgacaaatgcccttaactcaaaatacaaaaacgttttctatgaaaatcacactcaccccaacataacaaaaatctc

SEQ ID NO: 41928 - DNA, 1072 bp, Cannabis sativa
ttttttttaagaaaaataacaaaaatccctcacattatccaaataattacaaaatttaaccttcagttgtattttgttcaattttcaaaataatttaataatatggtcatgagccagatgtatgtaattattttttgtaagagtctcaaattatagtagattagctcgggattagttttacatcacaaaaatgttagcaaaaattaaagaaatacaaccgaccgaatgagcaaatttacaattatgtctaaaattcaaggagaatttcttacaaaaaagaaattataataattcaagagcaatactttatgtaagaatgttgtgacacatgtcatagtttgagggtaaaatcatatttattttaaaataaaaatataataatgttacataatttaaattatgtttggctaattcattgctacatcagaaagagatgtcgtaaaagcttaaattttaatacctgaaaaggtaataaaaatataataatgttacataatttaaagtatgtttagtttttttaatcatttttttcttttatttttttttatttgtttaagtattgttttacggttgtttgtcatgatttatttatttgacgtcaatttcattgttcttgctctatctcgctagaattaatagttattttctgggtattctcgtgttgctgtggtgattatgtccgtgggtgtggaagatggaggtaataaatacatttcttcttcattcgctttggatatttttatgtttttttattttagttctcctataaatacatttgacgagctcactggtaaaagagttttgagggataagttgaaaactattttttagtatgcattaaccaaatataactctaaaataattttaattaataaatactctcttttataatcaaagtatcaaatataaccttacataacttattaaaattagaattttaatgcacataatggggatatgatcacctataaaactagatataaattaaagtgtagtaaaataaaggtaaaaattaaaataaaaaataaaaagtgggtatagagtgtaatttaggtgtgtggttcttttatgt

SEQ ID NO: 41929 - DNA, 1148 bp, Cannabis sativa
ttacaagtattaccaaacgacaccttagtattgccaattaattaattacaaatatgtactatatactaaacatgtatacactaattcgtagttccatttcttcctaattctttttttatacctaatttttctggtttgtattttttttttcttttaattataataatatttctttttagaagggaataataataataattaattaatataatttattttttataaggaaagaataattatgtaaatatggtttttacgttgtcaatacaataatttactgcatgggcatggcattgccatgagaagccgttttcattacagctgcacattaaaattagattcccaaaaccttttttgtttgtcaaaccaaaaacctctatatatatactcatgtattataacttttattattattattaaaattcctttttagattatattggacacttggacacgattttgtcccgtaatatactttctcaaaatatattttgtggtacattaaatgggtattaggtaaattagatagattttaaggtacaatactattttttaaccctaattattcctaaattaatcccaacccttagatcaaatatataactctttcatttaacagctgtcggacatgacgaaatacattcttacacggacaaaatcgtgtatcaacacaaaatctgtagaacacgtgcttaaaacaaaatagatggttggaaaatgagaaattatagatatatatatggtagaagatggtagtgacacgtgtacagttgggggccgggtacgtacactacgataatgatagggtttgtgttattgttataccacggcgtggtcgattctcattccttacaataatatatatttttagagaagattttaataattttaccgattatatttatcttagttattggatcaataattaattgaaaaattaaataaaataattaataaattatttgattttatttacttttttataaatgaaaaataaaaatattataaacattaattgtaaaaaatattttaatttattttagaaattttattttttttacactttaaaataagttttttttttttaataattttactaaattatacacagaaacccttatagtaactaatggaacaacttaaatcgc

SEQ ID NO: 41930 - DNA, 3405 bp, Cannabis sativa
acttgtgcccaacatcatgatgtaattttgaaatgccaaaaggatggtttcagctgcaacataaatggaaaattcaagcaaacaaacaataataagttgatcagagacaacatatcatcctataatataaagctttttgcctaggcggcttagacatattggatttttcagcagcatacaatgacatgtaataacaaaacactgctttccaggacgatgcactgattacaacacaaactaggcaattttaatcaaactgtagaaggaaataaactgatttcccaacattgtttagtaatttgagttagataaactcttccattacaaaggcacgatgtgttctatatattaaattttttttctttctttctttctaataataatatattttcccttcgcgaagactaaaccctccacatgcaaagggatttgaggtggccatgacaaaaagcacgagtgatgtgcaattgtgcatggcatgatcatacatccaagttgaattccatttcgattcctggtcaaagcaaatgacaccagtcaatgcagtcatttgtggtcaaagcataccaccccatgaattgtacaaaccagtatggaacagaagcagttccacaagaaaaagaagaaaaaaatcaatttccttgataaataaaatatatatcacagagcacgcaccacagcaaatgtggcagaaaacagacccgtgatggccattaaacctttattttagggacatgaaaaaaagaaaatgactttaaaagcatgaagatggacccagtacatcaaaacttacaaaagcttactataagctcacaaagcctctctctctctctctggaaaaaagggtaaaatcttgggctggagggttttagtaaaggtgtagtaatatcacattttcccagtcattgattctccatgccagggaaccagtaaagaaactaaaataacatattttctccaaacaaagaaacaatgtatatagttttcttcgactcgtgttaataacttgatagtgagtagtaatgacacaaagcacagttaccaaccatgaaacttatcaaccactccaaaaccctgagcttgttttccttccttctacggtgtactcgaagatagacaacattaacatgaacccataaaaaaactgtacacaaaagcttctgaaaatctatattaacacaccctcaagcccatttcttattcaagctttaagatgatttaaaaagtaataaaaataacattttgagagaaactaaacattaccccaaggagggttggagtctatgcagtactcaaggtcttgaagctgttccatgggagggtggcttatgtctgccattgttgaagtgtctgagagagtgagaaacttcagaacaaacccagataggcaaagaagaaagaactgagaacaaagtaaagtaatagaaatagaaatataataaagtggaacaataaaaagcaagtgagaatttatttattttaatttttacttttttttacaaaataaaaataaaaagaaagaaggaaagaaggaacaacaatatgcaaagcggaaacctctctgtgacgctctctcactgctgtcgtcgattagcctgttcttgaatcagtgtgaaattacttgattaccccccaacttattctctcaactgcaaatacccattttccatagtgtaaagggtacaatattttggttttattgtggtacggccaaaatatttcaaattgggtcaagagatacctattactccaccatgacatcatcacaatctcttgttacattgtaaaatataacatagtaaaaaaatgataccaaatgagtaaaaattgaagatatcaccataaataattttcttaccatattaggatggattgggttgggtaacaaacgctattcaattttcaatttcacgaccttatacatatttttgagccattattattgcatatccaattaaaagaacttttgttagaagggtcccccaactcacaatttcatctcaggtgtacatttatgtagaaaaaatttatagtcgttgggggcatttggtgacacattaaatctgccattaattcttttatatatatgtggaataatgaaataaaaagattacaggagaagaagggaatatcaaattataaggtagggtcctagtagtaaaatcagtggatttgatagagaaaaaagtcaaaggaccaaccaagtatggaaaattggaagatgggttgcacgtgccatgcacagaggttaagctttcggctaaatctataatattttttttttatttttttattttaaaaaaaaatgatattcctcccatctccattccattctccacgactgtgacattctcccacaaaatacgattccatgggaaatggattaccccaataacccaaaactcactctccccatttttcaaatccttttgaaaactctcattttcaagataagaatctcacgctcacttttttcgttttccttttggtttttccagcctcaaaattaggaggaggcttcaccccttttgattttttcaacagtatggatcatttcgctctcttttcacaaaataaatagtgaaacaaattaagtttgtaaataatatcactcctattgctcaatatttttttagtagtcttttttttgaaagaccacttatagagttatagagacagtgatagctgtatcagtgtttatttacatcatttatatattgtggttgatgagtatcaattagagaaggcacttgtgaagtttcaacatgtgggacccctcaatatttttttttagtgtcatgagaatcatcgtccacttgggctttgcttgttttcttttattggtctcatctttttgttaaatgtttaataaatcatggtcaattcaatggagtttagcactacgtaaatacactcatcatttgcacatttgattttggaatggtttatgtttcaactttcaagtttttacatggaagccactaaagtgactcatcagactaaactaagggatcaaataggacattggctagtttaaaattaattccttaatgggacaaaagtttgacctacttgcaagaaaactagagccttgaaaacctaagaagaagacataaggcaaacgacatgaaattacattggaaaattttaaataatagaggaatgaacagataaagtgcaccccttgaacatgtgtgctaaaataaataaagaaaaaagtaatgaagaatatataaatacttaaatataaccaaacaatgaatagataaagtttaaacctttttaatgttatggaatttggaataactttggttagcttccaagtaccaccctacaaacaaccgcttttcaatgcattgcctcacccaatgaaatggattattatgttttctaacttcttttttt

SEQ ID NO: 41931 - DNA, 1747 bp, Cannabis sativa
  modified_base (240)..(250): a, c, t, g, unknown or other
ataattagggttaaagaattcggtaaagggatgcacacgggacaaagaattaacagagagtgttctttcatacttatctctattgaaaattttaatcatcattcccgtttatttcccatcggggatgtggcagggaatcccttaatgggggcgagaacgaaacgagaaatctcctaattaataaaaaaaataaaaattatactaaaaattaaaatatataaaaatattaaactacataannnnnnnnnnnttacacattaattattattcaataaattaattattatccaaaatacaacttaaaattcataaaaaataatactaatatactaaaaatgcaaccataaattataaaatgtaacatattactagaaatataaaataaaatactaaacggctccccatcgagacagggagtatgatccccgtccccgtcccgtttaatattcggggacaaaaagtaatttccgtccccgtcccgttccccatttagatgggaaattcccgccccagttccattagaggcaggtccccgtgagacccactcccattgaagaaattagcatccctaatccggtgtcaatgttttgtggtaagatattgtcaatgaaacttttttttattaacaataaatgtttcatataaaattatatatttttttctttaaaaaataacttaaaatcttatactatatatcaaaatatgtagaagaaaatgagggagtcatttccttaaattacttagttcatgattaacaaagcaaagaaagatatatcaagtggtggagtcattttcttcttaatataatctaattaataaggcaaagcaaagacccactgattaagcatgccttacatacacagcctcattatttaaggggccagagtaagtaaaagctgaagataagcatcatagatagaggtggataatggctctgaaaaattatgccttttaaaggtcactagttacaatctacaactctaataatgagcaattattcactgttttaaagggcgtgggggactaaataagatcttctcacccctcatataattatcatagtcacatcactttaggttgctttgtttgtgggtgtgaaattgtagttttcacaaaatgaaaagcaacaactcaaagatttcagtcactcatcaacaaagaaaatggtgtccaatatttctttcatggtctatctttttttgtcttgttgtcactgataatttttatgggtataattgtgttataaaaatcaaaatttctgaatatttctatagagatttcatgaaatttctatttgatgtatcgatatatggtatgaattatttgttatttgtctttggcaatgatatgaaagatattgtcagtattcagtatagtatagtctatggaaaaacagtgaggagagagcatcaacaatattcatgcaatatttagacttacaggcaaatatagctatatcttaatatcaatataatcgaaattaaaattgtttaactaataattttgatattataatatttgttgagagaatgattttcattaggcaaatcatcagataataatctattacgtgatgatatatcacttaaagattaaagagtgaaattaacaagatagacaaactatgccatttacaaaaatataaatggaaattctaataacactttcaattaaaatactaataaactatcagcgttgaagcatcaaagaagcacaaagaataatagatttccaatctaaatgaaca

SEQ ID NO: 41932 - DNA, 515 bp, Cannabis sativa
attttatcgtttgtatcctaataatcccacccaaaatattagccaacttcactaataatgcatctctgttctaaaaatcattcagtggtgggttgcttatcttaaatttggaaagaagaatttcctacagctaccttcgattccatggccttagcattattatcagtagccagattcattaatatgttctctctctctctccttgattcagtatgcataataatattgttgaaagtttggcctacacagggtcaaacttttctgtatgtcacttagagatttctctaactaaatataaacttactttgcagaaaaaaaaaaaaaaacatacataaacttactatctaacctaagatacctactttctaaaatttagacataaaagtttaggacaagtctaaaatatatccttaaaacagatattttgatattattttattgttttggtatctagaatagtttttttttttttttttttcaatagtgatgtacaaagttatttatgattaccttta

SEQ ID NO: 41933 - DNA, 1520 bp, Cannabis sativa
tttttcggttcggtttgggcgggttattcggtttaggcggtttacaaatttttttgtacagctctagtaaataattagtataaactttatttttagtactataaactatttagaagtttttgataagtgattttaaatagttacaatatatatgattataaaaagaaaataaaactaaaaaactctcttaaataccgaaacagatgaaaaatctactagaacaaccgtttagaaggctagtatacaagaaatttcacataaagatagcttagaattacaactatagtcataaaaaatgcaaaaaagaaaatagaaaatatttgtagtgtccaccatacaagccttatcccaaatttcattgatttattattatatagtgaataatagtgagtagtgagctaataaatagaggatgtgtttgtgccaaacataactagacaactcatcaactcaacccatctgtcagtcattgttttatatctcattttttatttggtcctacacctaacctaactatcattcctatacaataactatttattttttgctaaaattaccataaatatttatttagtactatatataactcttaatttactactacttgtctctctatatatatacattcatttatttgtttgcattatacatatatgtatactcaacataaatccctttttctatttctttttatttttttttaattatattcatctcttcaaaattcaattctcttttttttgcttagtgaacacttaattggaatgaaaaattatatactatggagcaaccataaaaattacaatggttattatgcactattataaaattatgccattaaataaaatttttaatcatttttagtaaatttatttaattttgagggctcttaattaattattttaaaaaatatattgtaacggattttttttcttcaatattttgatttatcaaattaaaaaaataatacatataattttaagtgcattctttatttttttactcactaacttttctccacaaaatgttaagcatttttttttcaaaaaaataaataaataataagtagaatgtcaagagtgtcttaaaatattttctacaaaaaagtatcttaacatatttgtaaattagaaatatatatcatacaatggctaaaataactattttatcaatctcctttttaaaaatatatacatatatttattttactaatttcctcatgatcttccgagataaaatatattactattataattaaatattaaatttttactattttttttattattattttttatgaaaaaaaacattgtattactaaactattttacaattctggaacaaagagctcaatatatagttcatttgttcaaatcaaatgttatttacttgacttgttttatcttttttaaaaagaaaaaattgaatctcacttatttttattttaataaaaattaaaaaaaattattaatcaatcatagaatgtcattttataacactgttgcccataataatactct

SEQ ID NO: 41934 - DNA, 2664 bp, Cannabis sativa
tgatagattgaattctaaattttttaaaatagtacactaagctgattttttctttttttttttttgtaaaaataaactcagtaataactcgatctagatgtgttatattatgataagacggattatattttttatatctgtttctaacaaaaattgtcttcaaatttattatattaaaaaaattgttgaaaaataagttcaatgtactattttgcgccattttttatttgacaaaatagataatctgattattaacttttgcaaaacacgagatgtatttcgaaaaagattaaattcattgtctttgtatatataaaacactattttttataaaaatttcacattcaaagatataccacctaaaaataaataacatacaaataacaaaaaatcaacaataaattaataaaagtacaacataaaaatacatcaaaagaccgtattttttataaacaaaattataaaaattgtaaaaatatttaaaattctgtacaattgtatttttataatttcttttattattttcgtatatcttgaaataagagattattgctacttaaaacataagaggatcaaatctttacacaaatgggaaactttcattttcctagaatattcagtcaaatattctcattttagagagagaaaagatgagtttttgagttactttttcttttgttctaactattttacctacctaaacttaaacaccaccagagagctttaacttattttcagactattgaacccaaaatctaggagaaaccaagctacatctaatgtaatgtcaaaatgcctagaaaaaacaatatcaaccctttgtactttacggacaaaaaaagtccaaaaatgaaaaatcttgtctttttcccacttagtttttcgatcatttctaagatactaattatgaaacttgtagctaaaacacttagtttttcttagtcacctccgtccattgcctaactataaaaacacttcactacccttcactctgttccaacctttctcaaatctaaacaacaaaaaatatatgtgtatatataaatattataataaaaatggctgctttctcatatccagcttcctatgctataagatgttcttcttgtaatagggatagtaatcatcaacaagacccaaatgttcaaaagttgaataatatcaagattaatggaaggtcaagctctcaaagtgatatacttagtcaaaagattggtgctttgccaaactcttgttcttctttgacttttgttactaaaaatgagtcctttactgctgagagaacaagacagaatatcccaactaagaagcaattggttgacccttttcgccaagggctaatgattgaaggtggagttgggtacagacagactgttgttattagatcttatgaagttggtcctgataaaactgcaaccttggaaagtatccttaatcttcttcaggtgagatacacaatgataactcttgatcttgtttgtcaatatgtttatgtatgtatacataggtttcgaatgtagtcccgctttttcggtggttttgttctattctgagtaatttacatttacattaataatgatgaattgatgatgtttatgttgtatgttactccagaatggaatgaaacgaaatagaataggattacttccggcaggtttcgaatgtaattctattctttcgttggttctattctattctggagtaatttattgaagtagtttagggaataacatttacattgatgttgtatattactccagaatagaatggaatgggaacaggattacttccacccatttcggatgtagtcctgctctttcagtagttctgttctattctggagtaatttatcgaagtagtttagaataacatttacattgatgatgatgatgttactttcggtggttctattctattttggagtaatttatcgaagtagtttgagaataacatttacaatgataatgatgatgttgttgtatatgaaattttgttaagagttttctttttggtgttataggaaacagcattaaatcatgtatggatatcaggactactcagtgatggttttggtgccacacatggaatgatgagaaacaatctcatatgggttgtttcaagaatgcaagttcaaattgaacaatatccaatttggtaaactctaatcctagttttcatactcttaataatgatacagctatgttgattatctttatctatttcaggggagagatagtagaaattgacacatgggttggagcatcagggaagaatggaatgcaacgggattggttgattcgaagtcaagccaccggccatattttagcccgcggaaccaggtaaaaacatcttttgaagaaagattatcaattttcatgatttcattcataaagtgtcgtagtactaatgtattataaaacagtacatgggtgatgatgaaccgaaaaacaaggcgactctcgaagatgccagaagaggtgagggatgagatttctccttggttcatagagaagaaagctatcaaagaagatgtcattgacaaaattgtcaaattggatgataaagctaagtacatgaacaccaacttgaaggtaaaaaagcaataaccaaaacttatcttgatcaaccacattcttgttcccaactcaatcaactcatataact

SEQ ID NO: 41935 - DNA, 640 bp, Cannabis sativa
aagctaaacaaggctctttatggtctaaagcaggcccctagagcatggaatgagaaactcaaactcacactgtacaacaaaggatttacctgctctaaatccgacaactccctcttcattttaggttcgggtgattctcaaattctattgcttgtgtatgtagatgataacttgattacaggacccaatgctcatcaaatttctaccctcattcatgatctaaacaaggagtttgatgtcaaaaatctaggctctcttcactactttctgggtattgaagttgtaagaacacctgctggaatgtatctctctcaatcaaaatacatagccactttacttagtcggttgaaaatggatggagcaaagcctagtccaagccctactagttctgctcacaaactctctctatccattggtgatccttttcctgatcaaacactttacaggagtaccttaggggccctacaatatctaaccttgactcgactcgatatagcctttattgtcaacaagcttagtcaattcatacatgctcctacatccacacattgggatgcctgtaagaggttgtttaggtacctcaagggcactatacatgaagggttattcatcaaacctgctgtcagaatggacctccaag

SEQ ID NO: 41936 - DNA, 1233 bp, Cannabis sativa
aatggtttgcaataataaaatgtcaattctcgaatcctaaatatgtatgtgcatgtactttttttattctcagtattaataaatgctatcctattcctatcctactaacatgttacatgtaataattagcttttttgtttttgtggtatttcatacttattatattttcaataagcaatgagaataatcatcatatttagtggagaacgatcttaactttgattcttgtgtttagctttcggaattttatgctcttctcttctctgggcagatcatattagaatatagagataatatatcgaatttatcatataaattaaacagggccggtcctatgttaatttatttaggcccagtgaaaaggtgaggctattggaatttgaactctcaacctcttagttgataaattaattaaattaccactaagctacaacacatatttagcattaaaagtattattatttattttataactaactatattttaatttttttttcgaaatggggccctgagcggtggggggcctaaggcggctgcctccttcgtcttagctcagagccggccctgctggaaacacaagggaaataaaaactactgtctacaattaattttatttaataagatcaaagtaatttatggtatgtcatttgaaactatttacggttaaaattaaatacacaaaagtgtataatttgagcatgtatatagcattctagcattgttatactgttaatggtgttgtatattgcctaatagcaatgttcctttttaaaaactcttgcagagaaattgctattctttttcaaattcttcattggttgcaactcacaacaattatgtaggattttgaaagtaaaattttgcatgaactgacaaaaaaacaagaggaacaatgaatttccaaacaattctagagatctagacaccaattcaaaaatatggattgaattggggccactagcatagaatatgtaatcatcatttgattgcaatgttcatgatcatagttgaagtaacacacacagcagttactcaaaacatatagtaagtcagtgacctaaaatgaaaataaaaatcagctgcagctgcggcatagcaaaagcacatatatcctcacatgaatgactagtcaatcctcagccacaatggtagacagagaaaatccagcatgcaatggagaacttgagctttggctaaatctacgcagagccttcctctggtttcatgtcatc

SEQ ID NO: 41937 - DNA, 848 bp, Cannabis sativa
ccactccggcacgctcacaatttggtaatattgtctcttttagtttattattcttaacaatgtacttttttgatcaataaaacgacatatcgttttgttatggtgaaacgacaggtagttctacgaaatataattcagaatcacacgtaatagtaacacagtgtaaaggaacaaaaaaagaaaaaaatttgcacaacaaattaaatttacataatatcaagaattagttagttagattaggtaaaagttagttgttatggaatttttttataaatatacattatatatattaatattaggtaaaaaacattgtctaaaaagaatgagtttatatactgtgccacatcagtattttatattgtggctgccaacattatttttgaacgttcaacgattatagacgcgcccaaaaattcacttttcttggcctttcacgtgcttttcaaaattaaaatagaaagtaatatatatcctcaaaatctaataaacgaaattaaaaaaaaaaacctaaattgaatgagattgaatcagagaactccattaacaaaaaaattgatagatttgaaaactgaagaagaagatacgatgcagattcgttgttgtatacaacaaacaaaccaccatctcactcaatcgatcaatacacctatcatctcataaaaaaagagcatgtagcttcgcggaaggagatctacgatggtatcttcgacatcctaatctagattgcaacattactgaaaaagataaaatagacaaataatcatgaatcgtattctatatatgtgattaggaataattgtttcaaaatcattaaaattcatattctaaaactcataatacaattcgaa

SEQ ID NO: 41938 - DNA, 944 bp, Cannabis sativa
tacacgatcataagctttctcaaaatcaattttaaagaccaaaccactcttgcctttatttcaacaatctcatttgcaatcaacaccgagtccaagatttgacttccttctacaaaggccgactgagtttccaaaatagtatcccccaatatccctttaagtcttgcagtaggaaccttagcaataatcatgcacacagtggtaatgagactgataggtctaaaatatctgactctgcaactgtttagtttttttgggattaaacagatgaatgtctcatttatactacctgggacactaccatctctctcgaatgaactgaagacttccattaaatcacccttaattacttcccactgagcttggaccacaaccatgttgagcccatcgggccaggggcttcattgccttcaaagctgaatactactcttttaacttcttcatcaaatggcatctctttgtcttgctaaagatgctggaatcacttgacattcgattccctcaatacaagttccatctcgtttttcagaagtgtacaaattggagaagaatcacacaatctcttcgacaatttcttcctcctcaacgatcatgccatcttctctttcgattcttaaaattgtattccaggccttccttgaattgagaaggttatgcaaaaaccttgaatttgcatctccttccttagcccatttgcactttgatttcagccacacttctttcttcttcaaaaattaatatctcccattctttctctcttcagctagagaaatgtttccacctattacttgcttcttcgaaaactaatttctgccattctttcttattattcttgctctcttaagctagagaaatgttccacctattacttgcttcaatcctactaagattcgccaatcttttctccagtggactcttaatcatcaaatgattttggcaaaggt

SEQ ID NO: 41939 - DNA, 722 bp, Cannabis sativa
gggaaaagatacagacgtgacacgtgggaagcggtgagagtgacaagtggcgaagagagtgaagttggtagtgacaagtgacgacatagataaacttggtcaaacaatcctttttgactgagtcatggtcgtcgtcactagtgggacatgttttctctctctaattaattttgctttacacaattattgaaaatgaaaccaaatttatttaaataaaaattcaatatttatttcttgcctaattaattaattaattaattcattcattcatttatatgtcacccacgacgacccctttccgatactcaattttttctttaatttttttttggtaatattttaatttgaaattttggatgcattccatttttatttgggtaaattgcggtataaatacttaatatttctcattttatacacttaaatacctattgtttatttttggtggcaaaaatatttaatgttacaattctcttacaccgttactaccacttccgttattaactcataaatatagacacgtagagggtccaaatgtattacatttatttatttcattttaaaattaatattcttaatataaaaaactacatattacttgttttttaaaaaaaataagagagatgcaatactaacttaccatagctcagtgaactaatgtcgtatatagaacatgattatcgaattgaagtgccaatatcatgtgaaaattgttaatgaga

SEQ ID NO: 41940 - DNA, 2979 bp, Cannabis sativa
aatcaagaaaaatgaaatcacaaataaagatcaaataaataactttttctgcagttatactaaagtgaagaaaaaatgacaaaatgagcagtggagagatcaaaaagaagtaaagcaaaacatagagtctcttctagaaatgaacttatattaatgattaatttacacatctataaatttgaagaaaaaaattcatagattgctgagcttaagtaactgagaaataaagaaacaaacctacaaaatgatgatcgaaattgcggaactcttacaagaggagaagaacactatacattgttcgatacctaactaaacttatacctttaaaatcaaaaccagagttgattatatattaccattgtttatttatttttatgtttttggtattggaatttggaagaggggtattaaaaattacaatatggattttttttttgtgagataacatgtatatcattaaactatatctgtgactaattctctgagcatctagcttagcgtaccatataccatgtatgttacatgtataaaacaatgtggaatgaaaatatattaagaaatacaactcaatagctttattaaataaaggtaccactaaatgataaaagatcagtagtatgaagaagaatggagataacttataacacagtgctcaaaatacaaataaaagattctacgtacacttatacaatctttaagcaagtggggattatcaaatttaaagaaaatgtgatatattaattgttattagttatcattttgttttgaagttacatctgagagttggaaacgagtaagaaacatttaaaagtttctgctcaagatgctcctagcaccaaccgatttagtgctaagtgctctagagcaaaatactagttttgaactactcgaaacaaatctattttttccaaacatttataacttattctctacacatcgctgagtagagatattctatccctaactgctataaattttatgacactcgtgcaaatcaatatggaatggtaaatcgaagtagcatatacaaataaataaaaattgttaatgtatattcaaaagggttcatttatatattaattaacatatttccaaaaagaagccatatgaatttaatttttttttttgaaaaaagaatgaataaataaataaactcctgcaagtactacaggactattattttcataaatgtacatgaatagacgttagattaacaactctttcttcctcgttggtaacaaagttgatgaacatagaacccttcattaccatctttttagttattaaagagcccttattttgtggatcttcaaacatctctagttcatctttgtatatactaccatgtttagtaaagaatagatttttattttcccctgcataaagaataagtaaaatagttattaacacaattttttttttatatacagggagaacaatgatatgtgcacacataaattattaccccaaagatgattgaagaaattctctgtgccatggacaatgacatgaccatcattgtaaatattccaatgattaatctcaactctattgattaaaacagttccatcttcacgcacttcatccacaataagcttttgcttaacactagctggaactagggttgaaccctgtgataggtgccctaattcaaaggcttccctatcaacctttgacattacaatttgataatcaaaactgttccattctttgaatcggattgcttcatctggcggaacaaagagagtaatagtgttgttaccataaatggtaaatctattttgacgatcgacgaagaacaagaattcgtcgcagtatgtttgaacagattggagattcctttcgagaatcgttgccatgaaatcgtagcctccgaattctctaagagcttttgtgatcttttcgacttgtactactgtaattgtagaattgtgtttgggtgatccattcgaatccaaacaacatgttaggcatgtagaatgaatagggccgtgatcataatcagttttccaaatagggggatatctcttactttgagagggaataattgttataagtattaggagaagaaaatattgtaaaattttggaacaagtcgccatggataatatgattagacttgtttgtttgttttgtagtgagagctaataaatataagtaaatttacaattgcgtatatgtatggcaaatatttcgaaaaaaatcaattagtttgaatttgatgtatcttttaaatacatatgtatgctgcgaggagttatatgaacgagaaaacggcccgaaacgccagtggtgccttaatttatgttttcatttatagtactctgattcagtggcaatgtaattttatttttaattaaatgagatgcaataaatatcatatgtcacttttaaaactgaagaccttctatttttcatatttatcaataaagtctactatgatttttaatagtgttgagtctttcataagtatcatcattaaaaattgtatttttgcacagtaagtattagtaaaaacagttctaaactttattaatgcaatctcagaagtttatatacacacctgtgtattacaagactcaaaatatcaagtaacagagttagttacaaaactaactgtatctgacaataaaactaactaactaacagttcaatataatcagctatatctaagactccctaagtgtatagatttgtgacactcatcttggacaacaatatataaaattgattggggaagagggcctttgtcataatatctacagtgttgtgttgagaaggaacgtaggagagtttgattcgatttttgttgacttgttcgcgaacgatgtggcagtcgatgtcaacatgcttggtacgttcatggaagacagcattctcagatatgtggatggcagcttgattgtcacaataaagtactgttggttgagtttgggagatgccaaagtcagataaaatgttgtggagccaaagtatttc

SEQ ID NO: 41941 - DNA, 1058 bp, Cannabis sativa
taaagtaataccaatcccattcatatattttgaagattggattgattaattacgagtattgtaatattagtctagattttctctcctcacttcttcgaaaacctagccgtcactgagtgagaattgtatttttctgaccagaccccaccaaccctcttatgaggctgtgtgtggctctggttgagttgttgatctcgtatattagatatctctaagttaactcttgtcctcttcaattgggttgtattttgttctttgagttgttctctcacatggtttgaatcctagtaggttctaagatggttgggtggggatgcgattgtggcggtttgccttcaaagtttttcccattttctcattatgtacgaagggtgtttctttcggtggtgggaccggctaggggcgttcataaaaaatgaaactaaccatcaaactgactagaccgtaacctaatttagcagtcagttttgattacaatttttttgacatggtggtcagtttcagtttttgaaaaaaaatagtgaaaatgcaaaaaactaccaaaaataaaaaaatgctaaaaactgccaaaatcgtgtggtcgcttttggaaggttataatttctcaacgtaggttacggttttcattgaaaaaaaatcgtcactgactggtcagttataaaattagtaaaaatcgaccataactgacctaatttcacccctaggaccgacgtcttagggttgtcttctacagtagggttgtcggttagcaaacggcctgggggcggtggtctattattgaggggcttcgttctggtgttgtgtgttctcggagcaggggccatagatttaacacagtctagtgatgagtgtttgagttttgtgttgggtttaacgagttctgatatgtgtggtgttgtgctaatttttgagtgtctgcattatattattttggtcaattagttttttttttattattattttataatattagttattagactaaggaagtttggtattgtcctagtgaaagatgaaagttttgtctcctttaattagtttatcggtgtctcattgat

SEQ ID NO: 41942 - DNA, 1169 bp, Cannabis sativa
actgagtatggtctaacgtcggcagcaaaaagattaggagtaggctacaaattccaatccagaaaggggccctcatgaatgattgctccaatcctaatatatggcagcctaaggtgatgggctgctttgcatttttatgtccatgtgaatgcgatatctaaccttttcttctttttcccacaattataatttatttatgtacctttctaccatgtaggattagattatgtcactgcaccaagacataaaatgtatgtatactccatattaaaagtttctttctttttttttttgtttggaataattactaaaaagaattggtcccaattttgataacagacaaagggcaagtggaattgtttgccttatctacttttattcaagtgtcatttatttatatacattaatttggccttcggagttgttgataaacttaagaaaaaccactatccattttaacattaatgttttgcaaaaccggagcttatattttataggcttactatttttattttaaataataatactttattagcagtctcaagtctcaacggctttttgtataatagttttctttctttctttttatgtaaggcatcgtgttaaactagcactttgcaaaggaaattttattttctacaataattctctacatttagctgtaccatatagctgtgatatgtgactgtataataaagagttgaaaaaaaataataatttaaatttcattttagtctactctcaaagctaaaaactgaataatttagaaaaacataaataaacttaaataagaagatcaaaacctatttacataattaatgtgaaagataacccaggaaaacaaacaaacataaaatctcctagtgaaactttttctgcaagtaaagtaaaatgaacgatctctattctctgaactattagttagactaccactaatacttatattaatttgatatggaatctacacaaatttagtgtaaattttttttttttggtgcaacaattataatgatttacacaaaatatcccactaaataaatatattttacttaaataatctcgcattttatattatctattttaataatttaaaatagttaattttataacataattatatcacgactactagtttgagtttaaaattttaaaataatttagtaaaataa

SEQ ID NO: 41943 - DNA, 4032 bp, Cannabis sativa
tattttttgcggtacggtttttgcattttttaatttcgcagtgcgggtgcggttcgagaaattagaaaaaccgtatgtgcaaattgatttgaaaacatagtcaaaaaccacacccgtaccgcgaacatccttaaattcctattaccatttttattcaatcatattactattacagttacaattaccattccaccaaattaaacaccacttccatattattttggtgtttttttttttgcactgtgaagttgctttcaattatattatatgtcattatcaaaaaaaaaaaaaaaattatatgtcatgatattttaaatgtgattgagatcttaaatcatactttgcacttgaacagaattgtctcttgctgcgacttgacaataacaaataattcgtcaatcaagtttgacattattatgtcattattactattaataataataataataatatataccacttggttgaaaacaatgacatcacattatcttaatcccaatggtttgaaccaaccccaaagttaaataaggaaatacataacttacaatacagagtaaaatagacccacaaaatcaaacactttgaaagatacttgaactgtagccatttttgtcatcataatacttggaccacagcattacacctccatagttagccgaattctttatcacaggaagaatttgagaagtaacaacattaggtgggatgtaccctgttccggtggaggctgctgcaggtgatgcaggcaagcccaagaaaatcttcccacccttaatcgaattactccatccattccacgaactcaaaagagtattaacattaccagaactcgagtattgacaagaaggattattgtaaaactgaatccaaacatagtcaaaaagcccagtgttaagagcatttccaagaaaatgatcaggatatggacactgaggagctgcacttaagtaaactggtcttcctactctgctataaccctttaagtttgtggctaaatcttcccaatacttggttgagccgagttcaatgtcgaaatctataccatccaaaaccgcatcgcctaaggggcgagaagttgacgtaccacccaagaaattgttccacaaataatcagctacgttctttgcatcagcaggagatgaaagagagtatgttcctagaccacctccgagagagagcattactttgatccctttgctttgacaacttcttatgccttggctagcaatggcgcatcgggtcgggttgcagtgaccggagaggttgatctgaggggtttggccattgccaaacttgtttagaaatgctatgattacgtaggaatatcttcctgtggcgcaagtttgagctaaggttccttcgttaacgttttggccccagtagattgctattccaccagcatgagtgaattggattaaggctaaaatttggagtagtagtagtggtaggacaagttttgtagccatgattttgagaaatttggttttgtttatgagttggagtgtgaatgtgtgatctgataatggggtttgcttgcttcttctttctatttaagctgttgttagtgcctacaaaaactgaccaattaataaagtttgttggggaaaatacaatagagttgactataaagtccaagtcaagctaatttgttccattatatataatagacaagattgatggtcccactagggtttaacttcttttggcatgcttattgggtgagtagggagggaggactacaactagaggattcattttatttttataatttctagaatattgtccaaagcatctcaatccaatcatgttttttttttttttttttgaaatagatccaattatgttctttaaacacactctttaactaaaggctaattagaatttatgtcttctaaactttgacatgtaccaaatcatgcccccttgaacttttaaggtcgttaaaaatgcctcctgaactattttagatcggttattttttttaataataaattatttaatatttcattaaaatagaaaaataaagtaaaaaagactatcgtttcttaatcttcaataatgatctctttccatctctatttacaaacaaatcaaaccaatatacatatatgtgagtatatatgtactcatcttagatgaaaaaaaacaaaacaatcattacaatatgtgctattctaaattttgtccacctgacatgacatgtccacatagtcaagactgaggatacgtggaatacgtacaacttgccaataacaagacaaagtcaccttacactgcatgtcaactgccaagggttctaaagtaattgagcaaaactgtcaagcaataagcaaaaggagttaaacaatctgtcaaggccctgaccaaccatgtttgactgaccaaatgatgcatatctggccggccaaaggaagattataggttaaccaggtcttgagaataagctgaccgaccaataaggtggctatccgatcaaagaggcttgattagaccaaagaagtctgacctttgtaaggaaagctatacaaagaagcttgaaaggctaacatgcacatactaaggccgacagacacctaccaaagttgataggcacataccaaagctgacagacacgtaccaaggccgacatacttataccaaggctgataggcacatagaaggctagcatacacataccaaggcttataggcacatagaaaggcttgcaagcacatataaagctgacagacacatccctaggctgcaagaacaatacctggacgaccataggaggtcatcggccagccaggccctacatgttcgatgcatactcgattattagtagtttcagaggttagggatgatatttcgatagtgttcgatagttgcttgatatagattagtactattacatgtttgattgttacacgatgtacatttgatacaaagtaagttgtgtggtttgttcgagtgcttcatgatacatgttcgatggtacttgatacatgttcaatgatgtgtgtttgacttatacattttgtacatatttttttgtggtatttattttactttgttttaaattgataaggtcaactttgtttggctatttaatgtacaatagtgtttgggagcacgaggaagatatttgattttcaattgcgcaaaaactaaaatattcaagttgaagttagatattggtgtttgattattgttctagtggctttttttggtaagccaatattcattcattcataagattattattctcattcataatagttaacattcaatatttagatcgatgaagtagattgatatcttttgataactgtttgatacatacccgagtgtagcataaaaaaattatccaaatatttttgtgtaccttccaaaatatttcatcttccaaaataagttacggtacattagaaatgtaatcaacaacaaaaaaaaaaaaaaaaaacactaattgaacaataatagaacatctaatgaataccattatcgaaaatacaaatcttgtgaacgaatattaacttaaaatcacatacccattcctaaaaattttaatttatttttgacatttgcctcctatctctatacaaacttatggcaagactcttgcttcatagaaatttattcatctttcactaggaatgactctaaaaattgctcaaatggcaaagtttttgggtataaggtgaagagagaagtttgtaggatttgggaaaagaggaagcagagaagagagagtatgtttatgaggggatattttggagtttagcaaaaatgtggtcattttaatttgaaagtgttatttttgtattaataataaaatttcagtttattaaaatgttaaaaaaaaaataaaatcataaaatcgtaaaaagaatatgattttaagtattgtataaatttctctattttatttaatactaaacaataaatatcagatgatcagttacaatatttttattctatatataaaatgtggctatataacagaattcttggtttataaaaaattattaagtgactttttttttttttttt

SEQ ID NO: 41944 - DNA, 4179 bp, Cannabis sativa
atatattattaggcattattgtccaacgctattgcaagatttataaggtgaaatttacgaatattataacaatatatatatgacagtgacacgtacctattggtatatttatcgtatatatgtatacacatatccacatatatataagttctattattatgatcatgagattcaatatacagagattttaatggtggaccaaacaatgtagataattcctattagcccgattcttaggtacgaagttataagaaacacataatataaatggatatttttcatatatatatgaaaccaagataaaagtcatggcaataagtcagcataaatctagaacaattatttaaaatcttcccatctataaatatatatacatatatatcaaaataattggttaggattcatcatgatagcaaatttttcttgtttttgtttttttgtttttaggtgagtacgtcaaaataaatatcgatttggtcaaaaggttgtgtcaaaattgatgaaaatttcaaaagcaagaaagtaggccttattaattgcgagtgtttaactaataaatattaaatatgaatatgaatatatatttttatcatatataatatgatcatcatcaaaacatcaactactactaaagtattcaatcaaaataatatttacgaatttaataacttttttcccattgaattaaatattgatgtggacaataatattaatatatattattgattgatggagagaaagaaagaatggatatgacaattaagttattgtgttaatggttaattttgtcatgtaaccattcactcattcatttcatttcattaaattaaattaattattagtgcatgcatttcgattaaatacatatataatttaagtggtggccaaaacaatgaacaccaatcaattaatgatacatggaagttcaaaagctgaaaaggtcaattatttatggcaattcttaatattgggtccatgctctcttttcgagcactctacagatttgattctctattaattaattaatattaatataaaaataatttaatcatatcttttcaacctctctctctttaagattagcgtgatgtgtgaattaattagtctaaatacataaaaaaacaaacaaatacatgaatttagatcaaacttatgtgtcttatataaaatataatttattctttatataaacaattcgatttttgtccactttatacaaaataataattaaatcgtatatttgtacttatcatgttctggtacgatcacgttcagtacagtatttttttaaaaatatattatcaaagaccaatgcttattacccgtgcaagttaagaatcgctctatcttaattttaatatattattattattattattattaaatatacttataaataataaattattatattctttaaatctcacaaataaaaaaaaaaattatttttttgtgactttgtccaaatcttcacacctttcacaccatcatttaatgcattcaacgttttgggagaagtaattaagtaatttagattaaaaataaatgtaaggccgtgatttgattggataagaatgcggtcacacaatagtaaccgtggacatgataagaaaagatgagttaattgattgacacgtggcgttagaacagtccaaaagttttgagacccaacgtttctcccatgcgagcagccgtgaaataagctgtcctcaaagtaagaaactgccaaaagggatcaggcactagagtacaggtacaccgtacccacccaaaaacaacacggtcactttgggctttacccgggcccacaatggggcccattaaaaaactccacgctggcggaccctctcgcacgtgtccagaagggtaattttgtccacttccttaacttctcttcactcactcatcctgacccacacgtgtaaattttttctgggtcccactactactactcccaccccatcacgttgttcagggacgagaaaaaagagaaagagataatataaaaagggtttcgttttggttttggactgtatctttgcttacgtggcgattctaaacaggccccagtcggcaggtctacgtggcagatacccaggatgtcagttattaaaatctccacctcacctcaccttaatagcaaagtatcttttttaccgtgtccgttaaaaaaaaaaggaaaagaaaaagcaacccacccagttccgataaacatgggttaatattccggatttgcccctaacaatgagctagtattacggtttgaccggatctctgctttctgttttttaaaagcaaatcaagtaataaagaacaagggccttttaggtaaccgaatctctctctctctctctttcctttctttactcatctgaggtcgattttttttccgtttattaattaaataaataaattaattaattattttctctctcctaacccaaccaaaccctaaataaaccccaccatacatccttgccacctctattgcatgccattttgttcatttcttctctcccattaactttctcttatacctctcctactctctctttttttctatattctctctcgaaaaaccaatactcaaacggaaccaagaacaagaaccaaaacccaaaacgcatacactgtgatcgatatataatatcatcaaatattataaaggcaggcctttatcatctatggctgttgaagctcgtcaccttaatctctttcattctcatcaactcattgccaacaggtactaattaatctcttcgtcttcttctttttcttttctgtatgtgtttgtgaaattgtaagctgattcaaaatggtgattattattgttacagagaaatgatgaataatccaattgaagcaaatacaaatatgtataacagtactactactcagatgggatatcacggaggtcttcctctaccgactgagactctccttcctgtgtacaatcccatgtacaacgattcatcggttcctcctcccaagacggccaagaaatccgatagcggacttacttacaatattccgacaacgacgacgacgtcgttttctagaaaacggtctagagactcatctgcagccattaacaacgtcaatccttcattcctctcttttcctccttgtacctccacaacaactactcaaccgattcattattacaagaactcctctacttctccgttttcgtttctcggtgaagatttctcttatcaaatccagcaacagcaattcgacctcgatcgccttatttctcaacatgtaagtattattaataagaattaagaaactatcttcttcttcttatttttctgtttacaaatttattaatggtttttttttttcattattgttctaataaattcagatggaaaaagtgaggatcgaagttgatgaaaggaggaaaaaacaagctcggagaataatggaggcaatagagataggaatgatgaagagactaaaagccaaagaagaagagattgagaagattgggaagttaaattgggcattagaagaaagagtaaagacattatgcgtagagaatcaaatatggagagacttagcacaaaccaatcaagaaaccgccaatgctctcagaacaaatctcgaacatgtattagcacaagtcaaagacaacaacaatcacaacaaccgcaatactcgctgcgtcgccggagccggtgccggattattaccagaagacgtaaacatcgataacgaaaacgacgaagacgaagacgatgaccttcaacccaacacattggcagccgcactagctgacgatgcccaatcttgttgtggcgaaaacgacgacgtaatagaaacaggagcagtattaggagagtggaggagtacattaaacgacgtcgtcaatcataataacaacaaaatagatgtcgttgatttggaaacgacaagtaacgtgaggtgtacgacaaccagtaataatactacgagtacaatcaatcacaataggctttgcaggaattgtgggaaggaagagtcatgcgtgttgcttttaccatgtagacatctctgtctttgtactgtgtgtggttcttctcttcacacttgccctatctgtaaatcaaccaagaatgctagtgtccatgttaacatgtcctaaaaccaacaacaaattgtttcatttcatagatcaaaaaaaaaaaaaaaaca

SEQ ID NO: 41945 - DNA, 1951 bp, Cannabis sativa
tttaaaattaatatttatatttaaatttgtttagtaaccatttatggataataaccattaagaagtgtttcatatatatatatatatggattgtttttcaattggtaatactcatgggaacttttaaaataactatagttaaatgtcaattttaaaaatattaatgttttaagaacgaaattttaatccaatggctgatattaaaagaaaaattataatttatgtgcttaattttactagttaattaaaaaaatttctttttttacactatatccaaaatatgtttatagttaacattacttttatttctctctctttaactcaaactcaattttttttatctcttttgtcttgatagaacaaccttaaccatataataaaaaatgaaagattcttttaattagattgtaaaattaagcataaaaatttaaattttcataataatactcattcatggataatactcattaaaagtgcactatatgtatataaatcttttaaatataattttttttttttaaaaaaaaaaaaagtccacttggaactattttaacccatcctcttgcaaggttaaaatagttccagtcaagagggataaaatagaggtaaattaaaaaatacctcttttattaatcaattaaccaaatttacctctaatttttatttaattgatatttgatacatatctctttttatatgtactgtacccaaaaataccctaacataagagagtcacatgaagagtatcttgaagtgataggggcaaaattggtacaatatttaaaaaaagaagtaataataatagactttaaaaaatagagtaaaaataaaagatgacaatataaaaagagtataaaatctaatttcttcgataaaataatagcttgagatcaagggcgaagctacatgtaaaatgagtggggaggtctccccacctaaaaataggactgagtgtagctgtaaaaattatatattattttacatttgattatatgtaattgcttaagttttattaaaactttaaatcttcacgtaatataaaaatatgtaattgtcttagcgtaattttaattttaactttacctttgtttggaataattttatccaatccctctaaacttaaaaaagtttacattagtttggattatattatccaaccccatactcttatcctttaaataaaacatgaatttagtgactattgtcatacttttttttttatatatatatatagcaatgtttgatttcatagaatgaaattagaagcactaaggttggtcattataaagcacagcaaagggaacacattgaaagtgtacatcctcattttttttcgtaatgttagtccatcaagcaggattgtcagctaaataattaaattttctttgcatcaatattatccaaaaaattacacaattctttgggttgcaattccctcttgaacacctctttcaattggtgcctttagaaatggatatggacaaagcaaacaaagttgtctttgcctcactcacaagcatattaggagtaatggtggtaacttaggtcacaacgtgaattcaatacgaattattacagattggtatcatgaaaagtaggcgagagtcaaaattaggtcaaactcgaatgataagtgtgggctaatacttaaaacacaaagatttgatcttttgtttctatgtgagctaaaaccagagagagagagggagaatatgtgtggcgtgtgccactttagagagagagagagactttggtggctttcaaaaacttttaaattgtgtgcataatggtctctcttttcttcttttctatggccaaaatctatggttttagtttccctttttcaaataaaaacttccattagtttgattaaataaataaagtgaaaattacatgaaatatgggatttcataacaaagttagaaaaatatggcatttttaggtttgccac

SEQ ID NO: 41946 - DNA, 1420 bp, Cannabis sativa
tcatacaccactacatcaatatgatcaaaagaaaatcctagcaaaataacattatcctcttccttccacatcaatgcaattcccccactatgcccttggccatcaacacaaaatcatccttcaaaccccaacatcactatcaccctttccacccatacttacccataacatttcacatatgatcaaaacattatgtttctttgtagacaaaaggtcgatcagaaaatatttagcccgttggttctcaagcccacaaaaattccaaaataatagattcatgatgatgagcaggcttgaacactaaaaccagccaaaatacattttttttttgaaactgacacattgtcattctccatttcttcaatctcttactcctgaacttgggccactaactccacaccaaaccagtccatatcattaacattaactctccccataacttcaataccaacctggtccaaatctccattactaacactgccaccatgccaacattaacttggtccaccatagacaaattcttcctttttcgagtcaattatgaaaacacaattagaatcaaaaagacttttcttatcactaacttccaatagtctcccactatactctcttcctccattaaattccaaaaatcattatcagccacccatataatttctttcccacgatttttgtcaatcaccctctctagtggcttacatgagatattcagactaacaactcccttatagggatgtcatcagtagcttgctgtcgaccaccaccttgtagctccgtctccttaagcagccatgagacccttatatcctaaaaatttgttggcaggtcaactcgcaactccaaccatatatcttcgatatcaaatatagtggcgtctcaaagagtcgatggcaaaaaaattctgcatgtcccataacaccacaaataaaacagattgtgggcagcttttcgtatttaaaattaaggcaaaattagttcacattgtctcgacaattattcatcatcctcttgattgatttagtaacggcagtcatgacccttacacgcaaataatccctccatactccaaaagaattcttctaatccaattcgacaaacgtaccaatgtaatcagctcccgccttcaccacactctccttctagtacaaaaaattgccacttttagtgataacgttttagtcacaacataatttttttgtgactaaatgtgacttttagtcaaaacaaaatgttacttgtgaccaaaacataatatctagatacaagttgtcactaatttagttttggtcataataaatattgtgactcaaactatatttagtcacaacaaattagagttttcgtgactaatacttttagccacaaactttttagtcacaacataggaatgatgaatatttataattactcacaacttttt

SEQ ID NO: 41947 - DNA, 842 bp, Cannabis sativa
ctctcctatttttctcgactatggcagccactgcggtggccagacaagaaatggccaaaccaatgcccatcctcagtttgtagcccaacccgggttggtggagttgttttgggctgcgtttcaagagaagtgggactatgactctgtcgtataaggccacccatagtgttagtgcgaggagtgtgaagacagtgaatgagcctgctgggatttcgaaatgtggggtcaagtgcctcttcatttggtttgcttcggctagccagaaggattggccgatggctgcggagatgtaaatgccagctgaccagatagggattactttgatcagtgcttttagttcttctacttgtctaactgtgcatacactccatcgttctttggcttccccttctgggctcaaatcttttgaagggtccctttttatgcatgccttgttcagaaacctgaaattgagtcaaccaaaattaatatctttcctattgaatagatgacatttttgatttgatcatattcctataagaggagtagtgctaattctaatttcatttctagcgatatttttttatagcgatatttgttataattataataatatttttgtaattttttttaaattttttgaataatctaagaaatgagtgaacatgcgttgtacttgtattcaagaaatttgttgttgatattataaattaggagttttttcatttttacaatttaaaacagttttttttttttttatatttttacagaattcttcatagaaattcttatttcatctagcgctgcaacctacattgcaacaaaaaatcgtatagaaacacatattgcaactagcgctgcaa

SEQ ID NO: 41948 - DNA, 598 bp, Cannabis sativa
aatagcactagtttcaactcaaaatatttttttagagtattactgtgaggcacttataatgtttagcacttcgacaaagtatcattttatatttagttagcggttttgataatatctatcgaagtaaaataaatgagacacgatattaaattatatcagtattaatattatacctcacactataggtatcgttttgtatttctcattgtttttaaataataaagcaagaaaactagctagtacaccttggggttaatgtaaatacttcacaattaacaatcagcagattacagcatctcatcattgataataccaaattatcatattactcattatcagtggcggagttaacctagcctttatgttagggggcaaaaaaataattcttctctgaaataagatataaataaaaaaaaatattaatttgttatataagaataaatatatgtgagaatataaataaaatatatatacattttagaaagtatggatcccttttacaggggaaatttgaatttttatacttacaatacattaaaattatttccctaaatgtatagttattaaaattggtcatatatgaccacattgttaattt

SEQ ID NO: 41949 - DNA, 2446 bp, Cannabis sativa
aaaaaatgttatctcatataattatcccaattaataataggaaattttgatgccaaatgccaatatcccataatttacaaatatatatatataataaataaataaatttcttatatttaaaaataaaaacaaattaaagtgaaaaaccctaactaaaccctttctcaatctcacgtctctccctcgtctctctcggctacggcaagccacaacagcacgcagcggctgcgacaggaccaccggttacatacgccgacaatagtgcagcttagaccaaaaggtcagttcttacattatgtttctaatgtaaacgaaacagaactgtccgtacccgaatatctcttagttgcaataagttttgatctattgtttggcatttagagactggtttttatgaatgataatttatgtattgatttcaaatttgaaaattggtttgctttcctcaactcgtagtcataaccgagtgaaaaatcgtattttaagggatgattggattagaagggaaacaatgcaattatacatgtttaattgagatttgaagtttgtaatgaactgaaatttacgttggccaattagtttcccgttattaatggaggtcttggtggcctcgtcttctgttgacgccggcatcagctgctgggacattcaaaccggcgcagagcagctccgttacaagtcatgcgtgtccccatctcatggccttgtctgtgttggtcgaagcttcctagcgtcctctcagctccgcgaggccaaaaccgcatctggttctattttctactggtcttggacaaaggtttcttcctcttttactcgttctgtgtggataagctctttgattaattgtctttgaattttcactctaaagtagtattgggtggctgttccttttttattttgcagcctcaagtcgaagttaagagtttcccagcagaacagatagggccgcttgctgctaacaccgaagggacttatattgtcgggggaggtttgtctggggatatttatttgtgggaggtaaatgttcttgttctttgtttgagtatgaattcgtaacatgattttaactgggttttacatgtatattgatgtataattaaaatgtattattttccaggttgctagtggtaaactgcttaggaaatggaatgctcattatctgggtgttagttgcttggtgttttctgacgatgactcactacttatatccgggtctatggatgggaatattagagtttggtctcttttaatgtatgatgttttgtctagtggctctaattttgtttacgttgtttggacttagaccctgcttaaaacaaagttcatgtctcttgacaaattaattaggatttttgatgattaccgaagacaacaagcaccttttgcatatgaatacaactttatggagcactcatctcgtgtaacagatatcaaagtgggatatggaggcgccaacgcagatatggtgtccgcttcaaaggataaaacatgtaaggtacgacatgatcttcaacaaattgtaaatagtgtgctaatttatttcgtatggtatgatcgatttatgttgtcaaatgggtttgtgttgatgttggatatggtacacattttttatgctgtctttttttctataaagatgtgaatgcaaaacaagttagttggttgctgaaattaatttgggatgggtgactatagtctgtactctatgctttctaaattattaaatataatagtgctcaattttaagctctaatgataatttgtaatttatgctgtgtacagtatgtccatttggctaatcttattttatggttttgtcaatggcattttaagtttgtgtttatctttggctgtacattttattaggtctggagcttatcaaaagggaaattactaagaagtattgtgtttccatcagagattgaagcaattgtaatagatcctgctgaacgtgttttttatgctggcagtagcgatggcaacatatatgttgctgcacttcatactgagatcccatctagcaaaaatcatgggctatatatcataggctcatttcctaatcaaaggtttgtctcaaaaagattaaatctttatgtttacatacttttcttttcttaaatagtcatttgtttacgtacttttcttttcttaaatagtcatttgtactagagcctattatttcattcagctgacaacattatgttctaaacattcaaacagcaaggtgaattgcttggaatacagcacaagtagaaatatattgatttctggatcagatgatggctgggttcggctttggaatgttagttctcgtaaaaccattggcaagttcagacatgaaaaaggtagatatttgttttgtactttctttttttgaaggtgtaacacgatatttatttatttttccagtgcttacgtatctttgtgtatggttgtttcatatttttgc

SEQ ID NO: 41950 - DNA, 3008 bp, Cannabis sativa
aacagtgtagcacataatcgatcgtgaaagctaaacaccttaaccggttgagtcacagttccaataaagctgaccgaagaggggcgttgagatttaagggtgcggttgtagacatgatagtgtaaaaatagtaaaaatcttttgctaaatcttaaagtcatatgggttcgttttcattatattctaatacagaaatggtggccccatcgaaacactaaccttattaaacatgtacacatcaaaacaataaacacaagaagatgagttatgtgaatggacccaactgaattaattgtcaattcccaagtgtcctgagttagattggtctcaactctcgagataacaatttcatttctggtttgtaatctctgcctactttacttatcttctttctttctttcttctcacataatgacaaaacaaattaattatcttacaaaccacaaagattcgatctttacactcatttcatctaaaagcttcaaactttcttcatctccaacctcaaatccaaaatgggttcttcttctcacttgttaataataacaataatcttcacaaatctattactctcaacagttcattctggtggtgaccacagtaccaacaatggaccttcaaccatagtaacaaaacatctctctttcccaaatttcaattccatcacaaacccaagaattctagaagacattaagcttctgggcagtgctaaattctcaaaaagatcccaacttcaaatcccagatgaatcacaagctttcgatctaagacaccaagcaggaaaagccattttctcatcaccaatcagactctacgaccctccaactcaaaccccagcttcattccaaacaaccttctcttttcaaatccacaacttttccggcaacaacgccggcgccggcggcagtggactgactttcatcatagccccagatgaattcacagtgggaagaccagggccatggctggctatgataaacgacgcttgcgataaagattacaagacagtggcaatcgaattcgacactcgtaaaaatccagaattcggtgacccaaacgacaaccatgtcggaatcgatttgggtagcatggtttcggtcaaaacagtcaacgcttcagatgttggtgtgttcttaaacgacggctcggctcaccgagcttggattgattacgacggttcacgccgttggcttgatattcggcttggcttaaacgatggaagttacccttcgaaaccggttttttctgagtctcttgatatttctccttaccttaaagaatatatgtttgttgggttttcagcttcgactggtaacagaacacaaatccatagtcttctttcgtggaatttcacttcaaagagtgaagctttacttagaattccttcctctgaaacatgtgagaataaaatcacagttgatcacaccggaaaaatgattaaaactaagcctccgacaagtttcatgatcttcttggctgtggttgtattagctttagctgttttaatcagtttatattacagcagaggaagtaaaaacgagaaaagaaacgatgtcgttttacctgaaaaaaaacagagacccacgccgccgtacaagccgcgccggttcacaagctccgaactttactccgccaccggctcattcagcgagttagaaattctgggcatgaattcaaattccaaaagcgtttactacaggggaaaactcaccaatggttgccacgtggcagtcaaacgatttcggttgacttttttagtggtggacaagaaacggtttttgaaagagattgtggctattagcaaagttcgtcaccctaatcttgttccaattcgaggttggtttcaagatcagagggagattatggtggtttatgattttttcactaatggaagtcttgataaatggttgtttggggttggagttcttccatggacgaggagatttaaggttgttagagatgtgggtgagtgtttgagtttcttacactctaagcaattggctcacaagaatctcaaaacgacaagtgtctttcttgatgtgagttttagagctatgttgggtgattttggttttgttttgtgtgggaatgagtctaagaggtttgaatcggctgtgagtcaaagtgttgatgtttttgagtttggactctttattttggaagttgtcgccggaaggaggcggcagtcggagggttccacggcggcgccggaggaggaggaggagatgagggatttgttgggttgggcttggagattgcatgagagtggtgagttagagaagttggtggataagagaatgggccttgtgataaatttggatcaagctattagggttttggaaattgggcttctttgtacgttgaatgagtccaaaggaaggcccattatggatgaggttgttgagtttttgggtatggagagaccgattcctgagttgccactgagtcgacccgtttctttgtttccttataatagtatgaatgtgggtctttgtaatattggttactcttgtgctccttttaagtgaagtgaagatttagaaaattttatatttgaattaacttatatttacttacatcagtagttgtatagttttatatatgtatatttcaatgttgtatagttttgtaacttatagtaacattgtgtttcaatattgaaactcaaagatgtcttatatattagccactcaattctcatattacactctattgtagttagtaaaactaaattagtaataaaattataccaaagtaataaataatatttttttttgttgtaattaaaattgatatttatcgtaaaatttttttattataacaaaattattctcatactaaaaggtaagtgtattttgttcttggaaattttatttgcaccccataaaattataagaataccttaatactaaaaaataattaacttaaattaatttttaaaaaattacttttaattttttttctaatgtttctttcacattattttttttttaatatcaataattact

SEQ ID NO: 41951 - DNA, 909 bp, Cannabis sativa
tattaattatatcaaatgcattaaaaatgataaataattacgtgcattattaccaaaatattgtgtttgtctttaatgaaaataaccaataaaatgtaattatttgccaccacaacttgtctttgtttcattaagcatttgtatctttgctctcaaccaacgaagatgacaatttttcctttttcaatgctaattgcgtgtctcttgactcttgtgcagggtcggctctggtgtgcaaattaggctattatatatacatggttcaaataaataaagagcctaatatattttttctttaatattatttagttattttttaatgaatcaaactttttaaggagctaacaactaatttccaaagtatattttcaattcaattactgttttcaagaaaaaaaaattattattgttatttattattttttaaaaatttttcatattttttttctatcatttttttgttgtattgcaatcaataacaattttaataaaataattggagttttttggtgtttgtaaaatatataatcgtatgataatatttaaaaatattattataaattacacctttttttgtaggagcccaatttttaaaattagagcaggacctctaaaatgtttaagacagccctgcttttgccgatgtcgtctgatggtcgtccgatgggtacccgatggcatgtgggtgtcgggcctgatgtgggcctgatgccatccgacgggtattcgatggctttgtgtttatattgaatatgggtgtcgggcccgatgtcgtccaatggtcgttcgatgggtacccaatggctttgtgtttatattgaatatgggtgtcgggcccgatatgggcccgatgccgtccgatggggggtgcccaatggcatgcgttttgagtttaatatgagttttttt

SEQ ID NO: 41952 - DNA, 1214 bp, Cannabis sativa
aaaaaaaaaatagtaaaatcatagaaaacgccgttgccggggatcgaacccgggtcacccgcgtgacaggcgggaatacttaccactatactacaacgactttttgattaaatattatttaaataattatacagttatatgttttaaaatatatcttcatgttgcaagcagggaataatagatatattatattattttttgtaaggagagaatggatagatattagcatggtgctgtgctgataattttttaatttagtattcgatggtataccaatattagtcgttttggttttaagagtttttttttttttttttaaaaagaattcattcattaacccaaacgattacccaaaaaaaaatggcttctcaactcaaaacataagagggtgaagcataacaaaatttgattagctaaaatgtgagttacataattagtttctctaaaaataaaagacaaattgataacagaggggaaaaacagttcttcaatttgaaataacagcccgtcaatgtctttacatccttgtttcatatctttctccaagacaatttgtttaagagaaattacaccaaacagagtaacatgatcactttactacgtaaatttagatatgtaatattttgagaagtaattctcaaatataaattaatggatataaaaaatatattatattaaatatggctatataataaattattattatttttttataaaaaacattacaattcaaatttaaactcacaatatatctctcttaaataaaatgactatataacataatattcctttgtaacattcatatatctctataatcattttaataatccaataacacatttaaaaaaaatatctttttattattgttttctttttaaataataaaataaaataaatacttatgtttcttaaagaattgatattgtttttattataaaaaattgaaaaaatatatgatatttttacaagaatgaaaagtattataaattaaaagttttacaattaaattaaaattacaattaataataaattttgaatattattatatattttttttatataaataattaatattattcgttattagatcaaaattcgataattttatagttaaatagaaatttaataatgaaatcaaataataaataattaatttttgtaaaaaaataaatttattgtaaatattataattaaatggcttaattgttaaaata

SEQ ID NO: 41953 - DNA, 4579 bp, Cannabis sativa
  modified_base (450)..(454): a, c, t, g, unknown or other
  modified_base (522)..(524): a, c, t, g, unknown or other
  modified_base (4004)..(4004): a, c, t, g, unknown or other
tggtaataaataaaagatttggacatccacataattaataatatttataacatttatctgtttcttactaattgtgtgagagcaggtgcgttgcacgtgtccgcccataactagtaatagataagttttctttatttcttttattaagattaaatgtagtagttaatgattaatttttattgcttatttattctacttttgtattaattttatataaattagatatatgtaaaattattaactctacttattcaataaattaagaatatattttttatcccactcaaaaattacattcttcttcttattattttctttctcaaatagatcaaatttgaatgtttattactttgttaatcaattgataattataaataattaataattctaaataataaatatatagggacatgattttgtctcgtgattgtactttcacggaatgtattnnnnnatgtacgacagccgttagatgagggagttatttgatctgagggcagagattgatctaggggtaattannnttaaaaaatagtaacgtaccctgacattcatctaatgtaccatgagacacatctaatgtacccccgaatacattccgtgaaagtacatcacgagacaaaatcgtgtccctaactatatatccacactattttttatgtatacatttttttattatatattaaattttaataaatatattataaaaattgaatataaatatgcacacacatgtttattgtagagaatgaaatctacaattacagaaattaggcatcagcaaccaatcaagaacaaagaaatagacaaaagttcaattgggagcactgatggggtgttagccagagggattccaatgctcaagtcagtatgattgtagtaaaaaataataataacgggaaataaatgaaatgtaaatagtagtcggacggatgagtggataagcggacgggcagactgaaggaacaaatatggtagtgaagcttaatagaaaagtttagaaaggaccactatatgcttaagtcagtgagtagtgtgagtatcaaatgttcgatgccctgcgtctaccgtatggtttcttttaacatgtgtcctcagtaccgttgccctccgtccacatcatccattagattcgttcaggttggttgcttccctaattttaagggaatagtaactgtctttctgactggttcaatatttacttaattccacctatttggctgactgggtaggctcggacccggttgcagggtgaactggctcatggtccataaagctcacctgtttgtctatttcaaggcccaatgagtttgtctggctaccttattgggcctaataatatcagattcattactgatgagcccgtctgacttgcatatcgggcttcttaagcatgttgtaaatattaagtaactttttacctctacactttgtccctcactctccaacgagaattcattctagtttgagagttaataatatcaaaccaggtgttactattgaatagcctgggtgttggccaagtggtttacctacctaagttaagcggtgtacgcgtgtcttgctgtttgagacaagaaaattgcccgaatggttcgagcatggcggttgagtagtccttgctgcatgcgtgtatgtggctatcttggccgagtaatgcttatgtgaataattagttcttcaaaaggtctcttatctagaccaagtcgtcttgttggtctaatcagttagacagacgcttggatataaattgcttataaaagtcatacgttgggccaaataaaaatattttgttgtctatctcaaaatatgagatgagaggagtagatagacgtacatatatatgaggtgtaagaaaatagacgtttgattgcgtaaagaaatatatatatatatgcatatgttgtaaggagataaacatatatatggtgtaaggagatagacataaatatatatatatatatatgttgtgtagggagatagacatatatatacatatatattgtagggagatagatatatatatggtgtaggaagatagacatgtataatagggagatagacatatatatatgtatatagtgtagggagatagacatgtatatgcatatatattataaggagatatacatatatatatatatggtgtagggagatagacatgtagataaatagtgaaaaaaaaatataggtacattttatatgcctataaatagtgattaggagatagacatttaaataaaaatgagaggaggtagacatacacacattaaatgatgtgaggagatgcataggtaaggagatagacagacataatatgtatgtaattagtagagacagacatacatgtaaataataagaggagatagacagacgtaatatatttatgaatgtaataagtaggtagaataaaatacatcgtaaattattcataatattactggctcgcatgatagtattaaaattatttaaatgtgagaccagatctattgtcccatcatatgacgagatgtgagggttattgaatccctgggaaaattcagtattcataatgtgtggatgaaaaggttcgaattccttgtccgagtcatatccggactgttttccatatatcctaacttgatacttcctgaatttgtcctccaactcatcaaattgcaattggataggatcctcttgcttttgacttagttgttggcgaaggtcaggttttttctagttcaagtgatttcgaagatctggttgtcgctggtcatatttactagtggacctcgtccgattcatggaccttgtcctactcatggacctcgtccttgaataactttcagttctacttatgcctgtactctctcgatcagtattgcgatgagttccgtcccccctcgcgttgatcgactatgggttcttgtatgtcccgagctgacacttgtctcgtcacgtcccgaccttctcccttgggtatgggttgttgtatgccccctgttgggggtttgtatgtgccccttccctgttggttcgagaaggacgttggcggtgtctcggtggcaacccacctgtcccaagttgagtcccaggatttccctcgttctcacgggggatttcctgttccctagtcctgggccgccttctgttctaatttctatgagaaggctccagttggtcatttagttgttcattctcagggggaccctcaatttcccaggttattcttcctgagcgttctgaggattctcctaagccatctcctacctcctggttcgcgaactgcgaggtctgcctcgtggtctcctcactctatgatcaggtcggttttgtgcgttgttttcctgtgtcgtggctacctcccgttctaactcagcatttcgtcagtttgcctcctccaggcggcgcttgagatgacaattctccaactcgataatcggtacgtatctcgtgggatcataggcaccatcctccatgggttgagcaccaccaacacttatgttgggttcttcattccctgtttgtgggttctggccaccttcactctgggtccttcttgaatgtgtggaccatgtattttggccaccctcatgttgggtccttcttgaacgcgtggaccgtgtagatcgtgaattgggaggcctccgtgagtccattggctcttttccaggacggtgagtagtctcttcaggatgagtatcaacattttctccgttatcagccatggagaaagatttgtcttttggttaggagggttttttctgagcttttttcatgtaggctctcaatgaaagcaccaaactgttcacgcagattttcgttaacgataataaaacctattttgtgattaatttgcacacaaattatagaaaatgaaagaagaaaataaaacacaaagctttttacgtgattttacaattaaaattgcatagtccacgagtcaatcttattcagattaatctgatacaaactagggttctttcctctcaaggatttttcgtccctttttcagtacattctgnctctatttatagtaacatagggtggcaattaattacaatcagatacagatcccacaataatattttcctgaaattgtgggctttaattacgcaccacgtaaataaatacggttataaattgaaaatcatacagttgtgatttatctacttttactggatcaatgctgacgtggaattagatacgctgtaaagtatatctcgctgggaacttgaatagcaacaataattctggcagcgagctggagcttttcccatatcttgacgagattaataatataaatcacgtcgtttttgcgattgaagacataatgctccatcagacaatcgcagttcttggtaataaggtgaacttcagtagtcaacatcatttgaatgtcagcttctatctgagagagctgacttggcgatgcattggatctacttgaaagatgtcaggagctaattagttaaggtaccatgagtacgtcttcctatagcgagatggatgcctcgctatccgtcacttaggttcttccagccgtgatgcttagttagtacaatgtatattatatactaagtgttctaatagtcaacat

SEQ ID NO: 41954 - DNA, 5533 bp, Cannabis sativa
  modified_base (5468)..(5472): a, c, t, g, unknown or other
cccaagttttaataaaactaataaaacttaatgtaagccaaaaaaaaaaaatctaacaaatagaccattgctgagatttacagcatgttttggagtaggttgatatatgtaaagctccatataatgaataaaatatttgtctgcaatcattttaattgtggccttcttttctctttttcaattgtagattgaagctcctacaaaaagtacaaaggtaacaaatggtaattactaattaagttaatggctagctaattattcaatgaaaagcatttggtgtcaaaatcatgtttaactttaacacaacacatgaaaagtcatcatcttataattaagggtgatatacattatacacatatatatatatatatcgatcctttaaataataatgatgataattaagttttagttatgtttcttcatataagaatgaacctacatctatgagttaattttctaagaaatgcagtagagaaaatgatcagctcaaagaggctgatgcagggcaattgtatttataattaatcccagagtttacagaggtggtagagatgaaatccctgccttacacgtggaaaagagaaaacaatcattacaaaatgatagagaatcaaaaagattctattgtaacagaaataaaggctgctgcaatgattgcctagggattggaaatattccaacaaacttggatgacacctcatgacagtatgacgaaaataccatgcatagttttatcctgtaacactatgagttgaaaaatcttatactatcacaatataaagttttcataaattgttttaattccttattattataatttatatatgtgaaggatactaatattattttctcaagttgacaatattatttgatgtctcttgagacgaggcatttaagtgattaattgagtcaatcccaacgtgaggcctaattaatccataagaagatactatgaaagatgcaaattttctttagggaaatgagtcataacattttagaactcaaattcaatctttgttgatatactacgaattaagcaattttcaatttattttttgacaaaattgaacaaattatataaagtgaaacaagacaaagtatttcagttgttttgtatgatatatgtgcctatgcaaaaccttttttgtttagtttcaagtatttatttgagatgtatatgtattatgcatatctatgtaatggtacggcaaaaggcagacgagtacaaatttattattgtggaaaatgatttaaggacggtaattaacacatttattggaggtgattttagatgaaagattgagaattatactaatcattgtaatttcatggtctataacgtgaccaaaatgagcgtttactcgtaacccatatggttgttttgatgtttttctataccaataaacatctaatattttctaatctataacggctttaggtttttttattaaaaaaaagtatgtaatggtggtgagtgagagagagagagagaggtactagacagtggttttttcttgggattgggagaggtttattttgtcattggcaaggcaaaagaagcagcaggaggaactggggtggctaggcctagattccattcaatagaggcattagcagtcaaacaaggatgacgataagggtcccacttctgacatgagcaagacaatgagtgaggaagaggaggagtgagctgagctgagcttagctgaaagtcacagcaggcattttcttctgtttgttttcccacctaaagttgaaaataaaagttggaaaatgacttgtgtagtctccacctccatatgtttaataacctattaatctagtctaaaaaggctcaccccaaaaactccacaccccccccaaaaaaaaagtaaaacttcaccatatctcaatctaaccccagtaccactaccattcaatgaatttcacatatatatatatataacacattattcagtgcttctgaacaaaacttttattttgtgccaattttgatcttgtgtgctataatcactaccacctccaccaccactaccactatcatcatcacatgctttaaaactttgttaaagatcaacttgtttctatatctctctgtctctttttcgttttcttttgtgtatctgtgttaagaattaatgaaaaaaatgggcaacattgcttttagcaaggaaaaaagtgaaattttgtatttagactgaaaatactactgtaaaaaaaacttattcccaaacaacttgaagttgctacagcactatatattttgatatatattttttctgtgtaccttttcaccaaccacatggcctagtaggagcccatcacaaacacaaacagaaaaaagatggaaaagaatgggggccaacttggccctttgctttgtttgatcaagacttgtccaataaattaattaattctttttaaaataatatattaaaaaagaaagaaagaaattattaattaattaaccttgttctgggttgtgaaattatttattatttaaaatcttgaatgagagccataatattagtcaaaatcaaaacaaaacaaacaaaaccagtattttgattctcatgcaaacaagttaaatgaaacagagagtgattggaggttaccatgcatgaccatgcaaatgcaagcacaacttttttataattaacataataaaaaggggttgtatatttcatcatgatgtagagatcgatgctattacaatatcatatatcaccaaaagtacaagaagaaaataaagaacatcttgattaattaattaattaatgcatagctagtattagctgcactatacttaatttgatttacatatggacctttttccacttgcaaataactacagcaccatcgaagctcatctcttatagagtacttgtaacaaaattttatttatttatttatttattataaatataatttttttgttggtttttactggtgatcagcaaagtaccagtggagggttggagcttgatcgacagaaaggaaattacaagagtcttctgagctaaacaaagtctgatcttccatcctcatgagctgaggttgacatattttgactgggaatgctctagagtagttattataatcagatatttgaatccaattctccatagtatttgagcaagaagaagaattagacccatttggccctagtgaatattcaagctttttatgatcttgatcttttgtaacaccattaatggaatcactgtcagagtagccatctttgcaggacttggcatagtagtttccataaatactctcatgatgttgatgattatgatgaggatgaagtagtagtaattgttctgctcccttataattataattattattattattatcattttcctgatgaaataattcacagctgactttactatgatccaaaccattgctttcatgtccagaaaatggtgactgatgatgatcttcttttacagattgactgctctcttcactctctgtagccaattttgtattcaactgtctaacctgaaattaataaagtttgcaacaaaataaatcagaaacatataacacacacacacacacacatataactatttatttataacattaaataatgttaccttttttgttagaacatcattttgtttttgaagagcttcataagaaaacttcaaagagtcataattagccttaagaagattgtaatctttctccaattgtttagtcttccaacgagctcgacggttttgaaaccaaatagctacctgtcttggttgcaagcctaactcatcagccaacttagatttcctctctggctcaagcttgttttccatttcaaaatatctttccaatgccttaacttgatttgaactcagtcttctcttctttcctgtgtactcttcattacagtcttcttggtctaaactgtctaacatggcttgaaactctttactataaccttgattgtttttagtctctgccattgtttttttttttttaaaaaaaaaaatgtatattgtcaagaagttaattaataataatgtcagtagaaaattgaaaaatgtttattaccttttggttgagaaatggtgactagagcacccaaagaatctgagctattaaacctcttcatgacttggtaaaagtaacccagatgagattattgcttacacattcaccaaaatgctaattataatactatatagctttaaaaatggatttaaagatggagaggagaggaagaggaggaaggaagggttctctttactttgtcacttttcaccactctctgttcctttatatcaaacctaaaaaaaattaaagttttagtgcaaaagggtgtaccctacaaaccggcctaaaagacaaggcaaattatattatagcttattaccaaattaaattatatttaagctgtagtttaatcatcataatcatcatcatcatcatgtaatcaaaataataataataaatatacaatagcaactattaaatatctcaaatagttagatgtgtgtcgtattggacctctagctttagacttagaaacagtgaaaatgattaataatttacatatactgtgtgtggtaatagagtatatataaatatataaatatatgtatagatgtctatatatgtaaagacacacccatgaaattaattgactcctctcttgtcacaaattgtcacagaaagtgacttaagagattaaaacttaacaccaaacatataggaaggaagctcttgtgtgttataaaacactccactagtctcttttctaaaacgtcataattacgtctcaccatatctataaactaccatatatatattataaataatagtattgctattaagcatatatgtaaataaaagtattgctattagttaataattttttatattatttattaaattaaattatataaaactcaatataatttatgcccataacaatatctcactttttatgctatcacataacatttctcgatagataataaaaaattgacaatacacaattgttcattgacatagtatttttcggtacctgtcacaaattttcccgtatacacgtcgctttgccccgattataagtgaagttctacagtactattttatatatatacacatatttttgtatgtattagcgtagcataggctgtaaaaaaaataatataataatcaaagaaacaaccaaagggttacttgcaagtagcaacttatgtaaagaaaaaaagatagatgttttgtctcacaagtcaagtcatatatatataactcaattaatactcataaccaaaggctagggttagtatcatgtgagttaaggatcactagtgctggaattaagctactcatgagtagaagtactatttatacttagtttaatactttgtatagtttttgatattagataaaagctatatatatgcaacactaatgcgtattacccatgaatagttactaaataaatttaactnnnnntattaattttaaaaatatcaaaccgtcgaattttgatctaataacgaataatgaaatcaca

SEQ ID NO: 41955 - DNA, 2123 bp, Cannabis sativa
tagttaatattaatcattgttaatattaatattaaataaatcattgttaaataaaataatgataagtgaaattattatcttaattcaacataataatagtaactataaattgagcatgttcgtatctcttcttctctctctaaggggcgaaggaaacaggagatgcagaagttcaatataaaggtcacaagctctgtggtggatcatacggaggtccctttgatccagactattgaagaagcaagcttatcggaggattttcatgattcacattcagatatgggcgtggatgtggttctctctatgaatgatgatcgaaaaatttctggtgttcattcatgggtaaaggaaactatgatggatttccagaattcagctaatgatatttggagtaaatttaaagccaatcaggttaaaactccatctactaaactattttaaagaacccatcatacaggggatcagattatagctaaggttgatatagatgaggttgagatggaagcttctttcttgcaattctcgatagtttgcgtggttttgggggcgaatcgtcccattttgatttttaagggattcattaaaaggatttggagaaatttaggtgtagaacgtatagtgaggatgcatttgggtttcacccttgttagttttagagatgaaactacaagggatttggttcttgaaacaggggttattcattttgacaagaagcttgcagtggttcgtccatgatcaagcaatttagactcaatgaagttggttcgttcggtcccaacctgggtgagacttaatggacttgggttgcaatactcggggagaaactgtataagtgctcttgtgagcactattggtaaaccaattatgatagataaagtcactcgagatcgatcaatgatcaaatttgctagggtcctagtttaagttattgtcattgatgatcctcctcgtagcatcgaattgctcaacgaaaataatcaattaatggagcaaccaattgagtgtgagtggccccccactacttgtacaacttgttgtattttgggacataatgtgagcttgtgtgccaaggagaaggggatggtgtgggttagaaaatccaatatcagtaagagaaaggataaagtagctaagaagactacaacaaatcccattccaaagaaagaaacccctgcaattgaacaaggtaaagttgatggagataaacatgttactgttacaatcggtggaggctcggctagtttgactactgcactgtcagcttaggtacaacagtagcaggatggtgattggattactcttaagaagttaggcagtaagaaacctatatcatctattaataatgcaaaaaccagtaattactataaggctttacatgaggagactggtttaggtggctctttacctaataatcaagtctaagatggagtggtgcaacatccttagttggaatgttagaggtttgaataatgtcaaaaagaaaaattccattttagaaatttgcctattgaataagatttgttttggtgctcttttagaaaccaaagcttgtgggaataagattgatagttgattaaaaaaagtttccctacttgggacttctactctacttctgttactgatgggagaattttgttattgtagtaaagaaattttgttaatttggaggtgattaaagaagacactcagttaatgtattgcaagtttaaggtttctggccttaataccgactttcttatcacggatgtctatggtcttaacatagtcgtggaacacgagagtttatgggagaatttaactcccattggcttggaaaagcttcctcggcttggcttgagttactttaacgcactgtttaactatgaagatagaatcggtgataggagagttactcgtgttgaattttctgatgctcaaatgtggcatgctagtgggcaagttgatgtcctaaagactttagggtattactatacttggtctaataaacacgaactaggtggtcgtattttttctaagttggacacggtgttcaagaatgaaagttggctggatttttttccaaattctaaagttatgttgcaatgggatacttgcttggatcatggtttttgtcttgtgaagca

SEQ ID NO: 41956 - DNA, 719 bp, Cannabis sativa
caacagcagttcaaccaagctcaaaaggccatgcaaatgggagcaggaatgggaaacagtcaagagagcttaggagctggtcacgccgggaattatatagggaaaccgggttttggaaatgatggcaccagtaattttctagggaagtctttcgggtacaatcacggtggagaatgagtcggtgtaggagagtttttcactataaaatgtcaaattaaaaacaccatgacatacacaatttatactatagtttcaacagctactctatcttcattcttgtaaggaggatcacatttgacttgaattgataagtagtcaactaattggtttgaattttttatttttatttaaaaaaaaaatctaatgattgtgatgtttttgtatttttccttcgttctcaagcttgttgacatcaccaaatcaacaatttattcaaagtatttttactattgaacttgacatattctctttgtattattttccctcaaaatattattggtttctctatattgtttaagtataatattttttttttgttctctcttgtgaagaaaaaaaaaaagattaataaaagtgctatggagagttcattattctacattttttattttaaaatatttgacatggacttaaaattaattttattcttaattatcatatgaattcatttgtgatctgttattgtttttatttcttttttcatttgttgtgtgttttgt

SEQ ID NO: 41957 - DNA, 1029 bp, Cannabis sativa
atatgtagacttttatattattatactgcactattttgttccatatcccaaagaaaagaacaaccatgattttgggataaaataaaatggtatacaactcagctagctagctgattctccaacaagtccctgaataaaaatctctcttctacagttttgtaaaacaaaaatattctcactacagtttaattttatgatcgcatcaagcagaggagggacctagggtactggtacggaggaaggtttggaaaggaggggcaaaatgttaatataattttagagggatcaaattaatgatttttgaattgttttaaaagatagcatgtaaaaaaaaacaaaaaaaataaataaagtttttacaaaatttgaaaggacccctgcatcactaagtgcatcagtccatggaggggcctacggggtatcaataactataattgaaaagatttatggttgatctcagctaaatttgtgtgattttagctatattaatcattatgcatgttggaaagtacatataaatataattgataatttcttcaatgtgtttttattgcatttgcatgcagaagttcacatcactaatactatccctctgctttgaagttgcaaactaatgtagactaatattccaaccatgatgattttgggtagatgcaatacaacatttcaaaagagagaacaatcagtgaagaaattcgactgataagtgataacacttgttaaaaaaaaaaaacctgcagtcctattggtctcctaaaagttgtataaaagaaacacctgattaaggaacaagacaaaaattggaaaattagaaaaaataaataaataaataaataagaagacaaaaaataaataaataaaaagtatttttaccccctcaaatttttgatattacttaattctgaccttaaaatatacaacttgttgaaaatttcccttaaaatataacagttatataaccatacactttatacaattaggtttcgtttcttttacggttaaaatttagatttttatctcctaaacttt

SEQ ID NO: 41958 - DNA, 1076 bp, Cannabis sativa
  modified_base (902)..(902): a, c, t, g, unknown or other
cacatatatatttcaatccttgtctgtaatataatttcatctaattccgtggcacattagatggtcttaagatacattaaatgggtgtcagaataaatttctacattttaaccctaactacccctaaatcaatctcagccatcagactaaataactccttcatctgacagctgacgtatatcacggattacaataagtacaataacaggacaaaattatatccctataaatatattatattatatgtagctctataagaattggatttattgctttgtcacttggaaataggtcatagtaattaatttcatgcgaattaagttgatgagaagaacaaattgtaatagttaggttgattagataggtaattagttactatacatattgagaattaaaggtgagcatatatgactttgcttaaatattttatcttttcttataagacaaccccttcttgtagttaataatttttttgaaaggtaatcaataaaagtttaatagaatgtcatctgtatgtataaatatataggaatgtttatagttaaaaggtattatttttgttgacagttgagaaattttgatttgataatatatataatgaaataaatattattttattaaaaaatatgaataatttatagtgttcaaaaagttcaaatagattaatttatttttttatatatacagataataaaaattattctaaatgtttcaaaatcttggaaaatgcttgctataaatacaccatacacggttaaatatatatatacggccggccctgaatatatatatatatatataggcgggctaggtctacgcttagactcacattttagggagaggcccaaatagaaaactattttttttaaaattataaatattttttttaataatttttaaanatactatttatctttatagtaagaattaattttttttttcgtctatgacctatttcaactcaaagccaggccctgtatatattattattattagtgaaatttacatgatatactaacttttgtcattttttttacgaaaatactgtcagccggtattttttacttttttactgt

SEQ ID NO: 41959 - DNA, 2251 bp, Cannabis sativa
gtgagatacaatgagacaacatgtaagatacgataatgataacaaatgagatttaataatgacaataacttaaaaatgaccgggatataaaaataatacattatggagaatacttcaatttttccctacaccatcatatttacctatttttgtaataacaatttttttttttaaaaaaaaaagaaaacaaaataatttaaaaatctatgtatgtgcattaattgtataagtttaaacttcttaatagaaaagaaaaattaataatatagaattagatgatataattttacggtaactatatattaaaattatatttttattattatattaaaaaaattacattagttgtgcgaagagtgattatattatttagtgttttataaagaagattattattgagtagaatattttcaaatagttttttttttaaataaatattctttttttactatagtttggttcttatgaaaattttaagagattttttcatttttatattttaaaacagtttttttttctgttgcatttttatgaaattctatatagaaattttatatcaactaacggagcaacttaaatcgcaactaaaattcgtataacaacacacatagaaatcactgtagaaacaaccggagcaacttaaactgtaaatttgaaaaaaaaaaaaaagaaaaagtgaaaaaatagtatacggagtaattttccaaattttaatcacaaaaaattcaaccaaacaaacacttattatttcttatcagtattacaaagaaacccataaaatgaaaagaaaaaaactcataaaccaagatgatattatagcatatgaaaatgtttgtttacgtaaaaaaatgatctagttgcgaggaggaggacgagtgttctccggactagaggtccctgttgcaactttggcaacgtcaagtgctgtggcctcaggctttttcttggaatacaaggtaaagtaacctagagtcatggctatggcaaacccaccaagggccattctcatgggacagtatggcaacttactccgctggtgtagcgcctcggtcgagttttgccccgcggtggcaactctttggctagttgtcttcactccttctgctcctgccattgttaatttacttggctgtgaaatttggattgtaatttgatcaaatgaggaagagtttatgtggggtagatggtagagggatattagcaaacacttggtgatcattgagtgaaagagcattttattttgccacgtggggtcttgggggttaatggttgatctgggtattgttagttattgttagttatgatgttttagtgaagactttttcattatctcatgtgggtattaatgttctggtgttaacagttgtggctgccatgtcttttgttgactttgtctaatgcagattttggtgtgtggtcacacttttaaataggatccatccaaaccaaccaagtaagttaaaaagtaaattcatttttggtatttaaattttggtctctcatttttcatgagtagttgattgaaatcacaaaaattgagaaagatctgaatctgttgtcaaacattataaagtctctgaattctgatatgaatcataaatgtacatgaaaaaaggggacaacacataatattactaatcagccatacgtggcaaaaatattgatttttgttgtttcctatggtgattacttgactctgaaaagtctcagtcttttgtccaatttaattttaaaactaacaaaaatcacaactttctcagaaaaggaaacattaacaagagttattaagatgtatttgaagcaaaaaaaaaaaaagcatgagattttgcaacatttgctttgtgaacagagaacaataatactattgatatcactcttactattaaagttccaattttgatcacaagattacattttttacaacacaaaactgagaaatatcaacaatatgaagatttatagattatagtatgcaatgattttcaaactaccatttcagcttctttaggatctgttgggattcccacatctaacctcatggttcctctgaattgttcaggaacagctgcaccagcctgcatacacatttccaccacagcagggccttgaccatagaagcttctgagttccctctgcaacggtggaccgttcacatcaggaacatgccagacataccgtggaggtatcaagtcatcaatgacggctgactgccagccgtgctgcccgtttcgctgttggtgcttgtgggcac

SEQ ID NO: 41960 - DNA, 772 bp, Cannabis sativa
ttctgaaaactgttttaaaaaaaaaggctaaacaagccaaattgttttcaaaaaacaattttctgtttttaaaaataaaaaactattttttagttatgatgccaaacgtgcactaagaacttttgtattgtgagaattaaagtagagataagatatttaaggtaaatctataatatttcgaagagttttttagttaaaattttttgcaatgatcgcatgttaaaattattgttaaagtatacttatcaataattataattgttagacagagtacagttggttaaaaaccattactcttatattgtagaccatgattcgaatccattaaatccttaatttttttctatgtatatatatatacacagacattattaaaaataaaataaaatttggccagaatttatttgatcataaattgttttggattatatttagcttatatataacattatatttggtcaccactacatgcactagcttacacttattttagagaggtccccatagaaatatatacacttgctatagtcagttacattggaattatatatagtagaaaccatttgtagaaatcttcatgagaggaagttacatgcatgcatatataataaatattaattaagagaattatataaaattacaacacatcatcatataattaataacgtacgtcaacatatagcatttattaatatttatgatatatttctcctttggtcatattgaaaaatgacataatatccccctaattaaggaaagaaaaaataacaat

SEQ ID NO: 41961 - DNA, 915 bp, Cannabis sativa
gacttagttctttagtcaactgggccctcttagattagtcagccagcccaatacctcattctttagcacaatattcaaccctaccaaccaattcactatcttcactcccatcactgtcccagccgcctctagcactcacgattcaccatcgccagccgctctgtcagcaaactccattcaactgaccttcatcaaccacgaacccagattccattcatccctagcaccaagctgagactccatgtccaacctccgttcacaaaaatcgtaaccagcaacacccagccgagccatcttcagtcgactccaccaccaccacgaaccacacatttcaacctaatctgaacctccacctgaaacctccttcaccatcactttcatctttaagcaacaacccacccgaatctccattcgaacaccagatcaacacaactccaacttcgaatagcaccatctccgtcctcagccgctccattcaactcgactagcacccacagcacacgacccacctgaaacaagaaaacctgcacctgaaccagtagcttccattcgaccccttcccacgaaccaaattcagcaaccgcacatcacttgctgaaactccactactgtcaatttttgctagaaactgaggaagccagcaagaatctccatttcaccattccattcacaaacacaaattcaaggagcaaggttagtccttgtggttgcaatgaaccgtatgtaggtgtttaatccaattgaacttgctgaatttgtgaatttgcacattgggtttaatgaaacagagagatctttaatgtgatttgattgtggaattgttagtgtatggaattaggtgatttgtgcgggtgttgaaatttggatttcagtggtacttgagaatagctggtatgattgcaaattttggtgtgg

SEQ ID NO: 41962 - DNA, 1032 bp, Cannabis sativa
tatatatatatatataaatccttagaaatgaagacaaagattttcagaaaatcacataattaacaacagaataccctatcgaaataagagtggaaaaaggcatccagcctctctcagtctcagcctcaacaagcccaaaaagataaaaggaaagtcacctagcaacgaccatgagaataaataataccatcatattcatatatatatatatatatttataccaagtgattaataatgtgaagaacctagaaaagctcacttcagatccgtcccatcatcatctgatgatcaactcctagttatctttgtctgtttatataatgttggagtatatttatctttaaacaggccagctgatttaagaagcttggggccagtagccattcacatgtgtccttttatgaagaaacaaaccaatgaaaagttaggcggacgatcacgggtcatcatttgttggagaaacttaaacccttgtagttacagcctacaggatatgaaatataaaaagaaaaaagtgaaatttctagagagagcgaagggagaagactctatctaaatgaaactacaccaattttttataatttaacactacaaataataacaaacaatattgaagttttatatatttcatcacagtgagcagtactcactatttgttttttttttattatttatttaaagaaatagtgacgattaacttcttataataaatttgcggaattgattggtaggtatttatattattatatatatattcaaagtataagttatccagttttaatttgacgttgcgttttaaacttattatatacagttttttagatttatatctacataacatatattcatgcattataaattcactctcgtcttggctatataatgaatatataaattaatgtatatgaatatgatcataaagttagcttaaaattaagtttgagagattgttccacagatgcatgtgtactaattaattatgtatatatgaaaactgtgttccgctgtatgtgtgtccgtgtgtaatttaaa

SEQ ID NO: 41963 - DNA, 717 bp, Cannabis sativa
aaaaaaaaaaaaaaaactcaatccatattacaaaagtgaaaaatacccaaaaatcaaatcccttgattatgcacaagatatcttgtgcgattactgaaatcatttcagtaatcaactaacactcatttagttgacgtggacatactaacttactgtgcttagcaaatgaaacaaggaataacacatatgtaactacaaaatatctacttagtcaaaatacagatgaccaatacacatgccagacacaactataagacatattttgtcacataaaaataatgattgttacagaaattatatatggtaagtagactactaaattaaaattacagaaatttgtgggtttagtacttgtgtaattttagtttgttgcaatgtaacgcctatgtaaaaaaaaattggttgtaatgcttcctgttacaaatttgtccttggatatttaaggaggtctttctcttattttattttataatttataatcgaagttcattaataccctccttttcgacttcggttactataaatgctttctctttgtctggataatactaagtgccaagatttgtgaaaattaaagaaaaattagtgaaaaattgaagataaagaacttttttatattagtgataaaggaaatacatttatacttatagaggtgacaatatctttattgctaactttaggagaaatattttccgtggaagtattagcgacatatta

SEQ ID NO: 41964 - DNA, 1034 bp, Cannabis sativa
gcggcattggaagagaccggtagatgcgtcttgagtgccggtggcgactgtggtttgatggaaaccggcatcgttggtggcgttggagttgagataggagaggaggagattgagattggcgaggtaggtggtgtcctgggataaagtagaagcagaagccgtggaatttgtacatgcgtgttcgctgtatgttggtgttgattctccgatgtggattaaacaactccaatacaaggtatgagccaagattagacacagaatcttgggagaaatgttgttcatcgtcatcttcattttttttaaggaataaattaaaactaaaatttaaaaattgtattcaaattttgttcaagagtgaattgattaagttagttggggtaagtcacctaaagtcaaaaaggttattttttcattgttttgtttgtattatctccactcaggtgccacaccgcacatagcaataccgtgctcgtgttctatttctttttgattgttttttaaggttaacgacttgaataaaatctctctctatcttcttttaagaataaataaaatatttttgctgttaagtaatgtcataatcatgacaagtttttccatttttttttttaataattctctgtttgtctgatttaatcgtgacaagttgtgcaatgccttccaaagcctctgattggtgacactaatgtccttatcttatcatttgacatttggtaatttattattttagcctttgaattttctaataacgatgaaatgttgtaccacgtgcgtagatgcaaaattaactaagttcccaagatgtcgagctttcattggctgaagagaatcaacaaaaactaattgaagtcaatcttgggggctccttaatgaaatattttttttaataaaaagcattattattgaactagagaattaagccgcgttgtttgatgtgtgtattattaataatgtaaaattagtaaaaaaaattaaagaaaacaaaataaaaaaaaaataaaaaatcctaaagacgtgaaggctaattttctaac

SEQ ID NO: 41965 - DNA, 977 bp, Cannabis sativa
  modified_base (26)..(36): a, c, t, g, unknown or other
agggtccaatctgtaacttttgcaannnnnnnnnnncaaaatagtatttaccttaaaataaataatgcacacaaattaagaatgaagttaataatttaatttaccaataaataagcaaatacagttgctaatgatgtaatagctaaacgcaactttttatcattgtgcacaacacaatgaacatgagtgatatcataagtaagaagagaaatctgcaacaaaataaccacacactgggcctgctaatgcaacctgtcttctcacttctttccacaccaacctatcataagtaggatcttaataaaatagtatttcatatgcatgtacaagaaacctcatcatatcacatcccacccaagtcgtacatatatacttacaattaacactacaacatataagaatcaaatttaagtaggaaaaagaagtgatacctttaagataagagcaagaattctcgagttatattaaaatgtctagtgtctaccaactatttaattgcaaacttactcctaagctcaagcatattatctaaactccttggggaaagactgaaaaactttaagtaaaatgaggcagaaactcttaaaggcaatggagatagagattttacccaaacaaatatcataaccctacatctttaattaatgcacccaatacaatcaagtcataatattgattgtataattattgattaggtgagttgttagccaacactactacaaaaattccctttagaggtagtttttaagctctttcagcgtcggttttggcgaaattcgctaccgacgctgatcaggacaacgctaaagggttttgaaaaaccgacgccatatatacccctatggcgtcggttcctagataataatcgacgccatagggggcgtaggaaccggcgccaaaaatgagctgttttcagtttttttaatttcatataatttattttaattatatatttattaatttatatattattttat

SEQ ID NO: 41966 - DNA, 6133 bp, Cannabis sativa
gatatttttacaaaggctttgaatggggtgcaggttgattatctttgtaacaagttgggcatgattaacatctatgctgcagtttgaggggtagtgttagaatattagttgtaaaaattagggtaaattatatttagcagtttcccatttaatttcctaactttgtatataaatatatactattttatgaaatacaacatacaattctattcactatactctacagtgctaaaactagtgtaaaccatgcaaaatatcataactaagtgcatcatcacggagttccaagaaaagcataacaattagaaagtaaagtatgaaaactctaggtagaaactcctcctatcttcaaggttttgattctcctgcctctccttctcactctaggctttaggaaattgtttctatctctaaaagtctcccctatgtcgttctcctcaatctcttttatagcctaagttgaaatttgcaagaaaagtaagcaaataagccagttttctgtttttgaaaatgtttgttctgtgttgcgatactaacactggctgtcgctgcgctagctactgacttcacagactccattggcgctgtgacattaaagatagccgttgccacgcggacagctaatttgcattaaatttatttctttctccattcttcttgactctcttttgctttctccaatgactccctcaaaactatagaactcataagttcagtaaaataaactctgaaacactaacaaactataaattctgaggtactaaattaaagtgtcaacacgctatatcagcttgcttgtattcttaatacgtccattatgctcatctgcatcattttcttgagttattagttcaagattgcctcataaccaaatatgttcttatttgttctggcactgtggctgacaaacaatccaggataggaggactatagagagaaatttttttagtggggctctttgcggggttgctgctacaaatgccctcgagttgggtattgatgttgggcatattgatgtaactctgcatctaggttttcctggtagcattgctaggtaggttgtgactcttatctgtcaccattctgtggtttttttttttgttctggtcaattttattttcatgtctaactctgttatgattatatttttagcatgtggcaacaagctggcagggcggggagaagagaaagagattctcttgctgtatatgttgcatatggtggtcctctcgatcaatattttatgaaaaatccaaaaaagttttttgggagcccaatagaatgctgtcacattgatgctcgaaaccagcaggttctgctctttaaaccttaactttcgctgttgcctatttgggagaaattgataaagattacgcatattaatgttataattttagtgctagcaggttcttgaacagcatttggtctgtgctgctcttgaacatcccttgagtttgccttatgatgaaaagtattttgatgctggtttaagcagcgccatagtgtctctaaaaaataaaggatacataagttctaatccatcatgtgatcccttgaataaaatgtggaattacattgggcatgaggtatgttattgttcttctctttgagttagtggatttgatttatatagtaccttgtatatggtttttttttagagggaggaagtagtccactaggctatggctttttttttttggtatttaaatgcatatgctgcattacttgttaattttttgtttttaatgtattttcttctgttttcttccaatatatcaataaatgaatatttataaatacagaaaatgccttcacattcagttagtatccgagcaatagaaactgaaatgtatgatgttatagaccaaaagacaggaaaaacccttgaagagattgaggaaagcaaggctttctttcaggtagcaaagtgatttttatgtacatttgcaaattattttgaaatctttttaaagctgcataatactgttccgaacttcagatcttgagcacccaccttttttcttttcaaatttcttatccttcaggtatacgaaggtggtgtatatttacaccaaggaaagtcatacttggtcagacagttgaacttatctagtaagactgctctgtgtgaagaagctgacttgaactattacacaaaacctcgagattgcacagatattgaagttgttgctggtaacatcgtaagttaggcttacaaggttaattgtcttattcatgttggcccttgttgtgttgcattgatataaatgttttcctttttcctttttatgcttatccaaaacctctcgaaaggaggagggagatcatccatttgggagaaagtctagaataaactacacataatgcgaaaagcgaaatagctatttatccatattaaattatctacttacgctagcatttgcagatacctctccccacctttgaattcaggatgatgatctttttgatttctacttttgttaggcatatccggctcagtcttcacacatccagttttcacgaacagctgcccgagcagatccttgcaaagtgacaacttcttggtttgggttctttagagtgtgcaaaaaatctaaagaaatattggataaagttgacttctcacttcctaagtattcatacatgtcacaggtacatttcaagtatagaccaccattgctggctttattaaacgtactttagtatgtcatttgttctatttaaaagttatcgtatttttgttttccattaataacacaggcagtttgggctccggttccacagtcaacgaaattagatgttgtgaagaaaaacttgaactttcgtgcaggcttgcatgctgcttctcatgcccttttgaatgtggtgcctttgtaagtttcaaattattcttatttatatgataaaactttaatctttgttcaagttgaattcacattgttttaaagcttgggtttgtttcattctttatcattcttctatcacaacaattttatattaataatttgaagttctacctcaaaaaggatggaaaaagtcttcaaggcaggcttcatgttcttacttttatattctaaaccacttgtgaatctaactttgactgtcatgattttatatcaaggcgtgtaatatgtgactcgtcagacttggctccagaatgtgcaaaccctcgtgatacccgttattttccagagagaattttaatatatgataaacatccgggaggcacgggtgtctctgtacaggtgaatcatggaacacagttcaaattgccttaataccttattcaaaacttgtttaactctgcatgtgatttatgattaataggttcaaccctttttcatggagctgttaaccgctgctctggagcttctcatatcttgccattgctcaggagattttggttgcccgcactgtgttcaagttagcttcattctaattcctctacctgttttaatatgctttattcaattttagcttctcaaccttcccacattgcagagctttgcttgtaaagagtataatgaagttcttcacaaagaggcggccattatgatcataaaggttcatactcaagtactaatggatttcatttcctcacgcaaccgaattttctatcacaagactaacttctttttttggtctgatcagggtgttcttgacgcagagcaattgtagtttcaatagcccttgtgaatcttctggaatctttacatcaaggattcaaggacctataacattgttataagctcacaaaaacaaaaaaataaaaaaaagaagaagaagaagcttcctgtatcgatcatgaaatgtgaaatgcaatattaaataaagctgaaaattagaaaattgtgtcaaactttactgacatgagagcaaatttacttaaatactccgaaaagattctcaaaacatgcaaaaaaaaaaaaaaaagtgaaaaacagaaagataattctgccgtccaaatttgagtcaaaagaaaggaatcgaaatcaaactacgagcgcactactgtaggtcaccatccaagaggtgggtttcattttcgctcgtgtgacacatgcatactcataatgttaatgactaatagtgatgatcatagactcatcaatcatataatgtgtagttctttctgtttgagtttatttatatatcaaatttagatgtaattaagattgaatgaaacgcaaatagctaactcacgtcattgtaagtgacataacctaatctattctttctcatacaaacaaacactcaacacgtgacatctttttcaacaatataatatcgtccaattccaacgataagatgttattgaaacttcaaactgttgcacaatcatcctgcacaacaaaggaacattttgaatttcagaattaaaagtgtagccaaaaaaaaaaaaaaggaaatagaaagatagcaagaaaagattgtctcaatcgaagataagaaaaagcggtggtttggtaggtaacattgcaaatagtttttaggtgacgatgataacaatgttgaatcttcactccatattcatagttccccaccaaatacaatatattattttaaggaattagacacatttttcacacagcaaaaccatataagcatgtcaaaaagatccatttagttagagcgggttggagtttcgattcgacggatcatcttctgattcgaaacattcggatacttattggatcttgaatcagatccgctctgtcccgcttaatttttttatggattggatctaattcgacccaatttcaaattattttaaaaaaaaatttaattcaagattcggaccccagacacgaataccttgggacctggaccggactgagaccttgacttgggacccagacccgggatccaaacccgaactcggacccagacttggacctggactgggtcctgaacctggtccggacaccgatcccagacttggacccaggacccgggaccggacccggacccagagtcaagaccctgactcggacccaaactcggacccagacccaaccttggacccggacccgacccgttgttggtgttagggtagagtttattaaaagtatattatctttacacaatctattaatacatgtcaatattaaacatattattgtatttaataatactaatacaaaattaaaatggatataaaattataagttagtattgaaattctttaaaaaaaaaaagagtcgggttagattagattcgatccgaataagtcgggtcagattattcagatcgaatctaatccgatccgagtatctgatctagcggggcggagcagatccttacatgatttggatcagttcggatcataaccggatcggatccggccagacccatttacactcctagaaccacatagaagctaggggcaactgtccctaaaacaattaagaaaaaaataatatgcattttacttagttacgatatatatttgtaataaaaaataatatttatagacataatactagtttgggtaaatattattttaaattgtattttgcaaagttattaattggatctattgttttattaaatgataaaatagatgctatattttctaaaatagtaaaaatatgacgaactcaatttgtgataatttttttatataactaacttgaagacaaatcctaatacgaacaaatataaaaaatataattaattttattataacacctctaaatcatattattattaagttttattttgattaaaaaattaattttgaattctatttgtctattttaaaaatacaaaatttattttatatttaagaaaatagaaatctccaattcaagtattttttttttttaaatttatttttgccattgcttttaagataaaaaagcccctcactataaattccacacaaacattattgtatgagaaaacggacactttttgctctatcaattcggaaatcatacctcaccattttttttaggaaaatttacacttcatactgttttttcctattttattttaattttactgctataaggaaaatattacatttttactgtatattttatactatgtgtactattttttttttctatttactttttttacttttttacttgtcaaaatctgcctattacattaaataaatatatat

SEQ ID NO: 41967 - DNA, 1132 bp, Cannabis sativa
agagagagagagagagagtggttggttgggtttagtcaacatggtaatatttatctaaagcatattattgcaaaactgcttcatggaaaagaaagaaaaaagcaatgttagatagacataacaaggggagtaactatatacagttttgtgttggtgtatctttaattagagtcttcataatcatgttttagtagtgctagtagtactcttctttaatttttgagaaaaagtaattgaaaacaaaaaactttactatagatcctttaattctctccagaggtagctagctcaaaatttaagatgctgctataataaaatgaagaaaaagaaaaggcatgctgtaggctttagtctagtgggaaatgtgggcttattattagttagaagtaattgtagttacaataattagaaaatatttttattatacttttttttaaacctctcttgattatacttaatttaacaaattagttccttagttataaaataataatataacaattaattcagtctttagttttattaaacataacagcatatatgtaaaaacaaatattactaatttttaatattacctcatgttgcggaattgcggaagcattctcgcatatatgtgttctctgattatttttgttgagtgaattcggtatatttaataaaatgcagatttgcaatgagtataatgagtatagtattattattaatgatattttttatgtttgaaagttattcttttatatttctatcctttattataagcaaattaataatgttcttactttttttttttagttaagttggctctttatgattttcgatagtttggtaactgaaacttttgcctaatttactttaatttttttgcttgtattgattgctggatttatttagcttggtgccttttttgaatggaattatttattttgttcaaataaaaaaattgcatgataatatacactaaaatgacaatagaaaatgtgcgatcataccactactaatgcactgaatcttatcagaactctgcaattaagcgtggaaagtcctcgtgttgcacccttaaaatttatttttcaaaaaaaaataacaatagaaaaaaaatcatattattaaaataataatagtaaataaataa

SEQ ID NO: 41968 - DNA, 2194 bp, Cannabis sativa
accactgcattgttggaggttgcaatcaccggctttggaaccgttctttttttcttcgccatagagagaaaaagagatggtcacacatggtttattttaatccattacttacttgataataaaaagttgacttttgtattttttatgtattttttttatgctatatattttggtaggcattgttccggacctggtcaaatgctatgaatataatatgacttatttgttgagtttttcaggagaaaaaaaaaaaaaaaaaaaactcatttgtttgagtatagtctcttggttaggtggagaagactcttttttctcgtcaacagatcccgcaactaacaactccacaaaatccaatttttaattaaatatgttttcatcactaatagtaacttaaatttcttagccccaattagccgctgagcactggccatggccagccttctttggagttttcgcccctaactagctagtcactttctacagcctcagctcaccattttctttctttcttccttccttttttagctttcaatgtcactgttttattctccaacttttctatattatgcattctttatttttttctttctttctttttttgtctttcggcaaaaaataaataaagtaaaaaattataacaatatatatagccaccaagaaaagaaaaataaaaaatgcttttctttgtgttattggttaacttttgcaacatttgaagtttctagaagtcaatacaatattgtataacgctatacaatttataatcatgttgccaaagtaaaaacgatcaaccctaactcgtatttcctaaaatacaagaattttcctataattaacccctaagtatatacttcacaaattattgtttcattgtggccctacttattaccaaattaataaataaaatcagaaacccctgctctatttttttttagcaagacagactttccatttcatgcatgacatgattctaaatataattcaacatatgtttggtagtaccatgaagacatattataataaaccaaacacgtgaattatttccaaacgttcaaatcaaaataattaatgtaacatcatcatcaattttcaaaccaagtactaagcatagtttgtatcattacattgtgattgtatctatgttttctagggctctacggagacaatgaatttttcaaaaataagaattctgcttaaacaattacaaacaccaccctattagcacctccagctcaacaatttggacttacttcttattttatttttcaaatcaaaaatatttttttagtttatttttatacaataaaattgttcatttgtaattatttgaaaagagagtgaggatgcaatccggtatttttttaaaggtgggcaattatatatttatgtcatattaaatgtgattatgtaatagtatttttttaaaaaaatattacaatttaaatttaaatttattacacatatttctattatattttatcttatattaaacatgactacattacataaatttttttttaacttatgaatcaaatttaaacttattgtagatatttaaaaaaatttattttacaattaaattaaaaaaaaaaattaattattcaactaaaaaatataaacataatcaagataaaaactaaatatatatctgttgcacttaatattaacttgataaatatatatttatattttttagaaatacaaattgataaatatatagaaataaataaaattccatatgaaacctttcttaatattgcatatggttatggtacataaactcatgattggacaaagcacttggtgttgcttcttggcatgagaagggagaaggatatggtccacaacaattcattattcatctccttctaaatttggtgtatctcactactcactactccctactcacttgtcttcaagctgagtccttttccctccaattttttctttcgataccttttcatgccaactgttttcctccttttctgacctgagagagattgagagattgagaaactgaaaactttttttctgattctcttgttcaattagtttctcactttttgtttcttgtcaacatacatagctcatcccttaattctcttctcataaataaataacaccaataataatgttatttcctttcattgtctatcaccttcattccccactcactactctctctctctctctc

SEQ ID NO: 41969 - DNA, 686 bp, Cannabis sativa
ccgagatgactcccaacacagttcccgaagtagttttccggcaacggtggatctaaacgtcgtcggtaattggccgtgacgatgaagtaaactctcctgttggtttcaccttctgtggctttgaccatggtggtcaaaacataagcagaggccaggacaaacgaggtcaatcgaagaggagaggcattgagatttcgagctgatttatttccttcttcccattgcatcgaaatccatctccggagattgtttatttccccacgtttcagctcgaaagttgctcgtacccaatcggacggggcctctggttccttaacagaggccgtgttggctaaccatcggtttaagtacgtagtgtatagatcgtccgggtctttaatggtggtccggtcgtaaaaaggggtaagttccggtgacaatggtgtattggttttagatatgtaagcccaagatttcatgaacatggccgatgatttcccatcgagaacagcatggtggaaggtggccccgatgcagagcccaatgttgggaaacagagtgatttgcagagccattatagaagacgacacgtcgtttataatcaagttaggaatgaggggacgagactctgcagctccatggatatgttttcttgtgaaatggtggaaatccacagtaaactcagcgagggtgaacgaaacagagtc

SEQ ID NO: 41970 - DNA, 2082 bp, Cannabis sativa
  modified_base (445)..(445): a, c, t, g, unknown or other
tctaaatttaatactaaaaataacttaacaaccaccttgagtttggagggactataaaagatgaatatagttaagttagttaggattgtttagctcaagcagttagttggcttcttgcctattatgttattagtttgttattactaatatcaactaagagctcttgttgtatataaactgattgtatcattttctcttattgatgaaatcaatcaattcattcacaccattctctctctaaatttcatagagatcaaataggtgtgtacaatcacgaaactcacaaattttattgttgggaatgcaaccaaagtcccacattggctaggaatgagaataattatgggtatataagggtggacactactccactagtatgaggccttttgggaaggtgcccgaaaataaaaaccgtgaggacttaggcccaaaacggacaatatcntactaatgtgggagtcaaggtgaggtagcggcccgaaaatgtggaagagtgggccccaacaagtggtatcagagccaaaggttcaagtgcttggatagtgggctggatttgcgatgtgtggaagataccctcaatgtgatgacctcgcgattgaagatctatatggtgccttgtatcgaaagtctatctgatattgaggtagtcaggtagcgtgttccgttgataataatgacggtacaagatggagatcagtgttaggacctgtgtcgaaagtcttcctgacaaaggggatggtcaggtagcgagttcgcttggtgatagtggcagcataaggtagtttcgctggaaaggaggccacgggtatgtgtacctagggaggatttttgggaatacacccaaagtcccacattggctaggaatgggaagaattatgggtctataaggatggaaactactccattattatgaggtcttttgggaaggtgccctcaaacaaaaaccgtgagggcttaggtccaaagcggacaatatcatactaatgtgggagtcaaggtgagatagcggcccgacaaggtggaagagcggggcccaacacttattagtagcagggtcattagcggtacacacaaataaatcaaaacaacaaaataagaaagcaaaatatataaaactataaaactaaaaacaaagaaaaaatcaaagagtccctgttgagatatgaagcaagagagaaaactatggaatgaagagaatgaaatgaatgaatgaagctctgccttgaaatgcaggcttggaaacctttttatatatgaaagactaagtcggttacaacagagtacaaaggagctgaaataacagaatatgacagctgtaaacaaacagtgccaaccataataacggactaactaacaaggacttaagggaattaatcatgtgtatctctaacatcccccctcaaggtgcactcattggacttgagtgtcaacttgtctctgagatacacaaattgatctgtaggcaggggctttgttaaaatgtcagcagtctgatatggagagtcaacatatctgatctcaagtttgttttccagcactctgttgcggacaaaatgaacatcgatctcgatgtgtttagtacgggcgtggcagacaggattagaggccaatgaacctgctcccatattgtcacaccataatattggtgtagttgttatcggtattgagagttctgtaagaatggcctccaaccaaattaattctgaagttgcaagggcaagagcacggtattcgaattccgtacttgaacgggcaactacactttgtttctttgaacaccagcttatgagattggttcccaggaacatacaatagccagaggtagattttctgtcatcactacatccagcccaatccgcgtccgagtaaccttgcaattgtaaacttgatgcagcagtgaatgtcaagcctgttgttgaggtgccagccaggtacctaaggattcttttgcaggcaccccagtgatctatagtgggatgttgaagatactaactaagcttatttacggcaaacgcaatatctggccttgtcatgaggacatattgaagagccccgatgacactgcggtattgctttggatct

SEQ ID NO: 41971 - DNA, 6175 bp, Cannabis sativa
aggttatagagccaccatgacttaccatatactggttgatgaaggtttcccgagccttctcctctatggttgtagcatgaccagagtgatccacccggaatgtttctaaggtacttgaatgtgctttgacagtttcctggattccagatatcgactccctttcttgttcggacacacctgcagcaagtttcaatgggatagtttgcataagaagagcagtaaaattattaagttaaactaaaaaaacttggaacttgccagaatgttgttaagtttgggactgaagagtgtgactatgggatattgactaatgagcgagaactaattcagactaaaaaacttactatcgacacaatgaagcagatccttgttattctttgctacgtcttgctcagccacttcccttgcagaattgatctcagcatcatgttgttcattaccctcagaagcattccttcaccaacaaattttcaaatgataagttgaagtcacatattatggaatgtttataaaactatgtccagaacttacaccaagagcaacccttcctcttgaatcaatatcagaattaagtgcaaaaagcaaaaatagccgctaacaaaaatgtattaaatgaaagaaagagcaactaaagcaaactggcagccacctgataaatgtcgtaacggctgacacatgctttgctcccatctcattcacagactcttgagtcatcttccattgcttgcaagcagaatcagcagtgcttacactgaagagaattaagggcatgagcaaattagaatcataagataacatagatcaggactgaatctgcaaaaataaaataaaaacaaaatacaatacaatagaacagaatagaatagaatacttaccattgttgtagaagtacctccatacgacaatgctttgcagcggagtgtacagcaccatctttggcatcactttctgcttgcgttgagaatgaatcccattttcgttttgcatcggttgtaatacattccattgacgaagcatgaccgtccaaaaattccttttctgcaattgcaccatctcttaaaccaacaagccttgcatcaacctgccaacaaataaacgtcagattaatgatcagtttaaaatctaaaagatcaatagagcaaaattgattgataaatcataaatgtaaaagcgggcaaaacataccatttctttttgtcgagacatatgattggtgaccaagcaagaaatgtcagccataagtttctctgcatcagattttgactgttcctgcaatcatacactttgatgtcagttactttcagaaaagtcgttcaaaaagcagtaaatagaatcgtaggtgacctcataagccttctggaattcagcaatactcttcattttaatttcactagcttctgaaacatgagatacaagcctatttctttcatcaaaaagcttttgtagaaacccttgagagtattcagatatgtcctttatttgctcagcagaggcactgaatctctgaaacattgtaaaatcacaaagggcataaacacaaatactcagaggtattttaagaagcacgtgcagacattttaactacaaacagcacagaaaaccaaaaagtaaaagttatgtagcgaagcatttgtatcatgactaaaatttaaataattagtatgtagattacccccacaaacacctgcaaagcattagaacactgctaaacttttaaataattgaaaagtggacatagaaaagccgacactgaatgatatgataatgtgccttcaaatattgctatacaactttaaaatgtaaaaagtaagaacataaaaacctcccgcaactcctttgcaaaaagagccatctcgccatgctgtgttgaaagagaactctgaagatcaccaaatatggagtctgctttaccagcctcagatgctaggaactgaattacaaacaaattgacacaacttagaaccaactatctggatgagaggaacggaaagaaaagcctaattaatcaatgtaagtaattggtaaaactaagaagaatcaaccaaggcacacaaactatttctacgtacttcttcaacagaatgcgcgttagaagaagccaaagaagaaatttcctccaaaccagcatcagagcttgccttgtgcaaacgaacaacattttgcatggcctctatatgagaaagatacaaagcctttgaagatttaactttcttcttcaagtcattaacagcctgagaaggaattaattcatcatgcaaaagctcattaaaaactatacttgcatcaagcagcttaagttgaatgagcaagtgttgaagacattcacaaattaccttatcatgtgcatctaaaaatgttttacaaagtttttcaacacactgaatgtgtccttcctgattagacaatgacttttcaacataattgcaaagagattttatttgattcccaagctctaattggtaattattcaccaacgatctattatcagaactcattttgtcctctctatctggataataataaatcaaatcattagaaaacaaaacaaagaaacatcatacaaacacaattgttgatagttagactactaactgattttctgaaacagcaaagcattatctccaagtgccttctccaagtcagatcgcaaaacgcatgcctgatgggccagcgcattttctgaagaacacatttgacaaaactaaacattacaaaaataaaataaaataaaacttaccacaccatacagaatgaagccataaaaaattaagagtggagtataatgtctacctgctttcttctgttctgatataataaaatccctctcctttagggaataatggcatttccttaattcctcctccgtgttagcaagcagtttggaggtttgatttaagcttttctgcacattatacatataacctaattatttatagctaacagaaaaaaaaaatcataggaaacaatttacttcaactcacctctgtcccttcaagtttgctactcaaatcattgcattgttgaacctggactttatacttttcttgcaagtcctcaaagttctgttcacagcatgacattgaaaggaacattaatatattaagggaactacccagccattactttatcatataaaataaatatcaacaacaaaccttctgatggttttctatagtgacccccatttgctcaatttggtcagccatggcctattaaagaaattggacataagtattcactagacaatacaagaaattatatctgcataaaaatatcctggaaattgccacttgcaatatctgcagagtaaattatttgccgacataaattctactaaaagtactagattagcttgtgaaaaaatgtaaacaatgtaagcaatacctttctttcggtttcctcctgaaagtatctttcttttgggatgtagacaccatttttctcccgtgcagcataaacctctgaacataatcagaacattcataagcagtaagatacacaggatgtgtgaaacaattcttctaacaaactgaattcaaagactcacctgacttaaggcgctcaatttcaccataaagatctttaataagtgttgatttcatcattttttggttcacctgcaacaaagaaaaataactaagaaaactgtacagaactcccaaaaccaatcattttacacaacaagaaattaaaatatgttcacaaatcagacaattggaattaaaatatacatccactgcaaggactaccttaaacaaataacatcaaaaaaaaacattgccacaacaaacctcgggcttattccttatattcttcgcacggtgtgcataatccagagtactcaaggtttcctcaagacaatggacagccggcgaaactgtagctatgatgcatgttttggttcttcccccaagcgagtcacgaagcaaccgtgttaacttactatccctgagatcccgagagagtaaatgtgagaatctaaaagacaattatgagaaagaaaaactcaaaactacaacccatacctatatggaatatgtcccagatgctccaccaaagcatttattacccttcctaaagtcagtaaacttttgttaatctctccagcttccctagcacgaccctatcaaaacattggcagcataacatacagttataacatagcgaaaaaaaatagttatgacctctagcagaacaattcctgctaagattattaattaaggaaaccaacatgttaacgtgcaaatgataatgagtcttatacctctcgagccccggaacgagaaatattctcagaacctgccaaatcaactagattcaactttccacacttgattaattcttcaccttctggtgtagcttctttaatgtgaatggttatggaaaatagagagtgtgaccgactgagatgagaaaaaaaaaattaaagacaatggacttcagatatactataatagtgcacaatgtgaatatggaagaaaattaccttgactgcttgttcaacaaagtttccgcagtgcgtctttttgcagaccctctttcaagtaaagtaaaaatttcatttgcacttgtcacaatttcctcctccaaacctctaacaagaactccaccttttccatcttccatcaaaggcaatgcctttttctgcttctcctccaacataactctggaaagctcttcaggggcaagtaaatcagtgatctcctcattatacaattctaaaaaggtgacttttacactgtactccgcattctggctctcaagggtatcaaaaatctgcttaacagaccgaggaatcaccccggcctcaggaggcaattctccattaggtccactctgtggcatgacttcacaatatcagtaaagtaacaaacaactaatctttggattattcataaaaacaactatggagaaaatatatacattatacctttgctcttttgcattcaccctccattgtatatgttttgcctgtaccagtttgaccataggcgaaaatggtgcaattaaagccttccaagacttcatgtacgattggaatcacggcttgttcataaagatctttctgctgagcagaaggaccaaaaacctgaccatataattcacaaacaatgaaactgacctcaattcaaatatagtgaacattgaagttaaaacagtatgcaagtaagttaacccaaaacaacagccatcactgtgaaacatgattcactattcaattatgagcattatttataactataatctaacgtacaagtaaacaggcataaactttaacttcctaacattacatatacattaattaacatcatcttatccactgagtaccaaaccaagtagtaaaatacaaacttgaaaagttacaaacactgagaagaattcatcagaaaccgaaactgtttaagttcagcataaaaataaaaccttatcgaaagtaaaaactctgtctatgtgcttccccgcaatgctctgagacacagccacttctctcatgtaatcattacaagtcaccacttgaggcgcgttgcttcgcaactcatcttcgctaaacggcctgttaaatatataaaaagcaataattaacaaaatttgaaaagaagggctcccaaaagctaatagtaaaccaaaagatatttaaatcgaacactaatgagaaaatctaaccctaaatacacagtacctgcaacgaagaaggacttgaacattaacgcccttctctttctcatggcgacctgacattttcaagtttcacggcgaaaagagagagaatcaatccgaactccaagtgaaaatgatagtagcagatctgaatccagaaatggtcgaacaagtttctctgagcctctctctcttagattcgaaacgtttcgttctcagaaatggactctattctctctctctctctcttcgtctctatctctctcctcaggtactgagtttagggagagagcgggatcgggcgtgggatttgaaattttgggagccgctctccctttaatatatatcaacggcttaattttaagtttttgaatattcgacggtgccgatgattttaatgttgtttgaactgatttacgttattacccttgtgctgtcacgggctctcggcccacgtaagatgtaaagcccaaacttatgctaggccccttagcaaagggctatttacaaaaatatg

SEQ ID NO: 41972 - DNA, 1965 bp, Cannabis sativa
taaaaaaaaaaaaaaaaaagacgtaggaacctcttcaaattaacataaattatcttaaaagtatagaacaaaattacactgaaaaatctagacaatgaagctatgctataaccagaaaaagcccacccaactcattagcatactattgtccattattgatcatagcaccaaagaaagagtaccctaacaaatcacttgtacagaaatttcacatatgagcccaattaagaaagtccatgactttagcctggagcactgaaataccatctgcaaaaaaatcaactcaagcaacccaactttattaaaattattacatttagcattagtaaaacatccaaaagtgtcacaacctaagtagcaaatcacgcacgtgcgaagtgggtgcccctgaaaagtaacatactatattaacaaattctagcacaactcaatcaagtgggtgcccctaaaatataatagtatatcgaaattttctgcacaactaacaaaaggagaatctcttttgtaatagtatatagaaatgggctaaatcttgcgtaaaaaaaagagaagtttataataatatactatttttatatttaatttacaataataacattactatgccatgtcagctaaatttaatattttctatttttcaattatttttctatatttttaaaagtaaatttttgattactaatagtgttgataagaaaccaaatagttacctttatataaaaaactttatttttatcatataacatgaaatatattttgcttactctctaaaaacttatttgtatacatcttagtaactaattagttatttttaaattatattatggtagattataacttaaaatactttaaggtgattgttgatctcaaaaattgatcaaccgacgacgaggtcgtatagatctgatgtttgccacatgtagaagtagtattgcttcatcaaaaacttcaattgataaatcattgttatctcccaacaaagagaagaagatggtcaacaacaacaagaaggatgatcttagaaaagtatgtgccacctttgataagaacagtgatgggttcataacaaagcaagagctgacagaatctctgaggaacataagaatcttcatgacagaaaaagaggtagaagaaatgttgttaaaattggatgctaaaggagatgatttgattgactttgaagagtttggtttgctttgtgagtccatgactggtggtggtggtgagcaagggaaagatgaagtgaatgggaatgaaagcttgtttgaaaatgaagaggatttgaaggaggcttttgatgtgtttgatagagataaagatgggaggatttctgttgaggagttaggttctattttgtcttctttgctatctattccctaattgattcataaagtaatcttgataatttgacatgagtttaaaattcatgtgtatttttagatctaatcttcagcataattgcgatgctgcaatttttttcatctaattttattttaatttttttgtcaaacaatctgaaagttagacgaccaattatttgacttattttaataaattttagttctagacgtgtctccaatagaaagattttacacaaaattttaccatttaaattttatttcattgaaaaccgatttttaaaacttgaaaaatcacaaaattggtgcaacatagaggagtatgcattgcatactcccttgcgagcgcaagggagatgctgggcaagaaaaatgaatgcatgcagccttgtttgatcgagaaacctcggcgtaggactgcttaggacaaggcttgtttgagaaacctcagttacaaggtttgtctgaaccttggtcttgaccgagatagctccactcgtccgcgctcgtaggtgttcctcagcttagatttttattttcaaactataaaaaatcataactaattcaataaaaatctaaattgagttttgtaaaattctaaattcat

SEQ ID NO: 41973 - DNA, 2785 bp, Cannabis sativa
  modified_base (2759)..(2759): a, c, t, g, unknown or other
caacaacaacagcagcaacaacatcccttaatcctttttccaatttggaaagtatatgtattgtagacattgaagacttcaaagatgatattccatggtcgactttgaataaactacggttcttgagatttgactgcattaaggaactggatactcttccatctaagctccaagatgttttgagcttacaagaactccaggtttggcggtgtcctatcaaagaaattccaagttggatcacaaagttcaaaaagcttgagaaacttgtgtttggtgtatgcccccttttgaaagaactacctgaaaatttcagtagagttcaaattcacacacttgaaattaaggactgtaacatgttgttgaggagattggaagtgggcaaaggtgcagattggagtaagattaaatttattcctgaaaaaaagttgggtcctatttcagggagatgatctcatagtaatttatgtatcattggatttctctttcactgaactgtttaatatagactgataatctccatagcaaattgatttcatttttctgtttattatgtgttataatgacctttacctacgcattttgagttatggcaaaactaaatagaaaaaaaaaagtagcactagaaaaaaaaatagaaaaagttaagcctagtgctactactagtgcatagtgaaattaagcctatttttgaaataaagaattacagagtctttgttgttaaagcagaaaagaaacataaaagttacatcacagtaaaataataaatagcacacacaatttatggtaagttaaaactttagggatgacatgtaatgtgtgtatatatatatagttgactattttatgatagtaaatagagtctgtaggaaagcaagaatgagaagggtaagtgcaactaagactgaaataagtgcccagggatgtttgaagtagtcacgattaagcactcttcgatatcttggccatctatgtccgcaatatttatttatgtcattaataatatcaatataataatcttgacttatggtatgagtggtgattcgattgaaaaatatgattgcatagttcatctccatatatttttccataatatcgttgtttactaatatttccacgtctttggcactatcaatgagatggttcagaaataccatgtatgaagtgatcacttcattgccagaaaagagacattgttctaagcatattagattcccaaacaaagtctcagtgacaccatgaagacttagttggggaatttctaagataccatccttgaatttaatatccaaaatactagagatcttagtagtagtaataccactttttgccttcttcaacttaattcccgcctcttgtaggcttgtagctgtcatcattttccaatacaatctttgtcgtggtttttgttttgctttagttgaaggtaacaccaatgagtttctcaatagatcaagaatgtgcttgttttcacatttgtgaatgatctcttcataattattatctacttcgtaagagaaccaccaaccactgaagaaatttgtgacaagtgtagtcaaagggagctcatcctttgatactacttctggagtagtcacaatcttttgaaacaaacaatcaagcaccaaccaaggtatttggttttccaacaaaactaagtcgccgtagagagatgccatcatgcaattcaccccgaagatgggatcatctgattttcgaagctccgcactgttgtccctgcggaaaagctcaatgagaaagcatccatcaagtaccaaaacattaacgaattcctccacattcatatcgatagatccttcgtagcactcccgagccttatcttgaacctcacaaacggcaactatgagatccttcaatttggtcttgcgatctgaatgtggaaagcaggaggagatgagttcatgcatgtatctcattttaattttctgggtggcttggagatgaggtttgttgtagtggaaaggaccaattgaaaatgctttgggtgtataagcttctggaatatgtcgagacagtatggttggcactctaaagatgcatggagtagtacgttttggtgagaaattatccattttactagctaatgcatcaacgtcaatcttaacttgatcaactgatcccccaacatcttcttttcccattcttttgccttttttatttctaattaaaagtgcaaatggaggagaaactatattattacatcaattaataaagagataggacggacatagagctaaggacgataatagaaaaagataaaaactatgtaatattaattttgcataaaccaaaatgaaagaaatagtaatttataaataagtctctaaatgttttatcacattaattgataaacaatgtgttatttttactcactaaagagttaaatcaataaaattttaaaaagtaaataaaaatataaaaaaaataagaataaagataaatttgaatagaatttatacaaagcaccatgtcacattcatgtttctcatttttatatagatataaagattatttgaaaaattataactaattaattaaacaaaaatcatcaattacatataccaaattcatttataaattgtgttatttttttttaaataactcactaaagagttaaattaataaaattttaaaaagtaaataaaaaatataaaaaataagaataaaaataatgaatagaattcatagaaagttttatattactgtcttatatctctctttatatctttatatattaaaantgcctatctaacggcaattcttggtt

SEQ ID NO: 41974 - DNA, 1642 bp, Cannabis sativa
ttttcttttatctagaataagtattaattaatgagcttatattgttttaaatatatctatttatgtatactaccatgtactactactgcattataagagtaaaaagaaatgaaagctaggtatagatgcatcctctaaatattgacattattaatttattcacaaaactatatatttgacatttcatactactatttatatggacatatatagctgtacatccaaataaatctaaagtatgaaaattccacttacagttctctactttccagaaactgacacccccacacaaggggataaaagaaaacattaaaaaagaagattcgaataagcaccaacttgcatatacacatgaatcaataagtaaaacagtgtcacattatattaattcatattttacattagatcttattcttaccaaaaaaagtaaagagctttttcttggaatagaaaaatgtagcttagattttaaggggggtgaagttcatatgctaccgtacgtgacaaattcatataattaaacaaagtaattatatttaactgattggtccaaggaggagaggaaaggagtgatcgcagtacatacacgtgtgagtgatcttatttcaaggcgagaaaagcgttaagatcaccggtttgtcatgttactcaaccaggccacagcccacatatcaccaggcaacacgtgtctttcggcttgtttcaatggacgaagctagtttatgtgtgtatgtacgtgtgttcgtcagcacataaatgtggacagttgactcttcttctacacgtgcttttatgttgactttaggctttttttcctcaattcaattcctacctcaccacaaaatccaaccgagattatgcttatgttgcctcaattatcttagcttttaatgccattttatttgttcaaataattaaaagacatgggtagtgttagagtatagcccttaaaatatgggagattaaaatatgagagacttatatagtagactatggtagatatttataaataaaatatgaagcatatataaattgtatacaaagtgcggaattaattgaacatatatccattatgaacaatggatcgaaatacctcttgttattgattgagcttcaatcctacacgagctttgaatctgcaaaagaaaaataaactaattagtatggataattgagcttctaaactctctctactctctttatataaatttattatgtttcacagaatgagtagtgagttcggggactgagaccctatattatataggtgagactttctatcaaggcctctcccacaattaattgttagaatattttgacaattaatttagaaaattaaatcagaaaattaaatatttagtaaatcgtaatctgaccatatagagaatatcaactaattacttatgaccaaatttaatgaataaaaaaaatattcattatattatatacacggataaaatctttaattaattttatacttaatatataaaatattctaatattttgccacttagttagcatttagatttatcttttaaacctaatgttcatcattacataataaacatatgaatcatagccataaatcctcattatttggccagtattatcttttatgtattacgatatatttattacataa

SEQ ID NO: 41975 - DNA, 1599 bp, Cannabis sativa
  modified_base (1556)..(1558): a, c, t, g, unknown or other
tatgggagatttcacaccaaatctcttgacattaaagtatagtgcagaaaagataaaagtttttaaggacagaatgcttactgagtataaaagttgaagattacacctccatcgagtacaacattggcgaaaagcaatgcgaaaagagtgacaaaagctacaatcctgtaagctagtagccatacaggatggattcccttaagacaagtctgccaagattcatactcatacaaagaacctgatgtttctacctcatgctctcttctcctagagcttgatttgttaaacccttcatatttccatatcaatatggatgaagctaccatagttgaacacagccataaagcacaaaagaagaacctccagttcaaccaataacttggttctgtagtgtcggcagtcatgactggctgccaagtatgttctggagatcctgttaagaaacccatcacttaattgaattttttcctcccagaattatgttttatatagattcaatttccaaatattactcaatggtcaaacacatgaatttcaccaaacacttcctcaacaccttctttttcagaaccacagatagagaattctcataaacttaaacacactactaaaataaaaactccccatttaatcattaagaaattatagcataaaaagtttgaaacttcattggttcaataaaagcaacaaaactactctaataattccatacaacactaaaaaacccaataacgaacatcttgtgcagattaagaaagaagaattattttctgataattgaatttgaaatactatgtgtgtaaaaaagtgattaaggaagcaagcaaggaacaaataccataacagtagtaagggacccaaatgagattcgtatgaattcatgcaatgaaacagagattcctttcttatataccggttttagcccaagagggtgtaattcaattgtaacaaaatcacaaaagtcggtacctttgaaaaaacaaaaaacaaaaaacaattatttggcacttacgcttctgtaatgggaaaagattaaagaggagaggcgtcaacgcacaagattctttgcttgttgccttgttcgtgcacaagatttaaagctagtgtactatattgtcctatgtatttttgatttctcagttgtgaaatccgagaagaagaagaagaagaagagaagaatcagtggagaagacagaataaactttttttttttttgtcgtttctttaatatttattatttaattagagaattggttggtaatggttgaagttgagccactgaaatgatgccacgtcatccatgtccagccgtacgagtttacttggaataggaaagaactatccctttttgttcctacgtcaaccaaatttctagtttatgaaaaaaaaaattaagaaaaacaaaaaaccaatcctttaactgaatctgaaaacaaaaggagggccttgtttttcttattagagaggaaaaacaaaaaaaattatacacataactaaggtgtcgtttggtaatacttttgctttttaatttttaaatcacaaaatgaaagtaaaannnttgtttttaaaaaatttatttttttttaaaaaaaatgcgtt

SEQ ID NO: 41976 - DNA, 919 bp, Cannabis sativa
aacctgtcaaccagtacctgagtatctatatatgtaaatatacagaattttttggcgatcgagcttgaaggaattgaaaaagcaaagagaggtgaaaaaatggtttagaagatgaaaaggaaagagaactcgaagaaggaagggtctccttcagcgagaggagtgtgagtttcagtgaaaagcctttggttttagtcgaaatacaatacaaagggtgtgagtgtgtaatgatacaattttggagcttctatttatacctcgtctagcgttaaacttcgagcaacttctccatactcgattcttctagatttcgacacgtggatttacctcgggatttgtttacagatatttaagacacagattcctttcatctaattttattttatttttattttttgtctagatcgaattaggtctattttcattttttcctcactaatgtaatataaggtgatattattatcataaaattgtggccggggacttatactaaaaaaaaggaaaaggaatatttgtagcaaaaatgttataaatttttaattttatatacttaaatattatatatttttttttacgaattaaatactttaagttatattttctattacttctgtcattacttttctattaaaattatattcaaacataaaaatatttactgatataaatgtctaatcatttaaattttatacatttatatatcacatgtttttttttttacttttatcattaccagtttattaaattctattaaaataaactaaattaacacgtgtcaacatattaatagttcactcatatatattctcaataaaaaaaattattaaataattttaaaatttattaaatggtaaataaatatttagagtgattctataatgcactcctttaaaaagatatattgatgcaccctctactt

SEQ ID NO: 41977 - DNA, 2410 bp, Cannabis sativa
  modified_base (2373)..(2381): a, c, t, g, unknown or other
tcaaagttgataaagcttgcaaccattttggtaggttggctcaagatctgaggcaggtggaatagcaaaggctggagcaaaactggtcatggcagtttcttgtgcaaaggttcgttcataataggtttacccatttttccttgcataatcttctttcaaaggttaaattatattttgtcatatgtttatgtttttgttataaagaatgcatcctatgtaatatgttaaataactttcctatcaaaattttattgaaaatacaagagtgaagtaactcccccaaggtatgatgatagtcacggagaactgctaccaatgtgtcaataatgctccagtgctttacagttagctcttcatttttactttcataacatgttagattacgcggtgctgtgtgcataacacacgggcacacaatttgtttagaatcttaaaaaaagaaaaaatgggaaagaatagaaagtaacgttacaaacaatgctgtgcagattccaaaagtaactataattgtgggtggaagctatggtgctggaaattatgcaatgtgtggccgagcatacagtcccaatttcttgtttgtatggccaaatgcccgaatatcagtaatgggtggggctcaggtaacctttacttttccttggttgcttgcttaccaccaatgtcaataagatactgttgcctccttgcctgcgaagtgagaattgaagcaattacgagtcataattctgcattttctggttgcttcatgcattcgttgcatttgccttattcctggtttcctttgacatctgctcatgtacttgtctaacatagcagatcagtaaaatttattttactatattcaaaatgcatgttagacactggcgattttgatttttaacaattgcagacttttttttaaaaaaaaaagattattgctgccaaaataatgtctgctgatgtctctcccccaaaacaaagtttctaccttcacaattcaaactcgggtgtggattaagtcataacatgttttttattggaacattcaggctgctggtgtgctgtctcaaatagaaggtagcagcaagaaaaagcaaggaataaaggtacaattcattgcctttgtaaaaaagattgtgtgaatattactttgtagacactggttgtcaatgatggtcttccatttcggttttgcttttgttttagtgggagaaagacgaggatgaggcattcaaggcgaaggtaatggaggcattcgataaagaaggaaatccttattactcgacagcaaggctctgggatgatggtgttattgatccagctgatacaagaaaggttattggactttccatctctgcttctttaaaccgtacccctgaagatactaagtttggtgtctttaggatgtaagaatagaatgactaactctcttactgtgcatttatatgtaattatgtatatatattactcttcaataatgcaagattgagtaacaaaggaatggaaagacatctcatactctgaccttgaaaaaaaatgaagaaaagaagaaagattatatgcacagaaaatgagctgtcttcttctttcatcccttgttagtataataaatcatgtcaatgaaatccataaacatatttcttagtgtaagatttaaaacataatctaatcaaaattatgccacatcaattatttgttagactaactcttactaaacttatttcataaatgtcaaaataaaaagaaaagattaattattttcaaatcaaattcataattcattttcatatttataaatactctctaccaaacataattagtgtaaagacttgagagtgcaccaacaacataaaaagtttaatcatccaaaaaggaaaactattatttgtttactttctttccacttttctcttaaattttctttccttccattttcaaattcttaaattataatgagttagtttgatcgtgcatagttaagccgtcaagcacattcctcaacactatccattcccttcaaactttagcaagagcatcgcctgtttggattggagtttctttctttgatttgagccgtattcaatttcttctatacttgtaaagctaaatgatagattcctttgatgtcaaaaactatgcctacttttcaattttttctttttaacatgctagaaaacaattataatataaatttactaattagttttgagatataatattgtaatgttactttattaaattataaagtgtttctaatgcattgatgtattttctatttatttacacatctaaatttttttttttggtgattttacaatgcactatcttaaaaaagatgtactgatacacccttaatttgtttcgacatccaaaagaattttttagtctattttnnnnnnnnnattcatgtacgttatatctatttaagata

SEQ ID NO: 41978 - DNA, 6695 bp, Cannabis sativa
  modified_base (26)..(48): a, c, t, g, unknown or other
  modified_base (6082)..(6084): a, c, t, g, unknown or other
aagttcttatttaggatgttaataannnnnnnnnnnnnnnnnnnnnnnatcttggtaaaataattccaacaagatctatcttgagtcaccttataaatcataataggtttgcctattgtgctaaccaaggcgctagatttttcttcccccaatattgtaatcccagcccatttagtctaatccaaactggaactgagttgactattctattcaaatcgagatcagttgtccacggccttaataccaccggcttcttatcaaaatgaatgactcccgcctcaaggatgagatctcgagtagcttcatcttgaaaattgaccaaagtgcatcctgagtgcatccgcacaatcttttctatacctaagttaccccaaatcctcttgatgaatccctcaaacactttaaatggggggtttgcacctagcacaatacatactataacatttttccagtataaggcctcaacctcaatctcctcaaggtctagcttggccacaatcttatcaccgattctaattggttcagtaaatgtaagtttggaagaaggtgaaggtacctaattcgacttaaatttactccaaagatcccttgcattggtttataagttggcctgctctacttcctctgcccagctaattggaatcgacgcttcacgatcgaattgctcagctttgcaaccttcagcttcattatcgatccccaagttcttacactgatcgtgaaactcttcaatgccttcttgttcagcaaccgaaccttggatcaaagggagatccgcctccttagcactattagctatagaaattgcaatggctggctttcagccaacccttttcttcttcgccatgggagaagagagggagagctcgcacccactctaattttctaaaatggttatactttattcagaagtctaggaatctaaaaaataacaaaatcaggcaaagtatcaagaatagcgaacaactaagtaaataagcctctgtcatgccaagaagggaaagcatgattattggcactagagaccaactgcatgtagtcagaaaggaagatcgggtgaaactagcccctaacctttgtaacagaagctggaaaaaggagggactcaaaaagtatagtagaaagagtaaattcttcctatgctaatttgtctactcttacgggtgtaatttattgtatgaaaatattatttttatttcattaatttgtttggttgcatattaaagtaaataacctttgtactattttagtagaatgaatattttattttgaaatagaaagaaaaatcattctaattcacgatgacaaaaaaattataatttttatattaatttttttttatacattctaaaatttattctattctatttttatttctattcctattcttattttttttttttatttctcaaaactaaacactatttaattgttaagccaaatatagtaggtgaataatagtataatactgatctcatactcatatatacaccaccaacaccaccgtcccacaagacctccactcactcgcttactcactcactcacactgtcacacacacactaacactattcttatatcctcatccacatgttaattttctcattcgctgtatcttatatataatctattaatgtcacggggtgatataaaaataataattggaacgttggtgagaaatatactattaatgcatacaagggccaaaacaaaatagttctgactcatcatacccttgatcaataaaaaaacacccaaaaaatagctgtatatgaatgtgatatgtacaaatggatgtaatggtggcataggcctttgtttttagtttggtaagagtttatgtaaattaaaatctcagattgcacaaaaagacacccaagaagaaacccaacaaaaggaaaaaataaaattggaaaaataataaaaacaaaagaaaacggctcaattttattttctttctttcttagtccatcttagtatcttacttacttttaaacctttttcttttcacatctaaataaataaaacgttcaaatgcacaatacccaagaaaagttgcagattctccatgtacattacttccccagctattaattatcccttctcctaacttcatcttctttaactctctctcctctttctctctctagaaacaagcaaaagtgagcaaaaggctttcttctttttaccttaaagggccctgctttgagggctacatcactcttcatgtgtggttacttaatggggtttcattactttcatcttactgccattatcgaccactagaaacgggtatttgagtttttcattgttctgctttattcattgacatattagctcaaagggtctgcaaatggtggatgtgggtttttgagtagttgagcttagaaagcaattttagtacaaatctcggaggaattgtgtttggttccttgctgggattttgtggtgtggtctcgaaatgaggagcatttatggtttttatttgattgtggtgatttgttttggtatgtacattagcacgttttgtcaggaggattcggatgaagacattacagctatttatattgttactcttaaagaagctcaaactactactcattactataatgagatgagaagtgtcaatcatagttccaaacttggtggttatggaaagttcgacgttcataaaagaaggtcatttttcttcacatcctttaattttttattttatttattaattaattatttttattccaattaattggaagttcaattttttagcagatataattatttatttaagttccatttttgtgtattttattgcttttattcgagaatttgcggacatggagtttgttacttggtgtccaaaaataaataaataaacaaacaaacaaacaactttcttgaaatttttaagaaaaattgggtttctttgatatcattgtattttttttctcctttattgtacatgtttattgaattttcattttgctgcttgaaatggttcctcaagtacacacaacagaagcaagtacacatgagtaatcgtaggatatcttgggcttgtgttacatttggagtaaacaaaaattatattactgtgtgaacattggtagttagttactgttttttttacatgaaagaaggtttgtatattacttgagtatcttatttgtgttcattctggtagactttctaaggaaattgcctaaatttgcattcatattttaatcattgtatcatgtagtagtcttcgctaatagtagtgactagagaacaatgtggatggtcaattttttttctcctcttatttggttgcatttttgttaatgcactttgcatctcttctgatgatgttttgaatgtcttgtttaagatttagaaacatttcgaaaacggatcgacgctatggttcttacattgcacgagttcacgattcattattgaggaggactttcaaaggggaaaagtatctgaagctgtacagttaccattacttgattaatggatttgctgtgtttgttacgccagtacaggtatatatcatatcattcaaatataattattacttataattgctttttctgtttaaattagtgctgtctggtttattcatattggtcatataggaatgtttgatttgtttgtattatgtgatttaaaggcagataagctttcaaggaggagagaagtggctaatgtagttttggatttttccgttagaacggcgacaacacatacacctcagtttttgggtttgccacaaggagcttggccccaacaaggtggatatgaatcggccggggaaggaattgtgattgggtttattgatactggcattgatccaaatcatccaagttttgcagatgacacaagtgatagtcaatatccagttcctcaccattttcaaggcatttgtgaagttactccagattttccatcaggttcatgcaatagaaagcttgtcggggctcgacattttgcagcatcagctataaccaggggaatctttaatgcatctcaggactatgcttcgccatttgatggtgatggccatggaacgtgagtttatgtggtttttcttaatatattgtactttatattgtgcctttgagcctgttttgattttctctgtttcatatcggtagcattactgccttttctttttcccatcatgaattttgaatttcggttgcagtcagaatgtgtgaaaatttaataggtacatccatgcattgcagtttgggatttgacttggtatccttattacacatatgcattgtgattatgataactttctctataagccatatgagctgcttagaggatctctcctaaggcatcagaagatctagataacaaagtattgcgtgcagatgctttaggctcaggcaaaagatagagccaacttttgaattgccaatgagataactatgtgctcagattcatgttgtttttattgattaagaggtagctaattttttcattgaggcactttactgagattcagacgtagttcctcataatgattacctaaaataacaactttccttgttttacttgttattaatgctagtatcactgttacttttagggctgtattcagaattcagattttacttacccatcaggactgcataaaataacagctcttcctttccttgtcattattagtagcataattgttattgttgtattattgtcatttttgtttgtttccgaagatcggtatgcaccacactgtctccatttacagaagtgtgcgttacaaaactggatacacaactgtttgttcatttcatattttgttagataatgcagactctgccagtaggtcctttttttgtgacatagatgatgtataaagacagatatcttagatgatttgaagagaaaatatataataatttttcctccctctattgtctgaactcttcaagtgtcagcttattgatcttgatataatgtacaggcacacagcctctgttgcagcaggaaaccacggggttccagtcattgtatccgggcattgctttggaaatgcaagtgggatggctcctcgttcacagtaattatctagatctagttatcgatcagtttgatttgttgttagtattgcatcatattagatatgttttctgcaattttatttttcaagaaaaaattttgttgcgagaaattatgtattaagtaatccatatctttctcagtgttgctgtttacaaggcattgtacaagagttttggaggctttgctgcagatgttgttgctgcaatagatcaggtatataaaattgattttctttaatgtatttgcaactaattcatctataaatttgacaaaactaattgtatgacacgtgcaagagatagaacagtttatatgatattattttcttttcttttcttttggtttgtccaatgcatctaaattatggatttgagctcggatggttgaagctatgctcatactctattttaacttcattaagtttattctcaggctgctcaggatggggtagatataataagcttgtcaatcactccaaacaggcgtcctcctggtattgcaacattttttaatcccatagacatggcactcttatcagctgtgaaggctggcatattcgttgtacaagcagctggaaacactggaccatcaccaaaaagtatgtcttcatttagcccatggatcttcacagtgggcgctgcttctcatgataggatctacagtaactctatagtccttggcaacaatgttactattcaaggagttggtcttgctcgtaagttcaccttgcaaatgcttattttatttccttttaatattctatgtaggattgttactgaagaactggtttcaaagaaaactttctaggtttgacaatgaatatatgacatgaattttatgagagaattctggagttatgcttctaaatataacaccaaaggagaacacaggattttgagtatacataattagtagctggagtgcccaagtagttaaccatccaattgcacacttaggtggcatttggttgggaggaatgaaaacataggaatgagaatgggaataggaatggaataaaatnnnaaatgcataaaaaattgataaaaaaattattaaattttttctcatcatgcattggaatggtctttccttccatttcaaaatagaattgtcactgaatgatagaaaggctattccattgaaatgacattccaacactttaatatgcaaccaaacaaagaaatggaacggagattgtttcctttcctttccattctatttcattacctccaaccaaacgccaccttagtagttagtcgatgtgggattctgacagtttcactactttgacaatggttaataatccacaattagttcacccgaaaaaaaaaatccacaattatggtgttaatgaaatgattaagcatgtttactaaaatctcttttagaaagttaaaatataattaaccttggcccatgatggatgattcatgttattaaatcaactttcattttcttattttcaagaaataatagtgctccttttactgtatgacactgatactcttgaatgaccatttgtatgagtagtcctgtcctaatgatacatgttattgcaacttgtgtgtagctaattatttcatcagttagacttgcaaattatctaatgtttatctgtttttattcagctggaa

SEQ ID NO: 41979 - DNA, 3117 bp, Cannabis sativa
ctaggattgtcttgttttaatcttttttgttcttttatttaagggaatttcaaggggtttatttttttggccatgaaggaaatttcaaggttatcaacttagcaacacactatagttggttggtagttgggatatgtaagcaattttgtttggtttaatatttatatatttttaccaaaaagcttggtttggttatcttctatgagatgatgaggtgtgtaatagagtgtatttaatctcaccaattcctattgttactatttgtagcaataacttcgcctaagggatgattaggttagaagcacaaaagaaatgagacaattttttatactaacctatccaccaacatacaaagattattaacaaaatctcaactacttttctaatacaaaagattaatgctcactaaacacatattaatcacttacttctttaatatattataaaaacaatccaagctttagcattctcttcaacccaaagtggctttctttcccatattatattttccattgaaaaaaatggacaattttttattagattgttcttctcaaaatggatatacattaatattaatgctaggctgcactgtcttatcatggattctcatccacagatggagccagaggaataagaaaggtcctaaaacatggcccttagtgggagctgcaattgaacagttgattaactatgacaaaatgcatgattggcttgttcaatatttctctgaattgaagactgttgtggtaccaatgcctttcactacttatacttacattgcagaccctgctaatgtggagcatattctcaagaccaactttgctaattaccccaaggtaataataataataataactaatattaatgcatcaattgtttagtcatcttcaagattttcatgcacattaccaattgtttgttcttttgtcaaaagggtgagacttacaggtcttacatggaagtactacttggagaagggatttttaatgtggacggcgagttgtggaggagacaaagaaagactgcgagtttcgaatttgcatccaagaatttgagggactttagtactatagtgttcagagattatagcttaaagctccatggtattcttagccaaacttcttttaaaaaccaagtagttgatatgcaggtatagcataccgaaaaatcttgccttaatgttatgttatgttactattgaaatacattcattcataacagagcttatgtggatcatcttttttgtaggaattgttgatgaggatgactttggactctatctgcaaagtgggatttggtgttgaaattggaactttggctccaaatttacccgaaaacaactttgctcaagcttttgacactgcaaacatcattgtgacattacgtttcatcgatccattatggagaataaagagatttcttaatgttggttcagaagctttgcttgataagagcattaaaacaattgatgattttacatattctgttattcgaaagaggaaaaaagagataaaagaagctcgcgaaaacagcaaggatagcaaggtaacataacataaaatcgctctttattctgttttgttgatcactaaactaactgaaaatttttgatcatgatcaatgaagcatgacatattgtcaagattcattgagttaggagaagatcatgaagatcagtttacagacaaaggcctcagagatgttgtgcttaactttgtaattgctggccgggataccacagcaacaactctttcatgggcaatttacatgataatgacacatccccatgtagctgaaaggctctattcagagctcaaaactcttgaacaagatcaagcaagagaagaaaatgtgtccttgctcgagttcaacaccgacgaccctaattctttcaacgaaagagcaagacaatttgcaggactcttgagttatgatgcattggcgaaattgtactatttgcatgcagttatcacagagacactacgtttgtaccctgcagttccccaagtacctacattatgctaaatctcacaatagagttttcttttaagtttttagtcatatccaaacattttattaggcctaattgtctactttatcatatcataggatcccaagggaatattggaggatgatgtgttaccagatggaacaaaagttaaggcaggaggtatggtgacttatgttccttactcaatggggagaatggattacaattggggtccagatgcatcttcattcaaccctgaaagatggctcaaagatggcttttttcaaaatgcatcaccatttaagttcacagcatttcaggttaattttcattagtttcaacttaaacaatacatatgtgtcctggttgactgggcttttaacagttgcttttagacttccgaaattccaaaaacacttctgttgttatttgagtaactaaagactcgtttttgttattgcaggctggaccaagaatctgcctaggaaaggactctgcataccttcaaatgaagatgtgtttggccattttgtgtagattttataagtttactttggtggctggtcatccagtggagtatagaatgatgactattctttcaatggcacatggtttgaaggttaacatcaccagacttccttagagaataatttacaaatatgaacacaaaataaacatttgatcatctgaataaagtcatctttatacttgaagtaacctgtaatattttatgggattatattattgttattatatctaacaaacaatgacttaattggcataatattccagtaccatgttatacgatatatccatttaatcttccaagttctcataacaatgactcagcatatatatataatccttcaacaagttctccaaggatattattaacaagttatttatacatttaaatataaaacaagaatcttattataaaggaaatgagaggattatagtcaaaagctctgatgaaaagtatactaactgatgaataaaaggtgttggggaatatctagctagggacaacatattgccttgtatgggtaaagaaccactacaaaaaatcctactttttagttataataaaatttgtgactaaaagtaaaaaagttgtaactaattat

SEQ ID NO: 41980 - DNA, 1082 bp, Cannabis sativa
ccctgagataaccttataattggttagtgatttgcccaacttaacaattatcctaccattactaatgaatagctttaaatagcaaaaatccaagttgaagtggatttacttctctctaaattcttcattcttcaattgggaacaacctccggccttataatgtctcatcatgctgtattggaaacaaatctcactttcagaactacccggatgaccatctcaatcttatttcccctagaacctcttactccgtctcgaatcactagatgttgatggatcttttctttttgattatatactgagtgaccaccatccctaccaaagctaaaagtaggggaagcagtaaacccactaacattttgagtcctttgggcttccgtaaaaactccactgaaccctcagctctaagagtcttctctaccacctaatcctaggtagtatagtatactcagtcatgatcatcaggtcgtatctcatctcgacattacatcttacaaagttcttatcttccatgctgaaactggattgttccattcttgaagccaaaccgacaaacctatccactcgtcgcttcacgtaattgagggatgcatgccatctctcccaccaaacgaggataccttcctagaattggattgtttacaagttacctgaccttagtaacttccataaactaagtatgccattagtgtgtaaccattattctgcatacataacgcttgagtttctcttgaaatgcaagattctttcttacaaaatcttttattatctacttataatcacacaggccttgatactaaaccctagctaggaggtataatgtctgaatcgacatatctctatatcttatcattggaatcaaattcacgttcccaatttgacaaagcctgaggtggatctacatcccactcataatacttttaccacaacctctgctatggttgcaacttaagggaaaaatctaactgtcctgactatttctagccttaaatactatatcatgattcatgtcatatcacctagatttacgatcaaaaatcaagtactttgggagatgtttctaatcatattcttctaccaca

SEQ ID NO: 41981 - DNA, 616 bp, Cannabis sativa
atactcacttttggttgatatacaagttcacgtagcctttactcaaacttatcattctctagtctttacacgcctaaatttaaagagaattattgagattcatgtgttttaatctaatttcaaagtcgtttggtcacaaatagaatatggttctattttttatttttatgtttaaattttgatatgtgacttttatagtgactttaaaaatattagaaggcatcagtaatgtttactaatttgcatgtgtcatattactattagtgtaattaagtatcgaatgttatataaattggtgtaataattttaagaaaatatcactaaccaatctcagaacgttacttttaggtagtattagacactaccgatgcctaataacaatactcattattctttagctttttattttggtattatttaaccttattttaaaccaattgctcatatgtgtcctactaagctttgatacttgtctatagggatgttcgtggtatggacggtacgagttttaatcattttttcaaaccaaattgtatatgtggtttttacaatttgtcaaactgcaaccgcaccacaagaccttaaaacaacaaaaaatcacactgccaaaatgcag

SEQ ID NO: 41982 - DNA, 1630 bp, Cannabis sativa
tagtgtaattaagtttttatgccatatatatcaaaacttatctttattttcccatatttttgtaaatagcccttaaattaattataattagacttaattacactagtttgcatctaataaaattcatttaacaacaagattaattcttaaataatttattacatttgttggcatggtattttagaattgacgaataattttactaagttaagaatactaatttttgtaattaatctcagataaactaggttagcaattattcaaatatttattttaatagaaaattgttcacttatcatcaaaattaatttttgtaattaactttagaaaataatatagttaatattttatgaaaaattatatttaagtagaaaattaattttaattaatttgggatctatttaaattaataatttttataggaaatttattttatcttgaaaatttatacttaagtagaacattaatttttgtaatttattttgaactaaataagttattaattttcataaattatttataaaattaatatttgggatataaaattatttttgtattaatttttagtacctaaattagtacttttattagataagtaaaacaaattattaaaataaatgaataaaatactgtttttcaaaataatgaactcatttttaaaggatatctgatctctactactaatttcataaggctgatattctaattgcccctcgagatgtgctgactttgtacccctaagggttgagatttaccagaataactttaacactatttaatcttgaaagataaatatttatagatttaattctagtagattcactcacaagaaaactgctagaactagatttatatatatcgaaacagtggttgaagttcataaaaataagaaaaattatttttcaattattttttatcgaataataggttcccatgttcattagaagagttggctacttaggtgatatctttgacttaaccctatcaggttacagtacatcatttaattgaaaattttggaaattttgaaatgtgcataattttagtatttttttccatgtcttctatatttttttttatatgtttacgaatttcttaagtatttcaataaatttattttgaactaagcgttaatttatgttcttgataatataataattatatagaaatgaaaaaacttgatcctatcctctttaggttttacgaaattggtaaagaaatgtcatcaagacacaaagttcatgaacatctacttatgatactactctagtttcttacagcaaagcaattgtaataggaatactattcctaaaatttgtctatttatcccacaattggccttttcatcaccatatagtttgaatcaaatttcattcacgaaattcagatccagaaactataaataaaagtagatgaaaaagttatcccatcttctaagaaaatgaatagagcccaaatggtcttattttgtgtagtaatgatgaaaaccctcaattttcaaacaatgctactgaatggattgaattagtggctatcttagctaatgtcataaaatcgatataatgggatataagaaggcaaacctaaaggaaaagatgatataataccaatttgtgagatgtttgtttta

SEQ ID NO: 41983 - DNA, 926 bp, Cannabis sativa
gagctcctgtttgtaatctgggtagagtcagaagtcatatggttcgttgccccactatccatgtaccaagcactgtcttggactgtagaaggggaggcaatgtatgcctgggggttggcctcagaggaagatgcattagagtcatctggtcctgtgtaactcacatcaaagcgtctatagcacttgattacagtatggcctgggcatccacaaagttggcaaatgacacgatttccattgttgtaacctctatctcgattggatggatttcctctgcctcggcctctattttgattggaaggtcgtgagagggaggttcagaggacccaggttttttggattgggcaagattagccatggggtgattaagctcaagaagtgaagtagattgagtgagttccagtcacatttcatgattttggagcatgtattgaacttcttaaagactcagatggtcacgagaagtgagattaaccaccaccgattcatattcagggccaacaccgacaagaatgtacaagatcagttgatcttcagagactgtgttactagcagcacgtaagccatcgacaaagcccttcatcttgagcatatatacatcaatagtcattaagcctttcttggtattctacagtagagacatacggtggatcattcgtgcttttgatttggtattgaataattgctccagtgtggtccagatcttagtagacgattcacaattgacaacatgaccaatcattgattcagagatagaagacagaagccaagaaatcaggaattgatcaagtctcatccaacggacaaagtcaggattacgtacaatgtttgtggatccctctatttcagggattcttggagctggacgaggaagacgatgaagaagaatatcttccaggtcatgtgctctaatggcgggaagaact

SEQ ID NO: 41984 - DNA, 1385 bp, Cannabis sativa
  modified_base (1000)..(1007): a, c, t, g, unknown or other
tatcaaaatgccatggttggtccttaaggacccttcgacgatctccttcacactgaaagatggataagaataagcctgagtggtatttggagatgacagttgggaaacggatggtctaggtttcagccattactttcttgatccagttcggcttggggaatttggaggtgaggattttgataacgagacaatgggaatcagtaaaagtatcagagttgagggaaacatggtaaaaatatggataagattctattcctcagtgagggagagggtgttaggtgggttctgggaagaggaagacgccattgaaaaggtttgggagctaaggaaggtgaaagccataataggtgtacttgcaaaagcataaacctaggtctttaaatagcaaaaaaccagagttaagaaataacacctgaagatgaaaggttgagatggagagtgggaaaaaccatcgtccctctgctcaaatctcccctgaactagtttagacaacatttgagcaataatgattgctcttagtgacctcaaagggctaaaaatggtggtaggaaaatcggagtagagagagtagaggggttgtataccatcagtttttttattctacattaattgtggcaaaacgtgagctgtcagaagtaattgcaaggttaagagagtaattaaagcaaggagggattgaattttttgtatcaggggtttagtcgtcatggcagaggaagtgaaactaacagttaagggcattaaatgcaaatgaggaagagaaagtaggtagaaacctaaaaacccaaaatcggtttggtggaaacttcacaaagaagatagtttcaatggctattaattattataatttttctttcataattgtgtgtgttaagttattgagtatcacatagggcaagatcaactcaagtgtaatatatacactctttttttctaacaagtaataatataaaagttgtataataataacaaattatttatattgtattattattattannnnnnnnattattattattattatgtttataaaacctgcaactactttgaacttaatattaggtttttttttcatgaaaataaattttataagggatttttatattatatattgaaattttcaactttgggtggaattttttaaaaaaataagttttatattgtgtactgtgttaagtttttacggttgtttcacagttattttttagttgttccattgttgttttaattgttctgtattgttgttttacggttgctttataaaaaaaatagtatttttgtaaaaaattctgtgtgacagtaaaattgtaatcttttgtccaaaatctaatacttttgtaaaaattccattttataatagcaaaattcataatttacctttttaa

SEQ ID NO: 41985 - DNA, 3335 bp, Cannabis sativa
  modified_base (26)..(27): a, c, t, g, unknown or other
  modified_base (54)..(55): a, c, t, g, unknown or other
  modified_base (83)..(84): a, c, t, g, unknown or other
tttgtaattagtcacaactattttanntgtaattagtcacaactattttacttnnaactattttacttttagtcacaaatttnnttgtgactaaaagtaaaatttttataatggcagttttaattaaaccaacacagatgactaaaaaaaaaattcctcccccacgtgcgccatataaatgctaaccatttctaaggaatttttattattaattctgctaagtaagacatggaatgaaagatgatgctattttttttaaaaaaaaaaataatgacactaactttgtgctttatatattaaactttccatctgtttaatttgtatgaaatatattcacttgcaacatttttggacgtgatagctagcttaatatcttgaaaattaactatttgattcaaaagataatatcaaaggcaatggatgtgacagtggccagtgggactaattttggaatcttattcctcataattctagcttttaccaaaatagaccttttactttaactaacaatttcttttgcatgcaaagatattgttctatcttatctagaagtaaattatgtgactagctatattgaaaaacagtatatatatctctctgaagctgcctgatacagtacgagatagtgagtcaatttctttatttattttatgttttttttttgataaggaaccaaactttattgaaagcaaaaaggaactacaacaaactcaaagctaccgaaggggcaacaactttgagcagacccgaagtgcaggacttggcacatctcgcccaacccgcaaccgcatcagccacaccgttcaaagaccgagggcaatgggcaaaaacaacaagatcaaaacacttacaaacacatcgacaagattcaaaaacaggataagtgccccaagcataaggcaaacagtcattgttcaaagccatgattgccaccttggaatccgaaaggattttgatcttccttacaccctgctctcgagctactttcaacgctagcagaatggccaataattccccttcaagaatccccgagaccgtgtggaactcagaagccacccaggaatcacccacatttggttcaaccacttccacagccgccacaccagcagcatcatcaagaatagaagcatcacagtgaaagcactgcatttcatccaggttctccacaaccgggacatggaaataaactcgatcagccacttccagaggaacatctctcaactccatctccttaactctttttcgaatgtcctttatcaatcccgttaaagagaatgtgctacctttaaaaattaccttattcctccaatgccataccgtttcacagaggcaagcagcaaacaattgaaggtcctcatcgctcacttgagaccaccattctccaaagtccataattgtttcccattgaaaatcttccaaacgaatgccccatcgactttgaaaccaagccgcacgaaccacactgcaggaaccaaagagatgaagagcagattctgaagccacatgacagagtgaacaagtgttatcaaccaatcctaaacgttgtttcgaaagcagaacatcggaccatgttttccaaagaaaaagctttaatctttgatgaatcttagaccgccaaagcttttcccaaacgcgattaggattcttgaatctactgtgttgacttaaccaatacccgcttttgacagtatacacccctgactttgatcctttccaaaaaatgatgtcttcactagtctccaaaggcctgattcgcaaaatggacattgcaacttcttcattgaaactttcccttatcaattcttcattccacactctagagccttccatgaaaagatccgagaccctaataaaagcatgtcttctagagtaatggaaactatctcgaacctcctccatagatttcccagggacccacggtctgtcccacaggtctgactccccaccgccaatcagaacaccagccctagcaatacatatctgtctagcctctataattcccagccaagctctcgaatcaccagctcttttctccactctccaagcatccgcaacctgacaatatctagcctccatcaacttaacccaagccttatctatgcccgtaagaaccatccaacaaagcttggccaacatagccttattaatatcactaaatcttctcaaacccaatccaccacaacgcttgggttggcaaatctcctgccaacttttaaaagctctgtatctatccttagccgaattccccacccaccagaaacgagcaacaatcctatccaactcttcacatagagttttagggaccaaggctgtagacataaaataccccggaatactctgaaggaccgaggcaaccaaggtcgttctacccgcctgagacaaattttttgctctccatccttccaaccgagacatcattttctctttaagaaaattgaaatcctttctcttgttagcagagaagaagaaaggattactcaagtacttctcgtccctccgaaggcagttcataccgatcatgttcttcaactcatccttgcacctttgagaggtattaggagaaaaaaccactccactcttttgtttgttcaccttttggccagaccaatcttcgtattgagagatacattgcataagagcattcgcattcgagccattcgccttacagaaaaatattgcatcatcggcataaaaaagatgtgtaatcggcgttgcaatccgagacacttttaccccgttcagctccccattattctcggctctaaggattaacttcgataagacctcgctacacaggatgaaaagaaacggagatagcgggtccccttgtcggagaccccgtttaggattgaagggagtcaaaggggccccattaaggagcaccgaataagtgaccgaagtcacacaagtcatgatgatagagcaaacatgatcgctgaatccattagctttcaaaacccgaaggaggaaggtccattccaagcggtcatacactttactcatatcagttttcatcgccatcaccccatgttttcctttctttctcttaaaactttgaagaacctcttgagccatgatagaacattccgctatccatctacccgggacgaaagcaaactggaaaggggagactaatctatcaataacttttttcaatctgtccgtaagaatccgagagatgattttatagcagaagtaacataagctaataggccgaaaatgatcaaatcgagaggcattagtaatcttaggaatcaaacacaaaaaggtatgattaaagttaggacaaaccgattggtcttcaaaaaaaccttgcaccatcttacagacttcag

SEQ ID NO: 41986 - DNA, 1205 bp, Cannabis sativa
aagtatgtagggtaattgtaatatttatattaggctatctagttttccttttgtgaggctgccttgtaaaacaatatcctctcgtagtttcaataataccaataatgtttgattcactattgtgaagattgtgattatggacgttagttaatatgtcagtataattatagtagaccaatttttaaaaataacatattaatataggatattcacaaaaatgtggtaaatgtaaacttagttcttataaatatttggtaaaaaaaaataatgccatcaaaatatagatttttcagttttttttttttcattcttctttatggtaaccagttactagtatcaaattagtttttcaaaaattgatggggtgttcgtggtgcaggttgtaacctgtttttcaaatcaaaatgtatatgtgagatcttaaaactgcaaaaactatactataaaaatataatgtggtgcagtgcggtgcggtttaagcggtttatactactttcatcattattaaatattataataaaaatttaaaaagtaatctaataaagttttaacaatacaaaaaaaaaataaaaaaaattactaaatcttaacattataacatgcatattaatgaactgtctctaaaaaaataatgtaatatacacatctattacatatatttgttcttatatgaaaaaaaatcatattataaaattagtaactttgaaatatatagtgtggtgtggtttcaaccgtaataattaaatttaaaatcgcaaaccgcattaaaatgcgcagtttggcaaaaatacaaaatacaaccgcactgtaaataatttcaaactatattttttatgcggtgtgtgcagtttgatgaatataaattttagctttataagtgatgtgatacataaaattaatattttaaaaaagttaatttagatttttttctcttaactttgacatgcactaaattataccatctgaacttttcagttcgtcaaaaattttcatcgaactattaagattgttagatttaaggatatttgtccaattttaataaagaaaatctaaaatttcaaaaaaaaaataaagaaaatctaacgtgaataaaaatttaagaagcacaatttgatacatgttaaagttccatgacataatttagtagatatcaaagttcgaaaaagtaaaatttagtaaatgacaatcgccacattagcaaaatt

SEQ ID NO: 41987 - DNA, 1268 bp, Cannabis sativa
aaaatttgatccccgttcccgccccgtttcccatttaaacggggaatccccgcgggaccccatccccatggggaaaatgtgcatccctaattgtgggattcaatagttaatgaatgtgatactgggcaatttgggagccaaatattttctttgagaagtgtaccaagcatcttttctttttttaattaacaaagatacaagtgttctcgaggagaatatgagatcatttaagggctaagcatggtcataacgcccatattgacgtgggtgttgggctttgcgcccaggttaacatacaacttggttcgcttatttatgctcttcaaacatagtactctggtaattcttcttattttggtcaaaaaaggataggatacctcattctcaatctcaaatgtcatagaagtatcaaaacgagccctggaaagctctccgaagagcacccaaaccctaggatgacatatagcctagtgcactgaattcttattttatgtcttgaaatacatcactgacatcgttaaatttgtaaatgctcgcagattcatagtttaaaaaagtaagtttttattattttatttattataataacaaacaatttaatatatatatatactaataaaaatttacttgctctttttacaatttgggagacagtcgcaatatgacgtaaaaaatgacttgttaccgttacaacaagaatgattaacaaaattaattggagtaatttacgatgagtagaaaacttatataagaatttacatatactattttttaacttttctaaaaaaaaaaaattacggtttgagtttctcaggtggtatctatatgggttgttatacagattctgattgtaatataggttgctccgttagttgcaatagagatttttatatggaattccgtaaaaatacaaaaaaaaaatattttgaagtataaaaataaaaaaaatccctattttattttttattttttatttttttagataacttttaaatatttagagtaattttagaataatagtgtaatatatttacttagagtaatgtaaaggttatttatttagtttatcaatttaatttttagttgtgctatggattaatttaaatatattaagagtttaactctcaattgcaaataattatttaagtttattttttaacggttttaatagtaaaagccctgggccggatggaatgactccggctttttatcaaaaatgttggagtatagtggggacagatgtaaccaatatggttcagagatttttt

SEQ ID NO: 41988 - DNA, 802 bp, Cannabis sativa
gaaaatagagctccaagacaattcgctgttatttctaaacatgatcacggctcggctccaatccttatcgcaaaactctgcttgtaaaaactcatgaaagttgttctgctccattctccttcttggaaatggatttcgaggcctgaagctcccattaccttttggtagaaagtcccaatatcccaatctgttggctttctgattctgggacgtttgctgttgaatactgtttctcccaccaagaggtttcaaatttttagttgggtcgaagactctgtcaacaatctgtcttctcgcagaaccggtattctgtttcacaatacttgcccaagattgcttagttcctcttccccacttttgctcctccaaaggttccttggacaaattcactttgtcgatattcaactggcagtctctttttaacgttcctttaaagcatcgtgcaaaatccttccatccattagcgtgttcctcctccgggatgatcaccattgatatcttgttattcttaaggactgataccttcatgaacacccccctgttgttatgaaatatttccaaaaagcaactgttggccctgttacgaaatgatctcttgtagttaactttctgcatctcctccctgtctattagctcttctaaaatatccgtcaaccacgaagctgcttccaatgtaacggcaatttcataccctgagaggcgagttctttcgcatattctaacaaagcctccatcattcgataaggtgatcataaacaccttataagaagtacggaaactccaatatttttgagacccctgg

SEQ ID NO: 41989 - DNA, 1510 bp, Cannabis sativa
  modified_base (406)..(432): a, c, t, g, unknown or other
ttttaaaaacaaaaaaccgattaaaaaagtattaccaaacgccaccataattaaaaaaaatccataaaaataaaatatggtctgtaaaaatataaacaaaattggattttagctattttgtgtaaaagccatacaattttttgttgaaaatttttgtcatgttaataagagtcataattattctagccttgtaaattttgtccctaattcaatttatcttacaataaggataaaaattgggtgggtaattagcggagcatgcaacccccaaccctgttcggctccccatttatgccccccattctcatccctgtcctgtttaatttccatcggattttggagtagaagaatccccattgagtacgggaacccattgggtatcatgaaaattaataataataataannnnnnnnnnnnnnnnnnnnnnnnnnntaataataataataataaaataacgttatgtaattcaaaattaaaaaaaaataataatttgaaataagatttccatctaattgtaaaatacataaaaactagaaacataatcaaccacatatgttgatgctaattttgtaagtaataacaaaataaagaagataccaataatcaaaattgatacgtagaatattatattaaaaagtattattatgacaataataagaaagagcaattatcaattttgtagccaataattttaatacgattatacgaataaatatttaaaaaattatataaaaagtatatattgggatcgaatatgaggtgtatcacccccgaccctaccttaaacccgctttgcataattaaaattgtcccccactcccaccctattcaagataaatactcatctccgcggattaaattttcatctcaatcttccgatgtacattttgttatttaactaataaagtttcctttcaaataataataataattgatacaggatttagtcaaagctagctaattttcatgtgtagactaaggttaaatctaaatatgaaaatgaattaataaaacaaacaaataaataaataattataaaattatatataagacaatctctttcttatctctttcaacagattttattctaataaaagccatttgtcaaaacactactataattgaaaatgttgttgatatagtaaataataatttaaattttataaaattttatatttcttaattgattatattctctctcatggttgatcttctaagcattgcctccattagaaaattctgtaaaactcacaaatccattctcagaaaatggtataaacacaattcatcttctaagaaattccacactcaattattcaaatccaagaagagatcatacaaagttgaggtaataatctttaactacattaattcattcctcatatcatatatattttatatatatatatacaaatattgttcaaatttataatatcttatatatgaaaatctctcctccacaatattatgaatttatttaaaaaagacatgatcatacccaaacaattat

SEQ ID NO: 41990 - DNA, 1018 bp, Cannabis sativa
  modified_base (921)..(925): a, c, t, g, unknown or other
  modified_base (957)..(961): a, c, t, g, unknown or other
tagggcataaaacccaacatggtcgacccaacatgacattaaaagttgaagggacgtcaatcaccaagaattataccatcaaaggtttgttactctcactttgattcccaagtgtagttgtcctaatatagtagttgattcccattgtttcttgcaatgtggtttataatgtggctacaaaagtaatttgtaattggttgagagttgttcttctaagtagcaatagtcaaatcaggatgtttacttcacaatataatggtgtgctaagatcttttgaggcattatggaaggaaaatatatcaaccctattgtatgatcaaaatggatatgaagaaggctaatgataccattgagtgagattttattgaagagatattgaatgccttcaatgttcctagctcattcactgttgccgtgatgaactatgttcagactatgaagttctctctcatgtttaatgaatctcttcatggcttcaaggggtttaggaaaaggggacccaatttctcctttgctttttgggattggaatggggtatttgtctcaagtgtttgcaaaagtggctctaaaagatgatttcaagttctatcatagatgtaaagatctaaagttaagtcatctttattttgttgatgatctttttctctttagtagaggggatccaggtcaagccaatcatgttatttctttgtagctttaagaggtttttgaaacttcaggtctccaagccaatgcctccaaaataacaatttattgctctcgtatgcaagactaatatatcgctcaaatattagagataacttctagcttcgttcgcagtttcttaccttctagatatcttgttgtgccaataagttctaaacgaatttctactgctgaatgtcatgttttggtagagacaggcccggccctgggcatagnnnnnctaggcctgtgcctagggcccacctatcccannnnnccaaaaaaaaatatttatcttttaaaattataccattttttttactgattttgaaaa

SEQ ID NO: 41991 - DNA, 2831 bp, Cannabis sativa
  modified_base (746)..(752): a, c, t, g, unknown or other
cgcctcccctcaactcaaaattcacccaaacattctaataacctccagtatacctgtacacatcaaaaccaacctattccaagcaagaaaacaccacaagaatctcagaaaaggaaatcaccattaaagctcaaagctagagctttcaaactataatttagttcaagcaagataacaatcacccaacttagcttattaggtcaaggataaccttcattaatctcaccatacaagaataaacacttctaaaacaatcagccacttagaacacaattcatcttcaaaaacctaacttttacttcaagaaaaccaaggaagaaaaagctaggaattaataccttagattgggtcttctaattctggttagaactccaaaattgcaacaagaattcccttcccttgctggttctttgggttgcacgaaagagagaggaagagagagatgcttctaggttactccaatctacccctttatcctttctttccttattcttctaatattattaatattaactaatgataagtttagtaaaaggcagcctctagtacccactaaaagccaaaagaataattggcaaaatgacctatttacccattcaattaaaaccaaagattaaacaacctaaggacaattttgtcattttcaaatcccgacaaatccctgaaatttctaatgtctaacaatgataccccggtaataatattctaaaacatataaaatgcgactctctaaaggcccaacgtcnnnnnnnacagcttccgaacacaatcacagaaattgagatatttacatatagcattttcaacatatattgcaattaaataatttttaccaatatgcaatattataaataacgattatttctcttgcataaaacctaattatttaataatctaaaatgttaatcttaggcgttctttacaaagatagtgttgatcgaaccttagtgagaaagttgatctcatccaaagttgtttcaagagagcacatgtcgcaatgtatcaaggttttctgaaaattaatggttcagtgactgtcaaggtcgtgggaaataatttgattttatttagatttttggatctaaaggacaaacgaaaggttttcggcggtggaccgtggttgcttgaacattaactcttggctttggaggtcccttcgggtgtgggtgattatctctcgttggcttttgatatagtcaaattctgggttcaaatacatcttgttcttatttcttgtatgaccgtcaggatgggaagggagttagggtgtctccttggcccggtgacggaggtcgacgagaactcgtctaaggactgtttgggaagatttctccgtgtccaggttagaattgatattacaaaaccactacctaaactaatgaaagttagtttgattaagggagaggaaaactttaaatttcctctaaagtatgaacaattactcgatctttacttttattgtggtattatcggacaccctttgcgggaatgcatttctttactgacttcgattctgcgtggccacaagtggaagtatgatgattttattcgtgcgaatcccatccatcgactacctgaccagtctaagaggtcccgtatggatgcaaggaagttgcatcttgcccctggaagggtggaaggcagaccctcttcatttcctcttcaggctttgggtaatgatggtggtggtttgtctaaaccggtgcctggtcgtcggactcccattagatacactagctaataactcaaagttcaatttaactgctggctcaagtggctataggagagcgtgtgttggaggtcttgagtttgagtccaaaattatacaataaataataaaaaaaaatcaaacttcaatttatttatttatttttgtgtggagaattagtcttaaaaagagatctcaataactgctgtgtaatttcttttactacttactacgacactaatgtcataaatgtatggaagacttaaacaatcattttacttttattaatttttttgtctctcatattaatctagagaagttaatgtgggtttaaatttgagatgaaatataaaaagagaatttttgtcagtgtcggattgttattagtgtaattaagtatcaagtctcatataatttaagaaattatttttaaagaatatcgataatcaaccataaaacgctacttataaaaatctagtgcccagctgatgtaaaaaatatgattgatacatttgttttttcttacgaagtgattagaattactcatgaatttacgacgcatacgtccgccaccggtgctagaacctcctcgaaccaggatagtttatcgtctaatctcaaagcatgctttgccaaattatgggccgctaaattctcagagcgagccacatgagacaaaactgcccccgaaaatttagacaataaagctataacatctttaaacaacgctcctaacttattaaaatacatcatcctattattgctagccgtcaccaaagctaacgaatttgaataaactgtatgaatttgaaagctacacatatgagcccaattgagtccaaccaacaaaactaaaaatttcaaccgtaacactgaaatttcacctaaaaaatatcaaaaaatcagaataaaacttcaattagaaaattatcaaggtaaacaaaatcaaccaaacaccaaaatcaaaaaatcaaaaaaaaaaaaaaaaaagctattgaagttgctgtatatttacaaaattaattatttttttaactcaaatgttacatgtacctttttggtaaagttgagatcatattgatgagaaataggaagtgtatgattcttgtttccagtttccact

SEQ ID NO: 41992 - DNA, 608 bp, Cannabis sativa
tatttttataaatatttgtatgtggactgtataaatgtttaatgggccggcccaaagtatttttgtaattttttttccttttttgtatttttttgtttttttccctaatttttttgctatgttaattgaaaaaaattccataaaacacttttttttctttgtaattttcttactaaaacataataataaattaatactatatatttatgactaatatttgtgtttatataaatatattaatcgtgtcaatttatgttgtatcaacatatttaattgtattttaaacatgaaacttttaagttttggtcataacacatttattaaacgtgttatcgtattgtgtcgtgtgatctgttaagaaattatatcgtgctcgtgtttaaagtcttgacacaattaataattgtattatattcatgttcaccataaatatatcgtgttgaaaacgtgtcgacacatttatctaaaactgtttttctatagtgtacttagtcatatatccaaaaaatttacgctttaattaatataatatggagaaattctacaatgcacccccttaaaatggatacattgatacatccttgtctgttttagcacccaaaataatt

SEQ ID NO: 41993 - DNA, 1856 bp, Cannabis sativa
attttttaaatatctcaaaatgtttcaaggagatgtaacctttccttttatatagaaatgcattgttaattaatacaccgtcttagaagaaacgaaaccaaatcttaaaatttggaagaagaaaaaaatatatgcaataattttttgagagatattttcaatacgacctatttagtagtactaataatgtatgatgaaaattgttgccccaagttttggttaactaaattaatacgacttaattctctagtctcctcctcacctttgatgtaacacactaaccttacacctttgtttaccaaagtgtgagtcttgctcttgtaaagtattacaataattaataatattaagacgatgggtttatgatttttgacccagaactataaattatgcacaattaattgtgttccttgattgttttagctggttaaaaataattataaaactattctcaatattgtaaagtagttattttaagttttgttaaaagtgtcaaacaaaatattgacactcaaataaaattttaacatgagggttttaactgccacacctcaacattacttatataatttaaaataataattaagaatatgtattaaaaaaaattattaaactaaaaattaacttattattataaaaaaagttaagtaaaactaatattaaaaaaattatatatataatttttaaaattacacgcattgcattaattgatgtgacaatagactaaacaaccatattaatattttatagttgaaagatcacaaaacattgtgaatagtttaaagactatttttatcagacaaaaagatcaagaatgagaatgcataaatcaagacaaaaatcttaaatctaaatacttttgttcattttcagaattaaaatattgttaccaagattaacagagaagtttaaatcctttcatgatttttattttgtgttgtttagttaaaattccccgtttacttgatgtgattatgttttttcaattgtaataaatgatgagattagacaccaaaagtgagttatataaaataaggctaaaaggctaaattatatttgccaatcaaaagaatttaaaaaggtagaatttaggtggagtttattattttgatagaatagagtttaggtagagttgtatgccagtatcttactacataaatttgaccaggcttagaaaaaaaaaaagaaaaaaccttttttcttggataggggttgaaggaagcatcaactttttgattatgaaactacttataaaactccatagtttttggtctttttaattagttctacacaggttatctacttaattctatgtgtagacctatgaatgtagctaaaatggattggtgacttggtgtaagcctcggtgacttcttcatggtttgcgtacgtactttatttttaggtgatctaattaaattatattatgtacctacataaatttcaaaaatagtagccactttgatcttattgatagaaaaataggtacttataattattaattcacgtattcaatagaattatcaatttgtttaattagtattaaactgatattaataaaagttgaatatagttattatcgcattataactaatgaccggctaattaatgcagatggatcttaattcaaactcttgaatgaaaaagtgatgaacgcaggtgtctttaaatgcgtgcgtaaatataaatatactagcgagacacttcttatacaaactaaaatatttttttgtacttggtatccttacgtgagaaacaagaagatgctaatacttacttgtatccttatgagcaaggtgagatatacttgtatcgatttagatgctaatacgtacatgttgttagaaaaatttaaa

SEQ ID NO: 41994 - DNA, 1023 bp, Cannabis sativa
  modified_base (916)..(920): a, c, t, g, unknown or other
ttttaaattatttttttttaattttttaatttgttaaatatttttttacgtggaccaatataattgtgccgtgtgtacatcttgtccacgtagatgtacacatggacagtctaacatgacacttaatacttgaaatggatgaaaactgtaaattgctaacggtttcttaattttatgagttttaccaccaaaatttaagttttagaaattaagtacaacgaaagtgaaagtattgaggagttttgacgccatttattttattttatatcattattattgatggtcctttttaaatatttaaaaacattttatgtattttgaaaagggtatccatattccacactgttttaaaggtgcgtgtctacctacattgtatggtaataaattttatagatatttttctccttccaaaagaaaataatagtgataatttggacatattcatttattagaaaaggagagtgaaatggtacaaactacaaagtaagcaacaaccacaatttttattcttaaagtttgatataagacaaaatatgaaaaatggtgggttccaattccattattcgatgcatatgaaaagtgaactaccattctctcaacaccaacgactcgtcgtacctattctttcacccaattctcaaatctcaacaacctattggattaaggagagttttatttgaactctataaaataataaatacactctattattaaaaaaatttaaatttataattcttaaaaattactattaatatatatttttttaatttttttcctcacattactttatgttaatttcaatacttattttgattttatttttataatttttctaattcatgtatatatatatttttattttttttaaaaaaaaatttatacaattttttattttaatttttttgttataatattnnnnntataatttatttttatttgataagtatattttataaaaatataaattggaagaaatatattaaaaaaatttagtataattaaaaatataaaatttatataaaa

SEQ ID NO: 41995 - DNA, 742 bp, Cannabis sativa
aatgtcaatgcagatattttcaccccctttagcttccctttttataaattgggttgaaaaaagggaagctaaaggcttacattgtaatagtgtgtgactaaaaaattgttactataattagttgtttttttttagtgttaactagtttagtcagtttgttactttcagtagttcaactgggttggttagtcggccattctttcattcctgttatttatataaccttgtatcacagcacaatgtatctcattcaattcatgtaaattctctttttctattttaacaaaaatattaaattttactgatagtatataaaaattatattaaatatatttttttgaatgaaaaattatattaaatatataaataaaaagataaaaaaactattaattatattaatgagtggcaaaagagtaaaaatggtatttattgtagatgtattcgcggtgcagattgtaatatttttttcaaactaaactgcatatatgcggtttttgtaatttctcaaaccgcaaccgcagtgcaagattttaaaaccgcaaaaactatactgtgaaaatacggtgtggtgcagtaagatttgatcagtttacactatcatcattatcaaacattataataaaaatgtaaaactcaatcgaataaagttttaacaatacaaaaaaaatatcttattaaaattttaacatcataacatatatactaatcatcaagttaattattatattgaattgtctctaaa

SEQ ID NO: 41996 - DNA, 532 bp, Cannabis sativa
atgctaaacttggtcacaacccttttcttggagaagtatcctttggggtagagagttattaagttcggggcttttatggaagattggtgatggcagtcatattcgaactcttgaggatcattggcttccttgtaacaagattaaattcttttctttggacaataggcctccttccccttttctgttctatttcattaatgatgctgaggattggggtgtttctaagcttgccatgtgtttttctgctcctttggttgatgaaatccttagtgtccctgttatgggtgagtttggtaaggatgatattatttgggggcatgatagttccggggagtttacagttaagtctgcttatcaccttgctttttcttctcaagatattccctcctcttcttcgttttccagttctaagaaattttggtctaaactttggacttctaaagttcctccataagttaaggtctttatttggagaatgctttctaatgctcttcctgtttcttcatctcttcataaaagatgtgttattgat

SEQ ID NO: 41997 - DNA, 4264 bp, Cannabis sativa
cgtcagttttgaagtaaacaagctatgcgtcaatctttaactgacgcaacaagtgttttttccgtcagttctaaaatgacacttatgtgtacatgtacaagacatttttcatggtaaaactttccacatactaatattagtttgtccatatataaaagataaattaatatcatatatccatataaacatatacattattaactcgaagttcactattaaaaataataatataaagttagaattaataaaagataaatttaaaattgtatcaattacatgagtaatattacataaagtgtctatataacaaatatttctaagaatactttcaatatacaagcccaacatccataacttaataaaaatttacacttacaatatacaagcctatcctccatatgtgttattagaaaaggttcttctactcctaactttcataagttttgatattattcaaagtaccttcttgcttatctaatcttcgatttaaaattgtatcgcgaagtagcgtcataagctttataatgaaagattgagtaattttctgcaacaataaaaaaaatttatataagccaatacacaattgaaattttaaatataaaatcacctcatttatataagaagagaaattttcttccactaactctttagctttatgtcaggattatttaaaatcgtatcactaagtaacgtcgtgagctttatgttttgtgctagacatttattttcttctttgcaaagaataaacaaagttatagtagtacacgagttaccataaccttaaatatgtataagctctcttttatcatcaataagaagctaaaaaatagacctaagattagtaataaagcactccaatactgtgaagagaagtgatttaacagaataacaacaattatatatgtatactgtgaagcgaagtatataagacatactaactgatcacctaggctaagttcttaccccattattcttagagaatttcagatgaagagattgttcttacattaattcaattcatatagaatataattttctcattaatgattcaagtattcaattctcttagtgtgataattaagtgtgattgtaaagtgtttgataattgtgctgtgagctatagtgttcttgaaatcattggatcaatttgattcataacaaattaattaccttgcaagtttctagttaagatttcaaagacaataatatagctcacaaactatactaaggatcccagaaatataattttaattaattagcttgcgagatattttctttataacagactcactaaaatgttggagcaacagactcactaaaatgttggagctgcagaaatggtacaactccttcactcgatcctctaatagatttccttgcactaagaggaatagcccttgcagcttcttcacctggaatatataaaaagcataatttgaaatgtaagaggatatttttgcagagtagaaaatctaacattcttttgtataacattatatgaacccccaataaataattttgacaacttatgctgaacaacgttgataaaattcaataaatgagtgaaaacatgacatttgggataacaatggcttgacacttgtattctatactttcattctcatgctaaccaataaattatatacatccaaatataaaatatataacataattagaatgaatgagataagagatataaaagaacaaaaataagcaactctaacaatgtgcagtcaaataaatcaataaaaatattggagacatatgtaataaaataattattaaattaagcatttcatattcattaaaaattaggtacatgactatctgtgcatagagtaaaaccatgcagatcaacagaagtgatattttgaacaagatatacatgtctatgcccaaataaataactgaaaaaatcatctaaatatggagggtacaaaaaatattgtggtatcatatgcaaaattgtgtcacctgaagcttaaaaccataagcattaatagcaagaaatatatttatatatgtttaatgacaattaacatgtttactatatgtgaatattgagtgtgcctttgatattaattgtatgacaatgaggaatcaaaatgaaatgtagattagtgtgttactcttggcaacacaaaaatacttatacatagagaaccaactttgccaatgaagttagttctttataattttggcatcttttattggtctaatcgctttaggatatgaagaaatatatataggattatatagagatcaaaaactaagttcgatgaggtcacctcacctcatatttcactgtctcgggtgtgagtgaaacaagtgtcctataattagtgttatggctatatatataaatatgtatatacactatgtgaatgtggtttataataaggatgaagtactattataattctgagagaagggagtaaataagtagtggttaaggaagtaaatcattataaatattgccttcgtgagagcatagtgaggaaccaacttgcagtcaacacttgccttggtgagagcatagtgagagcacagatggaagaaaacaaagaattggctataacatattttgtacagttgattattcatccctaaaccagtaccgaaacacgtagaaaacaaatcccatgtatgatccagcagctacaagtagtacaattatttgaacccataaagatgattcaaaggcctgcagcaagaaagcattccatgaccaataccaaaaaatagagaatattgaacctataattgcaccaacaaccacttggttgagactcgtaaccatgtctgtaaacatagatcatcattagtcacagatcaaaatggcttctgtttcagaagcaatctgtttatggtagcctgagaaactatggcatgaagataaaaaagacaacaaatgaaaaattagtaggtggtagaaaagttcaactaactcaaagaaaatcaaaatacatctgttaaatataaatatatacgctcaatatatactaacagatttaattctttttccatagcaaaacccacaacctctattcacaatatgtaaacatatctcaaagtcaataactgcaaaatattgtactcatctaataactgtacatcattgcttgtatatccaatttaagaagaaaaagaagaagataattcccataaccaaaggaacaatggaatccttatgcaagcacccgctcgtgaattggtatgaattattccgcgatatttaattttgggccacaaatgtcaactattctatccaaaagcaagaaaatcaaagttgtcatcagttgcaaatacaaatgaatattttctatcaaaaaccatgaaaagactcccgcttcaataagcgcttcaccaaaaatgaacaaaaacaaaacaaatcaaacaaatagcaagtaggagaagtaaatggctaaatgaatattttctatcaaaaaccatgaaaagactcccgcttcaataagcgcttcaccaaaagataacaaaaacaagaagtaaatggctaaatgaatataatcttattttttgcttttaaaacattcaatacatggttaacattatgtaatacaactaatcaaactttataagctcaagaacctctaaaattactattattgttacttactagttcttctctataagttaattatatatatatatacctctggaggagcagtggtcggcaatgaagaggacaccaaggaggtattgttgtggttgggtcgtcgggttggtggtggtttgggctacgggttgctaagaagagggcgaaggggagagagatccagcggagagggaaatagagtggagaaggttgaaatggccctcaagattcggtggtgtgctgctggcctagtcgagagagtcttcgttcatggagcttgaggcgaagagaggatcatggagttttgggcgagagagagaagagaggaatggaatattaggttttctgaaaatgaaatgtctaagttagaattagggattttgtgaaaaaactaattaattagcgactgtttttattaaacgctcatggtaattgcgtcgatttccaacggatgcaagcattaatagcgtcggttggtaattgacgtttaaaaaaaaaattaaattttttcatcggtttaaattttagcgtcgaatagataaccgacgcaaactcctattcttttgcgtcggttgccaaccgacacaacaacttagcttccactttttgcgtcggtccttgccattgaccgtcccgttgaccgacgca

SEQ ID NO: 41998 - DNA, 747 bp, Cannabis sativa
aatttatttttttcaataaaggggcacgattcgcggattcggggataaaatttcttttctatcatttttttctaaaaagtgggtaaattattatttaaggaaagtcattatttttcactgacagtaatagtttcaaaaggaatcgtgcaatattacaaaaatttgggcaatagtttaaattataggagaataattttttggggggccaaaattcaaatgtcaaaatacctatttattattaaaaataaaaatatttagaacttaaaaggctatacaatatcaaaaaacatgattttaacagtcaatatcccattattgaatttgtaattactacccgcttggaaaaactccaggagtgttggcacttcgcacgttcaaacttgaaagtaaaacataaaatgtcaacctaacctcttataattttgaattttaagcaaagtatatatatatatatatatatatgtatacacactatcattacatataaatacatataatcatgatcctttaatagattagatttaagactgggattgtgttcaaattttgagttttgaacctcaacacatttaactttaactatacattttaaaggtcacaaaagaaaacaaacagttttaattaatattagttttttactttcttcttttggaaaataaacatagagtcactcaagtaggggtgtgcataaatcgatccaatccaatgtgaaccgaccgatccaattacaactgaccgccaaacatt

SEQ ID NO: 41999 - DNA, 5289 bp, Cannabis sativa
tttcatgattacatttaatgtataaattctattaagtccagaatatatatatatatatttgttcatgagtatagtgtcgtcagctcaatggaatagaatcataattatatgtcaaaaatttaatttctatgatttgtcagtttactaaatttagactgacatgataatcgacgataagatatacttacaccttagataagtgttatgttatttctaaggtattggccatatggagtatacaatggttaactgtgatgctgtaatttttttcattttattttatttttaatttttttgtcaaatgatctgaaaattagcagttgattatttaactcgtttttctttttaattttaatttcaatttgtatctttgatagataaaatatcttgattttattgtatgttattattttaactgattaatattaataatattagaaaaaaataatattccctcaacttgcctacataatgtctttgtaaaacccaccgtccattactcaacttattattattattatatacattaatgaatatgattaatgaattattattatattattagtatttctaaattgaatgatgaattaatctcctcttattaactttgacttgaaaatcttgaccatctccaactctagccttcaaataaataaataattttaagccacactcaatttattattattaaaaagtcaatctccaaaaggagaaagaaaaaaaaaacaaatttcactttttttatttattaatttattttgactttataaagagtctaataaacatctatagtttccaccgctgactttcttcaaaactatatatatataaccttcattattccctacttcttcaactctgtgatatttttattagtttaacaaaaaaaaaatctaatcttattttttagccaataaaaaaagagttcttttttgttatagaaaaatgagttatgatcatgactcggaagatagcagtactacgagtcccaactcggttccaaagtacaagggtatacgaagaagaaagtggggtaaatgggtatcggaaatcagagttccggggacccaaagtcgactctggttaggttcttacgccaccgccgaagcagccgcagtggctcacgatgttgcattttactgtcttcgaagacccttaacctcatcgaacggtctaaactttccaatgatgttgccggcggctggtcttccggacaacatgtcgccgaggtcagtgcagaaggcagcttccgatgccggaatggcgatcgatgcacaggttcagttgccggcggcgcggaataataataataataattcgccggcggcgggaacagaacagaatgtgatgatgacgtgtactagtggagttcaaaacggtgcgttttgttatagttcggataattatgagactctgttttgggggagcgacgtgggagcaagttctggaacgtgggaaggttgtgaggtggcagtgggacccacctatgaagagtccttgagcatttctattgacgattatctctataattaataattaattaatacttattattattaattttgggtttcatttagttggagtataggacccttgttgatcttagagtgatatactagttcaataattaatagttttcttaattaataataatataaagatgtcattgtaattaattagtatgaattctacactatatatataaagaaaattattgaattttatatattttaattatattctcttgaattataataaaaatattttacacaatagaattacaagaatctggactctttttgatttattttatttgaacgtacgtggtcacgtaattgagttaattagtcaaatataatattaattaatggcggccttttacttatacctatagtgattatgaattctaattaatattatagtgtttcacattttttttaaaacaagtgtttatcattatttacatattaatttcacacactaaaacactatttagagattaaatattaagattaattgtctaaaattattttttccttttaaaaaatataaataattttttaattttttttaaaaatatcacatattttttttcatgagtgctcaataatattttttgttcttaaaaccagtctcaagggtcaatatttaatcttctttaagaattgtgatatataaggaatagtggttctttattattgatctttaatatttgaatttgaaagaggcacaaagtaattaaatgtacgacactgaatcactcaaccttaccatgattctttttcttttcttgactcactaacagtggccagtacaacttgtttaagcatcattcatttataaaagaaaaagcttttattattattattattatcttgttgaatatagtttggatgggtttgagttttaattctctggctagcaatagcatagcagcctacattttgcatttgaattggtcaaaatattagcttacattcacattaattattatggggtcataaaaattatccatattatttgtggggtccacaattcaacattgacctgagccttcaatccataggtactcacttacgtcacttgcttctagaaccccatttgcatttaagttccaaactagtcacgtgacataataaattttaagatatattaaatgagttagaaatagaaagtctaaagtactctcctagagaatcttccaatttagtttagagatagatatgcacttggccatatcttttaaaattatttgagtaatttgtatataaatatttaaatttaatttttaataataataataataatatttaaattatatttttgaaattatgtaaaaaattagttattaagtattaattaaattatcaagtagcaatttttaataagtccaagtcatgaatttttttttaaaaaatttactttaaatatacaaaaaaaataataacacgacaaaatttaatattaaaatatctgcaaagttttaaaaaatataacttaaatatttatttataattaaaaaattaaatttaaatatttataaaacaaattaatataacacataaaaaatattaaatactaaaagtatcttttaatatttctttttttttttttttttataatctcctatctccactctttattaatttgtttagttattcaactcttatttttaattaatttctaaagatctccataaataattattattatttttatataattatatataaaataatgttaaaaaataatatacaaataattaaaattataatatatatataaaaagaaaaaataagtagaacacagatactaaaatgcagatcaagttgaacctgcatctatatacatctatgttcacaatgcatcatgatggtttagatgcctataatcaggccgacctggcataagcagaattgccattgcctaggattcacctagctttgaatttttttttcctaattttggaaagtacaacatttttttcttaaataaaggcttaaatacttaacagccatagcaataatcttatattaatgaatgtacataatgacacaaactcacccagaatatatagctcaagtattttaacgagtctttattgaacaaaagtgtgaggaaagagagtgagaaattcaggaattaagaaagacttgaaagacaaaatataaaattttaaacaaacaaagcataaaataagagaatactaccatatacatacatacatagatacatagatagatataatattattattcatattttagctggtgaggaggactgagaggagagaaggtaaggggtacccctgtggctgtggtgagagtcttcctaggagatgtgccttctaatgtgaaagccctttcggttggagcaacataaggcctaccagtccccactagtgaagtacttctcttagtaccatttggagacagaagcaatcgaaaagtccaattcagaatctttggtgcaaacaccctgtatagtaggaatatgtcataccaacttggaaattttacatatggatctcctttacatgccccagaaactatcaactttgcaaatttctccactggaccaccaacaacatgtacctatacataaatgaaaagtaatttacaatattttacttagtagtatacaaattgttgatttgaaaaaaaaaaaaaagatttcattatcatcatcacctctctttcttccttccattgcatctcagcaccttcttctagcatgaatttgccaccacttatttcgctcccgatccaaccatgtgtcgcgattgttattcccacctcgtcttttacttcgaatctcagtgtctcgtagaagtttattagagctgccttcgccgcctacacattagtgtctcgtaaatatcaagttatgatatgttttattggcttaagcaacacatgttttaatcaattactcacagcatataagctcattctaggcagaggtaaccagttctctactgaggcattaactatgactcgaccattgctttggtataagtaaggaagagccacaaatgttggataaacatttccccaaaagttaatgtcctgaaaacccaaaaaataaattacaaaaattaggagtctttagtctggattttcaattttttcaaactaaaccactattacggttttttaaaaatttaaaaccaaaccagaccatcaaatcaaaccaaaccactcaaaaatgaattggtttagttcgaaccatgatttgtatttcgtagatgttttaattttttttatgataattattcattttttcagtattttttttacttagtaacaataaaaagaattcattatagtaacaatatcaacattctaattaaagttgttcttaaatattaagattttgtcaaaaaaaaaaatatattaagtatatatataataattatacggattggtttaatttgaactgctactgagatttttaaaatcatgaccgaactagagaatttaaaacggtccagattgatcaaatcattcacattgaattcatttagtccgatctcaaataatttgatttggattggttggagtttaaaatcacgaattgcggattatatgaacatccctaacaaaaaatattaaaatctaagtagatacattatatattttgatttttgagttgactatatatgaatagttattaattcttaccagcaagtggggaaagacagatgtatcagtaacttcttccaagtaaaaggtatgacctaaacttactgtgttcactagatgatccactacaaaaaaaaaaaaaaaa

SEQ ID NO: 42000 - DNA, 1451 bp, Cannabis sativa
  modified_base (1050)..(1052): a, c, t, g, unknown or other
tttttttttttttggtatatatagaaaggacatatatactgatctaattatttaatttccatttcttcttgatctcttttctttgaaaagattttgtattaattaaacacaaattaacctaacaaaaattttgtatctacatattgaatatgtatagtgcatgtacacctaattaattaattaatgtttaacaatgtttgcaaattgcatgcatattggtctcaatcattataattagctaataattatttttttaatatatatatatatatgtattgttttcttggattccttttattattatctgtctttttcaattggatatgtcaaaattacaccaataataaacctaatgtaaacaatttttattgagggccaaataattatcagaagggttgaaattaatatttggagttaaataaattaaaaaaaataattaattattgatcaggacaaaattatcatggagttgaacaggatctggttttaacaaatgttttttttaatcacttgttatataaagtcaataatattttatttttcttaataattcagaaagttcttgaaaattaaaattagggcaaatgtgcatgcatgcaactgaaatgggtaatcattaattaatttcttgatatatattaatatatacatgattattgaatagtatttttgagtaaattttggtaaattcaaaacaaaattatgttagaagaacatattatatattgaattgaattaactaatacattatttgaaccattaattgctacaaaatatattttatagataaaatataattatttaacagtttttgttagtttaattaactatgtaatttaaaaatataagaatattttgttaaatttaacgatattagtaggattagtattatagatatataaatattaatattatttattatacaattaatttaaatatataaatgttaatattatttattttaagttaattgaacttaaactacttttaaattaatatatataaatattaatatattatttgtagtattattatttttattattattannnttattattattattttttaatattgacagtatgtttaattttaatattcttaaactttatatttatttttctcaaaatttttaaaatttgaaatattattcttttaaaaaaattaaaaaaattaataagtaacttccttttaatttataaaattctaaaaatacaaataacaaaaattaaaaatataactacaatacatgtaactaatatataactcattattttttttttttttgagtgaaatatataactcattattaattaatgtgtcggtaagtataatgtcatacctaactaattacatataactaaacaaaaaaattaactaaaatatatgtcataattagttacctttttgtacgtgtgcttggaaaaaaatatttatatatatctttatat

SEQ ID NO: 42001 - DNA, 1176 bp, Cannabis sativa
cgacgtgacctagaagaaataccgctctcgttctctcgccctgtctctagggttctgccacaggcgactctccgtcaactccgacgatggcgtcagctcccctcccatccattcccgacgaagccaacctcgaacaagttttgtttaagtctgcctttgtcactgtttctgtcgcaggaacgctggttgattttaacagtagaatgttgtgacgagcaagatatcagcactatttgatttttctattcctattctatagtttctgtctaaaattcaataatatcatatacactcactatagaaagtcatgtcctctgacatgtgtgtcgtctctatgctatagagtgtgtctttttttgttttgagtgtgtcttttattccgatttaagtgtgtgtttcattccctcaaaggcgtcaagcagtggtgtaacaaaagatttagaacaacaatggaaaaatatctgccttgacgaagaagaagacaatgaagttgtgtacgaagatgaagaggtggaagagattgaattcgacgatcgatggtgccttgttggaagattactatcaaggaaagtatcggattttatggtcttccaaaaaataatagcagatttgtggaaaccagggaaagggatgtatgtgaagatcatggaacaaaatcagttcctctttcaattttatcatgaaatcgacattcaacgcgtaatcacgggtagcacatggacatatgatcataagcaactgattatcgaacggttgaagcaaggagacaatcctagaactgtgctcttaacaagcttgatatgtgggttcaaatccatgatttacaatccgggtttaagacgaaaacggcgatacgtcaagcgggcaattatattggtttgtttcttgaatcggatcctaataatttttaaggtatttggcatgagtatttacatattcgtgttcgactaaatgttgaagcccctgttaaaagacgtatgaagtttcgaaagaaaaaaggagatgcattttatgctaacttcaaatatgagaaagttcctactttttgctttatatgtggcgttatgggtcactcagagcgcttctgcagcaagctttacgatacgccacctgatgacatagagaagccttatagcattgatatgtgtgcttcaacgagaagacaaagctttctca

SEQ ID NO: 42002 - DNA, 1766 bp, Cannabis sativa
ttatcattatatataattaaaaacaaaaaacacgtttgcaacaacattaaaatcattatttcaattgccatgggctcattctactaaaagaattttcacaagaaaagattaagacataagagaggagagaaatgggggttggttggggctaaacattctaatttctatctaaaacaatttgagatagaatgatatatataaatatatagaataatttgcagcgtaaataataaacacttaattttatttttttaacaataataatacttaagttatatttctaaaacttccgtaaatgcttcatcgttaagcgtcaaatcattatatgttattttcttattgatatatttaaattaatttttaaataaaaataaataacttaatgacatagaataatcaaaaactttcacgagactattgatttgacactaaacgaccaactacctatagaagttcaaaaaatataacttatatattattaccgtcaaaaattaaacttaaaattgcaactaaaagttaaattaagaatttataccgcaaattactcttatatataatatatagctatgactcacttctcctgaaccaaacatgaaatggttagatagaagaggtaaaatttcaagtatatatatattctcaactatggaattctctccttaaactaatatgtttcttcataaccagtcactcttaataacatcatcattacatgactaaaccccttctatgagtttggctccacaaaaaggctggcttgagggtgcaacccggcttctttcaaagatagcgccagcttctcggggccataaaccatgcgagggaagtttgagaccaggctgtaattctccacctctaaacatcccaatgaatcgacataatcatacacggtctggattgttgctgtgctgtcgaaccttctttccttgcgttctccggttgggaacctcaccaaaacctggttttacaaaatgtgtattagagaactttgcaaaaggaaatagatagagtacaacgggtggttcccgaaaggcagaactatctacttcggttttgatttatggttgcagtgtaaaccgaagagcttaaatcagtctgaagagaagtattaaatgagaaagttaaaaatactttctaagccgaaaaggaattacctgtgttacattaggtcctttttcaggttcagcaccaagggataaggctttttcttgtcgaatcctagcgagagcagctgctttctcctctgcttcacgtgctgctctctcacgagcctcttcttcctctttgcgcttcctctcagcttcagcagcttctctttccagacgttcttgctcctctttcctttggcgttccctagcctggtggaaacattggaaaagaaggaaaataatcaagaaaaagtattcatatctaatcacgaatcttaagagcacacaccatgagataagaaataaaccgggaaaaatgaaaaactaaaaaaagggaatgaaagcatacttgatcagcttcaagagcagctctataagcagcatcttgctcctcccttaaacggatgttacttctcctttcctctgcgtcaagccttgctgtaacgagaactggagcactttcttcaagcactctctgcagtactgtaagcaattcttcaggagttttcggaccttcaacctgaaagcaacataaagtgttaggcaataggattagtatggtgtgctagcatataataagtaaaaaagttattagagtctttgtttgggagaaaagtt

SEQ ID NO: 42003 - DNA, 1107 bp, Cannabis sativa
tctctctctttcttcatatatattccttgtatctttcttcctttctttcctttgaaccctactctgtttcgaaaccgagttttttaaattatattctggtattagcttatcattagagaactagacaaacttcactcctttctcttttcttttctcttttgctttttccgaaggaaagaaaaaatgtatgcatgagagagagagcagtagtagaagcaggcttttggcagaccagttgaacccaagaaagataaattcctaataattctaacctaaactgaccgagtatcactgttttgggatatgtttatgtgtttgtctatgcatcatattattaatattatttctctgtgttagctgaaaagcctgctaggtggaacttgtgtagcttaaaatccgggagagccccctggaagaagagaaagggatcagctctctctatactcattattcacaccctgcttctgcttctgcttctgcttctttaagagcaaaaaggacttgtctctcttaagagtgaataaagtgagttgtagtgaaacttagcaacttttaaggataaaataagagagagagagagataatggaaggtggttctaatggcacttcttgcatgatgggttatggagaaaacagtaatggaatatgtccaatgatgatgatgatgcctataatgacttcccatcatggtcagcatcatcataatcatcctaataataatcctaatgcaaacacaaacaataccccaatatttcttcctctaccatccctaaacaatcaagatcatcgaaaccgtattagtaatagtagcggctcatcttcttttatggtcgaagattctcaccaaaacaacaacaacaacaacaacaatactaataatatccctacacctgggtgttatttcatggccgatcacaacaccaacaccatcaccaacaacaacaacaacgactccatcaataatatctcttctttcaaggctaagatcatggctcatcctcactacccacgtctcttggctgcttatgtcaattgtcaaaaggtgagaaaacaaaaaaaaaaaaaagcaactttgcatgcttttttcctagtttcaagtatcgatct

SEQ ID NO: 42004 - DNA, 876 bp, Cannabis sativa
ttgtatctctctcttcagtttgggattattcaacggagaagaaggtgtgagaggtttggtaaattacagtgcggtcgataaggatgcggcagagaagtactatatacttgccctcctgccacgtggtagatgtgccatgctggatactaacgtcatcaacggccagtcacgtgagaggtagaggtaggcacgtggatctgttccattgttgaaaatgaaaacaactcctcgaaaagaaatggtaaaaactattttagacttatattttgtaaaaattactaattgaatttttttttgttaaattacaaaatatattttatattttttaaaatagtacaaataagactttgaactaattttctgtcaaaataaaacttaatattaatccgatgtagagatgttatggtaaaacttgtaatattttctgtatctgttcgtattagaaattatcttcaagttagttatattaaaaaataaaattatcgaaaattgaattcaaggttatatttttactattttagaaaatatatggtccattttgtcatttaacaaaatagagggtccaaattgtaattgttgacctcagaatttggtcaacctcgtatttaataatgatgcttaccacgtcttacacaataagaataataaagtaaatgagacacaggattttatagaggttcgacccccttagttagcggataatgatctactcctattttggttgtgttgatatcagagataatactactgagatcacaagtgttgtggaatctgtagtagctctcttaagattacaatgtatgaatcagtaggcaaatctctaatgagaaagagagagtcttggaggcatgtgagagtgagtgagtgagagagaga

SEQ ID NO: 42005 - DNA, 1543 bp, Cannabis sativa
atgttgtttgtttatataatattattattaattaggctctagcagttgcttggaaagatgcttgtgcggcaccaagttcagctaagatagtaattccaaaaggtttatacaaattaagaaaaggatatttcatgggaccatgcaagtcacctattgagtttgagctggaaggaacattgcaggccccatccacagctaacggcttccaaaagggcgatggatgggttacttttgagcgcatcaacaagctatccgtgtacggtagcggaactttcgacggtcaaggaaaaaatagttggggaactcagtgcgccaggactaactattgcggtcaactccccgttgtcagtactgcatttcctctctttctttcataataatcattatataatactacacctaaaaaattgcattaaaatacgattccttaaaacttttattatctgtaaatattttggtctatattttttttggtgcacatataatttgtttgtattattgattttattgtgttattgcaatgaaaacacacagaatattaggttgaactatgtgacgaattcggtgatcaagagtgtgacatccctaaacagcaagcaattccactatatagtttacggaggagagaatctatcgtttaaaaatgttaaaattatagcacccgaggatagttggaccactgatggaatccacattgggcgttcaacaaacattaccgtcaccgactcgatcattaaaacaggcgatgattgcatctccatcggggatggaacaaagaaattgacaataacgagagttacatgtggacctggccacggaattagtgttggtagtcttggaaggtacaacaatgaactccctgtacaaagtatctatgtcagagactgtacattcaagggtagcacaaatggagttaggatcaagacatggcaaggttctcaggatagtattgcaacagatatgcactttgagaacctcatgatgtacaatgttcaaaaccccatcatcatcgaccaagagtattgcccatggaacacgtgcaataatgtcaaggaggtaaatttatattcatttaaatattaaaaaaattcaaatttatccctagctaatatatatatacatatattttgatgaaattataatacagaagccatcaagggtgaagcttagcaaagtgagcttcaagaacatcaggggaacttccgcgactgctgttggagtgaagcttatttgcgggggatattcgtgccaaaatgtggaaattagtggcattgatctaaaatacaatggcaatgggcccactaagtccgtttgtaagaatgtgaagcccatggtctctggctacgtgaacccagctgtttgcaaacagtaattagtactacccatggcacgaatacaattattatacaagttgaagtcattttttccttgttatatagtattcatgaatcatgctaattaacgggcatgattactatcttcatctaaagctatatacacctctctcttttagttagctttctgttttgctttaccatactac

SEQ ID NO: 42006 - DNA, 660 bp, Cannabis sativa
taaaagaagatttggtggtgttctaaaatttaaagtagagttatagatcacatcgatatataagacttgaactagtatatattattgtgttattgctttaattgtttctcgttttaatactatgttcatctctctgttttaatttctgattgttgtgtgtgaattattaattttatcatttttaagtatttgttgattaaacgttttttagttgtaatttcctaaatatataatatatagttaaataattattatccaaaatcaaatccaaatatttccaatcttttagaaatcttacacaactcattgcatataaatgtcaacaacaaatatgttcaaaaaaaaaaaaaaaaatgtcaacaacaaatattatttcacatatctagctaacttttgtgaaattattttattattgttttacaccaatgtataacacaattaattcatacaatatatttaaccaatcatatataatacaaatcatctccaagcttctctaaaataattaattttaagcatattctccatactttgacctaatatttttagtttgtttatatttcattcaaaactaccattcactttaatgcaatgaaagtcaaacctgtaattggtatggcccataaatggtaagtaaagctgttagacaacatatatacc

SEQ ID NO: 42007 - DNA, 1247 bp, Cannabis sativa
atatccaaacacatcttgcattttcaaaatatagtgtaattactaaactgtgtaattaccactctaataattatcctacctagtaattacacagttactttcaaacgcacctatagttatttagtaaaattttatcaaaattccataattggttcgaaatagttaacaaatatatattcttgattggataatattacttacaagaactggttttattgaatatatattgcaattagcccacaaaacattaacttaccttttacagttgttatgaacataactgataagtagtctataattttacagtagatttctaaaagtttaaattgtttccgtaaatgaactgagagccattagtgtaggtagtgtctccgtcatcatagtaaaactctcatattatctaacacctcctattaataatgtctaccttcatagtagtattggtcttagattgacgctaatagtattaataatgttggttatgcactaatagtagcgtcggtagtacaaccgttggtaacaaaattggttatttactacatctgtttttttttagtaactttcacttttaagtagaatctttaaaacaatattatataattttatatagtgaagagaaatattgagcattttgttgagttggatatatcttttgtggaatttattcttcataatatattttttcttttacatgaaattttagatatataaagatttgaaagattatacattgtaaaactttatttgttattctttgtgtaacattcgtctttgtacgtacaaatttaaagaatcaatcttagtgtccaatactggtttacacaatctgaaatttattactttttcaaataaaagatttatttaataataataataataataatttaatataattttagtaattgagtaaatactttatttgatgggattaatcaatttaatctaaaaaaaaattgtccccccttatttatatatatataatttgtaaaatttatattacacttttccgttacataacgaaccttcaactcttaaaatactatttacatcaattacaaagtttctaaatctaaaaacggatttatttataggcaataacatttataaattaagtatttcctgttaatgccaatagtgtgatttactctttaattaaattggcattcttagaagacatttgtatgaaatgttcaaaataatttaattataagaaatattataaagaagaatagatcggaagagcggtt

SEQ ID NO: 42008 - DNA, 1280 bp, Cannabis sativa
ggtttttagaaaaatactgaatttcagacaaaaatttataattttactgtcacacgaatttttttacaaaaatactatatttttataaaacaagcataaaccaacaaaacagaaaaattaaaacaatagcggaacaaccagacaactgtgaaaatttaattcagtacacagtataaaacttacacagtattttaaaaaaaaaattctgccccacaataaaaaaaaataaagaagttggaattttcagtatgttgtgtaaaaatcctaaaaaagattttaaaaaatattattgaaattaatacaaattaatgtaagaaaaatgaaaattgaaaagttaaaaataatagtgttatatgatttctttaaataattatatatattctataggtgagagtatcatcgttaataatttctcctaaaataaaaaaaaaaattagatacatttttcttttagggattgtaatgtagtaatgtgagtatataataagttataatcatgctttaaactttgtctaccatacatatggaaggtgcccagattgtaagggcgtcctatagatgactagagaccgtcttacatgaaaagacatatttaccctagcccttaggcccatttctctgttttgtgtagggaaagataaatttgactttgccacaggggtgaccatccgtatatctgcctacaaatatgtgccttcaatttctggacaatatcttttagggcaaaaattaaaaaaaataaataaataaataaattggtgggtctaattttattttcaattgtttctatcgctcccttctttatttatttatttttttctgaagaaattttaaagagaaaaaaaattggtgtgtctggtctacatagtaaacaaaggggattgaattatgcgttttgtaggaattaggggaatttttttttccttattctcttctcatcatgacggcaatgagtgtataattggggacaaaataacggaaccctagaatgttgaaattagtgcataatcatgggctttatactatgatgtggtagaaaaatatgtaaacaaaataatcttttttcaaaagaaaaaaaaaattaaaattagggtttgtgaaaaagggtataaataaagctgaaataaaggttttctgttcaaagagcgtgtggtgggttagaaaggttatagtgtgggtttgctgagggacaaatgcacacgttaattaaagttgatttcccttcaaccaaaaaattaaaaattaaaaagaaaagtagatttacatatttttttatctct

SEQ ID NO: 42009 - DNA, 1478 bp, Cannabis sativa
  modified_base (1071)..(1080): a, c, t, g, unknown or other
aaaaatcctaattagcctatatgtaatagctataatacacaattatatatgaataaaaatagtggccatgctgtataattttatcttatacatatatcactcaccaataataacttcataacttattcacacaattaattatctacactacactacacacctagtcaaaaaagtagttggtgtaatcttattaattaggcctaatatagagtcaaaaaaatcccttatatatctccacaaataaagaatacaataatcaataaagtatattggattccctcccaaaatagcaaccttttcttctctctcaaaaattattattttaaaaaaatatttttctctttttaaaaaatgtaactaattttcacaactttaaaagtttaaactcccctttcttttttaaaattgatattttgggatttttttgaaactaaggaaacattacaagtaacaagatggtactaaatccttccaaaaaaaattatataaagacaaactagacaatttggttctctaaatatgagagggtctttactaaattgtaaagactcaatgtaaccaaaaaataaataaaagagaaaacttcttaatgtagccaaaaaataaatatttatatttataaattatgaaatttataaaaataggtaaagtgagggggccacacacccaaatataaactcatattttttcttcacttctaaaacggcaaagaactcaaaataggtgactacctttttttctctaattttggtagtgaatttaccatttgtggcaataatgatgaccttaacatatttgcacagcaaattagataatgacaataataataataaatctattaatttttttagaaaattccacacttaaaaaagtacatcaatatactttatttgtttcaatattttgaaaaaaaaaaaaattagttccttttttttagaaactcaaaaaaaaaattaatatattgaaaatatggttttaaataatttgttacaaatatgatttttttttttattattttatatgtgtgaaatagattatttgaacactgctctctatattgtaaattatttnnnnnnnnnnaaaattttacaaaatatcttaaatgattacaacataaaaaaatggctaaaatgttcgtctaaatgccgaaacaaatgggatgcatcgtatatctttttaaaagagtgcattatagagtagaattgctaaaagatactactggtgcctaacaccctcttcggtgtcataccgctattggtgtaattaagtatcaggtttcatataatttttagaaaatatcaccaatcatggagcgccacctataaaagaagagttgctaaaagataacactggtgcctagcactctctttagtgtcatactattattgatgtaattaagtagcatattttatataacttaagaaaataactttcagagaatatcactaactaagcataaagtgtcaccttataaaagg

SEQ ID NO: 42010 - DNA, 605 bp, Cannabis sativa
tgagtttgcttataatcttccatgcattctgccactaaattttaaccatttgaaattgtttatggttttaaccctttgacttctttggatttatcacctttaactgtttctgagcatttgaatttagatggccaaaagaaagtagaatttgtgtagcaaatccatgagagggctcaactcaacatagagagaatgatcgagcaatacataaagcaagataacaagggtcatcacatgaaggtttttgagcccggtgaatgggtatggttacacatgacgaaagaagggttcccagcctaaaaaagttccaaattgcttcctcaaggatatggaccatttcaagtgcttgaaaggattaatgacaatgcctaccaactcgatttacctggtgtgtataaggttagtgctacttttaatgtttctaatttgagcccttttgatgcagatgataatttgaggacaaatcattttcaagaaggggggaatgatgaggacactaaggctaaagatacatgtcaagttttagttggtctggtgacaagggcacgaaccaaaagattcaaagaggaactttacatcctagtccatagaattctaaaacatga

SEQ ID NO: 42011 - DNA, 2397 bp, Cannabis sativa
ttcatcaactgacggttgaatgaaaaatcccacccacggattggatggaagcttatgatttaccaatcaacagcctaccattcgctctctaaatgctcttctactctacttaaatagtccattgtgtgattgtgctgtgtgtaactaaggtatggcggacgcatctctaactgcgttgtttgaggactcggtgcaagtttcaacaaatgatcttacgtgtgatcttcatccttgtgaagttgatcaaaatgaagaaccaagtcgcatattactaggcaaactctactgttactccagattggggagaaaagccatccatggctccctcagaattgcatggagtaccctaactggatggagttggaaggagagggaggatggactactacagttcactttccaaactaggatggatgcggagaatgtgttacttagaaggccatggcttgtttgtggctatctactcgtcctgatgccgtggccatcatggctcacaccaatggaggtggtatttgatcaaactccgatttgggtccgactaaaaagtataccacctttttattggaataagaccaacttacaggagctggctagtaaggtcccaacagtttatgagctacttggacatattgagaaaaattttaagagaggttcgtttggcatggggacgctgcgatttcgggcaacggcagatgtaaataaactgctgttctcagggttctatttgaggaggaagggaattaaggatctgtggatccaataccagtacgaaagactaccgaaactatgctttaaatgtgaagttctagctgacgaccatcggtattgcttcaaaaccccaactatcatcaaagatgcgaatggtgctttttttcctatgtacggaacttgaatggatgaggatgtaaaggaaagatcccctttccaactcccactaccaaaatggttcaacgattggatttctcaacaaaaagagttaaaggacccggcggttcaaaaacaaatggtgcttcagagaagaatgcaatgggctgaggcctctgaatggagggaactcaggcgacaactaccaggaaaaagaaggcaagttgaagtgatagtggaggatagaccggtgaccggtgaagtagtcatgaatcgttttccggcagtcgaacttctgggcataggcgagattaccccttttgagaatacggcggagggagtttttgaaaaagtgataccaaaaagacccctgcatgagattgtgaccgttcctggtgccccaaccaatcccggtcctacgattagcagtacgaagtctgggcagccaggttctgctacaaaggcgtgctctcatgctgaagaaccagacaagacaaatgcaactctcaatgctttggagaatggcgggaaaggaaacttacctacaaaaggaatgaaatcacctgggaagccctctgactctgatattgcttcctcttctaatggtagcaaagtagccgttagagatgaagggacttttacatggatgagtaatttccaagtagggcaatcttttaaccctcttcttgggccgtaggcccaaccattagattggccttcaagagcttgttgggcttcagcctttgggccactaactgggtcaaaaacagttgataaatatcatagagaacccattatttttaacccaattctatgcattgatgattttaactgttatgaatcggaacatgggcctaggaaaagaaaggctatggatggattttatatgatacatggagttataccaagcccagaaactattcccacacatgaggataatcaaaacactttggcaaacactgaacttcaaccggacacagaggagactacggcatctgtattctccccagactccagtgacgataagccagccaaacggaaaagaggcaggccccgtaaatgtgaagacccagactccactccggtagcaactgacaaaaaacgtgaaagaccgccaagggccaaagcgtggacgggcgtaacctccaagagcctgaagaaaagaggagcgaattcttcctctagaggtaaaactagtcactaccgtaatttatggaatgctaagtgctttgatcttgatatagacctagacaaccattttgtggtgattgaaaagaaaaaaatagagcactcaagctgcgtaataaaagaattggaagagagtgacaaactgtacccacctacggaaaagtgctctggaatcattgaatcaaatgctgaaggataggattttcagttcggggctacggagacttgcccagaaaagtctccaatgtccccatgaagcttctagcttggaactgtcgcgggctcaggaatgccgcggcagttcgacaactgacggcagttgttcgccggtcaaatcccgatatg

SEQ ID NO: 42012 - DNA, 949 bp, Cannabis sativa
ctctaacggcccctggtgcatccgtggatatacactagctttgcaagattggtctccgagagtggatggtccgatttatttaactctcttcgagtttgggtccaagttcataatcttcctcatgaattttactcaaaagacaatgggcttcttcttggggggctggttgggaaggtgctaaatctagaaatggtggaggataagccagcttcctggtcgactttctttaagattttggttgatctcgacattaacaaaccgctggtctctggatgttttttcgacctgaatagtggtgtcaaacagtggttacaaatgaagtatgaaaagattggcattttctgctataactgtggtcggctaggccatcaacgccgaggatgctctttgtcgtcgccggtgacggtgtcgaaaggtgatggaattccgtttccaatgttcggaccgtggctctcaacgtcctcggcctaccatgatgttttctctgggccggtctacggtggatcgagctctgcctctttggtgatatcgggcaaaaatggcggtgcgttcagaccggcaatggcttctccggccatggttgatggccggtccaaggggaaccctgctttggttcgacgtccgagaaacaccttgagaatgacctctcgtgcagcagccgtacctgggaaggctcctcgactggtgtggcatcctaagccttcggatgtgaaccgtgataatatcttacctgtttttggtaatggaggtaagtctgatactctgggaaatgagaaagatggtttggcattaactagtttgggagaacgtgggaagtgggaaatttaaacataatataaatgttaatttgaataaaagggccgttggtttgtcttctatggatgttgggcctctccctattgggccgaatgaggttttaaatgacaaagaaatggatagtgtggagggt

SEQ ID NO: 42013 - DNA, 4644 bp, Cannabis sativa
ttagaaaaaatagtatttaagataatttccttaaaataattatagtatttttaaattctatttttatcacatgtaagcgaaatcaaaaaattaaataaataaaaaaactccaaattatatgaaatgttaatattaaaaatataaaatattttcaagttaaaaaaaataaaaaatttaaatattatttatttatttttttaaaaaaattaatatataataaataagtaaatatatttttagtccaaataaatttattagccttcattcaaaaaattagattgtatttgtatcaactttaatttttagctattttcgtaagtttttagaaaaaaacttacaaaacattttttcaaaaaaaactttccatttcctaaaaactgtgccaaagacctttagtacattacaaaagcctatataactcacttaagctagttggcaataatttaatgaccttgaacaactctaaattatagatgtataatctcaaattttataattagaatggaaatattttacaagaaaaataattaacagcagaaccatataagtactgtatcatagttctgtctggggtgtaggaaaattctaataataataataataataaaaaaaagttgatttaattagacaagaggcttctaaaataaagacatagccattcaagttagtttctgtacttttcttttgtttgttacatctaactccgtaggaaactatacaaaaggagaataaaaaattgcaaggacaaataccattttccaaaaggaagagtcaaattgttccatccttgttggagcctgtttgttatgtacaagtctggtcatttttcaggccaaatggaataccctattccactcttctatgccaaaactgaaaaaactagcctaaatgtaaatcaaatgacgatcttattagtcaaagtgtaacatcagcagtcatattcttacccagacagccattactgccaacattagtagttactgcctcatccttacaaggggccccagttttcccggttgaaatggagcttttgcatctgtaacatacaaatcttagagggaccaactccgagtcaagaatgccagaacatcgagtgtgttgccacacactacaaacatcacatgccagcattctctccccatcatcatcttttgccccacagctgcactctacagtccacctctccacccccctctccatcctatacctacttaagccatgtttcacatgacatctccctctcaagcgaacaaatccggttgaacccaataagtacttaatctgggtggaatcatcaacaccaccatagtcaggtaactcattggcatgaaatcctttaaacataatatatacatcttggaaagcttttgacgcttcaaacttgacatccgacacagtagcattttgggagaggattacaagttcaggaggcggttttgtaatcatttcatcaatctcatccacaagttcaactaagcatacaatacgtgtcaacccattattgatatttgtagatatcatttcaggctcatagttcttcacaaactgcttgcagtcaaggagcttttcagctgaactaactgcaagatcccttgttacctgaggtacatagcttatcatagttcgagggtggagcatgcattcatacaagtaccttaagtcacgcaggagactttcttcagatgatctgtttgaaatggaagactctgtgaaagtattgtttccttgggaagaaacaccttgagcctccaatctgataagatagaaatcacagcttattacattcctgagcttttagaaatccattgcccagccaaattaaaatagaatatagaggaaatagagacattataatataaataacatcacaacatatttcttgtaggacatgaaacaacccaaaacataacaatactatgataaagcttgatgtattaaaagcttatcagagcttaccggaactcaaaatttccagtatcaggattcggtcgtgcattaacaaccattccattagatgtcattttcccgccaagttccttgaggcagtaatcaagcagttctggaggagccaccttacatacagcacccttaagggatcgtatactgacccaattggccccagaaactgcacgcagcactctaagcatggcagcttcaactcgctcaatatcacttctggtccatgaatacaaggttcttgaggtgccagcttggggcttcttgagggcagtatcatcagcccttgaggtactcttgtgagcatcatgtatcagtttcagtacaaaacaaaagaggtctctaacattcacaagctcatgttccgaacaagactggtagtatgagataaggtctgggagatgagagtcaagtttctgtccctgagagagaaaaatggacaggggtagggaagataggctttcaacagacgttttatatgcatccagggagagggcaaagctaccagcaccaaattcataaccccagtcaccataccaaggacggcctttggttatggaatgcagcagccgatactccaacccgtacttcttggacacatccatcacactaactttcctattggcaggtaaaaaagaaaatcaagtcaagagtaatcaaaacattatataaataaagccgaaagcatcagttattgcatactatatacatataacatatataattatattgggtcaaggagtagaaatagatacatgacacgttaatgaataaataacacaatgtgaaatatatccaccaatgaaatgcctacagagtagaaatatatagatgaatgagtgatcatggagacatgaaacgatcaattaagaaattctcatatacacacaattgtcaaaaccttgatttaaaaactaagcatgtttcacaataagaagctattactaaccaatagagctaacctggctccaagggtcttacaaagccgatcccagaagttcatgatgtggcatcctgagagaatccttgatcctccttccctcccattgaccctaagaaggtgtccataaccattggaatgaattacaccatgcaaaagatgagtagtattctctaactggctgtacacccagtcttccacatcatctgtacttgtttcaaggttgcatgacttacacctgagaaacagtgatacataagcacataatctaatgcaatggtgataactctacaactgatttagcacaagcccataacaaaaacataactaaaaatataattttttttgaaaggtaaaaaagaacaaaaaagggtcaacaaatagaacacaacccaaacatatagtacactaatatatgtattcatacacacataatatcatggctcaaaacataactgaaaataaaataaaagcatataaattttaaaaagcaaagcagtaaataaaggagaataagaaagagtagaaatggaacatatcccttgaatacacaaatgcatacatgcatccataaacacatgcatctgtttgtgtctgtttgagcacaagcttacagagcacataccattaattttctataagagagcaaaatggaagatataataaatggatagcaatgcagagatctgaatcaaaacatagcatcagagtaatataaaaggggtgaatgtatgtagtaaagaatataaggtccatcaaagtaatataaaaggggtgaatgcatatgtagtaaagaaaataaggtccatcacagtaatataaaaaggtgaatgcatatggagtaaagaaaataaggtccatcacagtaatttaaaaggggtcaatgcatatggagtaaagaaaataaggtcctcacttggattctgacaaatgcaggacatctccacagaacatacagggtttgtgatagccaccaatggaattaccatcggccttgataataaaatggtaccgtttcgtacagactggatggccactccatcctaaatgtttcaaaagaaatatagcttatcagaattcttgagattcctcaatgttatcctagccacaaataacttaaaacgattgccagaaattgtaatcgttttgttccgtgtcatgacctaatttcactgtattcaaaaattacctaacttcacaactatcaatcttcacttgtacttttatttaaaaaaaaaatatacatatacctcgactccaacaatcttttctgtataggaaaatgtattttatttttctttatcttaggacaaggaaaagccaaaatgaacaaatatattttaatcacaatgagaacctgaatagttctaataggcaataaaattataatttagaccaatcaagtacaagtggactcacttgcaaagaaaaacataagagttctcttgagataaaagtgcaaataagagaattaatgaagattataactatatgagtgaaaaaagaaagtggcataataataataataataaaaagaagataaaggttaaaaatataatatttatagtttcttcaacaattttgtataatagcgctatttcagccattaatcctaaacaataaggtaaagatgtggtcaatatttaaatctgtataaagagtgggaaagattgagagaattttcaaaaagtatgaaaaagaagctgactccatctaatacgacaaacaacatagaaaaaaggtatcaa

SEQ ID NO: 42014 - DNA, 3335 bp, Cannabis sativa
  modified_base (1532)..(1542): a, c, t, g, unknown or other
  modified_base (1812)..(1821): a, c, t, g, unknown or other
actctatatattgatatattgatattgattgatattgatattgatgattatataataccttgtatttaattatactaatagtagcataaggagttaagtactactgatactttaagtatttctctataaaaaatactaaagaatattaatgtctaatacttttatgagatattattttattacgaatataatttaggataatgcttctattaaaaacaactttatgtagagttatttttttttaatatgcatcatcattttatttttatgtccattaaatattatttccttatttaatttttttacatatataattatttgttaaaaatattatcattttctttaaaaaaaaaatatcattcacttctctcttattctcttttaaaaaaaaaaattcttaaaagttacttatcaaagaacctaaactataatcaaaactaagaagtttgatattctttcttttaaaagaaaaatagagattaagactcagaaattctcgaatgacgaagtcaaaaaactatgcaattttttttttttgtacatatctcttctcttagatcatatgcaccaaaaaatattttttttggtagatatgagtatttttgacaaataattataaaaaaagtaaataaggaaataaaattaaatatggacataaaatgaaacaatgacacatattaaaaaaataactttatataaagtcattttcaatacctttattgaagcattatcctataatttaatatcaaattttatttattccattttaatattaatgatagaaaacagttaccatttatagtacaatacctcatgtagtgctaatggtaaatggtaatgctcaatgcgccttataccattattaatgataatgtaaataaaattaagttattaaggtgacgttttgataacaatttttttattagtttttttgtttttaaaattggaaaagtgaaagtatttttcaaaaatatgttttataaaactgtttttacttttttaatttttttattgagaatcaaaattttaaaaacaaaaaaaaaaaatcatttttaatatttttttaaacattttttttcttaatcaatattttgaattccgaccagactcggacccaaatctccccccacgtcccttgcgctgaacccggcctttgactcgaacctgaattcaaccctgaacttagacccaacttaaataaacttaaaaaataaaaataaaaatgaactttacagaacacattttttctttctgtttttaaaattaaaaaacaaaagtggttacaaaacgtatttttgtttttgaaatacaaaaattttaaaaagaaaaattttactttcaatttgtgattaaaaaattagaaaacaaaagtattaccaaacgacatctaaatatttaaaattgaaatctataaaatttgttagtaaatttttctaacaatatgttatgttataaagtggcattttgttcagtttaatcaaatacccaataaaaatgacgactaacgagttgtaataataataataataatnnnnnnnnnnntaataataataatagtaatagtaacagtaatagttatagtaatttgttgatgttaggattatttttgaaatagtaataaaaatgagtagtgtatcaattaaaatatttttatttaaacttttccgtaatagaagagtatgcaataaaggtattagggtagttttaatgttgagaaatgctaaaagtcactcttggtgccagcacctcttacgtgtcaatattgttattggtctaatttagtatccgatcccatataatttaatataatannnnnnnnnnagtatcgctagccaatcgcaaggcgacacatcttaaaggtgctagacatcattggtacccaataacaatgcgacacgtttaatatatattattcagaaaagagtaatcgaaaaagcaatacattgaaatgtttaatgtatctacactgattattcagaaaagagtaattttattttcatataattagtgtaactgtaagtgtttagataagtgtaggattatctcttatgttcgtttaaaataaagattttttttttttttttttttaaagaataatcaagcaaatatattttttaagaccattttaaataattacactaatttagtataaaatttatattaatttagtgtaattttttttctgatacaataattttaataatttattttaaatattctactaaataaatatattttatttaaaaaatcttgtacaataattatacttatcagtgtttttgctattgttatttagtattttaaaataattattttatattttaaatatatgtaatatatttaaggctaattagtaatttttttcccgaattttaacatatattaaattatgacctctcaacttttttggccgttaaaaattctccttgaattgagattgttagatttaagtacttttgtctaatttcattcaattttaatgtttgtttatatactaaatcatgctccctagattttaatatgtaccaaattatgtccctaaaactttaatatgtactaaattgtgcctcctgaatttttattcatgttagaatttttttactaaaattatacaaaaatcgttaaatttaacaatccaggaaaaaattttaccagccaaaaaaaagttaagaaacatgattgagtacatatatatataaaaacaaatatgagtagtttaaaaaaacaagactaattacataccagaaagaaataagtaaaacaaagtgaaagaaaaagacaagacaactattgtcgtctctaatcgtcccagttggcacttgagtggactaatacacatcgtaagtctcatgagtttagatgagacttttttttttttttttatctaaatacattttgttttcgtttttaatttttttcaatatttcttgttgagagaaatatatatatttttttcaatattgaagatacgtctgagaattggttctctcaaattgaagcatcacctttttgttatccataatatatatatattttttttgctgaaatataaaatatgcttcttgctataaagaaaaataaaatatgctatttttatttaaaaaaaaaaatcaataaaatatgcttctttgtactcgtttgcccctaattttaatattaaactaaaactgatgtttatccatatgtatatcatataaataaataaataaatgatagaactacactttaaagtagcgtatggttgggagaacgaaaacaaaaaaataaaaataagaatagaaataaaaataagaatataatgaaataaaatttaaaattgataaaaaaaattatta

SEQ ID NO: 42015 - DNA, 1461 bp, Cannabis sativa
ataaataaaaatttggatggggaattttggactttcaggacagtcatcaatggatgatcaacaacaatactacacaaaatcatcatcaaactatggtggtagacccttcaaacaatcccagagagacaatcatcttcgaaagtcatccttcacgggtctagataacgaagaagattattatgatcaagatgaatcatcgtcatcagctgcaatctctgagctcttccatggttttcttgctattggtacacttggatcagaccaaatgatgactgatcctgcaacaccaacatttgccatatcagtggacaatataactgagaaagaaactgaggttactgagaatgagttgaagctcatcaatgatgagttggagaaagttttgggagctgaagcaccagatgatggcttcaataatgattcttctggtagaaacagccatgttagtaatggaagaagcagccatggcagcatcattacactgagtggaaagactgaagatgggaatgggactactgtctgcccactgcagggttacctttttggctctgcaattgagttgtctgaaacaaccacaacagcagctgctaagaaagaacacagaacatctcttggtgaactgttccaaaagagtaagattatagaggagaataatagtggtggtggtggtgctggtggcaaaagtgagagggaggagaagagatctgagaaagaagcagataaatctgccatgaacctcatgaaaaagaagctcaagaagaaaatgcttcatgcctcttctcgaaactctggggcaggtcctggtggtggtggtggtggtggtggttgtaatggtggaaccggggactcttccgctccaactgaaacaaaactgcacaaggtatggctaatatacataacaaagttaaaaaagaaaacttgcatatttatacataagtaataagctaaaaatgggacataaaatttttggattataacttacctagatactacaaacaaaagcttgtgcacatcccttgccagtaataccaattgagaatttccccaagttatttgcattaatctttcatgtatgtttggttgtagattcttcatatgtttcacaggaaagttcaccctgaaacctcagcggctacttataataagactaataaggttccaaagaatgagcatagaaagaaaactagccatgttggtactggcaactgtggaggtcagattctcccagatgaagatatcaccttatgtccacagagagctctctttctaaagcaaaaaatacggcgctacagaagccaatccaatccaccccaatttacatacagcagcatggattctatggcaaatagggagcagtggatcaaaacagatgcagactgtaagatacccttatcttagcttcctctcttctttaaatctctttatttattttcagaacatcacacacacacatatatatat

SEQ ID NO: 42016 - DNA, 627 bp, Cannabis sativa
tagccccagtagccgagctgtccatggcagcagtagccccagcacccgagctttcaacgacagcagaagccccagcacccgagctttcaacgacagcagaagcatcagaagctgagttttccgcaacagaagaagcatcagaagccaagctttccgcgacagaagaagtatcagtaaccgagctgtccagtgcagcagaaaccatatcaatccagctttccacgagaacagatgcactggcagccgggctgcccacaacagcagaagtaccagcagccaagctgtccatggcagcagaaggccccgcagaggagctgcccacttctgcagcaaaaggccccacagaggagttgcccacttcggcagcagcagcagctggtgtaggcacacgtttctttgcctcaattccatagaagtagcgatgcttaagtgcctcagaagccataattctttcttttggattcagacacagcagtttctgcataccaaaaattaaagaatgataaaaatacataaaacttcagattttaataagcatatacttcataacaaataatagcagaactcacagaaagaagatcaattccagctggttcaacaccaatgaatgtttcagatagatcctgc

SEQ ID NO: 42017 - DNA, 2975 bp, Cannabis sativa
cactattataagttaagtttctttctccgtatttgaggactaatgattggccatatctacaaaaagaaattgaattttctcacaatgagcaaataccaaaatgcttctggctactcaaacttcaatcaagtacctattagaccactacttttgaggttttgatagtacatcaagagtattaccagcaccaaagcttgaacattaactcattgttttataatgataaagatcaagaaatcgacatggaaaagatacaattatcatatcaaggtagagacgttattgaaccttaaatagaaagtaattcacatgcatttatcttttattgtgacagccacaaaaatggacctaccaactctcaatcgcttgctgaactaattctacgttcccacattggttgtatactctagctcttccaaaatcgtcttctatgtcaaatacatccggagcaacattagcacagtttttacaacctgcaaagcacaacatagagattaattccatttacagagatcttaactctgacttgtgcagattccacctacaaactagtactctgcttcattttcattcatgacatacaataatcataatcatcatacaacaaaacccatttgagaaccaaaaagtcataatattttcacatctatgaaatctacaaactactacactaactgccctgatgttagtctttgaaatccactggactaatttaacagatttaagccacttctagtattttgagcatattagaagcataacttatatcacaattttaccaaaaaaaaaaagttctgaagcaatggaaacagataaaatgataccttaactaatcaacaaagtgataaaattctaacctatgcagctaaactcgtcaacaaaggcatgatcttttgtgcttgaatcatcaaaaaatgggttgatcgcagtcaatgcatagccatgaatttcatcatatatcatgcgttgaacggggtcactgagcacctgcactgaaaaaattccaattctagtgaaagcacaataatgaatttgaaacaacagacttgcttgaagcttaaatcctttcgcttaaaatggaaacccaccgcatagacttcgttaataaacatgcaaaaattattggtctcttgatcattgccactcaaatccggatgacaagctttcatgcagttataataagccttttttatctgtgctggtgtggcatctgggagctaaaaacatgaaacaaccaatcattagacatataaaattaaatattcaatcaaattaaataaaagaagaagaaaaaaaaaatcaatgggaaactgagtgcaattactaaactttccatttcaaatgctaattattaaacactattatttttctgtgtagttgctaactaccttgccaaatacaacaataagaatgcatatgaaactaacacctcacattcaagttaactcactttataattaaaatagagcaatgacacacttttgtggcaaattatttcatcaaggagacctattttaaatgaagaaaattagttgaattttttttgcgattgtcgagactttgcatgtgcacatataattattctttaaccttaattactattgcacttctacctagtaattacacttcgatataagtaattagaagtaattgaagtgttctactttttgctaatcactaatagtcattacaatattttaaaatattctgttataaataataacttgtattttaaagacatactcttaaatttggatgcctttttcattaataaaaatcaccatgttaataaagaagagatgtcttaaatcctatattggtgttttatattagtgtttagtaatgatacttctctaaactactcgaattaaattctaaagattctttacgttcccacataatctcgagctcttactagttactatatatccatgttaatctaagacatgaaatactagacatacttaataaatttaccaaaggagttaacaatttacgcagctaaagaaacgttcaaacattcaaccaaaaaaaaaaaagaaactttagaaagccagatcaaatttaaatgatttaccaggcctaagacctcgtaataatcatcagctatagcgtccaccgaagcagattcatccgccgcgaccttcactcggccacagccttttctcctgccgccatgacctgtcatagtcagagcactgctgggccgagtcaacacccgacatggggctctggagcccgaattcaataatgggttttggaagctcagtgcttctgcgcatataggggaaagtaacgtagccattggagagcaccaatgattttattttttattttttatttattattttggattacttacttgtataaaacactgtgtaagagaggagctaaatataaaatatatatgtatatattattttctaaatgagccaaagaggagagtgagataattgaatttatttaaataaatttgcggcagaataaattgtggcgtgaaaggtggcgatgctgacatggcagattgagagccaaatgtttagtttgctggagaaaaaatctaatgtggaagaggcttgtcggcacgtgtcagctcgtggatatttgctccctcacgcttcaagctactgtttttgtccacaatacacatgcttgctttgcttctatagcttgggttgatgaaacaagcaaataattgcgtatgtatggagaaaatgagttggcaaaaaaaaaaaaaggaactatggagaaaatgatgaaacaaagctcagtgtgttttggtaagaattggaagtaacagggactagttcttcctatcgatatacacgggttagtttttttacatgacacaaaatcaatattagttcaagaggcacaaatctgatctagcacatgtaaattacacgtcatgatacaaaaaaatataaatataaacatgacttaatacgataagtttgaaggcacaatatttaagc

SEQ ID NO: 42018 - DNA, 1598 bp, Cannabis sativa
atatatatatctctacgtattgtaccattagatgatgaacaattgtacaatggcccagggaagccattaatagtgtaagcatccgaaacattgggtccccctccagtttgaagtgcttggttaatcacagcttctgggtctacattaaaccactctcctatacataacataattaaataataatataaatctatcactttctttcatttaaatatgatcaaataaatttagtttatgtagaggataatattatacctaatataatcggtacttccttgtaaggcttggcaaaggggtaagattcattgcgcttaggaagaataataatgggcccataaacagtggatctgagccaagagatgtgagcgtgccaaagaagagtacctctctggcccgtgatggtgaaattatacgaataactctgacccgtttgtattgggcattgggtcacgtatgccggtccatcagcccatccactcgtcagttgccgaattccgtgcctgttttccagaatttaattaaaaataaaataacaaccagaccgtggttgcggagattcgaacccacgcctccacggtggaattttcaccactaaactacagccactgctatatgtttagttgtctaatataaaatattatgtgggtgactatgaaagtaaattctacatcatatttctcaaaccttttataataatttacaaaatagtgagtttccaaaatatatatttatataatagtcaggctttcaaaaaaaaaaaaatatctttacaaaatagttcaggaaagtacaaactaaatgctcaattgagtggaacttgttactattcgtctttgcaaaactttaaaagaagatagtatctagcatcatcacatatagtatatattattatcgatgtaattaaatatattaaattttacatatttcaactactcatattcattttagatgggtctatcattttttgaaatgaaattaccataactctattttaaatttgtgtgtaatttatttgtatgaacatatcattatcagtataaaagttttactatacaaaaattatcatattaatattttatagcactttgtctttgtgagaatagatgtagtgatgtctattgtacacattgtatatataagtataaaatattttgagaaacccacattataaatataagtattttcctttattatatatatacttaccagtgtatggtaatattgttggaaacatgattgacgaccttgacaataactctatcaccttctcttgctattaatggagggcctggaaatttattgttcacacaaataatgctcttcgtatggcacaatcttgtcacggtttggttccttatctatcataatacacacataataataccattaacaaacatatattaccataataaggtttaaaatataccaaaagaaataattaataatgtttagtacgttgaacgtgtaatgccttgttctgcatgtgacaagctctggcatcatcataattgtatacaaaccaaagaacaaagctgtcattgaaggaagataatgaagaacattataagaagaagtacccatctctctctctctctctc

SEQ ID NO: 42019 - DNA, 665 bp, Cannabis sativa
ttcaaggaaaaaagcattctatttatctttctagttgtgccaatgacactgagctcacttgtcattgcaaagcacacaacatttcgaataccataatgtgaaacacagcaacttttttgcatttgttaggcctacgatttctcgtaagataaaacaatatctccatattcaagttatttgcgctttgagaaattacctcattaaaaactcttctacaacatccagtgacaaaaccatagggaagtgaaaataatggttgccgtgattaacttcccctcatatatatgaactgttactgtaactggtgttttcctacgaaaagctggagcttgccaaagatcaaaaagaaaaaggccttgtgtggtatctaaaatgattttaggaaagtggaatttactgatatcttattaagacttgaccatggtgagtcaggcaaagtgaattttgactttcttgagtaatggaaaatttatcagagcacctttggttcactctaatcaactggaatgggataaaagttaccattacaatttttagtttgtgtttttaccctttctaatgaccatctttatctattctgatcatcaatgaggattacaataattgaactacataaacttatataagaaatattattctattatatataaaatagaaaaaaaaaa

SEQ ID NO: 42020 - DNA, 789 bp, Cannabis sativa
ctaattgaattgagtacctatttattttctttcacgagagacaaggaaacaactacaaccgccgtctaacagaaaaaaaaaagttaattttctatactagctagtgttttgtatagctgactgtaactaaagctgaagagaataatatactattcttaggaacaaaactctctaactaaagctgaatttttagtatattgcaattcaattttggatcaatagttttgttatgtaaaaaaatatagattaatttttgactttttgttaaagtaaattttttataagatagctatattttagcaatagatcacatttttaagtgttattatgtgtatctctcttttttattgggtgtgcatgtgactcttagaaatctgaagaaaaagagagtgataaagaagaagaaaaagaagaaaaagttgtgtattataatgtaagtattctactttaactcggtgttatatatgtgtttctaaattttgttagaggctagtcagaggcagaggttgatttatacttgtaataattttcattgaaatatattataggattggaattgaaagtcatggaagaggaagaaaaagatgaatacttttatgatccttacgaagatgacttggacaaaagaacttgcaaaattgcctatggcgatggaaaggatgactacatgcaagtctagtaaatctaaaaaacttagaccaccacctgaatataatgacatattagattgatcattgaatagggtattaaattaggctttgctttttctcttgtttgtttatgttactg

SEQ ID NO: 42021 - DNA, 826 bp, Cannabis sativa
tatagagccttggtgctcatagttcactaatgaatatacaattgaatactttctctctctcgttttccacttctcaacaggttactactttagacaacagtgttatcaaaaattcaaacacttgcaactattcaaagttgccaaaaatttctccacctcaataagtacatacaaagtcacaaaattcaacttaataataaatataaatataaacaaactatcccattatgtaaaatcagtttattattgaatgaaagtttctgaagagtttctttccttagtcaaattctcaaattaaacatgggtacacataaacattttatttataatagagaaaatcatccatcactacaagagaaagtgatggaaaattctaatatcttttagtgcacattctcttgatgatgagttgaatctcgagcaatacgagcagacctcaaatcatgaaacaaagcattaaagtctaacatggatgatcctgcttctttgatagcactcctccccatttcagcaagactcttcactcttcttctcatttcctctgcttcttctccttccataattctactcactgcgtttctaatgcgttccctcttcacaaaatcacccaccattctcacccatttccttgctccaacctccactccaatattcagtacttgactcaccaatttctcattaaaaaactgttcggcggctacaggccacgtaaccattggcaccccagcgcagacgctttccagtattgaattccacccacaatgtgttacaaatcctccaactgcttcgtgttccagaatcggaacttgtggtgcccatcctctta

SEQ ID NO: 42022 - DNA, 3244 bp, Cannabis sativa
  modified_base (260)..(271): a, c, t, g, unknown or other
gtagtagtagttgaagacgtggaagtggcaagaacagctctccaatgggctcttcacaatctcgttcgctatggagacctcatcactcttctccatgtctttccctctcttagatccaggagcaagaccaagagtcgtcttctccgattgaatggcttccagttagctctctctttccaggacatctgcaaccattttccctatgtaagtactcacgttatatatatacgtatatacctctctctttctctctctctctnnnnnnnnnnnnctctctctctctctctctccgtctatggtctatatcatcaattatgtatatgatggataagtcatgatatgaatactcgtagggttgtgttgcagaccaaggttgagattattgtgacagagggagaccaagaggggaggaaaatttccgccatggttagggagattggagcttctgctattgttcttggtctccatgatcatagttttctctacaagtaagttgtttttatttttaatgctctgttcccctaaaatgcttcttcccttttctttttgctcagaaaaaaaaagggaagaagataatctacagaattttaattgctcctgattgcggtcacgattggaaacttaggaatgaatttactatgtatatagtttgggtgttttgattgatgaagaaatattaggaagcttcataaatacgtgggtggcttcattttctggatttaatgtcttcaaattaatgagtatgaatatgataattaagtttttcgaatattttgagaatcaacatcatggtggtgatgatgatcattgatcgtggattggttggtataggtatatggtgtgaaaattttggggctaaaattagataaggggtggggtgggacttttatttacgacggctctctacttgaaattaattaatggtcaactgttatcagatgggtttagtttagcgttaggtaatcccacgtattgaccgactctctctagtttatatttgattgtttaaaccttagacccaattagaactggttatggtaacaagcagcccacttaacttacttccctcctggtgggaccctaaaggtcctatctttgtctaataatatatatatatatatataaaaaaaatagatttgtgtctatgtgttgttgtgtactatatatatcgctaattgaataaatttctgcgtttgctgtatttgaaatcgtggaattagtaaaataatctaatgcccaacatttccataaaaatgaataatatcacacaaattggattagttttaaattatggctaattgacctatataacaaatggaaacggagagtctaagataaacaatactttcatttcttttttagaataaatacttgttccagtctaagtctaatgcactaagcacctttaagttttattctttacattttaagtgaaaggttaaaactggaacggtcagacaagttttcgaactagtgctgttgatgttcaacaatacattatacttctataatatacgtctggtgttgttgtacttgtaatcaaggaatttcttatgggacttattaatactgtgaatgcaatatatcatttatcgattggttatgcattactaatacttgaaaactttgatatagaaatttacgtggacttattttttttggggtttctattagcaaatattaaaacagtttcggttatgtgctattaaagatatgtttagtggcactttgtaccatcaagatggatgaaatcttcaattcccttttcagactactaacttttataactcagttcgaaatgatacaatcaatgaaggtctatctactttaaaagttttacataatttgtataagctcttttttaagttcgaccccaaataattaattactagttggtctgttcttgtacttttgtctttgtatgctaaggattcaaaaaaacagggaatgtgatgatcaagtgggaagacaataattggaaaattctatgaacaaaatcacgcgctataagttcaatcatggaccttgcatatgggccccaccttttttccgttcattttttagagttctttttgagatattttcttgtggccaattcaaaatatttaaagcaaaatatataaattggtattggttttatctggtttcttcttaatggaattaagtgatccacaaggttgtttgttatttgtccccttcacataaattattaagcattttttcttcgttataccaagttcaataaatatatgatatccactttttgttatatggttttactaaggaaagagagtgtgttatctaatttgtacctgtgaatatataggttggcattggcccacaacgatattacaaaaagctttagttgcagagttttggctatcaggcaaccaccatcctcagcatcagggagaaagacaagggcaagggccagtactactgcttcacttgctctagacaattcaattagcatggatttttcacaaatcgacatcagtggagtactacggtaatattttaatcagatagtttaattaatatattagtatatatcatatactttttctattttttttaacaaaataataatgttaacatatttttttttagtaaatacaacaagtaactgcgtcataatagacatttttttttttttgagaaaaggactattatattaatttgtagaaaaattacataatagtcataagtggaggtggaaattcttccaaccaagaacaatcagtatccactgtaaaagcaaacttagtcaaaacatgggcataagtattagcagatcgtctgacatgagagacctgtgctcgtggaaaataggatacaagatagttaacatcgtttaatacagcatgaaaagcagaattacaatgagaagcaacttttaatccctgattaccaacaatgaatcagtttcataatagacatttttgaagaaacataaatattttttctattttattgttttttaaaaaataataataattttttttgaaataattgatttgaagaaaatgataatagagaaagatatgtgaaatgtgtttaaaattaaattgtaatgttaaaaaaatatatatttaatgttatagactcacatttaatataaataaaagataagagccatatatatagtgaataaggttttacggaatgttaaatatttttataatttttttgattttatttacaaaaaatacgatctttttatgttatacttttgttaatttgt

SEQ ID NO: 42023 - DNA, 4003 bp, Cannabis sativa
cttcaataattgatacgtaaaagcttaactttgaacttcaataatcatcatcatcgtaaaaaaattatcattatcattattattgttcttattacctctcaaacttgagacttaggctcaagcttccaactgggattgtaagaggatgaagttcccaaatcgtctcaagtgaagggtggcctgttttgcatttcatgtaagtttgaaaggttgagattcccatcagccacactctaccactggtgtcccctattccggagaccaacctcttaagctccatgaatatttggtccatggcaaagtaggagtttcttctttgctgagaacaactggaccagaactcagaaacccatgtgagatcacctaagtacaagacaacccctcttcccatatagcttttaacaacacacctaagctccatcagcttctgctcaacctcctcttttgaaatatttcttaaagagaagagaggaaaactgatgaactgcaagtatctataattcccagaagtatttcctctctcaaatgtctccatcactccccttgctataccctctgctgtagccaaagactctcccacaataacagtgttttttctcttgttcaacatgacattcaacacattattcacatcctcttgcctaatttgatcaaaaggcttactaaccgaaacaggatactgactagaaggtaaggattgagacaagtgatgatgagaaccaataagaccattaagaggcttgacactctccttagactgaccattattactacctggactttgggaacaaacctctaaagaaacagcttgttctactctacttttcactagagtactagaaaaaccagcctccctcataactctactaacacttggatcatctaagatagaaatgataagctgttccaactctattttcaaagctaagataggctgctgctggttctcaacagaaccacggcgctggtgcgcttgagcgcgcttgaaggcagcaaccaaggcgttggaaaaggaaggattgacatagtgagggcctaacaatgggctaggactggatgcaggaaggcggttgagagccacattgaagcaaagctcaagtgctttgcactgaagggggtgagaatggcactgcaaacaggcctttctaagaagtcctgttgaggttgcaagcatggcacttgctacatggagaggagtcacttgggcatggcctcgcctttttgcaaggctaacagcttgtttcactaagctggtagcctcggcagtgagagcctgctgtactgtacaaattcctcctctcattttttttttatcaaacactttgtgaactagactgttttgttttttggcagggaataataaactaagtacttgtattgtgccaagggaagaagaagaagtactattactagtactacttaaatgtttgatatttttgggttaatggggttcatttggattctggaaagaaaaatatggatgttgggatatattgtaagtgaagtgacgatatggtatgtgtatatatatatggtttttatattagctcgaggaagagtgaagagagagtggtgtaaaaagatattatgggatgtgggttttgttcctttcttgttagtgagggaaattttggcttttgtgtatgtgaaagtggactgcatgtgatgcaaaactttgctcttctttctctctctctctctctctctcttgatataaagtgtttattgggtaatcaaaagttggtcttctcaacattgtgggaactaaataatatattttcaaagcactaagattgagctttaaacactatgaaggggaataatcacttttacttctttataaaaatcaagagtaatgtgttttggaagaataaactcaaaaacccagattgtggcaaagaaaaagaaaaaaaataaaataaaacggaaaagagaaagggaatgatataaagctaaggaatggtcgtccgccaattacgaggaactgaccaaaaaagagtgagaagactagtgttgtctctttgaagggattgagaactgttatggtgtttcctctttttttcctttctttatatatatatataatttttttaatttattttttctttttcttttcttttttcttttttcttttcctcttttttccttttctctttttctctcttctcgaagaagaggaataatggctttgatgattgattgtagatcagttgatgatcaaaccacaaaattgcatgaaatccatgtaaactaaaagtatactcctctattcttctcttccaaaaagtttggctttcaggctttccattgtttgaaatcattagtttttctttgccaatctcagaacacatattttcttccattcttcttcttcttcttcttcattttattgttaataaattctgaatttgcagcacttctgtattcaaatgtagcaattaataatatgtacttgttaagaaaatgctggtctaatgatgctcaaaacactttttgaggtagaaaaaggtaactatccacttggctaaatttttacaatatggtatgtagtagtagtcaaagaattactaaactaataagaatcaatgcatgtcaagactactgacaatttttgggtccaattgcctgatcatagttgtgtcatcttcttttgttctcatcttgttatgtttttccctttttctttaataaagttttttttactaaaaacaaaactgcaatggattaacattgttggatggatggccaatatttgtcaaatagaacgaataaaataaaactagtttagtatatacaaaaagatgatagatgagacaaaagtttatatggaagctatattgaattattgtacttcttgtcttaccaaaataataatgatattactgaataggaactgataatatatttcaaagctcaaatttttaaaatattacatttcatatggtcataccccttctaagttgatcattatgcatttttctgcagcattgaacatgtttctaagaaacgaagacctttaacatccataagatatttcctctttgctaagtatttataactacttgaaactgcattggcaatctagtgctcaaaaaaattctgcatttacttatttgcagatatccatatctatgatctttgaccgtctgtttgatttattctttccaacttcgtttgaagaattatctttggcagatgattcctcatcgttgttatcgtctgattctactggctgacgaccagcagcaattgcagattcagcagcagccacagcctctggtgtatgaagatcagcaacacccaacatcaagtcctataatttgagatgtgtcaagaaatttaactcaactcctaatttccttagcaataacagaagagaaagagaaaatgagtgataccatttcaatgatttgtgattcatttccactaagcacttcaatatcatagttttcaatgttttcctacaacaagtacaatagtaaataccaagtggtaatcataaaacataaaaataaaaacattgctttatatttgtattttagaaatctagcttcaatggtaagattatgatgccaacctttgcatcaacctgcaattttttattagcttctgatagcactcccagaaagtcttttacctttcccagaactgcacaaaaataaaacaaactaagcaacattgccagtccaagggcttgaatcataaatattatttaaaggatcaattattagctattttttttttggcagcttcacagttcaataaacttggtgattgtagagtaatagaacaccacacaaagctcttgattaccttaaggtggaagtacaactaacatatctcatagagcctaaaccaaacgagtatatcctacaaccaccagtattccatttacatttaattccttattatagacaattagacatgtcatctttcatgagaaatatgctttctttgcaaaacttcaaaaaggaagttctattcagaaaaacccaacacaaca

SEQ ID NO: 42024 - DNA, 726 bp, Cannabis sativa
tactatgctcaactcaggtacaatgttatgagtgcaatttaatatctaattatatgtgttttaatttaattggtaatattaattaaaatttgctattcacttataaaacatctcattgtgttgagccttataaccatactaatcataatattaacataattggtattgacaccttaattagcaattatcttatacatatactttgtaaaaatacatggtactaaatgcacaaatttgctagttaataataaggatattggtaccataaatgttttaagtaattatttttatgaattgcacttagatattaacttttaacattaacagcataaataattagttttaagtttttgttgaaaccattatttagttaagaataatggtgctgtaaaatacttaaacttataattattgcacttgagtacccaacttttagtttttaaaacataaaattaagtgaataactaaaggttgcaacaaaaataaaaattaaatatttttgtaccactcatgcaaaaatttaactatttatggcactaatattccttaataatatatcttccccttatataattttttatatatagaacaaatgtcatacatgtatgagcaacacaataattcaaattttgatgtaaatttaactatctattaaagagaacctttgttaaaatatgtaatcatatatcatttactaacttctctgatgaatgagtgttaattata

SEQ ID NO: 42025 - DNA, 861 bp, Cannabis sativa
gtttgaaaaaatagtcaaaaaccgtaccacccgcaccgcgaacacccctaggtagaatagtcattttcaagggttgaattcttttgtcttctagtgttttattaggctaaattttaaataatagtaagtgtatatgctggatataatgataagagataaaaggctgatattttagaaattaagaatgtttaagtttatgcttcctttctccttccttcgagcaacctagaagccagccaaatgtgaggagttcttcatcaatttccttaaatctctagtagattttactcccaagctcaacctagaagccttgaggtaagttctttcctatgttgtattaagatttttcaagttttaagctagtttttggttaggattttaggatttcaggactatgatgttaaattaagtttagataatgtttttaggcttgatttagggtttgttagagtttagtttgagtgagttaagtggctgtggtgatggaattggagaattgagttttagaactcaaattcatggttctaacatggtgatttgtgtaatttgatgagttgttgtgaattgatgctttgaatatattgtgtttatggtattaaactgttatggagcaattggataggtttgaagaggttttggatcggttttgggggaagaaaacctagaattccttacttgccagaaccggtcgaccggttggtctgtaggggagattctcgattttctttgaggttggtttttggctcggtgtgttatctagtacctagtttaggttatttaggtgttgtatagcctattttggagctaatggaagttagggtttgtccaattttagtattagggtttgtgtcagaaattggt

SEQ ID NO: 42026 - DNA, 6773 bp, Cannabis sativa
  modified_base (38)..(50): a, c, t, g, unknown or other
tataaataattttcaaaattaaacatgattaactgctnnnnnnnnnnnnnaactaagcggtctttacacaagcaatgcctttccaactttgatcttccattaatttaaagatacaacatctttaggtgggtttactttactaccacatacaatctcccacaagtcttggcctaggaggtatgactccatcatcgttgaccaagtgttgtaattctgattgttgagctttttaatactgccaattacttgagcatcacccatcgtggtttggcaaacaaattaccaaacaagtttttcccaacttgtaagcttcacaaattcaaattgtgcacgacaacaagaagctcttctaccactacgagctcgacgaacctaactctgataccacttgttaagtaaaaattacaacactttattattattgaagagtacttacaaacttagaacactttggacacaatgactctaggacactcttatacttttacacactttagactctctttctcacacttgaactctttagctcaaacttataaatttagcacacatcttacttctatttataggctacaagtgagatacctaaacttttctaacttttcaagttactaacaagtttctaccactatgtaaataactctaactatttacaactagtccaagtaaattctatgtttcttccaaagctttatagagtgctctaggttttttttgttagaaattccttagaagattataaaatacgttaaaattttctagaattgatgtcttttaacaatgttggcctaaaaaaagaataacataggaattagaagccaaaggatgatgaatcattcgtttggttggatttttttacaaaagacaacctagtgaaagcatgagaactacacacaaaattgcgtgcaaagtaacaactaccacgtttcacaagtaacacccaaaatccctttctacaaaccacataaaatttggataatctaattgaccattctcatttgatggacggctgagaatactgcaaagccaagcacactgccactggccgtccattttaatctctacaaataatactctttttttcttgatggggtttttcaaataattagtttagtggcaagaaaacaacaaaaactatttggtatgcattatttccctccacgtaaacaacacatggtccctaaataaaacacaaccatcctttttaatgagagaggctgcttaaccctctttcctcctcttattttctcacttaaaactaaaaaaaaattaaagaaaaaagaaaaagattaaatcatattgcagagttacaattcaagtcttggaatagatgctcagagcaaatgtttattgcacactgatttctagtccaagacaattgaaggcattcaataactatggctcttgggtgatccaataccgtactataactcgcaggccttatcagggtgcctcagtcaaggccctgaaagatgaaaccggtggcggtggaggaagaagcggttcccctggccagagttgggagcctggcttggaaattgaggtcccttttgagcaaagaccggtatgtacagtatctacacatatatgtttacatgataatgtttatcaggccataaatcatctttaaagattctcacctatcaataccttaaaaactagtatgcagactttttaacaaagtctaatgttggagggttgaaaaaaatgagtgaattgaaatgccatctgggctaagcatagcatagcataatttaagttgaagcaagtaagtgttcttgtttttgttattttacgagtagtatgtttgagtaataggtgaatgagtattcatctctgaaagatggagccttgtattcgtggggcgaactgggacctggagagtttttgcttcgccttggaggactgtggctggtgacttttactgttcttggtgttccaattgcagctgcaagctttaatccttctcgagtaagttcaaacgccattcttgtaaataagcatacagcacttgttggattagaacagtttacagaaagttgaaaaagactcacaccaactgctactctgctagaaaaacaatacacaatacacaattcagtttcttttcttttttctcttactattattattatcatttgagaatcttatatgcgtgagacttatttcatttgctaaagatatcttatgtctatgcttttttttttgtttcaacttgcaggaacctctaagatttgtgcttgctgctgggacaggaacccttttccttgtttcactgattattttgcgaatctatctggtatggttgtcttttttatttatttatttttttttttaaaaaaaaaagagaatagaccaagaatgttgactagttatattaacaaaaacacatcccattcagggggaagagcatgaaagacttgcactactagtcaatgcattatatgttgacatgcacacagtcctaaaggctgctagttcactctagtaaatattaatccaaggaaacaaactcatgacatgattcctttaagttggggtttcataattattctagattcttgtgtttcaattttaacttaataaagatctgcccttcagtttttcatccataatatgtagtttaagaaacagtcttcaaacaaagtgactaaatcaaatcatgaatatgaatattgcagggatggagttatgtaggtgatagactcttatcagcagtgataccttacgaggagagtggatggtatgatggacaaatgtgggtgaagccacctgaggttagcacccttttctagcttcctccttcccttttctcttgctagagtaatcacagatcataaacaagtttcggtttctttgattcttgtttctatggattatttgtagctaagaagaaattctaatagtgttggaggaaagatgagaatttaaatagaatgtagttctgaatacaatcaagcttaagaatatatggccaattgaataattttggagtaatgttttgttttctacttttctcgtaggttctggctcgtgacagattgttgggttcttacaaggtactaaaaatgagccagtattactgacatcttaagcaattgaaaaaacatggtaaatttgtattggcttagtttgtgtagaatatgaaattcattgtaaaattgtacctgtatggttataggtaaaaccagttgtgaagctactgaaacagatactagtgggaacaggggccttacttgtaagttcagttttactcttcgtcttcgcaactccagtggaggatttttttcggacgactttcatcacaaaagaaaactcctcaagtgttcaagcttcaaagctcaacacaaagttcaatttaaggtaatatagtaataagcaaacagaattaacaaacctgagtctagtatctactagcatatttcaatcttggactcttgttgtgtattttagttatgtacataaagataaactcactcattcaaacttgtttgatttcgtttttcttgtaaatgtaggaaagaagacttgcttaaattgccagtggatgtattgtccgatgatgatctcgcagcagccgctgctgagactgctgacggaagaccggtttactgcagagataggttttatcgtgcattagccggtggacaatattgcaaatgggaagatctagttaagtaaagtggttacaaaggaggcataaatcatataaataaatatagctaaatgtaatagatgccttctgtttgtatcaaatagaacatgtcattatgaatcattgcattattttttaaggaactacatatattctattggaatcacaagcatcaatccaaaaaaatatgaacaaaaagttacagtttagaccatatgaatggctaagttgaggagccaacaatacttgatttacagttgcctctacatatttttacttgtaaatatgaacatagtttattcaaagtggggccttttgtgagatgcgaacatcagaaacatgccaaaatttgagtttcaccagtcagtttgcaattcccgaagagcgttgccagaaaacatatttaggagtaacaacacaaaagcagcatgaggatcatgttcgcaagatattccacaaatgatcatgaatcctggtagcatggcaagtcatctttgtgacaagtttaccacactatggacatgtattccagtgaatcatacataacaaggaactcgtgaagcttttagcaacatttaggaagattggcttttgcataactgctggacctcttgattagcttgaagaataaaaacagagcaaatcttttgagacgaggcacttcatcaggtcaatgctgacttcgctaaacaaatttcttgcaccaactaagcattttatacaaatttcgtgaaacaacatctctgacagtatgtttccttatttttgcatcttcaagatctaaagttctatatgcaagagcaaggatatacatggcgggatgtagtctcctgtaaataacatcaatgatatggtaagtttgtgccaaagacaactatccataatacaaatactaataattaaattacacctaattcattagtaaccatctaagcattaaattcagacatggaaagaaatgttccccttaattcagagatggaaagaaaagttcccctgaattcaaaacatgcaaaagccagtacttttacaagattatggaatattatatgaaccataaaatatatgatattatatacaagacatgctttatgaaatgacaataattcaatgatgaaatgcaagggtaccaccgtgtccaacaaagcttatattattgataaagagaaaccttcaaacatagcccaactttttagagatgcctaatgtctacttacttttcaaatggttcgtttgagctgaaaccatcccaatacctttgtgaaggtatcgttcgccctttcttgtctttaccaaatgtttcaatataccaaccacctatgtcgtgcataccacaccgaggctcaaatagccaaaatctgtatacgtaagcaaattaaaaacatcactacatctaaaggattaggaagagttagcttcaggacttctatacattaggttgaactgcaccaattacaacaccttcacaaataattaattaaaactccatggcttacttgctcgacggtaacctggccctactgcatctacactcgcaaacagaaacttcattttccattccataccagtgcatgtgcttcacctgaacacatatgaggtaggatatatgtcaacaaggataaaagctagaaaagtgtaggaatcaaaggaggcaaattttactaaccagcattgttctatgtttcataatcacatgggttttagtaccaatgctattgtagacaaagcaggacccttcttctgggctagttcctaatccagttatggttcccagaggaattctagatccaacagcctcccctggaatgaattctttgccaatcttttcggggcattcatatgagttgagaaatacatgtatacaatcttgattttcttcattctgtatgccattgcaatagcctttaggagggacccttgttgcaagagcaaccacttttccatacacatgcatttccaaatcagcatatgcatgcaatttacgatcttccagagtcaatgttcgcaactgagggttatcaaagtcactcgtgccatcaaagttagcggaaatgttgacattctcctcagactgacaaatccccatatcccgagatgttgaagaattcagctttcggttactgctaaatgatagttctggatatttatttatcagacagaccatcccaaaaagatcacgccctgaaaccaaatgaagcacctctggagtatcaaacactgatctttcctcagcttcaaagcagtctggaagaaaatccatcgattctatttcggggccatagtaagctgcatgtatggctgaataaaaatctgcttcaagcacatcaaagtatccagtcccaacaaccactttcttctctgacaaaatatcttttattgcagatctgtaccaccttaaccattccactacttccatctccttataacttgaaatattggattcattcgcataaaaccttacacctttttcagattgtttgaccacaagcttcctctgtgagataagatacatatcataatgggctcgcttttcagaatccgaaagaatctgcaatccattattgatcatgctgtgaggtcagaacacctgtgtatcacagcatttatcaaagacgaacatcacgattacccaactataaaattcacatacgaaccatgatatcagcatatatataaaatccccaggaaataaatcatgcagagaagtgaatgcaagcccatggccaattgagtaccaaaaactaaactagaaacaaagctgataacttcataaaagattggaaaatggacaattcagacttatattgattgctaatttacagtaaaattcattctatcccaattaatagcaaaaaaaaatcaaaatatcctactcatatgtaaacgatgaagagattaatcatatgaatagaaacccaataaaactctttgaacattaatcaaaacctttctaggtatagttctgagaagaaatacaggaaattgtgtacttagattcatcgagttaaagagtattcacctcataggccgcaaggatttgcacaaatctcttagaagcatcggaatcgttcgtcgactcagcaaggtccgggtgagtttccttggccaatttgcgaaa

SEQ ID NO: 42027 - DNA, 2391 bp, Cannabis sativa
atacttgttagtaaatctagatcacggtaaaatattcccaacaataaaccccatctctattgtagtgccagcaccaaccatcttctacttcacacttcgctaatagaatagataaaattatgttcacatccattgacaaaaaacctcttgaagcttccccacatcctaagtaccagatggaagaataaattcactcacctgacagtcaacattaattctccttgtgattggctaaaacaacctcaaacgcgggagctgtaagtccttgaaagccctaacttgtgttccatcaccaaatggacctccaaagcccgcatttaagcaactccaatccccatatcaaactcgaccaaagatgaaaagaaccaactttttccatggcctcaaggatagagcaatttgggaaatatttatgtttcaaaattcaagcaagcaatgaatctaggtatagaaataacttccatacttagccaaaaaaacttgatcaaagagttgaaaatcccaaaatccaagcccacccatcgtcttaggtcgatgtactgtttcaaatcttcctttgatcaccagaagaaccccactagaattgtagactttaatttaatgtagcattaaaatatttcacaaaatacaaagcaaaattatactcattttcaattttcatcaaacggatcagtaatgcacattatgaaccaaatgttcgtaaaagctcaaaaggaaaagtattgaaaagggccactttctacagcttggtgtaaaagtatatatattcaaaccaccacgtgacaaaataaaggaaaaaaggtatacaaatatttcatcaagctgtgcatctagttaggaaatattatttctcatgctgttgtaaatcgattccccaggctgatgcaagctgcatcccaatctggtcaggcattgcacattcccagtcctctggtggatccattgtcaacgaagcttcatgtaagttcaataaaagctctttcttcacttccatgggaatccccaagatatctggtccatgttctaatactatttctgtcaactgcatgagatgcataatgtagaaaaattagcataagtcttaagtctagaaccaacctatgtacgaagaattccccaaataccaagaatgataatgttctagtagcacaaaaagcatttatgagatacaatatgttaaatattagcaaaaaaatttaaggtaaatgtttaaacaactcgagatcaaggaagaagctaagaattcttattatgttatgttagtgtagttgaagttgctcaaagctacaatgttgaataactggacatgtctaacttggaagaactatctttaacccattaagttaacaaacaatggaaagaaaaaaaaagcagaaataattaaaggagtaatacctgctgaatccaggacaaacatatgtcaaacaagttctgctctgacaaaaattgcgtaacagcatgcaggacctcacttgctatttcattcgagagttggtcaatcacaggaccagatctgtccattaactttacaagtaagatgtcatccccagtagacagcatttcagcatatgctgaatccatgtctcccgcttgaagagcatccattgcattagtccaagaagtccagactgggtcccgctcttgctcaacattatcatctcccatagcctctgcggtcaattcagggatagcaactctggctgtgcgagatccatgtccattgtcctctccagctacccgaattgcttctaaggttgcctcatcctttgaagctcgccagacacttctagcagaaggtccctcacccaacctaattggtccagcccccttatcccaacccctccggctgggaccctgatcaccctcatgttctgccttgggcgatctaccatctgaagatgcaccagctagagttctccttgagccaatctgcccattcctggaactaccgtaagttggaaaatcccaagcctcagatgcgtctggcctccaatgaggacctcgtccccgcatgcctgaagcaattccatcagtttgagcaaatctttccacaaaaggcatccgcccatccccactcctaccaaactttgcactagagtattcagagaatccattatacttgcctaaaggcctattagatccatcaaatcccattgcaaagttaccccctctcctgcctgatgatattgatagatctcttgccatgtcttcaacaattctctcgagtccccttactctattctcaagagttatcatgctatcatgagaaccacccatgaaatcctgtaatgtagaagtgttatcatattattcaataaaccatataactagcatctaattttatagatcagaagtataacaaaccctgaaacatgacagcagttcacaacc

SEQ ID NO: 42028 - DNA, 1339 bp, Cannabis sativa
agctgattattgaaaatatgagtactgtaggtgacttcaagttcagctgattcagctaaggaagctagtgccgatgtccaggtttcagtgtcagctgaagaatcggttccgggtccgagaaaagaaccaacgaaatctgtgccggagcctgaggaaagacccgctgatatagatgagagggaaagtgcaaggtctaatttttcttcgttctttcattttctgaagagacccctttttgatgtgcatatattaattgggttttccaggatgctacaattagtatttcttttttttgtctttttcatttctgttgttgacaatatatgaagttgagttatgctgattttagctgcaagtgttatgcctcatgagctggttttgctatagtccatgttaggctatcaggaggtgttttttttttcccttcttccaaacgtttgacttgtttggcaatctgtgtttttgttggatgtaatggcaatttagctttaaaagaatcgaactgaaggactgttggtgagtgaacaatgctgattgtgtgctcagtccatttaagtttttttgaaactatcatgaggggtgtagcagaattagtccatatatttttggattgttaattgtacttatatttttaaatataggatttcccttgaattatttaacactgctgtaaatttactaaaatagagtgttaaaaagttcaatgtggttaaatgctcttttatgttgtaaattgaacagtgttgtattgagtatatgtatgattatttgaacctggtgtgattgtactgaatatttatgatcaaagaatttaggttatattgattgagggttttagttttatttaaaatcttttacacaaaaatgtctgaacaacaatacttgaaaatctggttgcagaagtcaatgtgcaactgatgcatcagctggccaaatgacaattttctattgtggaaaagtgaatgtatatgaaggagttcaacctgagaaggtaatgaagcttcttctactctcagtctcggtgatatgttgtggttagctttccaatgaggcgatgaacggttttgcaggcacgtgcaatcatgcaactagcagcaagtccaatccctttatctcgtgaaaactcgtttggtgtccctgcagcagttaggccctttccattgcatttaaattctacaagtgaaaaatgtggtgttcctcctagtgtctcaatctcacaacccacgcaagcaggtattaattgggaaagggttttttgctctttatttgatggatgtgatgtttggggagctgtaaatccaagaaatcactctttggattttactttaaaatttcaaac

SEQ ID NO: 42029 - DNA, 4983 bp, Cannabis sativa
  modified_base (3871)..(3875): a, c, t, g, unknown or other
tgttgtgactaaaattaaattagtgacaatttgtatataaatactatattttagtcataaataatattttagtgtgactaaaagttacatttattcaaaaaaaaatatattgtaactaaaaaattatcactaaatgtaacaaatttttataatgatatattaaattatctaagacttcatattaacttaaactaatagcaatttactattttttgtaccacttaatatttctctattatatatgttatatatgaaaaatttagttaattattacgaaatattttctgtactgtactatgatgacccttgagaagtacaattatcaactgaagattctcaaagactttttttttttttttaaaaagaagtcttactatgctgccacaagaatttgaggacgcgtaaaatgtttactaactaatattattaagtttctacataatataatatattaaaaatttatacaaatttatatttttataatattaaatataattaaaaataaaaaaagtaacaataaaattattaattttaataattaaagcactaaatataaattagaattcaaatcaaatatcattttcttgtaaactatgcacgaaattgtttcctaagtattttatcaaatcctttataactttccaaaagaaaatgaaaattaatagtgaagtaataaagtatagagtgatctcttgatctcatgaactccttatataataatataacaaaggaagaaagaaactatatagttatagttaacaacaaataatgttcaaggaaaaacttaattaattgaattttaattacacttggatttaattaaaaaaaactgaatagaaaaaagacaagatgagaaccaaccaagtttgaacaagttggcatatttatgagtgtgggacagagagagctatttatataatagtacaataaaaataaataaataaattaagggcggctcatataattagatgaagcaaattactaatggtgtggtgacacagaaacaaaagagaaataaagtctaaggttagttgaaattaaattaaaagctttaattgttttcaaaaccgtgtgtaaattcactatcatttatgtttttgagtcaacaattgaccaagaaattccttattccaacgaaggtgattggatatgagagcttctacgtctagaaaattatatgaaaaaacatggaaatcatactcatttttccaccttcataactcttaaaaaaaataaatagtacacatagcattgctattgtgtttaacgatttaaaataaggtgacacctttcaatttaattttggagaattatatttcatataatattttttaattttttttttaaatttatgatttggattgttctgattgtttttacaataattttaatgtggattgatatacgaattttggttgcgatttaagttgctctgttaattgttatagtttttatgtgaaattctataaaaatacaaaaaaaaaatactgttttaaagtgtaaaaataaaaaacctcatttattttataccaataatattaattacaccatatattgaaatttctaacttttttacttttatactgtgaggcggaatgtttttcaaaaatactgtgtaagttttataatgtgtactgtgttaagtttttctgttgtttttagttattatgtttcgtgtttcactgttgttttataaaaatacagtatttttgaaaagattttcgtgtgatagtatttttgtaaaaattaactcaaaatctagtatttttgtaaatttctctaatactataacatgttgtatgataatttttttatacttttaatataatcaataactaattttaaattataagaaataatatataggaaaacattatgagtaaatttattctttaaaaaaaacattagaagtatacagtggtactaaatataattaatgaccctaattattgaattattgtaagaaataataaaaaaattaattttaaattcaatcacgcatgaaataatataaataaataaagtaattaccttattatatagagtattaattaatataataataacagaattaagactagctagggttacttttatccttataccaaagtacaaaaaaacagattaaaaaattaattttataaatatataataattaaagactagatacaaattaggagaatgacgtgttgaatgacttttaggttatttcctcatactttcctttttaattcatatttatctattctcttcccctataaatatgacaatcctttctgtgttttcctttcaataaaaaagaaaaagaaaagattttaataaattttctttgtggggatcgatcttcatcatccaattatatatatacatatatatatatatatatatatttatggagtcaaagtggacgaaaaattctttagatctcaatcttaaaccatttcagcatctcaccgaagttactgtgagtacaaataatattaatcatttctcatattaataataatattcatgtatattatataataatcaaatttgctaatttttttgaatgatcaacctctcataatgtttttttaaattaattaattaattaggatggtgatggtgatgatgaagatgttgagcattataataataagaatgatgatgaaatattattggctgaagaggtaaataggatgagctcagagaataagaagcttagtgaaatgttaagtgttatgtgggagaattataacaagctgcaaaccaaagtgagagagttgatgatcaacaataatattgatcataatcataataataattatgaacaatattattcatccttattaacaccaaggaaacgaaagttattattagatggagaagaagatgaagattactacaagagcaataatattattactactgatgaagttaataatcagtactattataattactctcctaataaggagattaattataagtctaaggtttcaaccatttatgtacgaactgattcttcttctgatgatcatcatgatcataataagaccctggtaagattattattattaatcttcatctaattctaattactatttattaattagtagatgtaattaatttttaatggttttaatttaattatatatatatattatataatgaaggttgtgaaggatggatatcaatggaggaaatatggtcaaaaagttacaagagataacccttctcctagagcttattttaaatgctcttttgcaccaaattgtccagttaaaaagaaggtacgtacctaactattattattattattattattattattatttaattagtaattagtgtattatgagtgtaattatgttttttaaatacatttttcactaaaataggaagggagtctaaaaaaaatgatattcttataatagagaatagatagattgctattgggcatcagtggagctagcacctctagacatgtcgcgctaacgatattctctaaaaactattatattaaactatataagactcgatacttagttggaccaataacaatgttaacacataagagaatgcataagcacttatagtgccttttagcatttctcgtttttaaatattatcttaatcaaaaacattattactttttcattattttaataaattaatttatatttaacaaattcaatttaaaaaatactatcttttaacttttttgaaaaaaaatttacagtttgggttactccggtggtttctcgtgtgatttttatgtgggttgttatgtgaattttagttgcgattgatgttgctctgttagttgctataggggtttacacgtgaaatactgtaaaaatacacaaaaaaaaaaaaaaactatttnnnnntgtaaaaataaaaaaacttcttaataactaataattaattaattaatttgatcaggtgcaaagaagtgctgaagatccatctctgttggtggttacatatgaaggagagcatatgcataacaatagccacaatataaagaagtcatccatggtgagatccttagctaataattcaactataacccttgatcatcatgatcatggcccagttttgcatcaatttttggtcaaccaaatggcttcttcattgacaaaggattcaaatttcacagccgctttagctgctgcgctatttcaggaaaaaaaatcgattattaattagacaataattaatacatatatatatattaattattactactagctagggtttatatatatatagtatgttttacaattatataaatggtagagaaaaatgaaattggtgcgtgtgtaacgtaccaactcgactcgatcgatctacagaggctttttgtcatgttatttgaaagaggagattagctatgaatatataaatatatattatgtaggtccatgtaaataatatctactcaatcctttcggcaaacttttgtgaataaatattaaaacaagaatgagtgtaattatttgcgatgattgtttgacattaaatttttatttttgaaagtaaacatatatacatgaattattgtgtgtacatgtataacatctttgtctcactcacattcaccatcgcctcaagggctctctctagatttgatattcgaatattatggttcctgggtttttatttcaaatcttgctatcatgagttgttcgtggtcagatctgaaagtttttttcatggattgtgtcattgcgaaatcgaagcaaataagtgaaaaataagatttttttttcgtgtgtcagtttaaaatcgacacaccgtattagagcattttcaatgaaaatgcaaatgcaaaatatagttgaatttattaaaactctactctaagagcatctctaatagagatgtaaataagtgatgccattacaaaaaatttatttttagtcacaataaaacttatgactaaaagtgatttgtaattaattataaattatcattcctacgttgtgactaaaa

SEQ ID NO: 42030 - DNA, 1394 bp, Cannabis sativa
aaaaaaatataaccaagctcgaatattttatcaaccattaacagccacaaacaagctcgaatattttatgatattacaatatatattcgaatatatatctctttgaaaaatataaacaattgctagctttatagaatccatggttagtttttcatcactatacaaaaagtaagctatatataattggtgtattaatattaaaacatataagaaatattatttaattaatcgtgtgaatattataatagctaacgcaagtcgcaaaacatcattgtataaaggttatgcttaatatgaaagtataaataaattaacaatagctataataaaaaacttggaaaaaactatatagcatatcttgatgtacttgtcttaccttattatatatatttatatatatatttatttatttatatatatgtggttccacgtggtgtggaaaaaggattttaaatagcaataataaattaattatgggggaaaaagttaattttatattatgctttgattgtttgttaaaagcattagaatataagtattaatataatagatatggaagaacattcttattatgcttaataaagcattaaaaaaagtttaattttctaattaaagtgagaattaagtgaaaagttgtggcacatatatatatatatatatattaaaaaacaattgtagaaaagaaatcaaaggaactaaaagggaagttgagggagacaaagtataaataatacatgattggagaggcttgatggccccaccttggaaaacaatggagataaaattatcaaataattcttttttagaattatggaatacttttaaataaaagtaaagttggaattttaatatatagttttacataaacatggcgctttctattccaactcataatatacttagtttacttgtcatataagacacataatgcatcttaagtgttttagaagtctcataatttagagtattaaaattagatactcatactgcctaccacaacgataaaatattgtcttataattggttataatatttattaaaataaaataagtaggactcgatattaaattacaccaataacaatattatacttcagaaaaattctaaatactgtgagtaccctttataacatttttccataatttaatacccaccacttttttaatctccttttataacagagttgtggtattcttttaagcaaatactttattggtcaaactttactttttgaaaacattgtaaagtataatattagttttcacatcttttaatttgataattgttatattacatttttcttcaagtttttttattaaaaaaaatcaaattcaaattcaaatcacctctctccaatgtcaaaaacctaaacttacaaaattttcagcagcact

SEQ ID NO: 42031 - DNA, 2757 bp, Cannabis sativa
taaagaagaattttttccggtctcctaaactaaatgagtcgtaagcgcagacctaatctacttatgttcaacgtcgtgattgcttatctctaaatccatatatgccaatatatattagaataaatattatttttacactctgaactataatatttagggttttgcccaataaattattttcttgtgaaaatcccactctgaactatgaaaataatatcaaattttctctatttgttgcatttaaatagtatgaaacttatttaactaacttaacctagtcgaaatcaagtatatagtggttttaaacattccaatattaactctaaaattatagaataaaatttcaaattttatcattagagtactaaatatgtaattatttttcgtttagactctcaaattgtagtaaactaaccctaaatcagttttacatcaagaatttgtttgcagaaatgaacgaatacaaccgaaggggtaaatttgtaattatgcccataattcgagaataaccttttacaaaataaaattattctagagcaaaatcctactaatgtcataattaatttaaagggtaaaaatcgaaagctcaaacttttgtgtaccttgttcaccatcatagctgtgataggtgaagacaatataaggagtagggccttcattgtggtacttcttcacattccaaacaacatcactaaagccaattttgccacctaaattgaagttcatgacacatcgatcttaacagctcaagtgaaaataataattattacaatgtaataagtttgaaaattaattaccatgaagtacatttttcccttcattagcaactatcttgtatgtcttcccattcaatgtaaatttagcccctccaattcgatttgcaacacgcccaacaacagctccaatgtaacttgtatcattctgaaaccattaaaatagacccaaattacagatcaaatcacatcatatttatatgtacatttctattataagatcaattaatataaggtatcaacaaaccttgtactcattgatagtatcatacccaagaactacatcagctagtttccctgaaaaaaagtatacataataacttaatatgcaccatatttatatatgagaagtaattaatgatgtagttcaaataagagagaatattgtggacataacaaagtaacaaaccatatctgtcagggacaaaaagggaaacaattgtggcaccccaattggtgagcttaatagaaatatcacccttttttagtacataagtactaacttttgttggctttgtttcataacttttggagagccctaaggaagaagaagctaagatgatgaaacagaggaataacagagacagggacagtttggtcattttcttagatgaaagatatgcatatatatttatatggcttgaatatatttcaaatggctaacacaattgggattttatagatgtagagctagctatagtagagatcaacacaagcaagcaaccatgtgtataataggttaataagattacaatccatttgttttttttttttaagtttattatttctttggttgctatatcatatgaagtgttaataataagtttgtagttttgactttgtaataggcaaaattatcaataagaaaggataacaacgtgctaagattctaaaacgtggtctctacttgaaataattataagaacaaacttatacattgtcgactaaaactcgtaggtgtttcagaattatatttatttatatattatatatatcatgctgtttaaataacaattaacatgcaattagatgatatataaccatatccatcgaccttaaattgatctcaatacaagattaaggcctggtttgcggttgttattattaataaataataaccaacactatggataaaattttgtattgtattaattattacgatgataaattttaatataatgtgaatcgtgttatttaatacacaataaattatttgtattaacttgtattataatatttaaaaaggattcgagattgaggactcgaactcatgtctcgaactcggacccagaccttaacctaaaactagacacaaacttggtcctagatacagaccctggacacgaccccaaacctggccctagatccggcccagactcagatccgtggtcaaggtgtgaggatggggtccgggtctacactcctagtcaagttgggttgtgtttatagtaaaaatagtaaatttacatataatctattaatacaaatcaatactaaatataatttcgtactaaataatattaatacattataatctaacataatttcctaattggattaaacttatgaaataagaagtcgtaaccaattagctacgtcttcttattgaaggggctagaaataagctcatcaaattacgaggtggtttttatatataaaatatattttgtaagatttgtaagtcacttgccattatttttagtttaaaaataacgttcaaggcaaattactaaaaatatataagtcaaatgtgaataatttaaaattcaaagttatatgcatttcaagggataaggccagctagcatttttgtctttctaattcattatccatcttgtgagactagaaacaaactaaaaccatttacgagagtcccacaaattcactttaataagctcaaaacaatcctttcctaacaagctggctttgtttggtttgggtgaattaggcttaataattttcataatatggtacaatgtaagga

SEQ ID NO: 42032 - DNA, 4889 bp, Cannabis sativa
atcaatatataaactaaatcacacatatatgcaaacatgccaatttttactcctttatacaaattatttcaatgtagtacttaagtttgagatgtacaacttctaatactcaacatgatatgtgtacatgtgtttaataaacaactggttgagaaaacttgtcatatgcaagtgtacgtgtcatattattgatgtaatttgaattgaaaaataaattatataaagtgttcaaaatgcacttacttcaactggtgtaatgtcaagaactctttggtggccatctgagcctttgccaccagcttgttcaactataaagctcattggagcacactcatacaagagcctgagcttcccattcttgctctttttgtctctagggtagccataaatgccaccatacaaaagtgttcgatgaaagtccccaaccaaacttcctatgtacctagctgagtaaggcttcccactgggtccaccagggtccttaaggtcatcaatgtacttcttcaacttgtcatcccaaagctgatagttcccttcattgaatgagtaaatcttacccgatttcgggatttgaatgctttcttgtgtcaacacgaattcaccatacatggggtctaatgtgaaagcgaaaactcccttccctatggtgaggacgaagataaccgagctcgagtacatgcagtagccagcagcaagcagattgctccctggttggcacacactcacaacacacctttgttcactagtccctaactgtcatacacaccaataaatatagtatgtcaaattgtattacactgtgatctgatgacaacactagctttaaacaatcacatattcacacacacacatatgtaagtgaccctgtcccaaagcagaactacagtattttatatagacttactgtgccatcatcaccaatgtcagcaagacactcatcatttggactgtatattccaaatattgatccagttgagactgcagcatcaatgttggaagaaccatcaagagggtcaaacacaacgatgtagttgcctgagtaactctcttccacagccactggtacatcctcttcctctgaggctataatcccagttcttccacttgatctcaaacaattagagaaaacctgttcaattaaggtatatcagattaacaactttcttatctaacacaactttcacaagtaaccctttattatttacctcattagaaacaacatcaagtttcttttggtcctctccttgaatattaacagcaccctgaacaccagttaagttggaaatactagctctttgaaccaatgatgctatctgtttacaagccatggaaatgcttgacagaacaatggtgagctcggcgtcaatcacccctgactgttcctgcttgagtagccagttggtgagcgtttgaatctcgtacgaagcacttttcttcttttgtgcagcctcctctgctgcaacagccatgcaccgaacatgtctcgctgatctcttgccatgattgctcaaattaagcaatttggaggaggcgctgctgctgctgcctggaactacgtcgcatagttgtagaggagagagccttgagattgaacgagctgagctgtagtttgaatatatgagctgtgatgaagaaggagataatattgctgttgttgaaaccatggttagttactactattacttcttcttcttcttggaattgtgaggctggttttgtcaaaaacacacagcatgagatagcatgagccttgtgaggttggcaacgattttatgttgatgtgggtcctacttatctttcttcaatctttttgtgatcatgcttcttcggatggagactccaaaaagtgtactctactctacaagctacaagtgcatttggatttggtgtattcttatcccatactacatacaaatccctccattggttttcctttttcattataactttctgtttcagttatatgaaaatctttgttgaggtaaataattgcagtttctcactgctttcatatttactgaacttggttggctgtagtgttcctaaaaggcatcaggaagtgttattttaaagaaagaacaaagaaaattgaggccttatctctgaaaataacactttgattttagtcctaatttgtctcatagtcgagccaaccctctatatgcttagaatgattctagaataaattatattttatacccattttattttatttattttaatttttaccttcatttttatattatttaatatatacccactattatagatgatgttcccattatacctcttaggttaatgtaaatgtaaaatatgtgttagacttaagcagagactgagaatatattggcaattcactcaaaaaaatggatatattttaatgaaatataatatgaggatatttttgattaatggatacaaaaaagaagtatttctcaacttatcccaaaattctatatgcatcaacctatttattataagattatttacaccacatactgaaatttttaatttttaattttttttacttttttgctaaagtaatttttttttcaaaaataccatgtaaattttaaactgtgtattgtattaagtttttactattgctctatggttattttttagttgttccactattatttttagttattctattttgttgttttataaaaacacagtatttttttaaaaaaattccgtgtgacagtatttttataaaaattaatccaatttcagtatttttgtaagttttctttattatatagtcaaagacaaatcttagtgattttttctatggtgaaagcttgttctatggttttttagcacggttgaatttatgagttaattatatgatttaataatttggtccctccatttaatgacattttattaaattgcccatgaaatttttacacgaccaaaatttgagggaacaattggtactttcacagatgatccaagatgatttattaacaacaacaaaaattctttactttatgcagatatttaggcagccatgggatatgaaaaagagactggaagaaagaaattgtgacaactaataaagctttatgttaaagcaattcttttcttcaactttgaagatcatgatgacttaataaccaaatataggtttggctctcaatcctggttccactctctaaccctgtgattgggtttcaagatgtgcgttcttgcaggctcttcgacttttcaaaagcaaagcttgtaggtcctcctttctttactcaaattctattaatatacaaagtgaaactggcattgcagtcctttcgttcatgaactccattttcaactccaaaattctagttattcccaagaaggaaaacgatagtttcacaacaatcactaagaattccctttgctgcaactccattactgtcaaacccacctttgataaaaagaatggcgtaaaggggtcaaagatctacaatcttagcccactatctttaacaatgagcctcaacctaccattgcattttatgaattttgatttatttggtatatgatttttatcaatcacaaccaacatacactaatacatttttcataattctttccaaattgatgcagttctgaagtaaaaaaatcccctgaaaagccaaaatacctaaacagaagtataccagtctacagataaaaagagttgccatgccataaaaggccttcatgcaattctgaagtagaaaataacctgaaagatcaatgaatctaaccaatgaatttcacctactaatatgatccagataagaaagacaatccagctttccctaatttttaccacttgtcctctctaaactactaccttcaatagtaaatgtaattttaagtttaaatatttcccccatttctaatagaaatgaaaaagttaatggaaagccgccctcttcactaaagcggccaatttagctatgtaatcatgcatacttttgcaacatacaaagaaaattccatgagatggttaaatggaaactattaagccccaggaggtttgtgagtaagtcaacaatgagaaaaacaaaagtggaataaagcgttctctttgttaaaattgccgtgccttgtacaagtttcaaagtgaagctcaataataatttttataggaccactattgacaatttcttcaactactaaatgcattggatgatcatccttaccccaagaacgtgagttataacttataaggaggctactgtgccttgggcaagtttcaaacacaaagtgaagctcaataattcaaaactactgattgcattttctaatcattattatctcatgaacatgaattgataacttataaggaggtggactaacattgtttttatcatcctaggctatattgagcacttcttttcattcccatcccacaatacttgattagcatcttatattggataaggtataagtatagaaagcaaataaaagacaattgggtgaaacttgacatgcatgtaattgaaatgaatatataaaatctaatcaagcttatcaccttcaaaagactgaaaatttaatgaattgtgaaacctcaacactcatgaacttaccaaaactattggttaaagtgatgattgactttcacagtacacatatttcagagtttaaatctttatttatgttaggaagttagcatttgtattagagaacatgggtattttgtaaggcaccatatttttcacaggaaaaaattaaaaaaagggtaaaacttaccaattaatactgtttttgacaatttaacatatttacatcacgttgttgttgcaacgatttcattggcatctaggtctactaagctttctttcccaaacagtgtaaatcccacagttacctgaaacaagataaaattatcaacctttatctcagtcatc

SEQ ID NO: 42033 - DNA, 1185 bp, Cannabis sativa
gcatacttttgaattgacatatccattgaactgaatgtgcggtaactcaatgaataggtaatcaaaccaagactcgcgaggccagctagagttccagttaccacatgcacttgggatcgtgaaggcaaatgcattgccggtggtataggtgatggttctatacaggtagcttttttccccacgttttggatttactcgattggaatgctttttgctctgttctcaaactaaaatgtttttttttttttttttgtgcattctatacttttctaacagatttggaacctgaagcctggatggggaagtaggccagatatatatgtggaaaaaagtcacacagatgatattacttcacttaagttttctagtgatggacgtactttattatcaaggagttgtgatgattctttgaaggtgattaaccacattttaaacataatattttctattattattattttagcatgattttatgacattattaatcatgaaaaatatgtggcaggtttgggatctgcgccagatgaaagcacctcttaaggtgtttaatgatcttcctaaccattatgctcaaacaaatgttgcatttagtcctgatgaacagcttttcttgactggaacatccgttgaaagggagagcacaactggaggtttgttgtgcttcttcgatcgagctaaacttgagcttgtttcaaaagtcgggatatcgccaacttgcagtgttgttcagtgctgctggcatccaaagctaaatcaggtaatcccacagccaaaccccttcagtctgaccgatatttatactttaaaatatactcaaaacactgtgtttctgtttgtatttgaagatatttgccacctctggagacaaaagccaaggaggaactcacatactatatgatcctacaattagtgaaaggggagctcttgtttgtgttgcacgggcaccgaggaagaaatctgttgatgatttcgaagctaaaccagtcatacacaatcctcatgctctacctttgtttagagatcagccaagccgtaaacgtcaaagagagaagacattgaaggaccctatgaagtctcacaagcctgaccttcccatgacaggaccaggatttggtgggagaattggtacaagtcaaggaagcttattaactcagtacctcctcaaggtaaattatttgttctttt

SEQ ID NO: 42034 - DNA, 931 bp, Cannabis sativa
taatggtgaaaagaattattgtgttcaacttagaaacaatgctaagaaggtaattgattcgatggaaaaagagactaaaaaattgaagaagctcaacaaaaggatatcatttatatagtgattcttgagatttttgaggctgcaattgatggatttagacaaataaatggatttgattctaattgacaatagaaagttagtggtaattgtaattttcctgcttcaaatctttgatggatttatagcttttgtacactatgagagcgtgatcacttaatttaaaattgcttcagatcgaacacgtttaattattgaatttttttgtgatggactattagaaagaaaaaaaaaagatgaacattgttgatatgagtagtacctactaatccatttaagtcttattcaactatgtagttatatacttttacattctcaaaatcatcacatttaacctttcacaggcaatataaaattacataacttacctgatatttcgcaggactactaaatgtcacaataatcaaaaacaaacattgtataaaaaaaaattcattaaattatttggataaataacagttacaattaataacatatcacctaaattgtttttatagtaatcccgcattggtaacataaactttagaattatggtgttattgtgtataaaattaagtgtaaatggcttgaaattgaattacaaaaaataatataataaattaaaataattactagccataatataataactaaaacataagagtaatataaagttttttcataaaaaaacaataaataaggctgaataagacaacaacaataaaagtttaaatgtacttagaattggctattaatattatctaacatcatttagttgatttttgaattaatatctattttatataaaatgtggctatataacagaatttttggt

SEQ ID NO: 42035 - DNA, 567 bp, Cannabis sativa
gttcatgagtcatactagtaagaacataaacaaaacaaaagaaaacttcactgccagagccatgtgaagtgcatatataatgagagaacagtccaattttcgctgctaactgggttatcttttatattttatataatatatagtctttatattataaatatatgtacataaatactgtcaaatgataatatgttaggtggatcctacacatattgtcattctgcagtcatggcatcattcttggccgttgaaataggagcttaagataatacaaaactacttttatgaagaaaaagaaaaaaagatcattgtaacagcctgccgaggctcttggctagagctattctatttttatccttgtctgacaaatatgacaaagattgatgtcaatgctcagaaaatgaggacactactacccatttgctcaattttagagaaagatttaatttttatgttgcccaaatagaaaaatacacttgaatgtcatgtagaaagtatagaagaaaaattaaatgatttttctagtatttcttgttttaataagtttgttgggaatataaaagtttc

SEQ ID NO: 42036 - DNA, 1293 bp, Cannabis sativa
  modified_base (101)..(115): a, c, t, g, unknown or other
aaaaaaatggtcaaaaattaagctcagggtcatatttttactattttggaaagggttcattttgtcatttaacaaaacacagggtccaatcggtaactttnnnnnnnnnnnnnnnccaaaataatatttacccttttttaaaaaggtgtgtaactcttcctagtttatatacatattttatttgtatgcgatcaacattggagaaaattaggtgggtggtatttttggggccaagtttttactatatctataattttttttttaccagtgtggattgtaaacttccaactttgaccactaactatatttattggttgaaatttatttaccgactagtcgagctgttttaaaattacaatatgtaattataggacaaacttattaaacttcaaagcatatttagataggtgttaaatgacataaataaaatttaaaactgctagataatatgaggatgatcttaagttcagccccaccttattattattattattattattttgtttaaattatgattatgaaaggaagaaaaaataatcaaatgcattgaaatgtggattttgcccacttttttggggaaggaagaccattgggacatggctatattggagagtcaatagtgtggaaaaataaaaatagaagtgaaaaaaaaaacaagtagatgtagaaaggatatgtgtatgtgtataaggaacaaggggaaggggccaaaggaagtcatgtggagagagtcactttctcaagagaattgtcttgaacatcaccaacaacactcctcacattcttatgagcaggtgtattatatgtatgtgtgtgtacatgtggtggtgtgctctaggctttcacattccacacaaatcccatcatattaaatttttaacccttatctttttttctttttcttctattatatattaaaaagtattctaatatggatagtacttaacccaacctctaacccactaactactggctctagccccctaatttgagggatttttttaagctacaacagttatattttgtcctataaatatataaaaatgctaaaaattacccgcacttaagtgttatatcacaatttatgtatgagttttatataatttaatttaataaatattataaaatattactaattattacaactttacaagatgttacctttaagtggtgctaaatattggactaagacactacttatacctaataacaatattttgttttccttttaaaaaaattacaccccttttttggttcatctaaaatattcacaagctaattatgtattaatta

SEQ ID NO: 42037 - DNA, 3226 bp, Cannabis sativa
  modified_base (2677)..(2678): a, c, t, g, unknown or other
ttatggttatgaacaaatattgggcacatagttaatgattgtgtttatggtattaagcttatgattatattagtccacaatattaattctaacagtaaattcaaattcaatgctattttacagtcaacttggcgcattgtaatctatgctgtaacgttaatttctcaattacccaattatctgaaaacatagagtagttgaaagcttaattcaactgtccatttcatataatatttctaatgatatttaactttacaagtaaagagttgtatgtgtttgcaataatgcctgagacgtatatgtgttccttgaatcatgcagtacgctcataggagttgtgtacagagatggtgcaatgaaaagggtgacacaatctgcgagatatgccatcaggtgacctgtttttgtagatttcaattctattttgctttaaaataaaaatacattattgtgattgaattatattttatatggtttcagcctttcaagcctggttacacagttcctccacctttgtttcgatttggtcgtattccaatgcatttcaggtgaacaatttggaatagtatcatatcacttattttatgtttcttgtcgtttgatattcaacttcaccaatgtggattggatggattcacaggggaaactgggagattacaagaagggacataaatagtccaaggatcatagcaatggtttcttcttctgaaagaaactttcttgaccatgagcttgatgatgattctgcttccagtacaagaagtctcacatactgccgtgcaatggctgtcattgtaagttaaattggttaatgtactgtgcctagaagatagatgacaaaataatctggtggttttgacaaaaacaggtgttgttgttttgtttttgcagttcatgatacttttgattctaaggcatactcttcctttaataatcaaaggaaaaaatgactactcattcccattaattatggtaaaactgatttcaacttctcttgtttcttttctttcaagccaaaacaaatagagcactaaattgcatcaatgactagtgaatccgcttaaacccttttgttcttaacttgggcagttgttatttctaagaactattgggattgtgctgccaatttatgtcatggtgagggctgtgagtgccatccataaccgccgacgtcgcagccaacaggtaaaatagttcattcataaaatctattgcatatgaatcgagtttcaacactactattgctagaacaacatgaataaatcactatgataagttaatgtgagacctggcattgatgaatgagtcattttgttttggtgaatgaacaatttaggtccatcccattgcttcaccagatacatcgtctgatggagaaaatgaagatttagaaatgcagcctccgccccatcccccctttatcattcaagctaactcactttagtaaagaccaaagagaactaaaaccaaaacaaagaatttcaaaagagctgctaatacaaagatgtgtttcatacatgtaaaagatggagaccactttcttatttgactcagtcacatttgtacagttaagaaagaatcacagtactgtagtagtagtacatacaaagatactaccattccattcagggcaagatcagtgatggatatgtataaattaactcttttcttaggtaaataacttaatttgtaactatgcccacaagttcttctgtttatacttcatatagatctccagcgcaattaaaatcttaattttaaatggtttgagcttcttcatttcaaattgtaattcaccctttcctcctcccccatacctgctcaatgttaaagttgttttgggctgtatgttctaaatctcttcttaaatccaatctgaaaatgtggtttatttttaaacatgaacaagaattatggcctaacaagcttattttgagttagtaaagcaattacataggggaagtaaatccgattgggtgttataaaagctacgagcaattaaagaccagttgacataagatttttattattcttattagttattacaatcatataactcattgagtaatttgccgttaaacttattcaactattattttaattgcacttaaccttccaacttcaaattttggtgataaaatcttccaaactgctaaactgatagcaaatttaaagtatcattcatttatttcagatagctgctcacatagactatctacgtatactatacgtgacacatttatattggtccaccaaatataattatttcaaaattataaaaaaaaaaatattttctaaatttattttaaaattaaaaagaaaaatttaaatttataaaattattaataaataaataaataatattttttaattctttatttttttctctctctctctctgagtcttcttcttccttcccagatttgagaagcccaaatctcttcaagctcaaatctcattctttcccgccggcaactggtccaacagagaccaaactctctttcacactccccctcttcctctacaactacctagcatcttggacccaaatttataagaaaagaaaagctcgccccatttcgacccttgtaggttcatcttcttcttcatttgtccttagcatagaccagccgcacgagcaaccaacactagtcacacttcttcttcttcttcttcnncttcttcttcttcttcttcgttcatcgtcatctctaactgcacgagaccagctatcttttcctctttcgttcatcttccccagccgcacacgaccagcagcaatatccacacgagaataccaactggagcgccccagtcgttcgctcctcctctggcccgtcttcaactgtcctctcctccaccagctctcagccccaatcttgaaaaaaaaaatggcaataaggacttatgatttgttttgcttaagcagtccatgtcagcatttaagtgagataaatagaaacacattaaatttgctaatagtttagcaatttgaagttttaccaccaaaatttgaggttaaaaggttaagtacaagtaaaataattattagaagattttaatcgcaaattactctaactcattttgtttatgttctaaaaaaatgcttaaattgtggtcaagatttgtatcattctaataaaagtgaagtttcaaatggtttttggtaacaaaaccaagatactagaacgacctaatcactgaattcaaaatgcaataaatatat

SEQ ID NO: 42038 - DNA, 1911 bp, Cannabis sativa
cttaattctctcaattttcaattttttattcgactaataatgtatattaattggtttcatcaattaaaaatactcatacaatttaaaatatttatatttatagccgtatcctaattaattttttaaaaaactacaaagatcttaaacctaattttaataaaatcttaattacgattgatgattttatcatagtttatatatatatttataaagataaaaactaaactactacgcattcccattctctgcttataaagatctatctaattatattttctattttttgcttcaaccaaattatatattttaatgtggaggaagcaactttgacaagtatggtcttttaccaaagtgtatgtattcttttatatagtaatcatatagatttttttaaaaaaagttatggaaataattgtatatttcgtgatacgattattgatagatataaatgcaaaaaaaaaaaaaaaaatcaatccaaattcaatcagtttaaaaaaagatacaatttttcttttttctttattatagttacttctttttcaaatattacataattttaaaaatgataattcatacatttttttgtcaatcacttactaattgaactctggctctctctctatatatttaaattattttttttacttctaactcatcatattattaaaagaaaaattgtataaaaataagttaataatgttaactcattgcttgatttattttttggtaagccaaaatgatagcgagttagtaagatacggtaatgacaactggtgatatacaatgttgagaacaattttaagaagagtgttatatgaaccatatcgggctttcattataaaaaagagattttgtacttacatgtcaagctgacccgtttgtacacttaccttctcatattattcatataaaaatcatatgaaaattagtaatattaaatttttttacacttccgccgcgaagcgcggattgttaactagtaaaaaattatttatgacatagttaattattaatatatatatcggacttcaccgatattgataaaagaatagatcttaccattatatctattcttagccaatataacttagtttattttagataaatttgatcttaatcctgacatgattgagcttaagcaaattgtgttattcgagttctttgagttaatcgttaccagcttaccttacagactagcccatactcagatctcgggactcggtaacaaaaatgagtggaagtattactcataggtacagaaatctatagctttccatgttataagtgaaatgataattttctttgagctatgttgaagtatttaatgataaagtgctcatttcaataattatattactgaaatatcagtaagtcaactaagtgcttaaaaataaaatataattaaagggcaaaattgtaatttagtccttattaattataaactatctatagaggatcattgattgatatgatagaaataatgaataatttaataacatatctgtatttgatatataaagttgttatctgtgtttacaagcgagtgacacatgtaatttcaagtgttcctaatcagcttacgagcccattcactaagcccaagcgaattgatggcatgacccacgaacagagtcagacagagggttcagatttgacctcaactcttccataaataagccagatgtatagatccaaaaggttgacactcgttcatagtcaacaagtattcaaataaaggaagacggatgccttcaagagtcatctagaaagggtagtcgaaaaggtgtcagggagcatcgaccgtctaggactaatcctacgtggcacgtttgcgaaaagaatctcaaagaatcaagggttcgtcccttgtgtcagaccttgaaaaggtgcacaaaaaaaaaaaaaaaaaaa

SEQ ID NO: 42039 - DNA, 4350 bp, Cannabis sativa
tatatatatttaaattttaattttttttagataaaatgttccaaatgtatatatatatatatatatttctttatttagggtgtggtagtgtctgtagccaaatattttgagagcttaacgagagaaatgaaacaaaaataaaggagagtggatacgagtgtattatgtgagtatttgatcagctggccataataggtatagctagctttaattttgatgtggtttcctttcctccccataatatgacatttcaattatgtacacatgcagctgtccggaccccaaaaaatgaaaaaaaaaaaaaaaaattaaatataataaaccttatttatttacttttcacagaaacatggaccaaaaatattaaatattaagatggcacttttattaggcatctgataacataaatgttccaacccaacactaccacatcggtaccgcactacttattgctgtttagattgcgactgtttcatctcatatccccaaaaaatagaaaacctcaaaaccttccatttgccaactaatctcttctcttccttttctccaaaccccccctcccctataaataagtgcataagagagtaccctcttagtttctaaaaaaagttttatacccacaaacacataaatatatatatataatatacatatatggagctcatcatcaagaagtctaccttcattctcatctttattctcttcctcttttccactcatccttacttctcaacaggtttgtttgtagtttattaaaatgaactatatgttgtcatttattagcatattataaatatataggcactacatttagttgttggaatgattttattaattaggagtctaattaattgtatatataggggctatggtggtggatagtgaagagatttatgagattgattatagaggtcctgagacccactcatcaattcctccacctgatcactctcgtgggaagcatagggttcacaggcaaagctcatggggacacccaaataaccctaaaacaaagaccacttacttgggaagaaaggtataactcttttctttcacatgaaccatatatggtataatttattagtcatcattacagcttagctctctagatttttttttttccctttttttcgtcctggcactgtatagtcatgtagtatataatcctggccttgtggacaggacaccaataatgtcataatcaagtagaagtatgtatagtactatataaaatatgaaagagtcactttttatttatttatattatttatattattctgttttgactgtttattgaagaatttttttcctcctttttctttttccacttttctgattttgcaggccagtaagatacacggctgaatgagatgtataagaaagattgaaagaagatctcccttcttttctagtgttattagtttttgctaaagtgatgatatattattgctattaattaatgctctctatagataattaatgtgtagggattaattatattaagatgtcatgatgaatcatatatattagcatttaatgtttgtcacattatatatatatatttatatattgtatctctatttctataatcttgtaataatataattaagttgattacatatatataatagaacagaagtactaaaataataagtacataaataaataagatctcttgtaatatggagtacactaatatgcctatccctttattagttttgattttttctccttacattatttcatgtatgaaaacaggctgtgtgcacacaaaatatacaccaaatggcattatacgtgtgtgtatgcatataaatatataaaaatatggttttttttttttaatttaataatgaatatttatatagatttacaaataagtgtgaataatgcagccagagatgatgagtgaggtgaggaaggaaaccaaagggacctgaggcgcagtgaggagtgggactttgtctcccatgcattaataatatctgggcatatcccaagcgttgaggtcttatggtttcccctttcaaaccctaacctacctagcttctactttcttcaatctttctcactcaatctaaatgcctatgacaaatggaccctttctcattgttttgtcccttcagaataaagtataatgtcattttttcactataatatatagacggtacaatatggtatatatacaaaaacattcactatatacaatcccctgttcgtgcacctaatttggatgaaaggccaggactgtactttactagtcattcaacattttattagaaattcttgccaccttgttataaaactattacattcttaagatatacggagtatcctatatataaattttacatattttattacattaattaggatggttctataccttgaagaaattagatagcagtgttaagagaatgctttattaatatgtaattgttccctaataattttttttaatcaaatattgttagaaatatatataaaagataaagcatataccatcaatttgcaaagtaaaataataagaacatatcgaccatataagcgaacggggaaagaggtcgaaatacctccagctattgatcatttaagcttcaatcccagtgttgctttagattgggtaatcgagcttccaaactctctctactctcttagattaaattttactatttgcatagaatgagtaggagctctggaaccgaaatcccatatttataggtgagatactccatttgtatctacactatattaattgctaaatattttgatgattaattcggaaaactaaatcgaaaaatgaatgttttaataaatcgaaaacttataatatttaaaatattcatacttatcacatattgattgtcatcaaatatattcaaagagagaattaacataatctctatatgtgtaaatcaatttgaatgattttgtacaaatacagaaatattttaatattctcccatttggtcagcatttagatttaccaatttaaacccaacgctactcattacataataaacacatgaatcatagcgatatatgtccttattatatgtcgagtattatctttcatgtattacaatatattcattgcataacaatatactttatgttatacttaaatgaataatcctaaaccttatgttcattctggtcctctaaaaaaattttaaatgaaaaattaagatgcgcataaatatgaaaaaatatcaaaataagagattatttaataattactttatttgtacaaattacataagagaaccatgtcacatgttctctacatgatccttgaatttattaggtcgcaagccttttgtcataggatcgacaatcatcaattcaatattaatgtgtttaatgatcactttatttttttaatatgttatgtaatagctaagtacttaatgtcgatgtacttgcttcgacttccacttttgttgttcttaaccaagaaagttgaattgtcactaaacattcttaatgacctgatatgaaatcaacaaatctaaggcctgagttgaaaatcttttggcatataccagtgtatcctcaaaacaagaaacgaactcagctagcaaaagtagcggtcaaggtttctttgttactcctccatgacataactccaccagtgaacataaacatgtaactagatgttaatttacatgaatcattaaaaccagcaaaatttgaatatgagtagccaattacttctagattgttggtttgtttgaacataaatttgtaatccttagtaccctgaaggtaccttataaccttctttgtaacttgtactggtctatccctgagttactcttaaatcttcccaacactctgacagaataagcaatgtcgggtcttgtgcacacctgagcatacattaggcttccaacagcagaagcataaagaatattcttcatttcttctcgttcaaaatcattctttggacactgtctcaaattcaatttatcacccttaataatgggagcaacgctcgttgaataatcttttatctgaaacctttctaagactttgttaatataggcttcttaagacaaacctaagatgcctcactatctatctctatgaatcttaattcctattacataggatgtttcacccatatctttcatctcaaagttctttgaaagaaattgtttcacttcccgcagtaacccattatcattggatgcaagacatataaaacaagaaagcaaatcttactctcactgaccttcaggtatatgcatcgatccatgacattctcttcaaatccaaaggaagagatgacatcatgaaattttaaataccattgacgggatgcttgttttaatccatagatggact

SEQ ID NO: 42040 - DNA, 6741 bp, Cannabis sativa
ctcgcgtcttaatttggttctaagaatttgatagcaaatagtacaattacttctattcttatctataaacaatctcaaatctggaaggggggatttgatactccatgggctgcataaaaaatgatattcattgttcttttttttaaaatcaccatcatcttatctataaacaatctcaaatctaattcaccataaaataagaggtaaggattccaaattaaaattggtctttgtttggattattgaaatattaatttgatttgttttgattctttgttctgtttgaatggggctgtgattgtttgaatttcaataaaaatgaaagaatgaaactgaaagagaattgggagagagtttttacagtaatggggatgtttacgaaggtgagtatcaaaagggtaaatacttactgaatagctttgctgcttttctttttcagccataacatttcttttcagctactaccatcggaaattcacctgttcttggatcttgaaacctaaggtaatcctaatatttttatttgattatcactgctggttttccatttctgttattttgggcgaaaggtagtcattataggggtcactgcaggcaaggtttaagtcatggaattggggtttataaattctacttttatgcttatgctaggcaggaggtattatgctagagaggtgacagagatagttgatttgcttaagtttcttgattgtttatctcttgtgattggttcttctattggaataactgtactttggaataactggttttgtttggcttgttgggaatttgggaatgaccttccttccaaagcatagattccaaaaatggctcagatggtgggttagcagattggatatttcctttgccaccaggcattggcaggtaagttatcaacttcacctttcttctctctttgcttttgtgtatttgtaattttttgtgtttttggtaattttagaaagctttagaccaatttttaaaaatcttggcttcaccgtgaaatatttgatgagctgtgactctactaatcaagatcgtcatttcggttagaagatttactggtgtgaaagacttcctcttataggttgtttaatgcttacagtcgatgttgttgctgccattgattaaaaaaggaataagattgattttggagtagtagtaagaaacaaggaaggacgagtgcttgctgactagtggtgccttgttcatggaattttatttcatcaccgctgctgaaggccaaaatttgttgcattctcaagtggtgtttgttaatctctttaccaatttcatatgctgaagtagctattaggtgattgtggtctaaataatgcctcatcctaaggatattgttagcgagattagagcttctttccttagtctcattcttgcttatgtttcaagacaagctaatcttttagctcataaattagcaaagaaaaggtactaggactagataatgagttgctataatctccacattatttaactgttgtacttctaattattttatctgtatgaaagttactaattctaaaaaaaaagtcttctcatttttcaactattacgtagtttatggttacattagtttttccatatatgacaaacattgttatttgctgggaactaataaatatgaattttagttacaagttgataggttattaaatgatagaagtttgagattcgcattattttaccgttgcgaagagttcctctcctttatctatatatacaatcacttttgattaagtgacagatgaaaactgagaactagaaggttcttgtaagtgatcttagggtgatagaatctttctggggaaagttcatgtggttgtaattgggatcattgggatgtgtttgtttcttgaaaaacaagagaaaattcatcaaccttctctgatgaaaatcaattgtaaaaaattcttcttgtgtattgaattgacaagaaggtgatttttctgccttggatatagtattgcacatcgcagtctgaaccaagtaaaagctggttgtgttctttctttgttcttgtatttgctcctcatctgatttcttagttctggatattataaaggttggatgggtttaaaacctcacaaaaattccactttcaacattttttttaacctctgaatctctatttcacaaagtgataattttgtgttttttgttatgagtccagagttaatggtttaaattagcttcctttggcgtgtagggtgatccgaaggtgttttaaaagcggaaagaacttggtggcactttctcaatagctagttggatagtcttcattggtttctttgccgggtgagttattgatggattcttacataacacagtgtgaattcatgatgcatttttctaattcttccttgtttatgggattttgatagctctttttcccaaattctatcaatggctccatttgttgtgttgtgctatgttttgtattatataagtccttatcacgtcatattccgccagtaaaggcttgtgcttgtctaattctgacatttgtttcaagtttatttactgctcagtggtttctatattacaattatgatttgagatgatacatccaatttcacttttgagaaattggacatgtgaaacttttacaactaatataaatctttcataatttaaatatagatgttctacttgttgtattatgtcttattgtttggttctttttgctcaattgaacatgaaattgataggaactcagatctgaaattggctattaagtcttctgtactgatactcaaacacagaaaatacaagatagaaggggaaatttgaggatcccttaagcctcccaatgaattctaatgaattcctacaatgacaaaaaaaattcacaaccctactaacctcttttcatctacttatatccctcaaatagctagaaattcctatttaattctataaatttcttaataaaaatttagaagctagccagccattgttttgttgctaatcgccaattggcaggcccaaaattttggatttgataatttctataggtgtaaggttgtatattgaaagcatgtgtatcttttatagtttacaatgaagtttttacattcatttttgcaattaatttattatgatatgtttgtaagtataagtgtaactttcaaatacattaaagacttgaatttcattgtttgttttcattttctattaccttaagaaaaatagactacatagtgaaatattgttcttcaattttgccaaccataggtatatagcattggttagaggccatagtatacatattctagctagcaatacattttaccaaaatttatcattacaatgaccactgtttttcccctagattccagttctgcattgttactaaatgagttggtttgttaatttgttggtgaaatttttgttttgtgatttgactggttgagctctatcaactgaaaatgtagcgagaactgaggcatacacaatacaagattgattagtatatcccattttaataagaccctgtactgttgtgtactctttcttgttctagcaatgtatgattcaactgtattttatggtaaaataaacttccagttcaggtgagatttattgcctgagcaatttagctcacaatggagaccctttttgagtgaaagacatgattggagccttgttcttcttggctgtcttgttgagacttatagaaggtgcaactttgatttaaagaacaatcacaatttgtgctgtgtgatttgactggttcagtcagctcaatgaattgaaaatgtggtgagagaactgagatgcatacaatacaagatttctttagtgataatcaagatgtgctgatgttttctctttcttctagaaatttaggttggttggtggtactaagcttaaaatttaaaacaataccttattggaccaacctgaatacaatctttttcatcagaaaacaattttttttatatttaatttgcttgagaaaattattggagagggtattcatatattgcaaagctcttgcttttttaaaacaactgaacaaccaaattcatctttggggatgtaacaactgaagaacataaacacacacacacatatagaattctatcaatggctccatttattgtgttgtgtcgtgttttgttttgtattatataagtccttatcacgtcatattctaccattaaaggcttgtgcttgtctaattctgacatttatttcaagcttatttactactcattagtttctatgttacaattgtgatttgagatgatacatccaattccacttttgagaaattggacatgtgaaacttttacaacaaatctaaatctttcatatttaaatatatttttcttgttgcagctttcctaagtgttgagttacagaagaagattgaaagagcaaaaatcttgtccgaattcaactgttggactactatctaataggtaccaatattgacttgctcacctatctgctaccaaataaaaaatttaaactaataaaatgttgtctgcattatttctcactatctttcttactttttttaagagcaaaaaagtacatgaagactaggataatgaagcttcatctaccataagaaaaaaaattaataaagaattcagttaggatcattatcttagtttattttttagttgtttgttgaaaatatgtgcaaattaagattatagtttatagttgcaatattaatatattgtctcttcttgatttaagatatagataacatttttattgtattccaacatagtggtcattgggatgaatattaaaattacatcaactttcaagtttgtaaaatgatcattccaaataattgcaactacaacaccttggttgaaatgatatgtaatgagttgaagatagagcttgaatcaacaatcctaaagatagagtactaaggaaaagacgttacctttcatttcacatagtgaatgatcttcagtttatcttctacaaggagttgaagaaaaacgaattagatttcacgaagtacttttggtgccttacaacagagattaccaaattgaaccgacttttttttcaaccagaagtaaaagaacacataatgagttgtatatagaattagaacaagttgaagaagcgacatcaaattcagatgaagaaggaactgttgatatgggtgcagatgagtatagattatatctcttatgcaaggcttgttgccaagcaaataatagacatgggaaatgaagcaaacaacgatgcagaagagatcgaaattgatgaagattcggtaatcaacaacaaaaaccattaagaagaaatagttttgcctcatatatacaaagataaagagacattgaagactgtgttgagccactacgctattagaaaacattttcaataccgtgtgaaaaaatctagcaaaaaaaagttcctagcgaagtgctttgacaaaaattgcaagtggaagttaagagtatcaaggaatggaaacacaagccaatttataattagtgattttgatgatgataatagttgtgatatgaagataagattaaaagatcaatgtcaagcaatcttaatcattaatgcagatatgatcaagtacaaatttacaaacatcaagactaaaaccacggttgcaaatgttataaatgagttgaaaattcgtagaatgagagtcaaatatagcaaagtttgaagatctatataaaagacaaaaaaaagtgagaggaaatgtagttaaatcttactctaaactagctaagtaattttacttgttgcatcttacaaattcaggcttttttgtggaactcaaaacagaagaagatggcaaattcttttcgttttgtagcattgaatgctttaagaaaatgatggttgcattgtattcctgtaatagttgatgggatattcttaaagtcaacatatggaggaatattgctggttgatcatattttttcgctagctttcgatgtggttgattcagagaatgataatttctgagagtggttctttgacaagtttaataagtgttatggtgcaagaaaaaatatgatcattatctctgtcacgaaagcataaaaaagacaactatcaaagtgtacccaaaagtatctcatgggagcttgcacctttcacctgctaaaaaacattaaaagcaaattaaggaaaagctcagaaaaggtctcagatgcattttttgcagtggcaaaggaatacattgttaaaagtttcaagcagtacatgggaaaactagataagattgacaagaggttacgaccgtacttgtaagaaattgggtatgaaaaatgggttcaagctcactctcaaaacaataaatactcaaacatgacatccaacattgtaaaatttttgaattcagcaattgttgaagtaagggacctaccaatttgtactacagtagaatgtctaagaagtttggtgcaagaatggaactggaaaaatctcaaaatatagccgaagcaattctcacaagattgacaagcaaacatgaagtaatcttaaatgataactacagatactcattgaagatggtattattctcaattttaaattagaagttaattaacttgactataaattctaatactaatactttgaaacattaggtgcactaacaaatgatgttttgttcgaagtttatgatggttgcaaaaatacaatagttgatctaagctcgagaatttttacatgaaaaaggtatattactcaacctatatatatttatatatatat

SEQ ID NO: 42041 - DNA, 4160 bp, Cannabis sativa
ggtaatggacttcaaggagaagcagacagtggtcagatggagagatttctaaattaaataatcttgcagaaggaaaattttccagccaactttgagtacacatcgcacggtcaagtctagcctcaatccaattcggagtatccctgcttttttcccacgtaaaaggatgtccaaacatatcttaatcacataatccgcattgttgaacgaccccttggaagccatctattaaccatgttggataaggattgccaccgatttttcattttggtgcagaacattgttaaagtctcccattatacaccaaggagcagtcaaccgagcatgaagagtacgaatgagcgcccaaatttgttgacgtaagcttcgattaggctcaccatataatcccgtgaaccgaaacgattgttgtccttcaaaagtaacgaagccatcaatatgattcttagaaaaagaatcaataaccacatcatttttatttttccacatcaaagcaactcccccaactatgtccatgggcctcaacagtaaaagacccctcaaattgcaaacttctacaacaatcttcaacttattactaagagtttcacataaaaatatcttcgttatttaacccttttttttctcaaaaaaaaaaaaacaagatcgttttaaacattatttcaatcagaattgtaagactttattcatcaagaagtgaaaaatgagtagggtgacttcttgagatatttcactcgggattcaaagcaaactgtacgagtctgagaactagtaagaacaataatatgaaattcatactatgatataataatagatcatacaatcaacttaaacagtcctccaaaaaatttcagacagaaaagcttcaagttttccccactctaaattatacaccacatccatttgaccctcaaaatgtaaggatatgtttattttaacagaaatattaaaacatagatgagtccatatggtgccgttccacacaggtctaaacgccaccagtgacggcagcatgtatggcatctgcaagatgaggaactgttctggagctcagaccagccatgctaattcgcctgaaaaattaacacaaattcagtgctgtctaattattattattattataatatgttatgtttacgtataagaaattgggctactgacccatcggatgtcatgtatatgtgatattctttagtcatgaaggcaacttgttgagaattcaatccagtgaaagtaaacattccaatctgtttgatgatgtgactccagtcaccaggtgtgcctgaaaaacagaaaggaaatcagcagctgattgtgattcataatttcaacacatcagagaagtccaaaatctccggttaagaggtaagcatagggtgtttttattttcacgaataaaacgtatgcttagactgacaggacagccatagctcatgagcaatagatccccaaaccaaacacgctcgcacacagcgaaaatcaagaaagaaaaaggtagcatgagcatccaaattgcaaagtagaagtgctgcgaacaagatccgcacccaacactgtgaaatgttcatgactaacactaaagcatgtacagaattcatgcactaagactgttacctctagattgtatggcatcaaaaagctgctggcgcatgctaatgatcctgtcagccatagccttcagctcaacagtccattcatcgtataagttcctgtggatatgacacaaattcaaggttgagatgagatgactactactttcaaccaaatttgtaagagaagttatcacacttgaattacttttgcgaataagagtctgcttaatatatgtatatgtctcagcatacaatttctagaccaagaaaaataatttccagcctaaaagatagtgaataacattacctatctctgaggatggtagccacaatagatgcaccatgaatgggtgggttggaatacatgggtctaatcacaagtttcagctggctttcaaccctgcttgctacatctgctgccttacagacctatcaaaaatggtaaccatacagtatagtcaagacaagagacaaagatataaatataatatacaactaaaaaaaaggatatagttcattatgggcatggtaatctatgactcatacaatagtaagcgcgccaacacgttccccatagagacccatgttcttggcataactctgagctacaagtaattcaccaccatcagcggcaaacatacgaattggctgtgcatctgcatccagactcccactagcgaaaccctacagaaccaagaaaaagagtacctctcaaactaattgtatatttacaacgtaagagcattatttggtaaaatgaaactggaagctcctgagttgcatgcatgtgatgtacctgataagcactgtcaaagaaaggcaataatgattttgacctaatcagttgcttgatctgatcccactgatcaggggttggatcaacaccagtagggttatgagcacatgcatgaagcagtacaatagatccagaaggcgcagattcaaagtcctctaacagacctgttagtaacataatattaaaacagaacagaaaaccagaagattttaatgaaattatgtgtcacttaccaacaagaattagtattaataatttgtaatgtaatatatggttgcgatacaaataaaagacaaacaaggcaactcgaagacaaggaaggagtatggattaaattacactaacagctagagaaatcaaggacaaatgttcaaattgtaaaaaaacattgacgaaaaatatgtgggcaatagtagatggggttgcaatatttatgaaaaaaagtaacaatcatatatctctgaaccttggaaattgagtccacgtgtttctggatcataatatcggtagaatttcacatttaatcctgacaaattgaaaacttttatgtggtttccccatgttggctggggtatgagaatagtccgctgcaggaaaaggtagatacgattaagttattttattcagcaatcgccaatactttcaaatcctaaaaacacagaaattcgacaagcacatacttcatggtagtgcttagccaaaaattcaccaccaactctcagcgagccagttccggataaacactgaacagtagtcaccctgttctgctgaattgcagggctacatccaagaaagtaggaaggtatcttaaatttattttttacaaaaacacaaaaaggcaagtagaaataaactaaagattcagcaacaatgtgttactggaaatcaacagcaaggccttttgtacctatcagcaccaagaatgagcttagcacttaatttattgaattccgcaagtccaacaataggaagatactccttcacacgtgaactgatgtcaagaatgaaagttaatcaactgcttcaaaaatgattctgggaaaagaaggaaaaaagaaaaaagaaaacttacacgtcgttaacaagcagctgttctgctttcctcacggcattcagtacaacaggtttcccttcctaacatgccacaagcagaacattaataattgtaacacggcaaaagatataacaagtaaagaaaaaaaatgatcacagttcaactactttctaaagttatctaattgaaaagaaatgataatgattaaataaataaattttaatattaacaaaacgacaaggaatttgtaaccaagctaaacggtttaaaatgagatttaagaggacgcaatggagattatctgtacaagattttggtacgaaacactaacctcggttctataagctccaactcccaaattcattttaatcgggcttgggtctttgttgtaggcaacagtcacctgttcaaatattgcaaaacgaaaggtgttaaaataggtagataccgaggcaagaagaggatcaatccaaaaatacaaagaaacatatgtaacaattagtagtcatgagattcaaatacgcatagctttgtttagtccactatatgataatttcaaacgcccctagaatgactaatataaaattcagtgtttaaatctgaaatcaaagagttactttcttcattttagggatccaaaattcaaaatcaccatcattcattttttttgtttttactttgaaagaatataccaaaacaaagcagcgacaaaaaaaaa

SEQ ID NO: 42042 - DNA, 1293 bp, Cannabis sativa
aaaaaaaaatgatgcagagttatacatgctcataattttcttaaaatacaagaaaattttaattcatatacatatatgcagatgcagtaattataataagtaatgcttattattatgactacatgtgtattatatattgggtgtagagtttgcatgcattgtatcattacaaacaagttattgaatcgagacaaattgtgagtgagtacagctaaaccacgcatcttttctaacttccaatttccaataaggatattctgtaacacaacttttcactactcttttctttagctcaaacatccatatttattgctatatccaaattattatctttcttttctttttaattttttattcttcgatatctctgccaaatctctccttatatactgctatgccttcagttttaaacacatcacttatctaaacctctctctctctgtttttctctctctttctcactttctctctttgcagctttctgttatttccttgatcgctttgttaggtgtttggagttaggaaaatggataacaatactatttcttgctcaaacggaaccaagaacgagaatgggaatgggaatgggaatggagttgatggaaaaagctatgctctcaatggttataggaagagttgttggtatgaagaagaaattgaagaagatttaagatggtgctttgctctcaataggtatacattaaatttagtccaaattattacatggctaggttatactcttgttctttacaatttttctcataatgatatttatatttatatatgcttatcttggatatggggcacttctattttttattttaggtgttttctatatatatttttattgtttaggtaacaagtgagtttggtacacataaacattccttttcaattttgggtgaaacaaaaataaatgaagtatggtctagctgtctgccatagtataaatatatatgtatgcatttatatatttttatatatatacacatgtattttatggaagggaaagagaagcctttgagttataatcctagtatcaattaaaagtaaaaacaaactctttttgcccaccaatattgtaatcataatggtcttggagaagttggacaaactcatagacagattaaagttagtaatgaaagttactcaaatacaaacatatatagttaagagcgcattattaccattaatttcaatataatactctttatattttttggtatgcagcattttacatacaggacattcacagtttcaagatattgcattgttggacacaaagcccttcgg

SEQ ID NO: 42043 - DNA, 4102 bp, Cannabis sativa
tcatatattgactcagttttgttttttaatgtttgatcatgcactttggtattagtaaactcccctccaagataaatatgtgctggttactaataataatagtaataataaagtatacaatcttatgggatttatgtatgtcaaaagctatctagtagccgtaggacatgtatttctaatacccgaaacttggtgtaaaatgttcaagtaaactcatcaaaatagaaagctaaatacatgcctaaatctatgacttttttactggtctactatatttttgtgaaagtagcgtttatgatgtaatttaaggggaaataagaggtggttttagtttgattacagtgttgtttctacttctgtttatattatcacttggtactgtaggttttttataacggttgtattgtttcttgcacaggtactcatgaaagtggaaccaagcctagtactttgtcacatgtggtatgtcttggtgataattttcatccacaattccacttttttattcctttagatcatgtttggaaagtgtaattggattggaaaggatgatttttatgatgtaattttgttatgaaattggaaaacttaatcctttgaaaacttggtataatattatgctatcgaatcctttatcttcatgcatttcaataggaagaataaaaagttacaactttgcatgcatccaacttattttctcataatcaactctttcctttatatatatatgcatatagttttttaaatccaatccaatcccacttttcaaatgtgactttagtgttttaagaagtaattgtatgacactggtcataattagaagccaaaaagttcaagttttgaagatgatgttgagatgcctgagttcaatgacgaggatgacttcatctgtcccccgaaggaggcgatatctgaaggttaagctcacactataattttcacagctatcactattttgtttacttgttccattatgcaaagttttccccccttgtaaataggccttaatgatctgcttggaaagggaaactttatgctgtcaaagttttccaagactgatgcatctgaaacactctccaaatatgtcatacttagtattgaaaatgaaaaacaagaaggctcttactcttggtctgccgctagtaaagaagctgaggcactaatgggcctaagtgaacatgcttcatgccattccaagccaaagaaagttttgaaaggtgccatttctttgataattactttgtcacaactttgttctgctgaacttttagttttcactcactttattagaaatgagaaaggaatatactaaagataattaaaaataaaaatggaacaagccttaaagttgatttattttggaatacgggggtcgtatgtgctccatttcctataatttgcaagttgagccttatagggaagaagctataattaactaccacacatatgctatatgaaaacccagttgcttacaagatttcatttctggattagttagtacttttacctttataagttgattgtgtttattttcagtagccaatcttttttcggacttctttaattcttaaggttgaactggataatctacaacttcaggagccaaagtcaaaggaaagccaaaattttcttttggtttacggttaaataaggacagactatcttcaccttgtacttctaaagacaaaaacttgtcaaataacatccatgaagtgcctgaaagattgaaccaagatgagttagctgctgagcttcctgaagatatacaaggcgaagaggaaaatatgtcagaaattgtgccttttgaagtagaggctgttaaacatggatgctgtgaggaaacgatggccgctcgcttagatggcctacaggataacactagccttctgagaagaaattcgaaaaaggttttgcttgcttatatataattttttccttctgattgtctccaccctggtttgatattggtaaattttgcagtttggtagtaatagaggaaagaaattccagcgtgctgtaaacagtgtaaagagaactatatgtccattgggagatagaattgtgaacaatgaagacttcgctaatctcaggggctgtagtggatcatcaagtgatagtgaggtatctaattgttttttttaatcttgctaacagcgaggtatctaattgttttgatcactgtttttgtacttttttcatgttaaaataattgtctattttttatcactgtttttgtacttttttcatgttaaaataattgtctattttttatcactgtttttgtacttttttcatgttaaaataattgtcaatttatcttaccagtattcttccacagataagtggtaaggacttagagctagccattcctcatatgaaaaggcaagccatggtagatcagttccaggaagcattgggttctaccatattgaatgataatatggctttacacactgggcctaaaccaccaaggtaaatgatgtaactacagttttccagttataaaatgcagtttagggttggtaagaaagagctcactgtgaccaagtgatggtttcttactaccaaattttgcagaagtggattattttggaaattgcagcaggtcatgcagagcgaaaaggaacaagacattgatttcttgaagacattagggaatggagtgtaccgaagtaataaagctttagattagttttacaactaacctgcataaactacttatgagcaattacaataatacttttgtgcgttgtttttgatgtatgcttttactattgactattgtttatctttggctccttctattattgcctgcttcagatgaagctagctgtgtttattgtaaaatttgggctagatacttggaaggaaagctggtagtttgtcgttgcttcttcagcgagaaatttgaggtcatatttgaagctaattttctaaagttttgcatgttaactccttaatattgttttcaaccagctttgtctcctgcagagtttctcattgtcagagacagccctcaaagaaatggtagatgaaggaacggaaaggacaatcattttcaacccgagagtttgcaatgacgtcgaacttgaagttgggaattgcattcgtatctactccccgtggtacggagtaaaattcaaaatctttgttgtttattagtttattttataagaagtttgacctgatatgtcttgctccatgctaggctggtagtgttcttaatgtatgcatttaaagtagttatgatttgatcatttactttgttgtattttattaattccaataaaaatgggtaccaattttaatgttgaaacttttggacaggaaggaggtccaagcgggcaatgacaaaaacattattttagctaattatttttccaccatatcggtcagttcaggtttctcaaaagaggtttgatttgcttttgtactgcatttccttaacataatatgatgaagacaaaacgaacagatgattagcaaaatctatttctttcagtttttcttaaaacaattattttcttaacatacatgtaccttgtcttagaaaaatgtaactctattggttgggttgggtggataggttgtgtaatacattattcaaattcttgtttgttctctcattcttaaaaaatggaacctggaaatctgaatactggaactcttaatctggttaggtatttgttaatggttgattagctagtactcatttaaaaacttagtttttaatcttttagtttgtaaataattggtaggcctaccgaatttttgatccacctagatattgacctacttcaccacttgttcttggccttatatttattgtaaattgtagtgctgtcatagttgactaataactaattatggcttaagcctcaagataaccactttgaaatacaataattagaacttttatattattattattattagagtgtttttttaaagcatataatatactagtttacacttctttgatttgcttaaatatcatgtttatgttattgggtgcttctataacttctatataaaaagagtaataatgtaatccattcatcattcaaataattttaattatttttattttttattttatata

SEQ ID NO: 42044 - DNA, 1135 bp, Cannabis sativa
cccccccccccccctctttgtcaagaaggaacatttctaaccatccatcctctttgtacatttttcaataagtggcctccaaaactcaattctattaggggatccccgtaaaggcattccaagatattttattagcaagtttcctacctgacactcggtggataaagcagacctagaaatcacgctctcctccaagaaaatacctaaatatttgactctttctcatgttaactctcaatcctgagatcgcacagaatgcattaaccactaaaaccatattactcaatgacatctcgccttttacaaaaagtaacgtatcatctacaaactgtaaatggctaacttggatcttctccttccataccaagaatccaaataacttcttagactctcctgatttgtcaatctttcttcctaacacatcaccactaatataaatagaaaagggaaaagaagatcaccttacctaagcccctagaacccaagatcttttatcttggttttccatttataattatggcaactgaagttgatgccatacattccctaatccacttcctccaattttctttgaatccttaacctgagtcatattaacctcgggttacttagttccaacatcaatctcttttcataatcatataaatcacgagcctagaccaccaactagcttaagcgatcaccccctacaagagataagactctagcaaacccaaaaagcgtaaaccttattacttgtagcatcaaaaaaatataacagtctctttggtacaacttttgtcatcataacctactccacacttaaagcacatataaagtaacaaatcatagtggaaaggtagacaaatatttttactttcactaggaataagaacatcgtacatagaggtgtaagaagagaatgtcagattttatactaaaaatacctgttagagagtcccacatttctaatgtgtagaaagataatagaatatataagaggaatgcgctactcctcccattgccaattggttttgagatggaacctcatgcaccttattatacactcacctattctactacctaaaccatacacttttgcatgctaacatggtatcagagcaaaaataaacaaaaaaaaaatctctagcgacta

SEQ ID NO: 42045 - DNA, 665 bp, Cannabis sativa
tatttcagcatatcattttgggcttaaaatttgattaagaattataataacactgtttaatatatatagcatatgtacgtagttattagttactacatcttatgataatctttgttctttaatctatagagaggtttaccaaagataagtgtacaattcagcctagctagctggataattaaaggatgtcgtttagtgcaactacacttattataaataaaaaagttcagcttaattaggatttttacccacttaaattttgacatatattaaattatatttctaaacttttaacaccgttaaaattccaccttaaactattgacatgattaaatttaaagactttggtccagttttaataatgaaagtctaacatggatgaaagttcagacaacatgatttggtatatgtaaaaatattttcatggacaagcgagtgaaaaagcagcttaataatttattctctaagatgaagaatataatttaatagacattaaagtctagggataaacaatcattgaattggtaaaattgtatgaaaatggacaaaaatccttaaatctaataatctcaatagtttaaaaaaaaatttaattgccaaaaaaatttaaaaaacatagtttagtaaataacaaaatttaggagagaagaaaactcaaaagttta

SEQ ID NO: 42046 - DNA, 2520 bp, Cannabis sativa
aacttcaattttggccattcaattgattgaattatatgtacaaatacaattcttctttttttttttaccaactgtggaatatatttttctccttggttataatttataatctacttttgcttacctactgcagcgaatgggaaatattgatgaagctgttcctttttttgggagtgagtttaacagaatctatccacttattatggttatatacacgcttttggttgctagcaatttctttgaccgtgtaaaaaacttttttgggagctggaagagatttagatttcagaccgaggcagatgatatggatggctttgatccttctggagtaattatcctgcagaaaggtatatataaccttaactttaacaatttattatgtatgcttgtttgacaattccaattggagactggattgttgtgaatataagaatcgataatcttaattttaatgcttcaactaaagtcattcaaaatttctcagaaagatcttggcttgaacaaggcagtgcagttggtgagcatgttatcccattggcaaggaatttcaacaatgatgttgagattggcagcaatagcacggtatgtaatttgtcagtctcttattttgttttttgatcttacgcatacatacgttccaaccttgattgtaaattttttcccctttctctttaatttatcttcacaaaaaagtggtgtagatacaatgatagttactttttcttacttgaaagtaaaatgttttaggaaaatacctccgttgaaatgaaaacatcaaccagtctaatcaatgatgctgcaaaaggaagtgcatcaaaacatctgaaagaggaaacccgtaaatatggctccaacagagaagccatgagcaacaagtactcagctatgagagagcaaaacaaacaagtctcagctaattcaaagaagccagtagagcagcagagtattgcatctgccaaggtctcgttgcttgatgctgacaaacctcaccctaataaccaaactggagtttcatcttcaggtctggccttaaagtgggaatctatgaaatctggttttcaaaatttcaaagcaaacttaggatccaaaaagttccaaccattgcgccaaattcaagatactaatctcatctctcatgtttcctcttccgagtctcttgatgaaatatttcagagactgaaacagccatcggtgtcagatcataggagttacagtgatgaggatgacgaagatgagattgaaattaagaattctggctcttctagatgatattcaacatctgaggtaagtttgtcactgttacaagtcagaatttaagtcttagaatgtacaggtcctgagtgaggacttataccgtgttcttgtagcccttgggctctgaatattatacaagtgttgggagggtatccaattgtgtaactacgcaggtttggaaccagctaataattagttttctcagaaacaatactttgacaggaaaaagtaggaatattctgatgtgtaatataggtggaaaagtttagaaagaacaaaaaaaaaaaaaaacccgctttagttggggaattttgtaattgatttatagagcagaagcatattttggtaatttgattctcttccccggctggaaactcaagaactgtaaacatgtgaccacaatggcaattattttgtattacaccaaattcatgtaacgttttttgaggattgagtttacttttctataacaattatagtgtgtccataaaaagaggcaactcaggggttgtcaactgacgtgcttttcatagaagtgtacatctatatatatatatacacataataaccaggtggtggtgactggtgagtgcagttaaacacattcaaggcatcttaaatttattaatctactatactaatgacctctgaatattgttacacctaacttttcaagattcagaaactattactgtttttgccttgtttatactttatacaataaaatcatggaccaattttccgttcgttattattattattatcctcggtagaagggcattgttcaatttattttgttgctttagttttgacgatttctcttatagttatcaatgaaaggcacttgggcttttgattacaatcgttttccttaaaaaaatttattattttgtctaactccacaaggtttccagcctatattacgtcttccacttagaatttggaatttctaaaagataatgttgttgtcgaattggaacaaattctaaattgactacttcgaaggtatggtcattatcttcgtttttcttaaattattcaaaataaaaaaataagcattttatagaccaaaatcttaggcacacagaaaataaaactagaaatatcaaatcaagtttccaattttatccaaggattcaaagatgactgaaagtctaatcacattttcgagtcattttaagtgtacaatgatgatagtaacccaacagttaaatttttatgcaagcaacccaacaataaaactttgttttcattagaaagaatgaa

SEQ ID NO: 42047 - DNA, 1422 bp, Cannabis sativa
ttgtccatttcttcatcaatattcacatttgatttctctttcttgtatttgattgcatattgccaaagattcttcaaatcatttggggtcacaggtttcagtatgaaaagagccattccactttgtgcactacgtagcaatacagtttctctgtcatccgctgacatcactggattgtaataaccaataataaaaggcaaattaatgagataccattcgtgtatatatatgatatataagtatcaataggatagttttctataaattgatcacatttatctaaatttacacatttatacaaagaagatgtatcagatatatcaaataggcacaatatcaatatacaatgtatccggactgagtcggaaccctagcagaggcactcaagaagaaaagcctaacatttacccgtcaattgccttcgccatattcaatgtatatgagtttaattatcaaatatacatgaatgtatcaagcataaacataattacatatatattttaaaatatgagttatcataattttttaaagcttttaaaaacattatatatatgaaaatatatattttttatatgtaataatacttactaataactgggagttgaaattctttatcaatttgttcctgtaactgaaaaccattcatgtaaggcatatgaaaatctgtaaccaccaaatcaattaagcctttttgtgtgcgaagagttgccaaagcatccagaggatttttcacagtcatcactggaaggtaagcaaacaaaattggttgaatcaaaatatactaacaaaaaaaaaaaaaaaatataataattaataataaatatttttagatattcatcacgaaaaaaaaactaagtaatcaagacattcaacaatatgtatagataatagagtaaaataatgcaatcaaatacatgaagttatggaatagtacacacgtttgcctatttaaacatgtttataataggatgagcttaaatagtgaatattacatgaataagtataaaaatagtaattaaacacggtatttttattaacatttctcttcttcataattaatcaattcagaaacgaagagaaatttttatttcttagagaaaaaacaaaagcactagcaataaggatttctatagttatataataagccacgaaaggaagaaaacataaatgaaaagttaatttcaatatttaaaaatataaaatatgtatggatccattttatctaattatttaattaggattttaaatatataattataatatatatctaaatagatataatatataagttatttttcaaataaaaaatagagatatcgcatggctttttttcaaaaaaaataaaaataaaaataaaaatctaaccctagataccattaaatacataaaatttagggcctttttcatttttatacttcaaaa

SEQ ID NO: 42048 - DNA, 1087 bp, Cannabis sativa
tccatttgacaattgtaacaacttatccctatctttgggaatgttctgccaatacttggccaaatatccagcaccagcagcagctgcaacaagccaaaaatccatttttgatcccccttccacaggaaaaacattaccctaactccaatatttcatctttatttcaattctcagccctctccaagaaatgcctgagtttggaatccaaaaccctcttaaaattttggggttataaataatagcgaaatgtaaactttagttgaaaccatttccttggattgaatgtaagaatcataagaagaaaaaaaacatacgttccccagcctcaaattagcttttgaactctcaaagatacaaaactcctcagaggtggattaggaattaatgtcaaaatctttcgctaaaagtcagagaccaatctctcggtccccaaaacgattatcaatcaagtatacacgaaaacagatacatcacaacacaagtgtccccaagtgaacgagttgtggtaaaatataaaaaagactaagctctacccagatgataacaatcttgaaactttaaaaaccatcaaagattaagctccatacctcaaaagccaccatcccagaaccactatagttaaacaagaagggaatgaataatccagctatacccttttggtaaaagactttgggctccaaaacgcatcaatggacacaactcatttgagatattagcacatacccagtcaagcaacataaatgataagaaaaacaagtaaataaataaataaaataaaaaatggctatttatgtttaggagtttgtgtttatgaggcaaatataaaagatacccaatttcctaaatcttaaatggactgtcttaggaggaaaaggagaggacccgaccaccctcacaatgttatctaaacgaacaccccacgagttcttcctcttataaaagaggggtttttaaagtaagtaaaagaaaggaaaagggatttttgcaatgtttatttcaattaactattttttcggtagagaatttttcccatttctctttcaagtgatgtacttgtgtgaagtggtatggttttctttctttcttt

SEQ ID NO: 42049 - DNA, 860 bp, Cannabis sativa
aatcacaaacgcttacagtttacaactgcaaggactgtgccccaaacatgttaaatgaaaagcttaatacttgaattgaacatagaactgataaatatatatacatacctcatcgactacattgcccccagaatccacaacaacaccatactccacaacgtggctggtgggtcgccacgagccagaactccgattcttcctcttcacttttctacggaacacacgccccacaatatccaccgcagaggaacccgacaaccgaacaatgccaacagcacctgagggacccccagtgggcgtcactacggcggcaatagtggcggaaccgccgtcatccaggcgaggctttgagcaatcagtggaagcccggtcgtccggtttgagaggagagatgaataagtgagttggagtggtagtgagatggggttgttttggtttaggggttttagaggagatgggtttggaatttgaaggttgaaagagggtagagagagtagtggaagtgggttttgagaggtgaggcagtagtgaagctatggcagctgctggtggcggcgttggtctgtaccagtgactcaggagtgaccggaccatagccattgctcgttactgaaaactcgaggttttctgtattagctttatatccttcttttatgtcaattcatttttacaagttaattacgttacggaaaggaaatgttactttctttacaaatttatgacattttttttttttctaatttatttagattataaacttttaataatatttatatttttttaagtttttatcatcttgtttttagccataataaatgggaaatttgaaattatatgcatattagggattaaaattggta

SEQ ID NO: 42050 - DNA, 682 bp, Cannabis sativa
ttacttactcgtaaaaccacctatactgtgtcggattcatctcataaagttggttcataactgtcctcacagccttgtacgtgaaatagttgagtatttgctgcatgcacacattattaattcttagcttagctcgaaatgcttataaatattttatgaaagataattattctagaaaactatgtatgtaatgtatcccagaaagcttcaatgtccaaggaaggagcttgttgaagatgcaaaccaaagtcaaaagtgcctgcaacatatcttagaatgcgtttgatttgcaacctaatgtaattgtaagggattatgtatgaacttgcagactttgttgacagtatatggaagagtgggggtatgtatgtttgccctttcaattatatgtcttttttaattactagccaaatataattgtacataggattctttcatatatattagatacaatgatgatataagtcaagaaatagttaaattttcagtcaaatttaccctataaatgctttcataaacgtacacgtgtttatgctaaaaatgaaatttcgatggtggaaaatattaaaaatatgtatacagtatgtatcctactaattataagtatatgtttctgttatctgaaaaagaaatatatatacatacaactaagaaatacgtataactattaaatattgaacac

SEQ ID NO: 42051 - DNA, 3875 bp, Cannabis sativa
  modified_base (1252)..(1254): a, c, t, g, unknown or other
acaacatcttcttgttgaggtaaagatcaaaacagtcttgcgtctaaagttggaaactttgtcttagagaaaattaatatacatatataaatcaataggtgatgaaaagtttcacttcaggacaaataaaaaaaagactttggaaaagtaaccactactaatgaaagtgggtgaccagaccagaccaaaccaaaccaattaaagagatgagctagttatatatagcttggcatataagaataaatatatctttttctcgttgttgattattattattattattattattaatagatacaatttgtgaatcaaatgagaggatcgaaaggaaggagtcgtctctaagttgagtggttcttgaccaagaatccaatgcaaagtcatgagtcatgggtaatatatttaccatttaggagcttaatttggttgtcaaaatcatgaccgcaaatggtgcctatatcacgcactaaaagtcatttttgtgtgcagaaacttacagccgtcgtaccccatttcttgaaatttggttttaaaaaaagtaggttatcattgtatagccacagtaataatagtcttgctagttttgtaataataagtccaagttttctccatattaaaattttattgtgtgattatttaatagtaattatatgactgttatttaacgtaacgattccaatcatagatcatttcgttatatacatgcatgatttatatatatatatccaccgaatatcaaatgacaggctaaaaagataggagaaattcggtcacaatttttgatttattttaacccctaaaaaggttggacagccggatctctaatcataacttaattttcgattcctcaaacgactttatgtgctatgctgtatggcctatatatatatatatatatatatgatatcataattaagagcaaaaccaatatattgctcatatcccatcttgtctcctaacttgtccctcccaacaatattaccaaccacgctgtttataatatatgtgcatgtttgacgagccaatatgtaaacatgtctttggagagtgaagttatagtagagattttgctcatcacgcccgaccctgcaggcaatcatggtagtttcttgatccattaaagcaaaagggtaaaataaagggccttgttgtgttgtggtgatgagttttgacacacaacctcaaactcagcctctgagtttgagttactatgtacaatcattatatgtctctcactctctctctctctctnnntctctctctctctctacatatatattactgtccacatcaagggaaatgttctcaagaggaatttatatgaagctcaaagtaaagggacttatatatattatatacatataaaaccaatgtttgctagttgctacgtcttggtagcttttaaaaataagatttactgctccacgctggtacagaagctaagcctgaaagtacaaatgccactcctaccaagacataaaaagatggcttgggttgggcttaaccactagtacaacatgtatgtgtagtttttttctttaataattatattctattacatttaccatattaaaaataaaatatatataaaagaataatactttgaacctgtgaaaaagagcaaaggttgcaaggttatgcccccaaaaagctggctagtttcagcttgcttagctaccatataaaataggctaggctaacttttattattatttaatttatttttgataccctatattgtgatataatacatttgggtgcccaatattgtgatttgtaaacatttttcttttcttattagtttaaaagtaaataatcaaatagttatttttgttgaaatatgtgtgttcaccttaaaaaacaaccactctctggtatacaaaagaaagaaaagaaaatctaactttgatgagtagatctcatagcttaaagctttaatgattagtattcaactatgataaagtataatgtttatgagtatttgcatatgccctttagcacatggatattatatattgaaaacttggaaaaacaatgttagaaaaatgtgttactttatctgaagtaggccaggctatatatatctatatttatatactaatagcaatagcatttctgttcagtctgacaaaacaaaagagtataatcaaatataatcgacacaaaaaaaataaaaaaaataaaaattccagctttctgtgctaatgggcagggttaccctttgattccattcttatgatctaactgagtcactttgagctgacaactttgaatcaagaaaattttactctgttttcggaataaaataggtttaaacttgagaaacaatatgttttgcagtgaactagaaaaacaaccaaaacctcataaaaattgatgttatatagttttaaagctcaaccactcggtcatgaaccagcatgaaatatttaagataccccatgtatattttattagttttgcattaaatgtatacaaatataccattgaaagagtgctaataatattgttagtttaattaataataaatgagaatatccatgtagttttttattttatttttagagaaaaggtaataaattgtttttttggcagatgcttgtaagtatgaggataagatttctgtattgactaaattgagaactatttttgtatattttgtattttttttttaaaaaaaaaaatccaaactttttcaagttttcattcaatgattctcatgacctatcagtccataaattttgttccttaccaagacattggttattggtattatctccaacaccacaatcactaatatagagtgtgaagcaaaagcaccactatatatatttatatacatgtattgtcatcatacactatcctctgttaccattaccaacttgctaaaacaagtgtcaatcttttgaaaagatgcacaaacatactactttaaagaaaaaaaaactatttgatcacttcaacaccttaagcttagattggttattctggctcaatatataaaccaactgtagtaaattaaaaatagaaaaaaaaaaaaagagtaaaaacaaaaaacccttgaaaatacaaaagtggtggtgcggtgtataatgtgaatattataaattgaagaaagagaaaggactactaataaggagaatagtacataatcctaaaaacctcgtctcgttccatgagagatatttttcccattaaccaaaattgccctgacccaaacaaacccccctctctctctcttggttttgaaaaataaaaatcactcttttcgttctctctctctcttcactctctctcatgtcatgtcatgcaagtagcaccctaaagcctttttaaccccttcaccccgcgacatttgtaatccgtagccagctcattcattcaacccattcaccaacctctctttctttctttgtctctctctctctcctcttcttctctctctaaaaactttcaacgttttctccaccagatctctcggagtgaccctttggagatgcgtgccttgtgagcctttttcacttcgggtggttttcttctggggttttccgtcaatcccagatatataaaataaccccacaaactatctcaggaacctcttcgattcttttgggatttgactttgtttacgggttttgattttttgattcgattctatcgttgaatggtttgtggggttttgggtggagagagagcgaaaatggcgaatggggtcgagagggaaagtgggttagtggtgttgtttagcgatgaggagctgagcgagatgagtggggttaagaaaaccggagaccacatagaggttacgtgtggctgtacaagccatagatatggtgatgctgtgggcaggcttaggggtttcatcaatggggacc

SEQ ID NO: 42052 - DNA, 2133 bp, Cannabis sativa
tttaaatttatttagtaacctaattctttcatatatatatatattagggaaatgtgactaaattatgtaaagtcaattttcaccttcataaaaaaagtactcataatgaactttagactgccaatgatttttttaacgtctcaattcagaaatatctttcggtcggtcggatcactatctcatgttattcccattccatggtgtaatgcaacgatctattattaaaattttggcgataagaaaactgaccaaaatgctcagccacatatgataaagtgatacagaaaaatatcagatatctttgagccttatctctaattaattatagcatgaaacgcagtgatccaataataatgataaaactacaaagctgggaacatagcacaagaataacaccctggtaagcactttaaagcaaatcaagattatgtttcataaaatgaataaactacaagacatggtgatgtacgttgttggaaagatgggatgtaatttgtttctcaagtgattaaactactcgtacgcacaatgatatttctcacccaaaactacccatctttcagaattagattttttttcttaatttcttcttttgaatgatacaaagccttgaaaagtttgccttttccagaagatagaattgctttagaaacgatgccactatgtgtgaagctaaaatggccacgtatattattataggaagacataaatattttatatctgtggatgaccttgtctctgaaacttgaatcacatgtgatttttatacacatatatactatattaattatataatacatcaatgatcaaaatgtagactaccctagttatatacttaaaaagcaatctttttattttcctctgtgttttatgatcatgtttggaagctgtattcgatgaaccttggaatatcggatccacatgtccatatctcttatcttatctcatcctttaatattttctttcttttttaaatttaattcgaataaataaataatagaaaataaaaaccttagtagggatatgatgtagtaggttattagcttagctagtagtagaagtagaaatcgtcctgagacaggcaaccaattgaaggctacacctaccatcagatatgttcaatagttacgactttttgggtacaatggggtgcaatgggggacaatttaaggccctgtcccataatgtctcgccactgagaacattacttgctgagttttagtgggttcaagacatctaggctcgaagccaatagaattaggagcttttaccaaaatggacaaaattttggccacttcacataaaatatacttaatcatgttatatgtcagttaaaatgtaacaattatacacaaagtattataaaataatataatttaaagaaagaaaatagagaagagaaaattttttgagcatgatatttcaatgtggtgattctcaatttatacgagctatagatttagaaactaaagaaaagggcataacaattacaattaatggtaactaatttgaagtgatttggacatctgcaaatatctattatttataacactccctcgtgtaagtctataataactgcctcattaaaaacctcaccgagaaaacccagtggaacaaaacttgatctagagaaaacgagtgcattatgaaattactctggctcatgttgccattcttggagatctttgaagcgacagattcaaatcttgtgaactattttctcaaaagttgatgttggtaataactttgtgaataagtctataagattatcacttgatcaaatttgttgaacatcgaaatcgtccttctcttaaagattgtgtgtatagaagaatttaggtaaatgtatttagttctatcttctttaatgtacccttttttaaataagtgatgcaagcagcactatcttcattaaaaactgttggtacttctttattggatgttaatccacatgttcttcaaatttgttgtttcattgatcttaaccatatgaattctcgacttttctcgtaaattgcaagtatctcagcatgatttgaggaagtagccagcagagattgctttgttgacctccaagatatagtagtgtcaccacaagtgaacaaatactttgtttgagatctaatcttatgt

SEQ ID NO: 42053 - DNA, 759 bp, Cannabis sativa
tgaattgaatgtatatatagttagttgtctttatcataagactaataaaaatagtaatatatatttatatagtgacaacaaatgtagcgatatcatatgatatgaaaatatatttcatatcatggttaaatatatagaattattaattatttaatgacaacttattattaatttgttatcatatgaagtattttggctgcagtgatatatatatatatatcttaattcaaaccaaatatattgattaccaaaatgttgttaattaattaattataataagttaatttgatttcaccatcactcaaattaatattattactaataataaattggccgagttcataaacattcaatacatatatacgtaaataaatattaattaatatgcagataccaaaagatacataataaatatacattaattatttcataatattatatatattataaaaaacacagacacacatgcatgcatattatatttatatatataatgaatgaattaaattctaaaatgaggaagagcagaattgccatcgagtcccttggacctgtaataagtaagataatcaaagatagtagtttgtgtatacttaggaggttcttcctcagatagaaactctttaatgggtccatagggtttgtttctgtgtgtagcacttggatacaagaaacatgctgctgaaaccctagctccattcttcatcgccaccactctgtgctccacacttttcaatttatcgttcgttattaactaca

SEQ ID NO: 42054 - DNA, 2506 bp, Cannabis sativa
attattattatgagattgattttgatgaagtttaagtagctctacttaaggtcttcttaatttataatacaaaatataggacaattctgaccaagtctatattatgatatttagttttttttattgtcaaattgtcatttgatagttgatatttatgatatttttctaaattggtttggttttagatctaatttggtaaatttaatgaggtttgttataattctaaaaacttggaaacgacatgaatcttaagaaacgacaacaataatattttgttagtgaaaatggaagaggaaaacgacaatgttacgtaaaaacgacaatcgtataaagtctgaatccgaattcggaaacgactgaaaaatcagttacgcaaaagaaaaatcatcgaacgacatgaatctctggaaacgacagaaaaccaattttgctctaaaaacgacaacaatttttttcttgacaataaaaacgacaacaaattttacaaccacaatttcacgaagaaaagagggtcagctattatgcgctaatagaaaatacaaaaacgacaacaaaaattggcaagtaaaagtacataaagctgctcattccagaaaaacgacatagaaagattggtgttctaagtccaaaaacgacattggaacatgttgaaaaagaagagccaaaatacccaattttttaatcttgttttcaaagttcattttatattgtaactcatacattgacttaacatgcctttaggtaaacaatcgagctttattgacttctttccttacaatcactttaacaaaacaaacataattatcaatccaaacttagattactccctttaaattgtgcaatacaattggacttctaacactataaatcccatcaaaccaaaccaatgatgcagacaccatagaattctctgataaaccacttccattaacaatcaaatcataacccttttcttcattaagtgacttaaaagaaagaacttcaggcactactttgacaccaattagtagtgatgaggaatttgataaggtaattttggccttataagttgagtttccttgaccaacattcttaacccttcttcgaaatcgaatactaaacgattttcgaacaccaacttcggctgtcattgaagggtaattgagatcttttggtgatcttttgtgaagacatgtaatgttattatgtcctgttatgagtctaactctgttattatcatagccaatgctgcataaaaactctatgtagtcttcttcaaatgcttcataaacaagtcctggatttatagcttgtaatgggttgacatgtccagaaccatgatcaaattctccatatgattccttagtgttattgctcatcaaccaagctacaaacaaaggagaatatagtcatttctttttcgtcaaataaatatgatttttttccccgaactataatccttatagaatttgcgatgtttcttataatttgggggaatttttcccccaagaaaaaaggtttatgatgcaaaactctataagggttatagttggggcaatgttatatgggaatgtgaagagtaggaaaaagttttggagaagtacatacatgtggtcataagagatgatttaatggctgatggagaccaattagggtgaaatgttttgacataggctgcaacaccagcaacatgtgggcaagccatagaggttccggttagtatgttgtacttaacacgccttttatcatcgtaaacttgtgttggtgagctttcgggtgagtatgcagccaatatggttacccccggggcactaatatctggctgcaaacgagcataatgggattccatctcaaaaccaattgataataagctaagttacaaaagagagatcaaaaatgtaggaattaaccttcataatatcgggtgttataggattaggcccgcgagatgagaaagaagcaacactaggagctgcactgtcctttgtgaattcacttcttaatattgttgcttgaggattcctagaaagatgtcacaaaacacccaatgaaaacttatagtagttgtttggttagtgggaaaattttgatcaaggtagaaaataaaatgtgcttactttgtggaatttagataagataagagcatgatgtaatctgaactgtttaaaactgatgcaggaaatggtacaattgaagaaaactcttcaaatttatcaatggtggtaatgcaaccaagtgcaccagcattgaaagcctcatttgttcctctataaaagtcacaaagcacaatcttccccttgattaaattagtgtctagacacccatctgtgcaaatactaaacaccaagaaaaaaacacaagtatttttcttcatattagtaatctcgattcgaattattcgaggcgaaaaatgaatggttttttaccttgacatttcacttgagcacttagttgaagtgtcttttccatgtattagaggaaatgttgtgccatttagtttaaaagaattgatagaactcccctattt

SEQ ID NO: 42055 - DNA, 557 bp, Cannabis sativa
agcaaatcataaaggaaaacagaggaatattttttcatgtagtatgggtaacatttagctttagggctcccatatttttggggacatgtagtctcatgtgaaagcacatattaaaagctcgtacaaaagactaataccagtcttggttgatacttgatagtgacatgtgtgatataatgtatatgttaatgttattaaagttgggttctttgttatgtaatatagtatttgaaaatgttctattctatattagattagattgactggactagcataatatataacataatataatacatgagcaattactaagttagtatccaaagaaacataattaacaaatgtaaaagatgatatagacttgttcataaatttatataatcaattatatttttaaggtgacattagcttatagtgacataataagtgggactctcattatgtttcttgtgatgtacccatccaattctatatgtgaaaattgaaatgtattagattaattgagaaatgaatcaggcttcatgatcacaaaagtattaatattagtgatatatata

SEQ ID NO: 42056 - DNA, 1902 bp, Cannabis sativa
tcgggtacatatttttataccctaatcatatcctaaaccctaatttaacgagtaataccctacacatacaagtagggtacccttaggtaaacgagttttcgaataaaactacaatccctaaaaaaatatcaaaagtgccatatagatagtgattaaaaacaatcacactactatagtggaaccctatacaaataatcacatacatatatatatatacacacactaaaaagcaaaaggggcacaagacattagtaaacaaacaatgttgtgagtgtgtgtgctccacaaaccccactacccaatacccattggatatggtgacagaagcaccatgaccaccatgcatggagagggagcattatgctcatgtgttcaatggattttcccaactgataagactgaaaatgaaaagtgcaatagagaaaactatgaagaaaatttattaaccattccaaagagatgaaatatcaaataaacaaggcataataagcactcaaagagtagttagtggcaacacacacaacaataactaacttatgttcttagcaatacaaaatacaatattacataatgaaaatatgaaactacttcagtctcagcctaataatgttgtaatgtctctccctgctttgtaaaagatcgattctttattcaacaaacatggaagaagaaccataagaagcctcggatacagtacagtagtactaccgaacgctaaatattggatattattatcttaatcttgtcaagtccacatgaagaaccataactgcagcggtagaagaaacgagcgagttttgatcacgattactatgatgacataattcagatactaatttcggaaattcttaactccatgcttctgtacttcaaccttgagagactttaagtactgaacagcttcgtctaggacagtgacggtagtcatgtcattaccgccaggtacaattcctcgcaatgctttcaccatttttttcattctgtgtcgtttcctttcgctgttggagctgctactgccactgtcagaagacttttgaacagaagatgatgatgttctattcttcttgttccttgtaccataattggaacaagattcaggggatgagcttccataattcccgtaagttcgtgcagtgcttagctcttcctcgtcgtactcctcttcttcttcttcctcttccaagctcagcaatgcatcgatatcatctgagtcttccttcagagtagaagacagttctccaacctcattattattcctatcaattcctccgaaatagccttggacacaagctgagcccatgtttaaagcaggactaccgaatttgttggcaatagcagggtggaacataatttgactgcgatgatcagtctgatcaaatataatgaaattcttggggcagacctcagagggttgaaactcaacaccatgaaaatgtttaaggtggttaccaccaggaggtaaagctgctgccccgaaaccagatgcaactggaacatgcatttcattattgcccgcttgatagtcaaggggaggtggttttttttcagtgtaaaattggtggttgcgctgcatcaggattcaattagtagatgaacgttcggttttcagctttttgagtagacaaattattaggtttcaactggaagaaggttcttaagttaaacgcgagatcacaagacttatgcaatgaatgaagaagttattgccactcaggtacagtagagagccaaaatactataagttcttcttatgtataaacaaaaccagagggcagtccgtcccaaatcccaaagtccgacgattacaaacagactacgtcacaggtttaagcaattgacggaaatactcagcctgcaataaacaagtagtatgtaaccaacaacacaatgcatattctataa

SEQ ID NO: 42057 - DNA, 1244 bp, Cannabis sativa
atattattacattgacttagctaaattaaagtcaattaagcacataataacattttatggacccaaccgagaatcttggctacaaataagtaactgcattagttttctagcttcacgctttcacaaacctgggcacattttcatatttaaggaggcaaatttctccctcattatatggaaatttaatgattacaaaacttgcattttaaatcacccttatttaaatctcccttagcttacacttaagtctaagaagttgaagagattgagcacaatggccattaataatttccttgtcaaaatctcaaccattgtcttcctaataatcgcctcattactacttctactatccacatcccaaaaatctcaagtttcatcatcatcatcaatagaaaatatttcaacagtatcatcaaaaactaacacttccgatcatcaatatgctgaaaaagatgagaaccgcaatgacaatgaagacgatgaagacgacgaagatgaagagttttacgtcctggacaaggtggcggggcaaacgccggccacaaacgtcgggattaggagtagtagtcgattcttggcgagctacatcataaagaaaggcacgcactgtgaccccaagacgtacaacatatgcaatggagtcccggctaacaaagggaagagcattctgtattgctgcaaaacgcattgtcgtaacgtccttggagaccgtaacaactgtggtagatgtggccacaagtgcaagtttgaggaccgttgctgtaatgggaaatgcaccaaagttttgtttaataaacacaattgtggaaagtgtgggaagaaatgcaaggctggagttgcttgtgataatggctactgtggttatgcatgatcatgatcaatatatataaatattgtcatgatgagattttgataagttcataatatagttgtgtcttgatatccttcctatatatgtatgtgcacgtatatacttattctatgtacgtactcacttctctacgggtacgtacggcttcttggatacgatctctgtatctaaaagtttgatttttgtaatttggatttttatacgtaatttatattgtatctcatacaataattaataatggttataatggttattgtttaatatgtgttagtgtagctaccatgtatgcatatggtagggaagtccataacttggagaatatcttgtttttggtacctacatataagaaaaataaaactatatctagatatat

SEQ ID NO: 42058 - DNA, 1108 bp, Cannabis sativa
aataataatgttagtgaagaggacacatgaagcaagccaagcttgtctaatcctgcaaatatggacccatctaattaaatttattattaattaagccatgaaaaaacacaaatattaatggctaacctactcgcttacgtttatgttactcttagtaattatgatttattaattaattaacatcattaactaattttaatttaattagccttggattcccaatcccaaattaattaattactacttaatatcctaattctaccttgctagattgaatatataatatggttatttgtagcgaaatttttttatagtttaattttatacacttaagttaattttgttaatttgttttttttttttttggtaaatttgaagtgcatactagttgaatattatcattaaagttatactaattaaattattagtatatatattaccttcgaaattcggtgatatttaactgacgccttaaatttataaaaaaaaaaataatcctaaaaaaattttgcaataaaaaactaaaataaaaaagtataatttataaaaattacaacataagaaatttcacctccaataactttataatataaatatgttcttcgttttttatataaccatgcacgtcgagtttagtatattgttaattaaaaaaaaatgtttgagttttgtgaagtcaaattcattttaacgtacaatttattcatatttgagctttgttatggggcactataatatcttttataggtaacattttacgattaattattatataagactcaatacttaattacattaatatcgatgaaacactgagaaaaatattataagcaccaatattaccttttgacaagaaaattgctaaaaaatactagtagtgtctaacaccctatttagtgtaattaagtagcgagtcttatatataacttaaaaaaataacttttaaaaagtattgttaaataatcgttgggtgtcacctagggccggccctaagcataagcgggctaggtctgtgcctagggcccacctaactcagggacccaaaaaaattttatccccttttaaagttacacattttttatcaattttgaaaagggaaatttgattt

SEQ ID NO: 42059 - DNA, 732 bp, Cannabis sativa
gtatctatagctagttttctccaacttgtacttgtctcttcaagagtttagccatacatcaccagttcaccactaccactattttcacattcaagtttttagtgcgtgtttcatgtcggaggagttttctctctgctaagagtgctggtcttccaacttgggtgattgatacctactggttttctagttaaagagagttatcattgattcatctgccactaccttttattacttattgtcttttattttggttggtgagtcttttagaaccttaatgatggaagaaagttcgaatattcctgatgacacagtagttgaaaacacacaagacgtggcaaacaatcctaatgacagcattcaggaggttgttgtagaacaaaatgcgaatggtcctacaaatgcggaaaccgaaattaatgatactcaacaggacaacgaagtaaaagatggggagctggagatcctgcatcaaaactttttggattccatgaccattgatctggaaccagactttgaaatcagtgcgaagattacaagaacaacagttttagcgagttttttgatggtaaaggggtatcccgaaatcgtcgcaaagacatactggggaagatttggaagctgagaggaggatggcgtttcaagactatgagccctgggctttggggcattttctttgatatggaagaggattgtgtggagatcatcgacaactgtccttggataatcaatggc

SEQ ID NO: 42060 - DNA, 5276 bp, Cannabis sativa
  modified_base (1967)..(1981): a, c, t, g, unknown or other
  modified_base (2770)..(2770): a, c, t, g, unknown or other
  modified_base (4646)..(4650): a, c, t, g, unknown or other
aattaaagaagaagaagatgataaaagatgagcggaagcactaacctgaagccattgttggagattgcaaagaaggtttgatcttccaagaatacactagcttttttaaagtattttctctgatgtagaaggagagaatacaaaaaccctagtgtttcttggggatcactacctatttatagactcatcttagaatgagtttttgggtatttataattcggcctctcaacaaattataaattaacttatggtatctacacattattttcataataatgtaatactcttttgatactcataacataattggtcacttaattttatattacactttataatagtatatatattatatatatgtgcccacaatagaaatttaatccaacattgacaactccttagtatacaataattagaaaatatggcattaaactccacgacattttgtgacaacaaaacatggactatatgtccctctcattatcagctcatatctctagctacaccatgatagcaccacatcctcgtgttgccacaaccattaacatcgtctttgttattggcaccaacaacaattactaagattttacacatttctgatttattgtcactgctccatttgtttgtttgtttttttttttttttgttcaaatctaaaatatgttatacatgtatatatttaacaatgcatttacgatgtttaatgatatatcagtaatggtgtaataaaaacttgatttctagcgacaataagaatatgatacttaataatgtatttgcgatagtctgcgataaaatttgatgaaaatattttgttgaggtataacttcaatcgaatcttaatttgaatttattcttgttcttttttaaaaaaaaaaattggtattgtttcaagatctacatggttctacaaattttttcaatgttttgtgttatacactccaaatttagatttctacacacaaaaggtgtagatcacgaaaaaattagaaataccaaaactaaaaaaaaaaaaaaaattacctcaacataaaaagctacgttattaaagtttttgtcaagttttattgcaaatgattgttagatgtatatatattgtgagaaaaccaagttttcatggcaacgttgtaaatttgttgtttttggctaaaagaaaaataagtatattggcaccattgcaaatgtgtagttaggcatcaaagatctacaatttttagagtttttattgaagaaagcaaacgcaaaataataataataaaaagtcttcattaaaatataaaacaaataatgatgggtgctaagataatataaaatttttgcagccttaataaataaatttatatttaaatagagaaaattgtcctaaaatagttaatatgctacataaagggaaaaaaacaaatatagataaatataaaacaagctagtattacaaaaattagttctaaatttgtactttcttattcgacctatcattcgtgattacaatcttaatcttactaaaatttgaataatataataaattaaattcttaaaaggaaaaagaaaagaaaaagcaatcaaatttaaatttctcatagctaaaataatttctaagagctatattaatcacacacaaataaaactcatttttacttgtgaaaaaaaattcaagtcatacaaaccaagactatcttcaagacttttatcaagttttaaattcatatttatatttcatatatttgaaaaaataatttatttttacaaaactcaaactccaaacaatgacaatttacaataagaattctcaaatttagtaatttggctactcagattgcatcactacttttttgcaaagagattcttatgattaatgatattttttgatattttttttttccttttaagatatttcacattaagtttactcttgaagttttaattaggctattttttttctaagaaatataaatatataataataatannnnnnnnnnnnnnnataataataagaagaagaagaattctcatattagaaagattgtgattaatgattagactataaaatataactagatatttaaagagtatcatgattaatgattttttcccataatattaaaaatttagttgtggttgaagcttgaagatcaatatgataaaatatatattgtttttgacatatcacttttatattgttaacattcgactgctagggtttctctctaaccctttgtgttgctgttatctttttcaagtccgatcaaggctcgtcgacctcctctggccttgggcgtgggtctcgtaccgggttttgatttgggtgccatggtcattgcgatatgggtgttcttctccggtgtctctttctttgggtgtggggtggcagagtggttgagggtcggaggggcaaaggttgctctggtggctgcatgggagttaaagtcctctatttgttgagccatggtttgagatctaggggtgcccaccaatgagatggggtctgtttctaggcccgtctggctggttcaaatctcatggggttggggtggttttctgtccgggtctgggcctatggtggttgccggtgggggctcggtgtgtaattcttctagaataattcctccacccccagagtaaccaccatcttcaataagtactgagctggtataaatataaggattctaatattcacccctatcatttaacatatatgtcactttcataattctttcttgattgtcttctaatgttccttgtttgattaaatcttagatggctcccactcaanagtaggagtctggttaaatttgtacataggagtacatttaacctcttactactggttcttagggacctttagttgtgatattttatcttagtctgaaactacaagtttcttctagactaagtcatcaacatagcattcctagcattaatgtaaaatacttgcttaagattaagtaatcattaaagataccataaaacatttcataaggattaggtattttgcataagtcattcgaatagacattgcaaaattctcctatcttacacttataattctgataagttatttctatccaaatgaatggttggatttactttctttgttttatattaaagttcctatcatgatcataacatagtaagctatcactagtgtcattcaaataatgatgggctagaactttaaaattctcccactcggataaggtactgtgatactttatccaagaacatcattagtatcattttctattactacagtaacatgttaattggaacaattacaggatcaagaataagctctaatattttacaaatttatttattatattacatccatgtctaatcaaaatatgtgtgccatagaaatactggggtgtattgagtataatctagagtttaaagaaaaagaactacatatgttaatagcttcttccacccctaagtgttatagagatattgtggagttatggatataatttagagttcaaaagatataaaagatctttgaactgcatacattgtttcttaacttcctccactcctatcagatcaaaagatcgttttatgaaataaaatcttaataattgcttaagaattaacaattattcataaacattgaatttaattaaacattgtgtatgtggtattatctctttgcagagattaaaataccatatattttgtatcattaataaaacacaaacacatacaaacacgataaacacataaatataatacagtattggcatacacaagttaaagtaaatataaagctcaattcataagtgcaattcataatgaaaatctcttaaagaaattttttattaataatctcaaaaatgtcataataaattgtctccataaaatataaaatagggaataaaatctcaaactaataattgaattgtctaaattattcataaactaaaacaattaattaaaaaacaaagaagatttcgagcctcatcttcaacttggacaatctccacccttctgtccaaccattcgactccactcgctaggatagcaatccaagtttaagcagttggagctaaaataagaagaaaataattacggttagtagatccagaattaataatctaaggggataataatttctgaaacacatggaattataacaaagatagaaataccatgtttctttgccaaaaacttaggacactggggtttctagtggccattttcattacaatagaagcacttttctttttgctttgcctttgaatcaggagcctttttattcttattagctgtattaacatctttaagaggtttcttgctattcttccacttcttcttcttgctgggttttgaagtagaagcaatgtttgtctcagccttagccgtaccattagcagtgccagaactaggagctttgtttcctcctttctttggacctccaatcaattctcaaatgtctgaaggttgttgattaactcacggaagtcaaaagtcaacttattcatgacatagtttgaggtgaagggtagaaaagctggagtcaaactattcaagatcaaactcacttgagtttcctaatctataatagctccatgattttcagcttcctggaagtaacttgccatctcgagcaggtgatcacgcacaatctgatgaggtttcatccgtgtatnnnnnaaattcttggttgcctcaaaccgagcttgatctgacgccatcccaaacagttcagtcaactggttcattatatctgtaactgtgagaatattggaaaaccttgttttcaaggtgttgatcatgctagatagcataaagtatcgagctttgctgttagcattctgccaacgctcgaactttttcttgactgccttggtcgcattctcacttggctgctcaggagcctctttagttaacacaaacagggtattttcacctatgagagcaatattaatgttctcttttcatttgacaaagttagctccagagagcttgttgtcagtcaacagtgacaccatggggttgttcatagtcatattgagtactacaaatatcaataaatagaaatcaagtaaggttcaaaacaaaatcatacacattcaaaaattattaagcaattagcatgtaggaatggcaagtgaaaatacaaaaacaagtaatcctaaataatatccaagatttacaacaaactaatacaatgtcccatttaggcaagagtcaaagataacattcattgaatagagcagtcagctcatctaaaatgaaaaacattctagcaaccttttattcaattaagatgagaatcc

SEQ ID NO: 42061 - DNA, 596 bp, Cannabis sativa
agtagtattaatatttgttgagaatgccatgaatggcaatggtagtggaagttttcttgatccaattagcttttgaagccatagacaggttcaacattatgaattccaacttttaaattctaatgctttggtagttttctctgatttttgttccttttgcattggaattttatatatttatacctaaccaaccttcccagaatgatctagtcttatcttagtggtcttttctctctttcacttcatgcatggccttaagtgatttgaattctatatttggtattctataccgaccacaacaaaaattttggagaccacaccattctcttaaacaaaaaaaaaaaaggttagccccaccattatctttcttccctccataatggatttcattatagaatcctgtcaaaatcagaataattgaggatgacatggaagtgatacatagccatagatacctataaaaatgaaattctatttctttcttaatatgtttattttacactgccaaattgttgacatctgtatgttcttttataagcacagaatctagcatttttttcagctaattatattaacacttcaccccaattaatgtt

SEQ ID NO: 42062 - DNA, 3340 bp, Cannabis sativa
tttttttttttaattttaaaatgaaatagtcattttacaataatgcaaaagatatttcatataatattctaatattaaaaattataaccaagcaaggaaatgaaataaaacttcattttcattccttttcattttattacttctaagcaagctaactaagattaagagttagataattcattagcgtattataatttaagtcttaagattatataacattttatagcggatttagtggccttcatatggtaatattcgatcatcactaaataatcgacctccatggatacgcatcatcagaacaaatttcagtcaccaaaacttttaattgtgaaaccttgttacctgctcgtaccagtgggtgtgatagaccatctaggaggtctacacgtgtgcctaagcaaaatccaaaatatttgtattaagaataacagctatattagtttatgcatttttttagttgtcttttatttaataaatgagatagtggaactagtctttgaacgttgtggtggtttcctcgagaataggatgcttcatgcttagaattaggaataagttgtttttctgaatattatatatgtaatcaccattgattattaaagggagtcatattttaaatcatcacttggtttgattttcaccctaagaagatctacaattttcctagtttaattctacctcttttggaggccggccaagaatgttcatgggaaatggaaattattatatgttggcaaaaacattcatgcaagcaatggctccaaaaatcagcattgtaaaaaataaacaacaaatcatataattaaagtggtaatgtaataagtttaaaaagaatattattgtcaattccaatggacattattttttttttcttttaaaaaatgcaggcatttccgtccaagagaggccagactactattgatcattgatcaatataatatataatatggtgccaaagcctataaataaccaaacagttcaacttataatgatcaccagtcatcatttaattaatatcacattaataatcaatagtatcattagtcatgggctcctccaagtttattattatcttcattaatattgctattatagctatctcattggttccttcaatttcagcagttgattacattgttggggatgaagcagggtggacaacaaacttcgattatcaagcttgggctcaggataagatgttttttgttggtgacacactaggtaactatttgaaagaaataataattgggagttattatttaatcactcaaaataattaataattattattttattttttgtttcagcattcaactatccggcgggagaacataatgttttcaaagtaaatggtacggatttcagacaatgctcaacaccattgggttcagtgccattgacgagtggaaacgatgtgataacattagcaactccgggaagaaaatggtacttgtgtggtgtttctcaacattgctccctcggcggccaaaagctctctctttatgtgattgatcagtttgcatggtctcccatgtacccaccaactccagctcctttaccatttcctggtgacatataataattaatatggggtctatacttatttttggagtgttttgattcttattaattaggttttgttcaagaataaatgtcatatctttgattattcacttgttagggttcggtcttatgagatcaataatgtacttgggtgaaaggatataaatgaacgctttattaataatcagtttgaaatatggttattaagccaaataatatttacttgtattagatcggtgatactataaaaggttaaaacaataaagtgcctcttaataatatgagtcaggggcttagtgatatccaaaaggacatgaacttaaagatactgtgaacttccacaatcgtactcacagacttgccaagtttgaaaccccaactcggactcatacaaaatatcgtgactttatgaatttgaaccaaaaattctacaacgtaaaagttggtcacagctggatctgcaaaatgattggattctttcaagacaagaaggttatcatcaaagatccaaggccctccttcaagcacgcgtttgcgatccgttaagagagagaatcgaaagagaaagatattcttttcatgtaccttcacttcataggtgctttggactttccaatagaaacgagccattccaattactgcacagcgagaaacatgttcagtacatatctttacccaccagcaagctagcgagcgctattctcagcccccttcgctaataaacccttatcaatgtcgtcacaaaactcatcctcataatcctcctcacactgctagagttatcatataggttgagaaatcctccataatgcaagatgagaaactacatactggaaaacaccctactcttagaaagaaaaagtttatctgaacctctttgcaattattctaatatttcagagcattttaaggtgcggcttggctttgttggtaagttagtgattgacaaggtgggtcgtagtttgtatgtttggatctgacaatatggtagttgatttgctaggctactcttgcttttttatatattaacattcttatatccccacacattaatttaaaatggcggtatacggtatatggacaatctgatcaatgtttgtgtgctagttttggacgttcttctcttagtttgtgaatgggttcaaatggcctttgttatgtgaggaagatttattatttaataaaattctttctcctcgtcaaaagaaaaggtggggctgtcgttcgtgaccctggtttgatgaataatttcaagaaaattcttgttcatgtggggcttgctgatgagtgcacatttgttcactcattcctcgtcagatattaatgaattagtattgatttcttaaattttgtgtacttgggaaattttgagctttaaagattataatactactgttgtttatggttttcctataatacttggcaagttaggagctgaccgtgtagcgctaagactaatgttctgggaataataatgataaattttcctaagagtacaagggaaatcattagccacggtcccttcagaagaataagctatagtattattccacctccgagagtcaagtttatcaagagatgtggtaagaaaaaggaattggtccgatcaccgcgagtccaaactagggtcactatagatgcattaaatgtaatatggaggaaacgtctgcaaattaccttgaaaagacgtgtcagaggtttaaagccatcattctctgatttcacactatccaatatcccttatgacggctacacaatgaacagtcaaatcatc

SEQ ID NO: 42063 - DNA, 1275 bp, Cannabis sativa
atatataatttaattaattaatatctatggcgaagcaagctcgtagagttgggatagggatggattactcagcaaccagcaaagcagcccttcgatgggccgttgataatctcatcgacggcggagatcacatcattctaatccacgttgagcctcctaatgctgatcatacaaggaagcagctcttcgaagatacaggctcacgtaagtattagtatattagttaactatttataataaagttataatatatatatatatatatgtgttgattaatttttgctatgcatatgtatagctttgattcctttggaagaatttcgagagataaatttctcaaagcagtacggactgaaaaacgatgcggaggtaattgatattctggacagggcttcaaggagcaaaggggctaaggtagtggccaaagtgtattggggagaccctagagaaaagcttttggatgctgttcaacaactcaaccttcattctcttgtccttggcagtaggggtttaagccccatcaaaaggtatatatataaactatatatattcatatatatagatccacattatctaaatccactactttctaccatataggtataatatgatgatgtgaataaaaaatagagacagagagtttagtaatgatgtgaaattattatttagcaatgtaacaattttttttttttaatttttcgttaactaataaaataattaaattaaattcattaaaaaaataattttaaatatttaaatttaaattaaataattatttttatataaattttaatttaaatttgaattaaatattaatttagttaatcatattttataaaaaaaaaaattattagttatattatttaataaatctcaacttatttatttattttattattcaataaaattaattaaatatagttttttataaataattttaaaattatattaaattttatatttttaaaaaatatactgaaattttattagaactaatttattgttattatttaaattaataatttagcaaataacagctcttataaataaacatacattacatgctactaatacttagtatatatatatatatttatatatataattattgacataatttaagagttcatttttatttttatgaagaagaggttctaaattcaaatatcccttaataaaaaaaaaatatctagatatatttattggagtagattcgcatcacactgatcccatgtaacttaaaattatcactaatcaggctatgagaatttgtaa

SEQ ID NO: 42064 - DNA, 896 bp, Cannabis sativa
  modified_base (865)..(865): a, c, t, g, unknown or other
tttgctaatgccctagaaaagacagaacacttatccaaggtgcaagtaaattttatcgctgattatcatgtcagtataaattcagtgtactaacaactcatgagacttaaactttaaagcataaaatcatgattattttccactgtgtagacaacactataatcatgaataactacatgttctagatttaatagaatttatacattaaacatgtaatcatgaaaaaaatcatgtgaaccatgcaacataaaataatttcttatcttttattaattagtaatccatcttttattaattagtaatccgaatatattgaaatgagttttatttaaggcataaaatcccaacatgttaggtctcatatgaatttgtatgctttcctccgggagtaagaagctctttttcaatgagacgagatgagcttatttttgatcttgttatggcgcatttggtatggtcgcaatcaataggttcgtgggcatgcattgttgtatgatgaaggagtgtatggctggtcatgtgatttcacctctcgtttgtcgaagcgaattcaaccgtgggtgggcgttctgttcgtaaggggccttctctcccctgctcgacgatttttcgctgggtgttacctctggtcgactatctcaaactcaattttgatgactggttactcgagttggtaggaagattaaggttggggttgtcttcggcaactaccataatagtaagttctctctctcctctggttgcaaaaactttggcagtgctttatgattttcttctttgtttgaggctatgttacaagtattagaatatttttattatggaaattattttctaattaagaaaatgattttctatttaaggaaanaaataaataattgattttctgataaatgaat

SEQ ID NO: 42065 - DNA, 1998 bp, Cannabis sativa
cgaccttaaaagttcagagggcattatttagtacatgtcaaagtttaagggacaaaaatcctaattagccttattattaaatcgaattgaagttaaaataaaattaaagtcttacagaaaattctaaaaactttagttactaaatttttgtcttaaattatttggcaaggttatgggcaatattgtttacaaagcgattacaaaacaaaatcttaaaattattaagtttattacaaactaaataaatatttcataagtacactcaaaaaaaataaataaatatttcataagtagttaaacaagtttcttttttgttcataagttttgttacatttttattgatgcaattaaaacttggtcgtttatggtttcatttaatagttattatagaatatcatcattcattcgcaagacgttatctagtgatgatattgaacagcactaatgcttaataacaatgttcgatactcaattatactaataattataattataaatatatgcgtgtcatgccagttcgacccatatttttataaacccgcaataatttgaatcgtgtcgtgacgacccacaaaaaaatatggatcgtgttgtgacgtgctaatattttaaagagtaaactcgacgcgacctgtaaactcatatttttgttttgtgttcagactcatatcgtgttaaaaggtctaactcgtatttacaacactactaataatatcttaataaataataagttatattagggtgtaatgaaatgattactaaatgaaaagaataattttaagttaaaaaaaaatatattattttattatttattaatttatgaatatgataatgcaaaaattaaaataaataaatgttttatatgcttccgcgtatagaacgcggccgataccccatgctgaggtaaagctacacgacttaactaattccttccaattctaatttcttaaatattaattttaatcttaatcctaatcctaattatgactaatttttttattatttatttattttttaatctttttttttttttttgctatttgatttgattgaattattatattatatttattcaataagtgcttctactatttctattgtaatattaagtcataaaaggcactaagttaaattccaacttctcattattgttttgtttattaatgctcctatatggggtctacatttgatcatataacatgcgacaatcttagatcatcattatatttttatatataaatctagatgaatatagtaacatttgcttaatttaatttttcaaaaaaaaaaaaaataaagtattaaatctcatattatttaatttaataattatcatgaaaacattaaagtagtattgagctagctttttattttatcacgtgaaagagactattacattaaattggaattttggtacaccaaagagtacgaaaatatagatatttttgagactatcattgtgaattttattttgctaagcgactttatatattatcatttttcaattgctttctctttttgtttcaatgttttaaaaagaatatttgatatcacatatacaatatgaaataatctatcaatctatctatataattatttataaaaaagagaagaatgatgagatatcatctcatatttttaaaaagtacttttactaattggtaagagcttcaagtcttgtcttaagaaaatgatcatatgatactaatctaattttgtaagaaatctaacattatttagaaaatattgtaggtcttctatatgtaattataaataagagtttctttgttatttttatttgtccaaaaattagtatattgcttgttatactcttaaaaaataacaatcacaatgataacattttaggtaggcatctaggtgataaaatcaccatgtcggcctcatcacctcaacctatacttaggtggtggcacgatgtcaactcacctttctcaaagtcgaagtactcttcatcaaggcatcatctcagccctagcc

SEQ ID NO: 42066 - DNA, 839 bp, Cannabis sativa
  modified_base (754)..(754): a, c, t, g, unknown or other
gtaatggatatgttcttatgtttatgttaatttagcatggctaaacatggatagagaatcaaaggatagttatcacaaaatggtttgacaggctctgcattttgcagtctgggtggttttgcattcttattgacactttaatcaagtcggagatctacagcgactatgtccaggtttatttctttctaaaatttcaagtttttttttttttttttttcattcaagtacataggatggatgtatatgtctattatgtattttatgtcgaaaattagattaaaagcagtggtaggaagaggtaacatatcggcaagtttctaattgaaacttaacgaagaagacacaaaatcattaaacagctcagaaacaataccagagaatgaagaaaaacactcctggaacttaagaaattgttcatgtttaggcaaaatttattgataaaacagtagagaaaataaagagagcccctccaggaactagagagcttgatctatcccaattcaccaccaatttcccaatgttcccactttgcaactacaagcacactttatcacagcataaacaagcctaacaaactctttctctctccaatgagtcatcactcatgtacacgtcattttcacccctctatcctttctccaaacataagtaaatttaactacaggcctaccacatatattcaaacatgtttgtaattgtgacaaaggcaggagggatacttaaatttttggtcttctctctctctctctctctntctctctctctctctctcatcagtatttggcttgatcagaaattttgtttcttttaactcgcctttcttcggtggtttgcaggaa

SEQ ID NO: 42067 - DNA, 507 bp, Cannabis sativa
gagatcgtctaaacagaaggagttcttacatcagtggcaagtttcccctcctctcactctgtgtggcctgcacttgaacaaaagttctccactcagtcgaaggctcgcttgcttcaactcaaaagccaattttccacaattcacaaaggaggacagactatatctgactatgtcgataaattgcaatccattatcgactctctagctatagtaggctctctaatatctgatcaagacactattcttcagttgctcaatggtcttggacttgaattcgattcagttgtctctaggatcaccacgcacagtgaccgtcttacctttgaagaagttcaatctctccttcttttgcatgagagctgtcttgaacaccacaactccatgacaaatctcactatgaaacttcaagccaatgtagccttcacatgattaagaaccaatggctatcgtcctcctcaaggcctcaagaatagaggtggtggaggctttcatggtcccaatcatcat

SEQ ID NO: 42068 - DNA, 1021 bp, Cannabis sativa
tatcattaaattaataataattattaaacaaagtcaaaaaaattaattaaaaaccatagaaaattcagaaattaaattctaagcacattgaaaaaaattcgtcaaaaaacgacttctggaaccaccgcacgcggccccatgtgctgaggccgagagtgggcttagctgaaggatgttgtcttctaccttaggaaggtctgaaactggtcaagcaccaccactttgtaggcagtcgagttagagagaaaaatccagccaaaaacttgacaaaacggacagaaaatgaggggtttttgatcaagattcaatttctaagagatctatggtattaatttcgtgcataaacacaaaaaattaagtatatctgattgactataatccaaaaatttaagaacaaataacgtgattatgatatatattttagccaatttaaaaattaaaaatgtagagacattataatataatcataaaaaactcacaatcattatcataatataatcataaaaactttaaaacttcaattttaaaattctcttaattattaagtaattttatgcttataatatatcattaaaaagagaatttaataaggaataaaactcctaaaattttaagatcaatacataaaaaatttaacataaaaaataataaaattaatatgtaattgaagaaaattaacatatacatattaattgttatacaaattataagtcctaaagtatatacagttgataatctaataccacatgttaaaaaattaaataacccaaaatacaatttgtatataatctagaacacaataataattaaaaaaaaattaggtatacatacatgattgatccatagcaattgatgcaactttgctttcagaccaacattgttagtgcagctatctgttcttccaacctctttgtatcactatccaagagatcccttccacagaccttgtcattcaagtgattttagaggtcattaccatgtagcctcgccttctcactttttgtacttggcatctaaacat

SEQ ID NO: 42069 - DNA, 1245 bp, Cannabis sativa
ccattaggggcggggccccacggggcaccattcgcatgggaaaaatgtgcatccctactccccactcttcataaaagctacccccatatatcgttcaagatattctgtccattccccttcctattcaccccacggatgatgatctgatttggaaactcacaaaatctagaatttactcagtcaaaacgaggtatcatctaagtttttcttctacctcacctccagatattccctcatcctcctccccttctccttagtggaaaaaccagtggcatctccacattccgcctaaggtaaaacactttgcttatcgtgcctccacatctaccctccctaccaataagaacttgcctctaggaaaattatccaaagcccaatttgtgagcattatggaaaccaggaagaaactgtctctcatgccctgtacttctgcaagagcgttcgaagtatctggaaaggtacagttttttacccctacattttctctattactaattagactgtttctttccatgatattgtacacataatttatactaatttaaccaaggaagaggtagaatgcttcctctgtgttgcttggcttatttggcataacaggaacagagctcttaggaatcaactacaagaccagaaccatgccatattcaacttggccaatggctttctaacagaatacaagtcctcatttcaagctcggcagcacccgtctccaatgattcggtcgccctcagcttccatctgggctcccccgcctcagggccgtctcaagctgaacaccgatgttgcaatcctgaagagcaatacaaaagcgggttttcaaggagttatccgtaacagtgaaggtcaagttgtagttgatgttgcttcttcccacttaggaggaggcgatgtggccacgctcgaagcaaaggctctcctcacctcccttctctgatgtatcgaagaaagtttccctattcaccaggtggaaacagattgcaaaactattactgacgccttgtcgaaccccaaagaagatctttcacttttcggtgatatcattaaacaaattaagacagctttgtctcttcacccctatgcttgtgtcacccacattagccagtctgcaaatatcttcgctcataaattagctgattgggctttggggttagatgaagtagagatttggattgatgatgacccatgtaatctagtttcttttctctctctttaagggcatctctctcttcaaaaaaaaaaaaa

SEQ ID NO: 42070 - DNA, 4698 bp, Cannabis sativa
tatttttgtaatttttttttttcaaatttttaatttattatgtaaaaatttctataacaaaatatatggaagctcattagtactaacataaccttaaaatggctgtacatgttggaaagtaaattcctctgcacattcccaattgtaaagtcacatgtagaagggagaggaactaaataaaagaattatgtatggaaagaacagaagttataattaaaatgaaaaatttatacaaacatatttgtctgaatgtctgtgctggagttttttcattctttggatttaacagccagcagcctttagaaagttgtcaaatggacttgacgccggcagcctgaagaagtggggattatgctgggattcagtagcgcattgcataggcgtggcggctgcaatgggagttttgcatccatcgtcgaatgagttcccatcaacaaaaggattttgagcctgcaaaagccaaatgtcatggtaattctaagcacaaatgtatgccaacatgtatgaacatagaaactcctgcattgtgttaaaagtttcgggaaatgggatgtaccccaagagaatcggcgttgacataggagacgattgttgttttcacttcattggtttgagtttgtaatgagatgtgcatcaaacattcttgtctttgttgagtacttattaaaccagacatcttttgttgttttcccataagcaaagcttcacaatgtcgagccatttccttgtaagacacgtcgggtgttgttgagacagagatccttccaacttgatgtgtagtttcagaaacctgtggacagaacaatgttatagtgaagagaatttttcactttcaaggaatgttaagttgagaattttgtggagagcagagcttactgattctagaagttggtttacactcaaaagatttggaatttccatggaaaactctggtagttttctatgactatcaaatgattctgcaaatgtgtcttcatctattgaaaaaagtggagcaatctatacagaaaatgacagcattcaaaaccaaatagataaaacgttaaagatcttgcgaactgataggtgaactcagaattcaaagcttatattacctccttggatatactacttcttgaatcagtttgatagatttctttgggagcatccatgaacaattgtgctccaagtggacagaaatcgtcgggtatgaaatcggtgagaagctgttctctaatcgacgaagactcagactgcgaaagaaaaacactaacaatcattagcctgcttgtaaattttaacttctgaagttaagaaaggccgaaaacaatgatgtaggaggaacttcacctcagttaaattctctaagcttttcactatttcaggagcaaagaattctctagtttgctcttcagtgatttttatctctgaaagagacttcaaggccaaacaatcatcttctttagatccataagaactattcgccatagataccggtttaacagctcttaacttgtgttcttcaactaaacataagaatggatcaacctgatacaaaagagttaatagatgaaatggaattatataatgacttcaaagaaaaaacaatgtaaacataactttacataccactttttctgtaattgctgccttggcaacatgaacaagagaaagaatattgtatgcattcaatgcaaagagaatcattgatgttgctaagacgaagagagacctgcgtcgtgatggaggcaatcgccctgtaaagatcagacaaattcaaacaattaagcatctgaagtcttaatcatttccatgaaatcatactgtataatcaccaatgacaataatgttgtagaatttcgaaagctcaccgccatcactaagagaaatattcctcaaggaaactgctaactgaaaactacgcactagaacctcatgactggaattctgtaagacaagaaaaatcatgtcatcattgccaaacagaaaccaatgaatgcaatgcatgaacaacaagcaaagcaacagtagttaaacacacttcaccttggatgtagaaaagagcaacacaagactataagtgtgcgcgattgcttcataattttcgggagtgtttgcagaagagatggactgtacccagattgatgacagcaaaagagatatttgatggctgctcagcctcagagcattagcctcctggaatttgacatggatcaccacaccaagtaaagatcagtttccaacaatttagagttttgtgcagctaaatcctttcaactatcattccactttcatttaaccctccaagctcaaattttagcggtaaaacactccaaactactgaactgttagcaactgccaacatgaactgcttatgtgtacgttcttgtacatgtgacacgtttatattggtacacctaatattattatttaaacatgtcatgtgtacaagagtgtacacacaagcagtccatggtggcaattaactagataacaccttaaatttgcaaacaatacagttgtttggaaggttttaccactaaaatttaagcttggagggttaagttcaagtgaaacaatagttggaaggatttaaccgccaaaaacttaaaaatttattgttcattcatggatttttcattttgagataatatgatatgatttaggatatctaaaatagtaaagaaaaggaaaagaaaatcaaatgttacctgttctttagttgagctattagtactattttcttcagtcactatagagtcttgcaaatttctcatactgtatgagctaaggtaagatgacttcaatctatcaagtgttccagtactgatatcttttggttcctcaacaacattttcctgtgatgaaaatttctccttccttagcttctcaaaaagagctgctgaggatgaaaaaactgagactgttctcgaaagtgtcctaggaaaatcagaggccttctttgaatcagaaaccgatgatggcaacgaacgagggaaaactgaagatggaacaagaacaactgaaaaaatacggtgtgcaccaactcttgtttcatggtctggatggaccatagctgggagtagctgatgaaacaaagtctctgggaaagcctaagtaaaaacatgaacatgttaacaataactacattattagtttattacaaggatgagaaaagcttgaagaaagaatgtgaaaatccatttcttatccttgccttattttgatatgttaaacttggtaaggaagcaacaatttgagcggctcggtaaactgcagaaatagtagttctagctatgacagtaatagtagagatgttttcaagcatgacagccatgatttcaaggatatggcctgcttctccaacctgataatcaatgcattttagatcagttaataacaatagcaaattttcgaagagttacttgaaattgggaagtgaattcaccttatgtgacaactgtactagacacttatccacagcttctttgaagcttttattccacttgatcacatcttccccaagatttgcatcatcaagtgagcaatgaatgctctttcgtaaatgtctcatgacatcgcttactgcaccgattatttctacagaaggctcaacctttgcttggtgagcaagagaagttgtaacctcaacaatatctagttgcatattgggatgtttaagaacatttttatgatctaaatgcttgattaaaatagatagtaaaacatgagtattttgacctgcaaaacataattttcgaaaaggattacaaaaatgaacaaatgggacttttcactatataagtcatcaactgaattaccagaaaaatccattaaaaattgcatgtcattgagaacaggcaaggcaagaccattctcagcagaccatagatttccattatcaaaatatcgaaacacagactccaaaacacgccttatagttgtcgcttccttggctagcttggccatgttatgcagacaaactcttgcccaaaagtagggattattggcatcttcactatgggaagaaaaggaaagatatgttactaaaacaaagtattagtttctatacatgaacacacacacaaaataattatgcagtaacagagattacgttgtcacattcacttcgcctttgtcattaacaatcaccctccaagaagaaactcttgttatggtatttggtgaagaagaaacaagtccctcattttttctcacttcatgcacccacctcttttgggaatcttctggatccactgttttcgccttaggaccttcgtaattttctaatactactgcaacaatctggttacagaatcaagaaaccgaattgttagcaaaatgctagaactatttagatctcagagaacagtggaattgattctcaaatagatatggaaagtacatttatagtcaaggaatcatacattatcaaactccactgagatatgtgagttttgacccataaaccaaacctacaaaaaaaaaaatcagaccattagattacaagtagcaataccaacttcattcataacatatcattaagtaaagaaattgttgaacaatagagtggaattctacaatagaaatgtgtgaactttaagtggatatctaacactagaagcattacttctaaaatgtgctttgctttttgttagtttatttcattgaagaagatcacaagcaataccattgaagatagagatcgaagtccagctg

SEQ ID NO: 42071 - DNA, 1631 bp, Cannabis sativa
taagcaattttggttgagagaagaggatttaaactcaaagtatttccatactatggctacttcgagaaggcaaaacaattctattcaaaagctgaaaaatttaaatggacattgggttgattggaatggtaatttgtctattgttatgatagattattttcatcagatatttgccccttatgcaattgattttcacacggtagtggagagtgtacctgctaccattttagaagatcagaatgctagcctactaaagcaaatcacgatggaagaggttaggaaagctttatttttaattcacccaaatttgtctctcggacctcccaaacctgatggtatgaccttggaattctatcaaaatttatggggtttagtgggtaaggatattgtatcgttggtgaggtattttttcaactctggttcttttttgccttgtttgaatgagaccaatattgtccttatcccaaggaaaaatgagcaatctacaacttatttcgctttgtaatgtgctgtataaaattatgctaaagtgctggctaatagattaaaagtcgtgttgcctgagatgattttggatactcaaagtgcttttttacctgggcgtttgatttcagataatattatggtctcttttgagataatgaattatttaagagaaaaagggttagtaaggagggttttatggcccttaagcttgacatgagtaaggcctataatagggtcgaatgacatttttttagaagctttactgattcgtatgggtttcgacagacccctatttttttggtttttttttgtgactactgtaagttatacgataactcatttggggcacgttatggatccaattctttcaagtagaggtttgagacaagcccattgtctccttatctttttgtgatatctgctgaaggtttctcttctttgttgaagacctatgagcagaatcgttggctaacggggttgcaaagtagctgggggagctccaatagtgtctcacatgctttttgctgataatacatatgtgtattgtaaggctaatgaagaagaagcttcaaatttcttgcacctttttcatgtttacgatcaccttggggatgaaggtaaattttacaaagtcttcaatctttttgagcataatattaatgtgaatgtctgatcgcgcgtatgtgtgagttgtatgggatgatggaggcttttggtgataatctatattttagcttgccttgtatcatggggcatatgaaaatgggactcttggtttagtttgttaagtaaaagatgaagaagaaaatatttagttgggaaagtcagtttctgtcaaaagcgagaaaatattatcaatttgttatttaattaaataattaattaaatgcagaataatgattatagtactaaagtaaatattttgtagttatagaacgcaactacagaatacaacaccaataaagaataaaattgcaaaaaaaaaaaaaaaagcacaaaatttttatacatgttatcatcactcctttcaggttgttacttgtccacgatgtcacgcctataaatagacaatctctactgaaatagttgttagacatttatatgtataaactgaaatatatgtatgtgtatataacatgcggaat

SEQ ID NO: 42072 - DNA, 2388 bp, Cannabis sativa
tttctttttctttgttttctttttcaatttcatattgaataattacattgtatctctcaagagaaaatagggagtctgtgctcaccagaggcatatgaaatgatgttcttcttaagaggagaaatatagtttgctccatgaaatgccgcggctcgcagtacattaagaggtccaaaatcaactgaataagccttttgaataccatccaagattcccatcattgcaatgttttctagcttcctctctccttcaaatttctttaacagtgaaacctgtaaaagaatatgtatatatgtatgtaaacaagatatgatcttgcaaaagcgaaagcagagaggataagaaaaaatgctcagaagaacatgtacctccccaatgtcagttcctacagcaactccctcagcaatgacttttgaaagagcaagagcgtctccgaaacccatgttaactccttgacccgccaaagggtgaacagtatgtgctgcatcacctataagaaccacattcttcgatgcatagttattggcatgacgcaaagataaaggaaacaccatccttcccgatgccaacttcattactttcggtggaacctcaaaggactcggtaacagaagatgtcacatccggtttaagccaagaaaaaatgcctccggttccaaaccttgtcgaactaggatgtgggccgaagccatagtccagagcataatttacatctttcaagaattcgctctcgggcatttctttgcggtcagttgcctctttggggttcatagtccaaactatattactatagttatcacctataggcaatagggcaatcggtccagcaggtagaaatcgttgccaagcacatcgattttcgataccatgttctactgtacagatgactgcattctgtgagtaattccatccggtagttgtaaatccagccaactctctaacatttgacttggccccatcagccccaacctaacacagtctcatgacttgaataaactcatatgacaaataatactataagaaattatgctattgaaggaataaagagcaattcaagaacatatattgaaattaccaccaacttcgcacgtaggctgctgccatcagttagatctagcttcactggattcttccactcgtgtgttggcaaagcagacgatgtgcttcccacccccacggacgaagagtttcgatgtaaagtcgttagtctggatggatagatagtcttctggaaatctgttctctgttaaagcttaatcttgttagctctaaaaacgttaaaaactcgcatcaagtaaaaaataatgctattttaaacattatagctggaaaaggtaatattttgataagttgacattgtaaatatcaaatcccacaagctaacagggaaagattgttgtgaatacctcttgtatacatgacagcaaggaactctgtagcactttattttccaccacacagctgtatcagaagtcaaaattagcatccttctcaattgagcatgacatttttctacttttgttttgagcttaccctagaaattctttatctgcatctcgggcattgtactttgtatatcctaacccagtatagtcccatacctagaaaaggttgcaaagatgaaaaggtctcaatactttttaacagtcttcacaagcaagaaagaatattaagaaggttaaatttataatacaagcacctgcatcttatcaaaatatgcatgtcgatgctgctcaacatatttccaagcaccaatctctgcaaagtagacaaatattctttaaagtccaaaactagaagacccaattccataatacaacaaaaaaggttggaaaatgactgcatgaaaaatggtaaaacggaaacaacttcaggctcaccgtgtatagtcaagccaaacatcaaataacattgtaatgtcaaaaaaataaaccacttaatatttattaccaattacctttgaaatttttgcgatgatgttactagataataatgtgaaataagctccattaaaactatgttaatcaaatcacgtgagatatttaagtggatagagaggagttgaggaaattctatagaatataaacatggcatacttaatacctttgaagaatgacatggttgcaggtgtaactgtactgacccttggatcaggagggtcctctttcttgacgcggagtccactcagtaatgcggggttgctatcaataatggcaacattcaaatgctttgtcaacggcatgcttgctagagaaaatgaaaaattagcaaattagcatgttacaaaggtatcttttttttaatgtttttagaacaggttatgaagtttacaatgaaaagaaataatattagcaaaactaatctggctattatctcctaatcccacaca

SEQ ID NO: 42073 - DNA, 3846 bp, Cannabis sativa
ttgattttctaagcatagaaaatcaaatttccctatatctaatacgagagcatataaaccaaaactatatgatgtgatgaggtcaaagcaaagatactctcttttcttattctatcataatagtcgattgagccaaataattcttgtttgcatagcaagtaactcaaaactacaagtttctttcaaagtcaatatattatttgtactattattacaatattgagtgaggaagtaaaagatttacacttgagaaactcccccaaattcaattccaattcccattactgagcaatggcttcaccgacttcccttgccgactggaaagcagcaattttagattctgtaatggtctgtatcagaccatacaccatacatatctatacacgagatgaaaacatgcgattggcagaagcaggtttctttcttgtccctgctgaatctccttcgtgtttgcgtgtggatcgatttgtcgggtgtaatttttgtattgggatagaaattcccatagaattgaacaatttttatccaactaccataattttggccaagttcaaaatgccaatatttatgtaaatttttgaaaaaaaataaatcaactttagatgaacgaaccaatggaaaatgaagggaagtagcatatgatatcttttatacgaagaaatcatttcacaaacagacttgacttttaacggcgcactttgcagtttttgccgttaaaatatcttctgtattctttaatggaaagatggagaccccccctgaagtccagtggatttcctttgtgtttcaactacctacttatactgacaggacaatggctcatcctccacactgttatacacacaagtatacatatatttatataaatatatatggaattgcacagcatcgtacgggcaagtttccatatttcaggtgagaaaaactcgaagcttcacagactatgtaccaaaccaatgtaaatgaaacaaatgaatcgtgttatgtccagaatcactgataacggttagtgttcgtggcacatatgggagagagagtgattcaaaccaggttaagtgcagagtggtatgcagttaccattttccgggttctgctgttctttccatatacggcctgtaactctcaacttgagttctttcttgtctcctcccgaaaagaagagtgccatgtttcgttgtattataaggccatcgtggctatctctgaccttcttgtggctatcccggatgcttctagggttgccctcccatataagctttcggtcatttcctccaacctcaaggctgtaactgtagttttgtgcttctgtctcatcccccatgaaacgcagaaatgccatgtaaacaggtgccatcccaagctggaaagcttcaaaatggagacagaaatactgaccaaaacagtggaagacctataacacgaaaagaagtaacagacacttcagatcaatagaatcagacttgcaattctgtgtctgacatgggaatatgaacactctagaatgcagcacaaaaaaatggaggaacaaatgtgtaaatcttgcttgcattataatatcactgctaattttgtttaatatcccaaagtgttatggtcattaaaccagtagcaaaatatggcaaaagcaaaggttctatcacatcatataacttacagttaacatccatgtagcattttccacttcccgggggttagactttacataacggtgattaaatgtacagcccgagtgcatgtcaaccttgtgataatctcgtagatgaccaacaagaaaaggtatatccccaacaacagagcagtctgatccagcatatgggcagttgtacggtctgaaattacatagagactcatgtttgagtttactgtagtaggggaaaatctcagggcaaccgtgagagcagtacttgcaaggcagttcaagcgattcagctaccttctctagtgctaaacaccttatatcaccaagctcttgtctacacgtagggcatctattgtgaactcttgttttacaagtagaacaaagggtatggccattgtgacactgcagaagcaaaattttcctagatatcagccataatattcagcaaaaccctgaacaagatataacaagccccaataaatacttgaaaccagttgccaatacgtcaacaattcaaagtaagtttagaattagtttcaatagcttctgagatcatccattcaataaaagtgaagtaaaacaaaattccatctagttgtaaaatgatatgatgaaagtcttcttgtttcttttcttttttttttttttgaacaatattgatgaaccaagaaaacctcataattcacttaataaaaacctcttattaatcatagtaaatactacttttcagtattctaaaacaacttccttaacaatcacccctatgggcatgtgtagtcatcctattaaaagatccccattttcttaaattcaccaatttcagaaaaaataattctacatgaatcacttaagggagatatcattctcatgctaatagagaatctatcaaacaaaagatcaaacaaacaaaaaaaattcatctacaattgtgtttccttcaatccttaattcaatgaacaatgttatgcaattgggaataacacaatccatggtgaacagaaaccaaatccttgatgggtcagtaaactttcccagaattgagacccctaaaaaggaagaagaagaagaacaacaaacctgatggatgggagggtacattgaattggtgcagacagggcattcaagaagctcgtggacactggttgtaacaggattgttgctaccgttctgagactttggaactgaaacgaactggtggtgagaacggctaggaattgcatcttcatcgaacacatcagaagatataacggtttcaatactttcgggttccattattactataaacaaacccccaattttatttccaaataaaaaactttgaaaatgtattaattaaattttgatggatataattcataaacgatgtaaaaacaattgtcccccaaaaaaataaaagagaaaaaaggaagaagaattaagtttttgatctcaatctggattacaaagaaaaggatcacaactatttcatcaaaagggcttctttcctttttgagtttcgtttggtaaggacaaaaaaaacatgggtcgccatagacaacttcaagaaaggaatcaacccagtctctccctctctaagggatttcaacttcgaattgtctcagcacagagggataatacagacaaggacatgggattttttttctccttttctcttttgttccaaacaaataatctatgaaatttcttaaggttgtgatttattttattaattaatttattttaataagagataaaataagaggaatatagttaatttaagttaaaaatattatgtttttagttgggtattagctgtggttaacccgtatgtagaaaaaagtagaaagtgggtcagaacaggggagacatatgaggtggctaagggtgtatttagtactctccagtttcaaccaattattacaggaacgacatggttaacctattttattttattttattaaatttggtaggtcccagtttatctttatcggttttgcacttctggcattttaatttttttaattgaataaaattattaattgtaaaagtctcgaagttgatacacacatacatttatataagtaactatacatattgggatacatcgagtgccttttatatcaagctttgagtaattccttttatatcaagctttgagtaattaagtacataggcattagttctgttcagcttgagataacatcaaatgtgtcatgatcacgattctt

SEQ ID NO: 42074 - DNA, 2230 bp, Cannabis sativa
taaattataatattacaaattatttattattgaatctactacttattatacaaaatacaacttacaaaataataaaaatgacactaatatacaaaaaaaaaaaaaagatataaaacacatattataaaactaggttaatattacgtacaatatgcacatatattaagttatattttagtttttatttaggttatgtatatttttagttttataattagttttttaatgttattcaataaataaaattatttttattaaaaaatatttaatttaagtattatttataaaaagaaaacataataatattcaaaatttattgttaattataattttagtttaattaccgtaatacttttaatttataatattttcattgtttttgaaatattatacacttttttttaaataattaaaatagaaatatatattttttggttaaaacatgataatagaaagattattatttttaaatacgtgcaatggatttaaatttgaattgtaatattaaaaaaaaaactttatgttatatagacgcatttaatatatagataagagatcaaaaaaatatgtagagcgaatttaaatttaaattgtttttttaaaaaaaaaaaactacatttaatataacgtatagttataaaatattaataaacagataagtaatatattatatgggtacccaccgggacagagagtatcatccctatttagacgggaaacctccgccctagtaggggcgggtccgtggggatcccatccatatggaaaatatatgcattcctattaacaaattgtaaaacattaattaataattataattaatttaattttaaaataaaattaatattaattaaggttttataagaaaataaagtatcaggttaaaagttatcacaaattaaaaattataaataaatatatttgatattactattaaaacttcttatatattttcttatatattgtgagataattaatgtgcatgatcaatttgacaattgaatgcaattaatttattttttgataatttgtgattattctcgtggttaggtaatgcatggactttaatcttttttatatatataggtagccgattttgtatccagaaatataaaacacaaaatgtattttgttgtacggcaggtacgtaataatgtgtctcaggtacaaaataatgtgtctcaaggtacgttatcattttttaaccctgattacccctagatcaactccagctctcagatcaaataactactctatctaacggctgatgtacatcatagaatacattccgtgaaagtacactaacggaacaaaatcgtgtccctatatatatattcgatcacacttttgtaacattcttaagatatatctattcaaaaaaaaaaacattcttaagatatatagtagaactccaatgcaccacttcattatcttttgatgtgttaaaatataagacaaagtcaagtatatgtgtctcaaactacaaacctacaatataataatgtgattgtgttaatgatatacttgtgaggtatattgttatgtggagtgtggacattggttctcataaattataaacttagagtaattacttctacttggtcatttggaaaatgttggtaaagtgggaaatgtttgaactactttttacaattaagtcaaactgattgattgcttaataaattaatattcctaagaaaatgggtttattagtttataattattattttgtatttatttgttttccaaatccttcaaatatggattaagtgtagtttgaaaaacataagtatcaatggctaatatttttggtttttaattttttaatcacaaaatgaaagtaaaatatacattctgtaaccacttttgttttttaattttgaaaacagaaaataaaagtgtgttccgtaaagttcatttttatttttattttttgattttatttaagttaggtctaggtccagggtcaaattcgggttaaggtcagaagtcgggttcaacgctaggggcgtggggggatttgggtccaggtctgatcgaagtctaaaatattaattaagaaaaaaaaaattatttaaaaaaatattgaaagtgattttttttttttgttttttaaaattttgattctcaattaaaaaattaaaaagtataaacagtttcgttgaatatattttttaaaaatatttttattttttcaattttaaaaacagaaaactgattaaaaaagtat

SEQ ID NO: 42075 - DNA, 605 bp, Cannabis sativa
cctttatatagtgggtcatgttttttttgtctagcgtctttgttacatggaaaaattatattattatctaaacttggtcagttggttatatagttatttacaatgttaaaaattaatttcaagataatttattttgtgctagtataaaataaactttttttttgaaaccatataaaatagactttaaagcaatttattttgtaattttataaattattttaatttcttacaattttgtggacgattctaaataattataatatatattgtcttataaataaattggatcatattaatctatataattcgtatgatgaaaataagctgttatgaaatatctatataagcacgtgaaaatgattatttcgaaacctattttcaatattataaataatttaaaattttataaaagttaataggatgtcgtacctaagtacaatatttatcatcatataattatttatatatatataattatattttctatgtaccaaaaaaatatgtaaaaaataaattaacaaaaacattaaattttttaatattttttttacactttaatgcagttttttttttttttttttttgtatttttatgaaaattcacat

SEQ ID NO: 42076 - DNA, 2771 bp, Cannabis sativa
ttccgatctttgtgatgagttagctaggggaattggagaagatagagctcaggttgaagagttgaagagggaatcggagaaagtaagggaagaagttgaaaaagagaggcaaatgcttcaacttgctgatgtgttgcgtgaggagagagttcagatgaagcttacagatgctaagtatcagtttgaggagaaaaatgcagctgttgaacagctcaggaatgagcttgaaacctatttggtatcgaaaattggaggaggaggaagaggagaagaaggcgaattaggctctcccaagtttgaaaagattaaggaactagaagcctacttgaaggaaatcaactttggatcatctcagaaagaagatgaagaaaaagttgaaaaaagacaagaagaagaagaagaagaagaagaagatgatgatgactctgctgatagtgatcttcattccattgagctgaacatggataacaacagcagaagttacaggtggagctatgcttgtggagaggaattgaatgaagacgaagatgaagaatcgagaagggtttcggttgatagagatttcaagggaagaaaatccatctctgaaaagattcaatggggaagtatctgcttgaacaaaagtgacagtggtcttgagttagactttggcaacaaaagccagggcaattcagatggtgttgtttcccaagctaagaaacaagagtttgaagatgaattcaagagatacagatcatcaatcaagggtcttgcagatcaaatactatcagggtcagaaatggtaccaattcatggccttacaagtccaagtcgacaatggggtaaaacttaaagctttgattttttttttttaagagttaattttgttggcaaagaaaccattttgaaagtccaagctagttatatatatcagtctctaaagtgcctacaattctctcaatttattttgcctttttgagtttcatgcgtttttgttttccaaatagtttggaagcttgcttgtgcttgtttgcattagtcaagtttggcgcaatagtttgcacaattgtaaatacaatattgtaaaatgatgtatgcaatgtccattataatttattatacaaaagcacttttcatacgtgattgagtaatgaatatatatactgtgtagcttaaataagtataccattggttgaatgtcaaggacatttgactaagaatatgaattaggaaaagtttttattattaggaaatataacaaaacatgcttgcgttagttaaaaaaagtaatacctaaattaaagttaaatcacaatgtaggtatattttttatatctctcaaaattactctttttataataaaaacctcacctagtctctcttttttcgatgttataaattttaagcatctatcgaactactattgacaactatcagatcactattggaccatttcatacatttatcaaccatcgtaccactatcaaaccattattggactttcatccataactttcatattacactactatcatacccaccatcgtactacatcgtaacacatacaaaaaaatcacagaaaatacagattttaccaaaaaaaaaatataaagaaagtacatatcgttcgtctattcgttcgacggtggtggtcgtgggtcgtcgaccacgcaccgaagaaagggaggattgtcggtcgtcggtgaagcaacagagggaaccagagagagggagggtcgtgggtggtggtcaccgatgttccacggtggtttcaatagtggagtttggtgagaactagagagagggggaagagagaatgagctggtgggaaagagagaataactaaaaaaaatgtaggtggttttttaaaatgagggataatttaaattatacaataaaatgtgtctataccgctaatatttagcaatttaagtttaaattcttatttttaacctatgaataaaaaatcaaatattatataatgtttctatttcaaatttaccattttttttttcattgcataattaatgaagtgccaattaagacttctgattttttttttctaatattagatctattgttgttatgaaggtcttttcataagacaaaataatattgaagatgaggatatggtgaatgaatttgtggctgaaacattaaagatgaagagaagtacaattgttaagttaggtggtatttgaaaatgtaatagtgtgacatgttaatacatgatagtgtcacttaaagttgggcaaacaatatgtggatatgtactttctttcattgaccgtttctttacttgcatacacgcatcacatacataaacatgtcgcaccatatatttaagagaccgttacattacatgatatcctcttagcccaactccaaccacaaaccccatttcggtattcaactttgatccaatactaaaatgggaacctaaatatatagcaaaaatattatatttataagatattattaatacaaaatacaatatatatatagatatcgtgtgaacaatgctacatcaataaattggtcacattatttatttttctcattttgttgtgtgttttgccaaccatttaactgttacttcagtgtgaggttggcaatcgttgaattggacttagactaaaggatttcaagaagaaaaggtgttaaaaaaatcaatactaaattatcatgattttctttgtgttgagaatcatggggttctatctcaaaatcaattggcaatgagtaaagtagtccatgttcttatatatagctcaatacttttacatttaatc

SEQ ID NO: 42077 - DNA, 4387 bp, Cannabis sativa
  modified_base (2689)..(2693): a, c, t, g, unknown or other
tagaccctatattttttaaaatagtacaaataagaccctgagtttaatttttgataatttttttaatataattaacttgaagacaattcctaacaccaatagatgtaggaaatttaactagttttgtcataagacctctaggtcagattattattaagttttattttcacaaaaaaaaaaaatcagttcatggtcctagctatttgtaaatttttaaaaaattaaaggtctattttgttatttaaaaaaataaaaggtccaatctataatttttgtaaaatacaaagtctaaaataatatttacccaaatttatatatttcttttctctctctaatttttttttttcaaaatgggttattcaaaaatatagaaaaaataaaaagaaaagaggaaaaaaaaaaaagaaaaaagaaaactagcttgcttttgcaagagggccgagaattgtaggaaaatagcttttgcatagggttccacaggtcggtctttttttgggtgtcattgccctttgatggctgattgtgggacaaatatatcaccgaccccttgtagtgatttctcactattaccacattatttatacatacatataaatttccttttcatatatttctacatgcataatcagtactatttatatacactttatttatttattactaatatctttttgagatattacttcctattggttcttcgaaaagaacattttttttatacaatttacatgcacgtcgctttctatttttcttttcttttcacggtgttataactatttttatatatatgtatatttatggtggcaatattaaataatttaatagctaggtttggattattacatggtgtttgatgagctttgttatcaagatgaattaacataaatatgcctggtttttggcgggagacttcgctgtcaaagaaaaagaccccagaagagatgcttatttgtagtttttcgccaattggagggctccacaaattgattatatgaaaagctaactaagacaagatagctagtaatagtattatttatgttcacgtggcaaaatatagtattgtccacgtgttaaccataactgcatggtcatggtaggtaaattccgtttagttaattaagccctaattaagtgaaagtttaatcaataatactcaataatatataaattaatagcataaagaactctaaaaattggtgctggttatagtttgttaaaataccctatgaaacagtagttgatgatcacactagtacactactactgaaattgcttctttaactaatggtaatgtaatggagcttgacacgatcaacttttatttttatttttttattaaacatactttatagattaaattttaaaatttcattagcagccggctattttaggcccacaaaagttttaatttcaaataattagaatattcaaaatcaggctttcgtttggatttatcacacggtaggtttaggtcacttcgaggaaagaattgtggggtattcatttttctgtttatttatttttttaataacatatagttcatttttctatatctattatttcactatttttggacaaaaccaatatgaattattcgaaagttttcatttttgtcgttgtatatatggagagtatatataaaggagtatttggatggagacctttttttccatatatatttcttaatttttttttattttttttttctaatttatagttttagttatatttatattatttatgatatatatatcccttctcttgtgttgtctatccctaatatatgacatgtgttctgttatccaacatattaagctataaggttgactttgtatacaatgatcaattttgaattgtagcatatttttctttggtacttcagtttattttggggtattttttcaaaaggattggccacagccacaccaacacttttttcttcctcgctatatagctgcaataagaagtaagccaaattaagtaatatgcttaccaaactttaccaattaacgtttatgactactaatcctcttcctcttacggtatatctaaatatatatatatatatatctaaatatgtacattagcagtttaatcaattcatattttgtgaagggttgggtaagagtaagacaagatttttaaaataaaatattaatgatctttgtaatgtatattaattaatctaaccttgataatagtaggaaagaagatgaatattattaacaacattataaattaataaagatgggatgggaccaacgttgtgttcaaaaatccaactactttaaaagagaaaaatataaattatgagagagaatagtaacatttcaaaaaaaaatgaatgaagctttctatattgaacaaatcacatgaccctgagctaacaaataacaccatccacatgaaaaaaaaaagaaaaatcaattttgaaaaacaatcgttgcctccagaaatatcatcaaattacacactctgcccaaacattcacatgtgtcgcgttatgacacagtcaaatgccattggatataactaactctggtcaatattcccaatcggatctcaataactttccactaatcacaacagaacgttgaaaacacgcgcctgtatgcacgtggaagaaccgacatattgttctattttatacatcttttattattccggtaatatatatatatatatatannnnnttttaaaaaaaaaaaaataagttgctgaactcaaattgcatgaattattatagagattgaatatgggaaaataatatgtgaagggtgttaggtcacgaagatggtcatgttccctttaatcccccaacttcctcattattcaaaaatttgaacccacaaaccaaacccatcatccattccattctaattccacacaacatacaatacaatacaagattatatattatattttatatatatatatatatgaatatacattatataataataatattaatattttgagtgcaatgtgggcttagtctacactgcacattgatccaattaatgttattgtcatggaattcagcgttattttcaaacttcccttcatacccgcgcactaaagcgagaatccgttgatagaaattatttctttttatttttcctttctattattaattattccttcttttgagcatatatattataatatttatatagtataatattcaatctagagagagaaagagagagggtttcaaactagttttcaacagtagcagcagtagtagtcttcttcatctcatctgtagagactagagagggagagtaaaatgacagactatcattgcttattactatcatggtttttacattagaaacagtcctctctacatttctggggtcactcccacttcccactcccaaactttcatactactactactactctactactcctgctctctactactactgatccaatctcaccctatcctttttcattccttttagattttgtaattgtacgtacatatacattgtttttgaattaagtgatgagagttgcccaatacccaatattgtgtatgtgtcacaaagtcttcttagtattccatttatagctcttattgcccagttttttttttatccttttcttttaatatatttttaccctttattcccatttcggtggtgattctcttgttcttgttggatttagtgttttgagctttgaattgggggaatgggtattaagtagtgcaagaaaggaaaaaaaaaatcaaaggggtgaccgaaaagttagaatccgaggcagtgtccgatatcgtattagagtgtatagccaatgctttccttcttttctttcaaacccaacaacagtatcagtaaaggttaaggtaaaaggataatttttcattttttttttaataaaagttatattttagtaataaataaaaaagttcaggaaagagagggaagtgtgccttttgaagaaggtgggggaagtgaagcttggttaaatatatagagaggtattacttactaagttaccattgtgatttggggttgcaaataaaaaataagtaaacatgaaaaaagttgggctttagtatgctttttggattggataaagggaaggagcgtccaagaaaggaagaagagagcgtgtgaagatttaagtaaataaaaacaatgcagaacacaaggaagaagacttctggtaatgaagattctaagaagaaggagcgccacattgtaacgtggactcaagaggtctctttcttattattttgcttaatacttaaaaatactctgtttcattcccattctatgattatcattattgttcttatgtctatgtcttgtttttatctttctttaccttgattgcttggtgggttcttgttattttctactcttcttcttct

SEQ ID NO: 42078 - DNA, 714 bp, Cannabis sativa
  modified_base (686)..(688): a, c, t, g, unknown or other
aacatttaatcaaaatactgaattgttgattttgtatgtggtttgacatattgacataataagtgccctcctagccatcccctagcagtcaagaagtaaagttcgagtggaaatatgggtgagcattttactcctttttatttcccttatttgaatcataaagttttctcatcatatatgatattatacatgtttgcaattatataactgtttaatgtgctatgtatatgcccattcactattgcacctgcttaaatgactgtacttttatatgacttgatctcttccatgtcagggagtattttactttctttgtttcttgattctcaaacaataactaataatatttttcttcaattatttaatagaaaacacctagcataaaactaagtatacgtgcctcgcacgtaattttcttctagtatactaagtatatgtgcaaatgtgtcttgcacgtaacatttgaatatgcaacaccatgttcaaatgttcttgttcttttcacttttccttgtcttttagttgttgtcattcgttctttctttcttataaggtcattgtttgtgttttggcctctatttctaaattatcatttttttttctttttcatctttgatcaaaagattttatgaatgttgagaatcatggggttccatctcaaaactaattggcaatgagtggagtannncatgttcttatatatggctcaattct

SEQ ID NO: 42079 - DNA, 3767 bp, Cannabis sativa
attttgtgagagctttaagttttgtctaatgaaaaaaaatctactaactttgtaaaaaatcccacattgtttagaaagcagcgtgtatactcaaactataaataatctatacaagcatggaaataagagttattgtcatcacctttttgcaacaaggagattttgctgcgttgcacaagaaagcttctgtacatttcagcttgagtagagaacctactagctgccattttttctgtcacctgcaaatcgagattcgtagggtctgcttgagcaaaagtaatagcttgtttgtactccttcttagcaagatggtagctcatctccacatcccctatttccttcctgttgaagactttaagagcatgcttgaggcgatgcagcttcagcataatgccttttaatccctttgctccaagcggcttgttctagttggtcttaagcacttccttaaaattcttatgggaagtccacatgttataaaatctaaaaggcttgactcttatattccccagcttgtgagattttatgaggcaaagtagtgatccgaaaccacctcctaatgaaattcagcaaccgaattaggaacttcatccacccaatcttaattagaaaaagcatgatcaattttagagtagaccctgtcaccaccatcttgtttattgcaccaagtaaatttagagccaaccctcttgagcatagccacctgggattgagcaatccaagctttgaaatcatcaatctcaagcgaattaacagccttgcctcctaatctgtcatcatagttgtagatagtaataaagtctccaactataagccaaggtttaataggcatttgcaacttggacatcccaaaccaaagctccttcctctcctctatggtgttgagaccatacacaaaagttataaaaaatgagtgttgaacactcaggattttcacaaggcagtgcacaaactgcttgtgttcatgtaaatcagtcatttgaacaaagtttttaagccaaatgatcactatacgttttttaataacattactcatatgccaatcccaaccaataatgaataccttatccatcatgttgtcttcaatttttgagatcttcattttattctccagtaaagctcccactccaactttattcattttcaagagactcgggacatcttgttgcatgttccttttattcaaccctctgacattccagctaatgatattggagtaatccatcagaaacggattggaaaacttccccactttcagcacccttcccctgctcttgaagcacattaaagccattatgcaccttcgtaagatcagctaacaccactttgcctttaatcttacaattcccaaccttcctaggaacctcccattcattacttttgccctgctttgggtatataattcttttgctaagcaagagatcatcacagtttatatgaacttctttgcttaatgtttcttctcttaatttttctaatttaattaaattttatttagttttactataaaaattattatattaactctcatttagttttataactatataaaaatattttatattcatgatcacaaaactcaaaaaaacatgtacactatattgataaaaactaataagagatgattaatacaataagtaaaggaatcaataaagttattataaactgatatattatttttaattattttaaattaatatcaatgttaaaaatattaacaattgcaccatatatatttttttcaactttaattttttttattttatataattatttttttagtacatttttttatagaaaatacatttgtgctactctctatattaatgtaatatactctatgataaatgttattatactagttatgtgttgacctcgcttttagccaacgacagtgaatctttattaaagcgataggaataattaactaagagaaaagcaaagattgtaaagtaaggaaaatactaaatttatagaggttcagccccttttagttggtaatagcctactccactttttgttgtactaacatatgaggaagaatgaactattctctctcaaaagctgttacaatgattcttcgagaaaattactcatagatcatgatttctcccttgagtgttctcgataaattattttgtatcgctgaatagtgagagaagaccactatttatagtgattagttacatgaagaatagtttctcttaatcaataataaataaatagaataggaaactttcttatttcaataattacaataaagagattcgaaagtctaggctgattgtctttattctttgaagatagaaattaatccgacaaatgtacaaattattttcatgacatgcaagcttggaattaacaatgtacatctttgacattgctaactcgcaccccctggtcggtacatgcatgttacttacgtgatcaagcaggtcggatgtctacatgtaaccttgttcagacatcttaccatccatgtatgacttttaacttcatatcaatctacatggcttgttaggagtagaatcatctgcccatattatgaaatatgatacgcgggtcacctagatagatgacacatcatagtgcacaaattaggataatattttctccccaagtctgcacaggatcttcttggtcgcacctgcacttattcggctaggaggctgtccagatgggtgacgcatgtcaagttgtcaatttttataccatgtgacttgattgaaggtctctttggtgtttcggccattaaatacctcttaaatattgtacctcgagtcacacactaataattgagtgacacctcatgtgtgacgtctgtacttttgaaatgagcactaatgtttacatttaggggaaaaacccaaatattcaaatttttaaatgtattaatcacccctttaaaatacctataaaatagaattaaaactttaatgaaatcttttagacatttttacttttaaagaaatagagcaaaaattccttcttgtttactctcaaatcttcatggggatttactggaaactctattgcttataccctctgagcagatcaagaaggcttcgaatagtgcataagttatttttccctttattgtatgtaatatttgttgaatatatgcattatttttgaatttcttactacaaaattatcttttctttaactgcaattcactgatcatagaataggtgatattagggcttgtaactttaactaacattcgattagacattctgattctctaattacatatcatcttttacatgaaaatttttatattcacctattcgcgggactctaaagatttccatatatttcttcgaggttttgaatttctgggtttaggaattctattctagagtaaaaatccttctttttatctttaatcagcacggtcaacatattaaacttatatttcaaccttccttccatctaactctcatttcttgtctccaatctttttgtagatgaaccctagtgatttctagggtggcaaatgttggcttttgtgccttatataaaatctattttaatataatcaaatttactaattaataaaagaatagaaattacttttatgttgcatggttcacatgatttatttcatgattaagtttaatgtataaattctattaagtctagaacatataaaaatatgtatttacttgttcatgattatagtgtcgtcagcacagtggaatataatcatgattatatgtttaattctcataatttgtcagctcactggatttagactggcatga

SEQ ID NO: 42080 - DNA, 1236 bp, Cannabis sativa
ctatattaaatgaagttttataatatggtaagaaagaggaaaaacaaaaatgttcaactgtacttgtaatcattaaattaattcaaataaaatttcatgccgagactaattaatattcaaacatatattaattattgtttgatttcattaattgatatttataatgaatatttatacatcaaaatttaaatttaaaaaacatcacaatttttttccaaccctagtggttgagctggccccattggatcagattgggtacacaatataatatgaatggtatgtacatgggccatgccataggcatgttaagatatcgaataccatacatacaagtgtggtataatataaaccttatttgtactgttttggtaagggtttttaaattttatttttttgataaattaatccttaaattatataaatgttagcaggttggtccccaaattttattttatttttttaataaattagtctcaaaactttattttttagtatgcattgactcatgtattgactcgattgtaaaattctccaaatgacaataggtgttagtatttttgaggggcaccttataaaatgataaatagctgtttgtattttcttaaagtaccttaaaatatcaaataatttatccttatgcataatttaagataaaattatttatattttgatttgataaataatattaaaatacttaataataacataggatgagtctacattacactttttaaaaagatatttcgttaaatttcttatctatttacatatctaatatcgtatacattatatagaatcacctataaattttaaaaagtttcgaataatttataatactgaataataagagaaattctataatacacccctttacacagatacatttctatctattttaatatctgaaataattttttagtcaattttttttctcatagtcatgtaaattatagttatttaagacatcttgtaaaattttaagaaattcagaaaagtttcacgccgaaaattacgttcaagcattgtcttacaccggtgactattttattttatacgcgtgtaaaatagaatgtttgaacattattttctatattgtaaattattctgaattttccatatagggtatcttaaataactataacgtacatgaatatgaaaaaaaaattaaactagaaattttttctgaatattgaaacaagtaaaaagtacatcagtacattcttataaataaataca

SEQ ID NO: 42081 - DNA, 1061 bp, Cannabis sativa
ggggtatgatttagtacatattaaagtttgagggacatgatttggtagatatcaaagtatggagagtatagtttattacataaacaatcgctgaaacagtaaaattgaatgaaattagacaaaagaccttaaatttaacaatctcaataattgaggggaatttctaacgaccaataaagtttagggacacgatttaatatatgtcaaagtttggggaaaaattacgaattaatctttttgtttttattgtaatattggtgtttactactttagttttttacctgtaccgttattgttgaggtttccttttgtgtcagtatgggggtgtggtgatctccttgtaagatttgtttttgtgcagttttacttttactttaattattggatttatctttccttttaaaatgttattaatcttagaaaaaggggggagagaaagatttggaacaaaaaaaattggtagatataattaatagggaaagtaataggcaaatgatatgttccccattataatgttttgaaaccaatagttttggggtcaaatttgttttttctaattaaaaaaagagttttggggtcaattttgatacataaatgataaataattaatggtagtgggggtctttgatcaggatagataaatagataagctgtgggttggatagacttgattggatcctcttagctttaatttatggctttcactgaataatggacaagttcagtgtcttgctggctatagtataattgttttcactaattggtaatgttaagaatctctctctctcttaacaatttttgttacatatgatgcctgatgagttgtcaaatttcgataacttaagataaaactcacttgtcacgtaaagtgtagtgaatacaaaaaataaataaggaataattaaataagacactattttttttttttgtaaaatatttatatttttacgtttaaagaatgatgtttttttttatattttacggttttctaaaaaataatacgaaaacaacataaaatcaacaagaaaacaacatagaagtaacatgaaaataacatcaaa

SEQ ID NO: 42082 - DNA, 2323 bp, Cannabis sativa
  modified_base (580)..(588): a, c, t, g, unknown or other
  modified_base (638)..(642): a, c, t, g, unknown or other
catgccgaaaacaggattcaaacagtctatctattgcacacgtgactcatttattttatacaaacgtaaaataaattgtgtgaatattgctctctatattataaattattctaaattttacaaaatatcttaacatatacgaggtcaaaaaaaaaatagaatattttttttcttcttaaaacagtaaaagagatattagtgcatcattttttgggatgcattgtatagccaccctaatttttttattgtttagtttagttttaaaacttataatatcattgataaaaaaaaaattataatgtcatgtaattaccattataccatttatgtaaaaaaaatatatttaaaataatttataaaatattttaatcaatacatcaatcatttctcttactattttaaatgtcgaaaacaaatatcataatactatttcttttcacattgttattataaggagtgctactgttaatctcctcttacaacctcttagtcaacctccacgcccgaaaatacatgtcggaatattttttttcaaattttttttaacggggtgttcgttatgcttacaacatcattcctnnnnnnnnntaaaaaatttcgaatagtttatagcgccaaaaatacgtttgaagtttttnnnnngcgtgtagtaaactggaatatcaggaactctattttcggtactataaaccattcgaaatttttgaaaaaattacagggttgatactgtaactataacgaatacctctatgaaaaaaaaaattaaaaatattttggcatgtgatttcgaacgtgaaagttaattaagaaattttaataggaagttgtaattagcatttttttttttaaaaaaaaaaaagaatatatccactttgatctctgataatgtcacgtgttttgtaggtaaaaacacagaaaacacataccataaacaatcttgctaattatatgtgcacaaacttaatgtaataacacatttaaatataatcgaaacttattcaccaacaatcctactttatgattagtattttttttaatagttttataatagtgtggtgcagtataattttaactgcaattaataatttcaacatcgcaaatcgtaccacataatttaactgaagagtttgaccaacacccttatacctaatggcaacgctcttaccatataaccatttctatttccattccattacacgctacccttatgccgaaattaataggcaacagcaacatcgttcttataaatttacagttgcaaaaatgttaaattttaaaagaaatgaaaaaaaagaagaaagaacaagaacaagaatttcttttgggttaaaaagcaaaattatattaaaataggaacaatacttgagatggaattctgaagaagctatatttgaaagagataaaatcagaatttaaacaccctaaaagatttatctgaccaatagtcttgtcgtagtagtagtagttgttgtagttgtagaaaataaaacaaaataagccgaaaacataaattaaaaaagaaaaaaaaatcaatcggctattgttcatcttcgaactcgtgcatgtgatccaaaagatagttggcagccaattcctcatttttgttgcatgcaaagtaaacttccaagactatggctctatcaaatcccattgcttccagctacaacaacaaaataatatatgagaccataaagattatattaattcatacagtatttacttgacactccatataattccttatcaaagggaatcaattgcgttccgaataactctaattcaagtctaaagaaaagcacgaacaaaagatggactacacagattaaacaaaacaagattagaaacatacacgttcaatggctgcccgctcctcgggagttacagtcacagcctgtggcatggcagaagccatctggcccagaacgttcctgattgtataataaaaatgaaaagttagcctggctcaggtagataacaaaaactaataaataaaaaagatagacggaatcatctcacccttctcctccctcaacaggctcatttatcaggcgcaaaaagtcagcctgatgctcttgtatgaggcgcacaagatgtggattttgtttccctagctcttgaagcataggctgcaaaacaataagggtagcatgagtattatttagtgctgtaagccacaaaaatgaccaagctaccgaacatgataggagcctaacctgcagaatttgaggattcgcttgaaccatagctcgcaaagcttggaactacattggaagttcaaaaaaggaataaccataactacaggaataaaaaaaaaaaaaaaaaa

SEQ ID NO: 42083 - DNA, 3577 bp, Cannabis sativa
  modified_base (206)..(206): a, c, t, g, unknown or other
ttaagtcactccgtccatatcaccctctcaatagtctttcttcccttcctctgcttttttttcttggacagatagcatcagaagacacgtcgattcctcttccattttcttggactgagagcagtacaggtatacttcctcttcaagctaaacccattcatctctcagactctcactctttaactctctctatctctctctctctntctctctctctctctctctcaggtcctattaatctttttctttccaaagaaaccctctccgccttaggtggttgaagaaagagaacgtttctgcagctacacacaaggttatgaatctagcaaatatatacattatatattttctttctaatattgttgtgttaaattttacatttggaatccattcatttcctcattagttttattattgtgttataatatatgaataaaatatacttgtctttctctccttttctttacagtcaaatccagtttgagtcttttgaactccgtggctgaaactcaaaggatcagtaggatgagtgatcttccggagaaaaaaagaactaaagggacatcaatggttgaggctgaggctgaggacagaatatctaaactacctgatgcaattattgtacatattctctcatttctacctactacggatgttgttcagacatgcatcctctcaaagcgttggaaatttatatggttttcagttctcaaactcagtttctccgatactagtactactgctcccgaatttctaaagttccaaaattatgtcgacaattgcttggaacaccgcaagagaggtctgtattttattgctgattcagctgtaactagtttcaagcttcagatagaatgctatcgaaaaagcaaggctcgcagtctagataaatggttaagtttttcagttgacaataaaatcaaggagttgagccttagcttagaaccaggaaaaggtaagagttacggttattactactactgcttacctaaaacagtatccaacttaagagctttgacgattatagaattgagtggaattgagttgcgttactcatttggttttccgtccttgaaattattatcattagaacgcattcggcttgcagataatgatgtgctatccaagtctttgttggattgcccatcccttgagaaactggtgttaagttcatataaatgtttgagtattcatgatcatccccttcgggtacaaagttcaagcctcaagttcatgataattgaatttgatggatcccttcaagttgaagccataaatcttgaatctttggtgctacgtagtggttgttttaaggacataaatctctctgcatgtatggcaattagaaatctctcactatctaattgtaaatggggtatgacagaccagtcatcatttgaagatttcattttaaaccttcctctccttgaggatttgactctagagaatgtttattgtatgtccggattggagcatcttaaaatctcaaatcaacacttgaaatgctttaagttgagaaatacacaccacactggtgatatggtcatggatttcacaattaaatcagcaccaaaattggtatcattttattatgaaggtaatatcaattgtcgtatatcattggaatcacccaatttgttgaatggaaaatttgtatttgatgattatcattacgaatatgcaacaaattggtttatcggtatgatgaatttttttctgaatttcaattgctcttgggatattgtaacactccaccttttttctgataaggtatgtccattacttatcttttatattttgtctttatgtatcttaatgtgattatgttgctttattttattttcttactttttttaaatctaccatacattgattattaacatgtttttgaatttttatgtacttaaaggctttcatcatgccagacaattggaaaaggatatgtcgttctaatttactcaattggaagcatctcaggcttgttattactcattgttatgccgagagaaagtcagatttagaagatgtgctgatttggatttcaccctctttgaaaacattatctgttaatggagagaacatattctagtggccttttgcaatattatcataactaatgctatattattagtatttttgaggtaacttagtactaatgaaattggctacttttgccgagttggtttgttttaagaacttaagggatggtaaaagactagaagttgaatgttattgttatccccttgctctaatgtattttggagggtaatgataaacctttgttgggatgtattttggtgattttctttgtattttgagaccctttagtttaaatgaaaatccaagttaaccatcgaaggaaaaagaaaactttttttgttgtcgttcattggtatttcataaggctgcaagtctgcatattagtttctgttttaattgttttcacattttattttaattttttattccataatgtgctcactcaatttaatattattaatctatttactaaaatggttctagcatatataatatgttgaaaagtttatgggttttttcttttctccaatatatacaagcagtactcatcttacttggaaactgttgaggtatgtcgttctttcctacgttcttagcctctcatgttatagctatttggtgataagttattttagtttttaccttggatagagacattgtttattaatcagattcatattaacgttaataaaatgcatattttatttaacgatgtatactgctggttttttaattaagtttgctgatggctactacaacattagtatttttgaacatagtaatatctcaaatgagaataagaaatagtatgacaaaaactgtattgaaatacatccacaacaacaatatccttatatctccacagcagcagattcttttgcagcgtgttgatgtcgttagtgatcttggaggaattatactcttgatttcctcaaacaaagtttaatgttatagatcctctctatgaagaagttttagcaattagcagtgtgcttagcagcagaaaaagatctgtatatgggctaccagaaaaagctgatatctcttaaggagtggcactttgactgaggatgaatctttctgctttggggtctcccaattgtctcttctctgtttctgtttttcttaagtaacttcttaatggaaatctttgacacaagaaagagaacaaagtgccacaaagatttgcaaaagttaatcacacttgtgatttagctctttattatagactatagggaaatacaagattagctagagtaacaagaaaagtaacatattagcaaccaaaacatatttgttgactgtttttaatacacagtttaacagaataaaatgaagagtaacttactaatctaggagtagtgttgcttatcacttctggttcaacttagattttgtgtttctatgttttgtatccttctttgttttggaccttctgcttcgttgtgaaggctggctgccttgtaggggtgttcataaaataaccgatccaatccaatccgcacgatctaatccaatccaatccgcaaagtgcgga

SEQ ID NO: 42084 - DNA, 635 bp, Cannabis sativa
atatatatatatgtatattactttggaggttcgagagagataatggtaggcgaatttgccttcgagtctgtactcatgcataacccagttacttttttcacctttaggagctctaccacggtaaaaaacaagagttttcttcattccaacaagtgagcaagttttagaactgtaaatctctctatctttaccagtagctttccagtacccagcttcagtagctctgttagttcttaacccagttgggtattttctatctcttaagctgtaaaaataccattctttttcacccattttcgctttctctgcatatatatataatttcaaattttaaaaaattaaaaaataaataaaaaaaaggagagagagagagttttgattgggtgtgtgactgaccagggagttgccatggttcgcatttgttgagatcaacttcagcaatggctctaccagtgaaagaactatcgagtactttgttaagaaggtaataagttatgagttcttcatcagttgggtggaacctaaacccaggtggcaaatgtgatgaattattatctgataaaccattgttaataatctccatgtgatgatgattatgattatggtggtggtaagaagaagaagatgaagaaaat

SEQ ID NO: 42085 - DNA, 1000 bp, Cannabis sativa
ttgccctgtcgattaggcctagaggccaaggttctaccaggcctactcgctccctgcctattctatagaaaagggcaaggctgctgctagcagtagcaattcaaatgattcttcctcttaggatgatggtagttgataataccaactttttctttttcttgcattaaataattgtaacttgtattctgactttgttactttttttttttttttgctcatatggcttccagattgagggatcttactggggagccatttgatagagcttcttcaggtcatcccaaggctaagatggcccagattgccaggtctactaatgccataaagtccctactacctccccctcctatagggcatgaccaaatgatcatagatcctcccttaaggaggttttcatgccctcgtagatctttgggcaagggggcccaaaagtctggccgagtgacttatttagccatcagataaaggattgctgagactacccatagttacattggtaggctgcctgtcattgatggggagctctaagagctagaggataaggagctagagcgtctaacgtccagcaggcttcaggacgtgacatctccaagttatatatttgattttactcaaatttttgcattgacaggggctggccagccagatatgagccactgggaggctcaccagctagggttgcattaatgagaagctggttggccagaaatgcaccacccaggggctgatcggccatgtcttctactacctcttacttggtttttgttatagtgagatttttctcacctagaaacttgagaccggactcctgtttaaaggacacgtgtactcaatttccccaaggaaagatgagatgtccatgagagactcctcgagataagacctcgcctgaaccagactcagcgagatgatgtggatatgaccaagtctagccgcattcgtacgactcgcattatgcaggaccaaggaatggatttgactcgcatataccacgatatat

SEQ ID NO: 42086 - DNA, 874 bp, Cannabis sativa
gacctgatggctggccttggaggccttgcctagctctcggagataacaaaatatcttggcatcaggatgtagctggtgctttcagagggatctcccggatatgactatcaaatccaagtaaattctcttagggtatatcttaagtatttcataatctttggacccacttgacacatggccatcgttgggacggcaatgtatattacgataaaaggggcaacaaaattaattataaaattgcattcaaccacatactaaatggtgcataaatattttacttatacatacaaatatagcacaaaaatagtgcctaaaccatgtgagattcttttcaaaacaaacaccatattatatcaaagttttacacattattttattctgaaaaatgtgaaagcctaaaaaataaataaaaatagaagaataaatatatagaatgtcacctaacactctttgttattttctctatataaataaaattataactaattaagaaatatttgattatcgaataataataatattttattcaaccattatatgtgatacaaaacaaaaatgaattttgtgacaactaaaagtaaagattactaaacttatttatactatataggacaacatacaaaatggtttataaacaatgtaggattgtttctaaaatatttatcatcaaattttcttcacgaactgagaaaacctcataagttagtaaaaatagaaaaaaaaatcatataaaatgcaacttaattctttttttgcttttctttatataaatatatagaatatatagattgttgtttattaatttttgataaaactattgcacctaattaaggaaatcaactcacatatagttttatttctatgtatttttttt

SEQ ID NO: 42087 - DNA, 1480 bp, Cannabis sativa
taaagaaaaagccttgctagacgaagtgctcagttgggtattcatgctcatcaccattataatcataatacaatctctccccctttgatatatctctgttagcaatcagtaaaacccggcattcaccattgacattaaatctcacacacttgaggttctgcttctttttcccctctctgcataaagaagaaagcacattagctttaattacatcaccaattatgcttacaatgatcactaatcaatagtcttagtgtacttgatcttcaattccaaaacagattacttttcaagcaattcaaattctttgagacaacaaaaactcttgtcaagacttctgctagtgagaaagtaaatatctaagtatacaaacttgggaaatgggggatgagagcttacaatgtgtgattattaatgccattgatgaagcgggcaatgttactgcgcttatcaggacaaataacgaggctttttgaaggattagcagcagaaagtaatgtcatcatgctgtctccatcatcatcttcacggttcttcaagtaatcaacatctcccacatactctgtgattatagtcaaatcttttatatacctatctgcagcaacagtaaagctgttggaaaaacaatcagttaagaatgcgagctacatttatatatatacaaaggttaaactttaaagtgttaaaaagtaatgagcattataactctctactcacccctcctgtggatcaaaagcaaccatgagaggaggccattctcctctctccatcatagtcttgcacaagtttaaagtttcactatcttcttttgaaagaatctgaagttcagtgatgttagcaactcgttagaatgcattcaatgggcaaaaacaagctcatatataagggcataatatctaacaaaatgcaagaatttactgttgcttcctaccattttgcaaatatggaagcaattgttacatactagaaattgaaatccaatatgaagagcaattgtgtttggaatatacctgcattcctccacgttcaagggctggttgattagccgatcttggtgccatgcctggtctataagtgagctcattactgaactcagtgcctgtggctgttaatgcagttgctagtgatgccatttgctccagtctccttgtgggatccgggcttggagtgaatgccagcaattttcttttcttctttgccatcaccaacccgctacgctttcttttctttcgaatatctaaccagaatatcaaatgcacaattaaatttctacaacaaaatcaaaagtgaggagctgctgcaactcaaaattatcaagagttcatttttaccttggattgctttttgggttgactcttgagacctctgaattctaaaaaagtccacaattttggtttggactagtggaaatgctgcacattagataagaacaaaaacaaaaccccattaataaaatgtatcaaatcgaaatcaaaaccca

SEQ ID NO: 42088 - DNA, 3989 bp, Cannabis sativa
gtattataccattagagtgttttttaaagtaaaggtgccaaaaatgatgtggaagaaaaataaaataaaatattatattttggatgatgtggagatctatagcatcttcaaagaatgctatcactataggtgacatcccttaattttttttttttgtaagttatataagactcaatatttaattatatcaataatattataacaccgaggatactagcaataataatattttttagtaattctctttatttattgctatggagacaaattttttagtttagagattttagaacatttacaataaatgttttataatggataattttacattttaaaacaaactaactaaaaagtttactagttatttattactctactaaatgtgtttaagtttcaacttttgtggatgtaaaatatcaaataatttaatgtacaaatcagagtaagcatttagttgtacatatatctttgttttattattttttttatacacatgcaataactattttaaattctgtttttagtaccatacattatttagatttttttttttttgaaaaatggcaagaccctgtaactttaatataatctttcatataaaaaaatgtggaaaatagaaacactctacctatagaagtaaaagtgacacttgtattatcattatggagccaacacatgggactggataaattgtcctgtcccaatctttagtctttaagtctttcccaccaaactttacacgccctttatgaactatcattattggaagtttggaacaataaacaacaaaattaaatggaataaatataaataaatacatattatatatagtgtgtatatacatttacacatatttcaattgaattaaataaacaaaggctaacatcaaattacacaacaaaatgagtaatgattagaaaacccaaccatagtaatttaaatttgaaaagacatcacattattaacatttaacattatattaaaatatatttttttcaattggtatgtttatgtaaaatttccataaatataaagctatcacagaatatcaaagtttagttgcttctcaatcactagcacttttctgattatccatgttgctattcccttctaaccactcctctagttttgctgctttaacagccttgaactcgtcaaagtcctctgactgtggtaccaaattaggagacggtaaagtcgcgtctatttgttcttgtgattcatctgtaatcttacttgacaagggcagttcatcagcttccacatctggctgagatgaactagtgctagcagcagactcaactgataaagaccggcttggatagaacatcgacttgtcatccttgctctgcagcgactccccagaatcaagttgtggccactttatgttactagctttcttcctagcagatttaaatacagttgaaaggtagccacttttttcaccatctagctggtcataaactcccgcacgaccccaattggctggtccccaagagcttgttttttctgcctgaaaacttgatctagagtcatggatcaaccctcttcttggttgtttagtagacatgatcaacaaagatttctttatatctctgatcatctcatctgcaatggggaatccacattctttcattgatctcaccatggttattgaatcctctgaatcttcagtgtgcaaagttgtttcatgagacttctctacaacattgtttctgagctgaattacagccggcactgcattctgagtgtgctgctgaacatagaaaagccctagtgagggttcatttgcgacgtacttaatcatctctgccaaacactcagttatatccacaaagccatcaacagttgagaatccatgcattgtttgaggaggttcatcactggttttgtcaagaattagaaaagcctactatcaaagggcgtaaaattagagataaaaaagacatatgaaaatagaattcatagaaaatttataaactaattgctctttgcctaaatggtatagtgtagtaacatttcatatctcaacattttttgaggaaatatatgatgaaaaaaatgtgattatcaatgatgataaacataagtagaggataaaaagaagggggtagaataggcacagcaacattgcttgtttcagcagcataaaaacatgaacttttgggttactaaaaaactagaagtacacattttatattgttattgccaacagagtttatattcaaatgagccacacatctaacaaaaatattaagttgtcattgttactaataatcctttattctacaaagttataggttaactaaaactaacaaattctgctaaaccagtccgtttctcattattaagttcaataaaaacacacatcaaagcgttctaaaaattaagaccaacattaaattgcatttgaaccaaaccatcacccatttcacttaaaaaaacaacctctctttttatcatgaaagcatccctaacatctcagcctgaaacttgattaggatcctcaaaactatcgatttcatgacttaacaactttcacttatccttagatttcaaataatacttatgtccacaggtttagtgtctagataacttacatgttctcacgcctccccgagtgagagcattagcataaatataaatccaacatttttttaatggaaacaacacttgaatttcaaaaacacgaaatcaaagaacagaaaaccatcccttaaaaaaaaacccagaaacccatgaaactacaagtgcgaactacataaacaattttgaagcccaacatggtcatatgcagtttactaatgatgaacttgtataccaaatcaaaataacaccactacttcattcttcgctagttagaaaaccaaaagtgggattggaaaaaatattgatttgtaggtcaacattccaggttctaaacccacactctgccggaaaaagcatatattgaaaaaccattgattttccaaaaccagtgctgcaagaccgaatattgtgcaatataatcaacacccatctcaagaaatcacgcaatcagttcccagaagcatcattatgaatcaatttgaatccaaatttaagagcctaccaacgcagagattcgataaatacaaataaaaaaataaaaaagaataaggcgatagagataacttacagaaaacccctagagggtgatatgttgattgtgtgagaaggaatttgaaatgttgtaaggagtaaagagtgttttagagatggaacatgctaatcgaacacgaagcttctctcttcctatctgacatttgtttgtttctgatgtttttattttgtttttctctccaataaatactttagctacaagttaataaaccaaaaataaaataaaagattttttttccttttttttatttaactacaaaagttagatttttattaattaattatgtttttaaaaaattgccaatctctatagtgaagatgtcgtttttccagaataatgtcgtttttcagagtttctttttttctttttttctttttttccagtaaggtccagactccagacaaaagttattgagtctttgagaatcgaattaatggcaaagaagaacaaccaaaagaggagacccgatagtgatgaagacgatgacgaaaccttctattaccgttacgcttcggctcctactccccccgccaaccaaccgtcacggacctccgcctctgggaccaaaccctccagctccggttcaggtgccctagctccttctaaatcgaccctttacgtctccaacatcgattactccctcaccaattccgatctccacacactcttctccacctttggcaaagtcgctcgcgtctctgtcctcaaggaccgccagacccgcctcagccgtggcgtggcctttgtccagttcgtatcgcggaacgacgccgtctcggcagcccgccagatgcacgggaaggtcctcaacgggagaaccctaacggcttcgatcgccgcagataat

SEQ ID NO: 42089 - DNA, 769 bp, Cannabis sativa
aaaactaaataaaagtgataaatggagatagcaaagaattagaaagaaacttcatataagatgccacctagaatgctttgtgcattcctttatatttatatatagattagacaaatctcaacttgatattaaaaaacaaacccttaataatcatagtagacaaatatctataatgtactctatagtgaatgaaaagagtggccactaatcaactttactaagtaatcacagaaaaagcaacaaagaaaggaactgcacataaacattgagatgagaaccttaatctaaaagataatgataaaaatttatggctaaaattaaaacaaatatgtgcaacttaaatttgtatgtaatattacacttaaagtagggtttacgattttcgtattcttgttgtatttcggatttataggattttaatgacatgattatgcttaataggaacgacaaaattaaataacatatcacaaattgtaaacacgaatacggcacaattataaacaaattagcttatgatacgacacaattaacacgatatttaaacaagtcatatgcaggtcatattaatattacacaacaggttaacattttgatctatttaatacttattttacctatataaaaaaataaataaacaaacaaatgctataaaaattaatataaatcccaaaatcaatttgtatataacatagaacacaataataagatataataattaggtatgtgtacatgattgatccatagaaattatctctgtttgatccacagc

SEQ ID NO: 42090 - DNA, 1235 bp, Cannabis sativa
ttttattaaataaaaattaaaaatcacccatgaatttctcataaaccaagaatttcagttatataggcatactttatatagaatagatatgtagtttatataaaagcaaatatgtatagtataaatatcttgttggttggagggtaatacaatatttatgaatatatatcaattgttatattctattttataaaaaaaataagtaatgttagataatattttatcattattatatctatagaagtttacaagataaaaatacaccttgaagatagaaaaattaacaaaaaaaaaagactttgaccaagcgataaaagacaaaacagaggttaagcacgaatagtgcgccaagagctggcccaagcggttattaagggccttaggcaaaaaattaaaattgggtcttttataaaaataccaattaattctttataactttaattaattttaaaaaaaaaataaaaaaaatacttcataaattttaaaaatatgcaagaattttagaatcatgtgtattgaaaccacgagattttattaagttttcttttgagtgcatatttattgttatgaacatttattatgtatgatgtacattatcaaaaaaaagtttattatattaaatatataaaatgaatgataaaaaaaattaggtcttttaatatagggggcttatgaattggcctaagctgccatatgcttgggcctgccctgtaagtgacacccttgtggcaagaaaataggctacatgcgagcaatgcccaaaggagtgtcagtgctcctgtaatcctagggtttgccttaaaagtctattttcgagtgaaatgtgtttcccaagtcaaaaaattggaaaccctaataccactaaccacgaggaaggtgactcggcaagtcaattattgtgtggtagggttcaagaattgagaaagaattctaataaggtaccaaaccctacttggttagaatatcaaagtcaagacatgaagaatgacaccaccaaagctaaaaaaaaggtgtagactcgagcaagggcatgcccttgctccagtataaatcaagggaaagaaaggccatacacgagcaaaggcataattgtaacgtctccacttcaagcctccattgggctctgacactcacggaataatggctcttatacatgagtatgccactctgactgcttttggatttacgactgaccctatagaccaacacgagtgtttccagcatgctttgtcctc

SEQ ID NO: 42091 - DNA, 1208 bp, Cannabis sativa
atcaacattggacacggcacacaaagtcctcatcaaaacagatctacaattgccatgtcatcagtcaacctttcaattattattaacaaattaaaataatcagttctgaaaccttaatgaaatctttaatgttcgcactttacatattgtttaaacaacatataataaatgtacaatatattaaactaagatagtctttagattattatgtattattacgtttagaaattaaatactagtaatgccatttcaaaaagatataataatattagaaagaaaaagtacaaaataatttggaaaactgggtcacccccacgcctaaaatggaggacaagatagatataatcaacttaaactcctatgtcttgaaagtgaaaactacttgcataaaacacaacgagggcaaaactgactttttcacttaatgaaagaaacaacgaggaaacctattatataaataaaaactttatttattattatagtgccttaaatttaaaaagaaaaaaaaaaaatctaattaatgaaggcaaaatatcaaccttatataaaaggggcataattagacataaaccagtgtctctcttccaaactcacacctaaacaaagctcatcttagtcatctatataatctaaaaatgttaaagaatcaattatcaggtgcggcagagagtggagtagtggagttggatcatcataataataatcaagatcatcagatcatgaagaagaaaatgatgatgattatgatgatgaagaggcgagtagcgattggtgattatgatgatgatgatattgaagatgaagatgaagtgatgaagatgaagaacaattacaacttctgcaagaggcgcgtgagagagccctgtagatcttttggaagaaggtgtagtttgttggtgaaggagcaaagagccaggttctacatcctcagacgttgtatcactatgctcttgtgttggcatgaatagtctaattaattaattaattataattttctttttctttttaattaattaaaattcaaagatatggtgggtttttgtgtataaattaatgatttagatattagtatgcccaacactgtagagtagagagagaactggttttttggaaattaatatattttctttcttccaatcgaaataagaaaggatcattagttgtgtagaatgtagctagttaattgttcatgttaataataataaaaa

SEQ ID NO: 42092 - DNA, 649 bp, Cannabis sativa
actgaaattgattggatcggatcggatcggatggtaaaatctaacatccaatatatgattggatcggatttggataagcctaaaaacattagatatgatccaatagacacgtataatttgaaccaaattacaaaacttatctttaaatctttttaattacaaactaatctttaaataaatattttttaattatgcatatatctataattaattaatgttattataatataaatcacttgccggcaaattcggcaatttattaatttaattattctgttatgtttatattcaaatagaaagctcttattacatcattctaatttatttgatacaccactaataatattatttaagtgatggttattttttatattagcttggcactttatgtttttaataatacttttgtaatattttatacttttaaaaagtatatattagatattttaaaaataaatttaattaatacaattttatcaacttaactaaataatttttaattatatataattaaattattatatttaaatttagaattcataaaattgaaaatagtttgatcgttaattcgttatgctatcctctagttcatacaatttgcttagattgccatcatttgtttactatattttgccaagtcacttactat

SEQ ID NO: 42093 - DNA, 1161 bp, Cannabis sativa
ttttttttttttttttttgtatcggtaaaaatttacttgaagtatttacaatattaaaatataaaacttttatgtggtattgttacatgaaatccaggtgtaaaattaaaatttaaaaaatgtatttttttatcaacaagaaaaagtttaaaattattatacttttatttattgatagtaaataaaaggaaacaaatttttaaaactctatttaagttgtacatatagtgctggtataacaataacacataagtcatattagtattttgttagccacaaatgataaaacttaacaatagtcttatatttttcaacattgccaatagcttggaaaatttttaactaggaaaaaaaattagaaagtataataattgtaataattcggagtaaaatttctaaacatttgctaacctaattatcccatacttttatggtgactaagtttatctatacaaattttaactgattttttattttcaatgattactattacatatttctaaatttggggtccaatttctgacccgactataccaactctgctcaagagaaataatatttcaatttcactacgaatggcctactttttctaaacgttgatgtaccgatgtagcaacttaaaactttggcctgaaaaatgaatcttgaaaaagcaagaaacataaaaatgaagaggatgaagaatgtgataaatataagttagacgtcatccattttcaaaattatatttgccccatagcaatgtttttttttcaaaaggaaaatactaaaagacattctcataagatgtaatattattattggtacaatttaatgtagttctacatattttatttaataaagattatagagaatcttaatgactcatagtaatatttttttttcaaaagagaaatgcaaaagaacactcatagtgtctaatacttttgggcccgtttggtatgcaagattggatctgtgtggaattttatttatgttatccagcagggatgagattaataatctcatgcaggtgagatttgtttattgtttttaattttaattttgtcaatatattttaaatttaataagaatttaaatgaaagaattattacaaatttatttataaattctttttatcaaaaatttattcataaaaattattaaaatgtataattttaa

SEQ ID NO: 42094 - DNA, 2184 bp, Cannabis sativa
cttaatatatattattcacatatatttatcacattttaatctactttattattatattataaaataatataacacacacctcaggccaaataagcattatctgctagatatacccccacaaaaaatttgcacactccaatattatatataagaatgctgaaaaaaagaaaaaaaaaaggaatacgtacttattattattgaaatatttttatgaatatatagtgttgagagttattattattattgtttaaaaaatgttgtattttacactattaagtaattacattttgaaaaattattttaaaatactattaaagtaatatggataataattaacacatgacatataataataattgaaaaatattaagcaataccatgaaatattattatgggtatactaaattaatatcaaatcacatatattttaatttaataaataataacaaaaaatcagtaaatactttaaaagcaccacattaagtccgtgaaggagccaaaaacaatgctcatcacaattttatataaattggacacagaataagacacaaatatgggaaacagatccagttttctaataattctatatttaattactattattattaattacataaaattattttacaaaaaagagaatttgtttattatttattttaattatctttgtacctagcattgttatattagacacaatatttgtccaaaaaaaacatggtaaggttgtaaagtagctagctagtttaaattaaattatagcatgcgtatcacatttcattgctattctttatgtttcaatgtttgaagatatagaataaaataattaatataaattaaaacacagagtgggggtaatgattatatatatagttattacttgattgtatgcccgtcaagcttgaatccagggccattcggagactctgaagcgacggcactgagtcggggaccgaaaggtgggcgtgtgctttgacatttgatactcagtcccttcggccttgggcaccggaaccctaatcctatcctgataatcaacaatcttgatattatcaaggtcaaccaccattgttataccctcaataggtctcaagtacaagttagtggttttttcagtgtaaaaacactgaaccttaatctctctagggctcatacctttctcgtcctctccaaaccaccccacagaaagagtggaacaaacaacatgtgacatgttaagccctctcttcttaatggactctataaatggcttgtacgacattggcaaatcactcgctttggtttgctcgtcaaaggaatacactgggtagccatgtccgacgtggacttgttgggagactagggaacgagttgacaagtcaactatgagctctaatgtttgtttgttgtaccgggcgtgaaccagggcacgtctagggatacgaaccgttttcggcctcgattgccatttcaaaacggtgcgtttttctggctcgtctaaacctacgtaatggaatgttaagttgctgtgactggaagtagtagtagtagtggtggtggtgggataagcttttttaactatggtttgaactaaggtgatctcagacatagttaaggggtctagtgggtggagcttttgggaggtgattggtgataacgataaggttatgaaaatggagaagattagtactaagagcgccatgtttgtgtggagaaagcttacgtttattttcttctttatatagaaggctttcaccaactattttgtagaatattaatttatatgttccacatggtacaccaaatattaatactaatttattagacatgtgttaagactggttaaaagtatttttttaaaattattacacatgtaggatatgtttaattttatatagatatgtgagtcatttatattttgttaaagcactcagaccatgctagctccttcaaaataactcaaaggttaatatatagctcaaagtttatttaaatttaaaagtgtagtgtaactgagaaaattattcacttctctattaatattttattattctatatccctatacatataaaataattacaagcgcagactaaaaaaatcttaattttggtcaacaaaagttgtaactaaaagtgaaaaaattgtgactaagtataaatcatgatttctatgttgtgactaaaagatccgtggctaaaagtattagt

SEQ ID NO: 42095 - DNA, 1259 bp, Cannabis sativa
tattgcatgttaattcattaattttgatcacccattaattgaaaatgttaggtatatattttctttttgaaaaggtgttaggtattttttctaattattgtaaacgatacctaccatatttttgttcaagtgagttgaattccaaattgttgtatgatattcttttgtttgtatcttccaaatgtttaattaatgtctaatatttggtcgttgttatcatcaaatttaaggttgtttaaattcaggttcaaattgtgtcaaaaaaaaaaaaaaaaacctcaggtttaaattcttgtcccttgcaatttttttatttgtccggtaagggttattaataatttttaattatatatttgaatattgaaaaatatatactaaattaattaggagtataattttgaatggagtactgctattaatttttaaagtgctgaacatcatatactgatatagtgtattattagtgattaacagttttatatattatttattaaattgaaaaatatttaacctaatatgaagttgaaacaattgcaattcgacatttttttttatttttcattttatattgaaagaggtgcagattgttttaaatttgggattcaactaaattatgtacaaattaaattcacaaaattttagataataaatggtaaattttaaattcactattatacatgtctgtatgccactgaaaattaatggctattcagattgatacgttaattaatttaatttatattaaatatactgtattaattatttttgttgactgaattcctattgctaattaattgatttataagtcttaaattggtgtaatacagtatgaacaccactatttaatagggatttgattctcggatgggtgtgttgccgagctttaacctatattagagttattaatgtgtggaaataaaataatataagatgaatgaattatgttaacataaatggttataagtacgggtatattgctattataattatattttttttaaaataaaattgattttaattattaatttattaataataatccacataataaacttgctttattaactgaaacataatatattataatatcatcatcacacttagctagcttaattagagctctagcttattattgaaatgaaaaaacatgaaaatatatatatatatacctcgttacacagtaatatacgtaacgttagtgtacatgtgtgtatatatatatataattaatgggttcatcaagaaatgaaatcaatctt

SEQ ID NO: 42096 - DNA, 5487 bp, Cannabis sativa
  modified_base (418)..(430): a, c, t, g, unknown or other
gagagagagagagagaaattgtggtggtggtggtggtggtttggtctgatgaaagaaacagaaaaagagtagagagagagcgtgaagaaaggaaaaaaagcaaaaaaaaaaaaaagaaaaaacttgtttttttaatgatttttttcttgtgtttcaaaaaaaataattttttattttatttttaaagatttatttatgtgggctaataatattgtaccacgtggacaatatcctatgtacacatggatagccaacctagcacttaactgctaaaaatagacagaaaagactaaatgctaaaagaatgctggttttaaaggtttgccgtcaaaatttaaattttaagagttatattgccactaaaatataagtatattaagggttataccgcaattaactcttattattattattattnnnnnnnnnnnnnttattttattttattttttgatatttactaaaattttattctgcaaggtccgctttaaggtatatagtatataagataattaaattttgggacctataaatagtttaaatattatgagaataataattctagtctactctcacacaataatgaaatttttaaaaactcttaaaagtttcaagccttgatcctccataagcacacatttaatatttctaaaacaaataaaaaagtagagattagaaatcgatctattgatctcatactcatagtttgaaacgacactatttaccactacactgaatattaatttgatacaaatcatatttttttttataatttcaagacttgagcattcaggggtccaagacgcagacttttggtcacctcaccttagagctgaccctatatgaaaaaacaaatggaggaataggagtgtatcgaaacaatccttatattgtactgtagattttttattttgggcaaatcagaattatatattgctcaacaaacatcgtttacattctatatatcatcataaaaaatgcttgctttaattttactataatatatctagcaaatcattaactatctattagttatatttttttagacgtaaaccctttcactttattttttacatctagtttcattctctttgttagcaacgtcaccataaaaatcctttgattccacaatgcttcattttgacatgaccataagatgcaacaaacacctgttttcgaaacttagagagcttcgcccgatctatccatttcagtagccgtggaaccgtggagtggaggtagaagttttccagcccaaccattcctttatattagaccaacatatattgctcattttacattcaaaagataaatggtcccttgtttctttgctcataccacacaacaaatattgatcatccttaattattttaaagtttaaactctgaagcaatctttccttctgtcaagtactgtagattttaccaaaaaatagtaattaaacaatttacaaaaatgaatttacatactatatgcacacaagaatattaataaatttgacatatagagttggtattttataataattctattacaacaaggactaaaatgtactcatatatattgtggtcataggcaagaggttggtatggtttgcagattacagaacagaggaaatgcacaattgatgaatgaaactagggattcaaagtttgaattcccttgctgactttttatttaagaaatacccagagttcgagagctgggattctctccaaatacaatcaatcttcttacagcccacctccatacaatttacagctcactcctcatatactcactccccaccactctaacaatgtaccctcatacagtaaattaaaacactcctaacggtttgctgacttggcactcttttcacccttttttaccctcctagcatacacgtatgtcaagggcggtctaacattacccccggcccaaagacgcaccttgtccgcaaggtggaaatccggaaattgctgctggattgtgttaaagtcttcccaagtcgcttcaaaatctggtagatggagccatttgattaacacctgtggctgctgaaattgagtccctggacgcaaagccaacatggtttcaggttcaaggagccactccagttcttcagtcaacgaagacggcaaaggaatggctgattgttgagggcctaacgctggtcgcaacaatgacacatgaaaaactggatgaattttagcttccggaggcagaagcaatttgtaagctgtcgatcccacttttgccagaactggaaacggtccaaagaacaatggacccagcttctgatttttccgtttggccaacgtttgctgtcgatacggtttcagtttcacgtacaccttatctccgacttcaaactgaatgtcacgcctcttcttgtccgcttgtgccttcatcttttgttgtgctcgctgtaaattcagctttaacaactctaaaacattgtcccgatcctgtaaatttttttccacagctgagacaattgtgcagttcccctccattcttatgagcggtggtggatctcgatgataaagagccttaaaaggcgtcattccagcagctgaatgatatgcagtgttataccaatactccgcccacgccaaccatttcacccactgcgaaggccgagagctcacaaaacacctcaaataagtctccaaacaccgattgagtacctcggtttggccatccgtttgtggatggtaagctgtactatacttcagcgatgtcccctgcagccgaaataactccttccaaaataggctgagaaaaaccttgtcccgatctgaaactatagttttgggaatgccatgtaatttaacaatttctttgacaaactgggcagcaacggtagcagccgtatatgggtgccgaagaggtacaaagtggccatattttgataaacggtcaaccacaaccaagatcgaatcgaacccattggaaatcggtaagccctcaataaaatccatggatatgtcgtcccaaacttggtccggtataggtagcggctgcaacaaccccgctggagactgcgccaagtacttgctttgttgacaagtatgacattcagcaacgaatttgtggatatcttgccgcattccctgccaataaaaatcagcggcaatgcgctggaatgtgcgaaaaacgcctgcatgaccacctatcttactgcagtggtactcctgtaaaatcagcgctataaacggcgacgaaggtggaactaccagcctgcctttgaacttcaaacagccgtttgaaaaagagtatcctaacacgtctttgccttgctgaagctgctgaataatgacactcagatgtggatcggtagcgacgtgattttgcaggtccacaaccgaaattaaattagggactgataaggcgttgcaagcccctacttctggcatccgtgagagtgcatccgcagctttgttctgacaacctggtttatattgaacctgaaagtcatagcccaacaacttcgtgagccatttttgatgttccgttgctaccatccgttgctccagcaagtaccttaggcttcgctggtctgtgcgaataataaatttgcggcccaacaagtacggacgccatttctgtacagccaagaccatggccatcaattcgcgttcataaactgatttacagcggtcacgaggtgataatgccttgctgaaataagctattggtctttgttcctgcatcaaaacagccccaatacccgtccccgatgcatccgtctccaatataaatgggctgttaaaattcggtagagccaaaactgggacctcacacatagcagttttgagtgccacaaatgccgcttgagcgtcttcattccaaccgaaagagtctttctttaactgatccgttaatggtctggccaagtacccataaccacgcacaaactttctataatagccagtgagtcccaaaaacccacgcaattcctttaaatttctgggagttggccatgctgccatggctgtcagtttcagcgggtctgctgaaacgccttctgcagaaacaatatgccccaaatactccagttgagactgcccaaataaacacttcttcctgttagcgtataaacgatgctgttggaggcgggacaataccatatctaagtgctgcaaatgaagctccatggaagtgctatagatcaaaatatcatcaaaaaaaaccaagacaaatttccgcaaaaactcacgaaaaacatcgttcatcaaagcttgaaaagtggctggagcattggttaagccaaaaggcatcaccaaaaattcataatgaccctcgtgggtgcggaacgccgtcttctccacatccgtcgctgccactctaatctggtggtatcccgccttgagatcaagcttcgaaaaaatttttgctccatgtaattcatctaacagctcctcaatgactggaatggggaacttatcagccactgtttcacggtttaatgcccgataatcgacacaaaatcgccaactcccgtctttctttttgacgagtaggacgggactcgaaaacgggctggtactaggctgcactacccctgcctgtaacatctctgcgagcagcttttcaatctcgtttttttggatctgtgcataccgatagggtcgtacggaaattgggccagccccttctctcaaggtgatgcgatgctcatgagaacggtgaggcggtaagccctttggcatctcgaaaacagcttcatgtttgtgcagtaactcttcgatgtctgcttcaatccccgtcgattcttcgtcaatcaccgccgttaacgcaccacattaaacccaatagccttgtccttcatgttggacagagtgaatcaaggccttcaaagaaatctgtgacttacataaactagggtctccttgcaatgtaatccaagtacctcccacttcgaatttcatcaccattgtacgccaatttacttgcatatttcccagagtactcagccactgtatccccaaaatagcatcggctccgccaagctcaagtggtagaaaatcagtcaccacgcgaagcgatccgagatccaactcgacattcttgcaaagtccctccgttcgaactcgaccaccggtacctaagagaactccataagctgtagtctcggtaacagccaagttaactgccgtcacgagatccttggacacaaaattgtgtgttgcaccgctgtcgatcagcaccgttactgggtgtgcggctattgaccctaaaattttcatcgtatgagctgatgatatacccactaaggaattgagggataacattgcgagctgttcatcttgtacggtttcctccactgactctgggctagaagggtcagattcttggctctcggaaccctccatctcatcggcaattaacataacgtgcagcgacttctgttcacaaacatggccacgatgaaattttttatcacagcggaaacaaaccccacggctcttcttatcttgatattcttgctccgttaacctgcgc

SEQ ID NO: 42097 - DNA, 6976 bp, Cannabis sativa
caaattgttttcaaaaaacattttcaaaaaacaattttctgtttttaaaaacaaaaaactgtttttcattatgatgccaaacatgcactaaatccttcaaacttcaattatgttttgatattcactattttgtctattttcttcttttaactgttatcatgaattattcacgtagacacttatgttacatatgacatattttaattgatctaactcattttaattaattaaatgattaaaaaattatattacattgtaaaaaataattaaaaaaaattaaatattaaaaaaatataattttagaacataaaaaactataaaaaaaaaaaaaaaaaactagttctttcttcctgataccaccatagcctgaccaccaccatagctagactgccaccctctagatcatgctaccaccaccgcaccattcatgtaatttgatcaaaactaattacaaaccgacacaaggagggttaattactggaattgatcatatcaatggatactatagtaaaactcaataaatatatttctatcattactaagagtttaatttcatatttatcgtggagtaattatgagattaataaaaaagattatttgtttgatgagattcaacatataaattaggttattagagcttagaattataggtccataatctccttatcgccaccttaaaacactatcaagatatggataaaaattgtatattgatgtctgaaaaaatctattttgatttattaaaataataaaataaataatttatttttaaatttattaatttaataaattaggaaagagataaaaattatctggacaaagacaccaccgttgtcttgtcaagacaatggtggcgccactattactgtgttaggactcagtgataggcgcccttattagtagggatgtcctaaatgaatttgtttttaggttaattaattaatccaaaagataaatatttatttgaatttaaaaaataattcaggataaatatctttaaaaaatttggttataaatacttattcaaataattaaatatgatttaatttagggaattaccccatatactgtttttttaactttcttttttaaatttacgatttaggtttctagagtggttgcagcgctagttgcaataggggtttctctacgattttttgttacaatttaggttgcagcactagttgcattatgaatttctatgtagaattctgtaaaaatataaaaaaaaaatattttaaaatgtaaaaataaaaaagtccctttaatttattattttgaattcaaatagttatttaaataaacttttattggttttaatttatatagataccatgtaaatctaaaaatagatacgtatagttcttaagattaatttgattaaaacctttttcatcactcttaaaattcttgctcatgttttgagattaaacctagaacataatatacactttatcctattatctcacactaacccttatttaaataaacctttattagttttaatttatatagataccatgtaaatctaaaaatagatacgtatagttcttaagattaatctgattaaaaccttttccattatcatcactctcaaaattcttgctcatattttcagattaaaccttgaacataatatacactttatcctattagctcacactaatccttgtgtatggtggaagatacggagactacgatgtgagttttcatcatcatcatccaatgatataacttacgaaaagaaacaagaatactctgataggcttcaagaggtaaattttcttttcgtctatttatttcaaatttaatgtatatacatatggtgatcttgaggatgtagtatgattctgttgcttacctgatgattttttaatttaaataacgagtacaatagtctcgtatataactgacacatggacttatttcttgtacgaaaaggatgacgcgtcaaggacataaatcccgataaaaatacattctcgcctgatagaaacatacaagaagatagcgactgggacaatgtctggtcacatgtaatgtatcgcataacaaaaaaaaagtaaaagcgaaacatagaaagaagtaagcacaatcgcgacgtataccgattatatgcgctggccaagtgtttctcccttacgccttatgtgaaggtcgttccttcatttcagttggtccaaaggctcaatattcacggtaacttgtctgaacccgtgagttcttaaattgccagtatacgaacgatcaatacgcgaccaagatagtggcccccagtggaaattgttctctcatttatttgtacaaacatttttcatttcctttaatgaaatttatatgtatagcgatcatgtctggccagttatataactaaaagggttatttactttctatataaaggaatgatccacacataagaaagctcatcacaaattcttgcaaaagtatactaggcagcccgagctcttattgaaccactatatttctgtgttccttacgtactccttgttttatactttcactacttattatattgtatttgagcattcgtcattctaggtgaatactcactattactctgtgagtattcttgcttagcttgaatactcgcatatcttggtgttgtatattatcctccgacaacaatgtcttttttaattaatggtaaagctcttcaacttattattgagatgagatccacaacccgaattggtattctagcttggttttattgcttcccgacaaaaattttaatacatgtttgacatcataactaaaaaacatgtttttttacttttaaaaacagaaaattattttttgaaaacaatttgacttgtttggctttgttttttgaaaacaattttcaaaaaacaaaattatagaaaataagagttttaaaaacaacaaaatcttgttttttattttaaaaacaattcacttttactggtatagttatgcaattttcatttttgcaaaaaaaaaaatatatattggaaaatcataccacacacactttggagtgtctttggaatgttaaatgtgctacatgatattgtgtattgaaactgcaggatctgttgtagacgcaggagcttgtttttatcatttttaataatataaaaacccaaatacactaatttaactcatgcttgtaagaaagaaaaaaaaaaaatcacgattgtacggacaagaaagacagggaaaacgccgacatttaatggcccgtactctgtgttaagatagataaataaatataaataatcacgctggtacggaagagataaggaaagagaaactaaatccttgatatggtgttttttttattggtgggcttaatccttgagttaattctgttgaacagtaattaaaaatgagaggtacaaataatatttttaatcataggctgtgctacgaaaccttcgaatagtggaaacattcaagatcttgaggataacctggttggtggtgcaccttggagtcttgaactggctcattgcagccccattcccaataaaatgttccaaaattttcttaaaagtccctctctcaacaatgcacagctctaaaggacctatggagtttgttctcctcgaaacaacatagccatggtccacaaacgacgcgtccatctctccacaacattctttaagaaccctctcatctgcatctcctttaatctcccagtaaataatatagtgaccaggctgttttgccacctcagcatggctcgtaaagtcaacaagttcggctttggccttgctggttaacagttctgaccctttctccaccactatttggaggtccttctctgtgttcttgtcgatatttactgtcagcaaaagctttcttctgcataagaagttcaatttcggtgtcccattatgaaatcccgccacttccactacatcccctaatctgtacctgtaaagtcctgtaaaatcaaaaatattaatcaaacatcacatgtgactaaatatacatgatacattatataatgatgatgcttttgaatactgatcacacattatatagtactactaagaaatacccaacggttcaaatcgatctacgtctaatcaaagcttctagtcctagctataattgtacgcttattttatttttatttttcatccttatctttttgtttatggttgagcaaagatggtccatagtgagattgaattcactgtccactgggacttgtattgtcttgaggaaacatttctagatatagcatatatatttggtttagctaagccacaaaatgctcaaacaactttatgcatgtcgtgcccctacgtacgtattttgatcattgtttgagagactatgtttttaaataatgtgccatatatgttaatattagtaggagaatctttttttgttgttatctgtttaaacaaatagtgttttgataataataaattaataataataataatatctagtaccgtaccagtgaaagtggtgagcacaatctcatactcttgtccaaccttgacttgggaaagtgggactggttcatcttctatgaagtcatcactggttgaattgcaattcgtcttcgtcctataaagtggtatgaactcaaagtaagaaaaggttggaatgactgcaaaagtgaccttttctggaggcaaacaagggtccaaattagccccaatccagctctctgtcgacccataatcagcactaactaatggcaaatccttagcatagtgccttaactttttcatgtaaggctgcatagaacctgtcattattgagtaaacatatttggcattaggccaaatttttggaatgagaccgtgccaatccaaatcttccaactcctggcaacaggcctcaatttttgaagccaaacttgggttaggaaagattatttccatgactgattttctcagttttggtaatgtaattactgagatactcaaagtgccttgtcttatatcagcgcacaactctttccaatgctcttcaaaggaaataaaggcctggactatgctgtaggcaaaagtggaggtaatgaactcaactttgtcagagaagatgagcccaagtaagagatgacaataagttgattgtttataatctccacttgatataacctcttgtgggctacaagtaaaggacttggttttctcctgtttgattttgaattcttgactgttgtaatagtgagttgtggctgttcctactgttaatccacctttagttttgaactgtttgctgctataaataaactcaagtattttacctccctccttcgttggaaaagccctacaaaatgggagcaaagaaacaaacaaaaaccaatatcatatagagctataaatgtatacataatcattatgaactataaaaagaggtattgaaccttgatctataagctgctgccagtctaaaaatttgaagtgtggtttgggcactgtgccgagtgaaaggcacaaatttttgcctgccttctgttgtaccggagcttcataaaaagtagaacaacttcaataacaacaacaaattctgaaaagaccccagaactcaaagccacaatctttttcattaaaactttcaaaagatgaccttttttagtacagtaaaacagaacatcacagttcaaaaccagagcatatatatatatatatatgtaaatagtttaccttaaggatagagtagtgattggttgttgagtgaggagaggagcagtgtccccatctgcaattctattaataaggggttcgatatcagcatgagaggaaagaggaaccaaagaagtgtaaagggattccaatgcacatgaatccaactcatggatatctatgccattaagccatttcttcagatactctgtaccgtaattcaactccagtatccggcgaagagtctgagtttggacccaaccggcgttttcagacacttcttcaaaccagctaacgacatcgttttcattattaccgtttctctgctgattttttgtcactgaattattagatggttccatattgaaaaaacaaactaacaacaaaaagaaagaaaagaaaaaataattgtatgtgtttattgaggtatcagaaaattggtgttagtggtttgtgtaatatataaccatgttaaatattagagctacatacataaatagctattatatataagatcgatcaagtggtggagagaggagggacttgaattataaatatgttggtttaatggggtcaattgataataattaataaatatgatatatgtatgtatatgtatatcttcagtctgtagttctgtaccttactgaaaagctccaaaaatacagcagaaaaaggctatcgtagaatggtacgacagcttattgaccacatgagatggggttttatcacgtagtaggatgattgtgttgattgtgttgagatagagagatctttctctatgtcaaggccttgtgaggataccattacaaatgtgggagagagatcaaatagggaccactttaataattgtatttgtgaatagctcccccatcccttatatatctagattctacctttgctttcattaacctcagtatacgtacactcaaaatctcactatccaacttgtttacaaattttacgcacatttatttacatacttcccttgtttgtttttttcttttttctttttcagtgggtggatggatgtaatgtatgttgctggtggctttacacatgtatataaagtaagtaacgatatttatatactcaaaacggtgacactgaataaaaaataaatcttaggtgtcgcttttgataaatattattggtttgaaagattacgaaatcattttgtgtcctctttagatacatattacaatacagtgtacatataatatatttttaatttcaacattaattaaaatcatttttaagaattaatatttatatatatttttaaggaattttttcatttttatactttaaactagtttttttgtatttttagggaattc

SEQ ID NO: 42098 - DNA, 1451 bp, Cannabis sativa
aaacaaaagtgatatctgtaatataaattttaaaagtataaagtaccttaatgccacggtggaaggcagttccagggattttaaaaggcaaagaagcaaaagaggaagaaatgagcttaaaattggctctgaatttctcttgttcttcacctgacggctccaagctcattatcatgtgcccaatcacttgtagtgtgaactgtcaaacatcaatttatcatttttttttaattattctttaatttatatccaattttatagactatctatcttcttgcattagactcgaattttgataagttatattttatttgcatgaaaaacttaactgtggaggcttcttcaagaactaaaacagttcttccatgccaattgtccaaagtggaaatggtgagggagttgatgaaattgaagtactttttgagtccatctatggataagggctcggcgatgaggcggcggaggcgcttgtgggcgtctccggtggtttggagcaagcttgtggggccaagcacttgctgtcctgtgtagaataggttcaaactcaccattccatcttttccacttaataatattttgcttgcttctcttccagtcatgaaaactgtgaatcttcctaatacaaatgatttgaatactttcccatacctataatataatttatttatcatcatcaaataccataccactattgttaaaatcaaatgaataatatttagcattatttttttggattagttgtttgggcaatattattcttttgcataattctttacaattattttgctctagaagttaggtgaaaaccacaaaaacatcacaaaaaagatatcaaacaattcgtagattacaaagaacaaaaaccatattctttcatagagggatacaatcagacaacctatctaaaatattttttcttttttgaaaggtttgaaatgttattttgtaaaaattggaaaatttttaaaaatattttttttatgtttaatttacaattttacgaacgaaatttttatttataaaaatacgcttgtaatattttaaaattatagaaatacacttttctcaacaaaaaaaaaagcaagaaaacaattaaaaaaaaacaagaaatcaatctcacgacaattataattaaactataaaacaaccaaaaataacatatcataataactataattaatacaactataaataaactataaaacaactaaaaaataatttattatttttactgaaaaaatatttttataaataaaaatttttcatgtgtttatataaataattttgtaattttttttaaaactttccgtgtttgcataaattttccgtatagcaatccacatagaaactaccggtaaaactattagaaaaatccaaatcgtaaattttttttttaaaaaaaaaaagttaaaaagtagtatatgaggtaatttttcatttaaatttacggt

SEQ ID NO: 42099 - DNA, 996 bp, Cannabis sativa
gaactcggaacagaatcggcgtgaaggagctgaaagataaggcagcgtggaccaacgcagagctgtattatggcgacggggttctcgatgtagcggttgaaggaaggtcgccactcgacgtcgaggccaacgatgagatggccgaggctctgattgttgatacgcttgatgtcctcgatccaggagtcaaccatggaagcggagatggtgactagggttcggacggtgatcgggccgacctggacatcgtagaggtcatgggtttgagagtcaagcccgtgattgacaatggttattggcgtgggttccatttttttttttttttggtgagtttggggattttgcgaggtttaatttgagttgactcagactcagtgtgaggttttgtttaatatgttattcaaattagcttcttctttttttttttctttttctttttctttttggtaaggttcaaattagctgaaattaaaaaatatacagtcgagagtgtgataaaaaggagcctcactgactaaatttgttcagatgtaaagtgagtgttttctgaaaagaaaaaggaaaaaaaggtgagtgcatcctttcttaggtgccctgcacaccaagtgcaccagtagacgatatgttgggtaaggaaacaattcgaaaatttccacataactaccaaaagtgatgagggaaaaaaaaagagtagttaaagttaaagaggatactaattagtaattagtgaccgtagattgatgttacttgttcgtatgttaattttattttagtttttagttttttataatattataattttaaaattaataatattcaatttagtgataatcatttaaatttgaagacacaatagtgatttaaataaaaataaaaattactattatactttgtaacagtaattaaaaaaaaattagactaattagaatttttgtcccctgaactttgacatataccaaatcatgtccccttaacttttaagatcattaaaaatgt

SEQ ID NO: 42100 - DNA, 4903 bp, Cannabis sativa
acgtacctgacagaagacaaatgcattgaaaattagtgtgttaagaaccgcagttgaatctgaaccagtgagtcccaatagcttctttccatcgaaattgagcaatgcaagaacaatgagttggtatatactctgaccaatgatattcctccacatggcctttgtgatgaagcttgcaccccttgctactggtggccttttcattagctcattggttggtggttctgtggccagtgccaatgcaccaagagtgtccataatcatgttgacccataaaagttgcacagccgtaagaggagcagctcctgaaagtgatcagtgatatagaatcgttacttttgagtactaatgttagtctaattgagtagagaaaaagaatgagatatagagtaaggaacctgagatgcaagcagagaagaaattgagaactagagcaacgacattaactgttagctggaactgaacgaacttttggatgtttatgtacaccgatcgtccccatctacctacatttacgattgttgaaaaattgtcatccatgatgatgacatcagcattttcttttgctacctgcaaaaattatcagtaacaaaaagaacttataagaaaatgtattcattcatggagaaaatggtactaatttcgaatggctgttctacgagttcataaatccaatagtggcataatagtttacaacatttgaaataatgtagcttagttgataggaaagcaagatcttaaaagagctcaaaataagattttaacttgaaaacgagagtattttgggtacttttaaactgaatatctagtttaaagtacaaacagggaacaagacttgaatatctagtttaaagggcacaaacctctgtccctgctatacccatagcaagcccgatgtcagactcgtgtaatgcaggagcatcgttggttccatcaccagtcacagcaacaacctcacccatttttctcaaattggtgactaaggtgtgtttgtctgaaggcgaagatcgtgccataacctgcatccatataaagcacaagttgagccaccttatgtttcacatttagatatagaagaaagagaaaagtagtttttgatcagacctgaattttgggtataacctccatcatctgttctggagacaaattacgaaaatctggaccttctatggccataccacctggtgtgagtatgccacattccttagctatagccttagcagtatttatgttatcaccagttaccattctaactgttattccagcagctaaacaagtttcaactgcattcttcaccccagggcgcacaggatccttaattccaacaactgctaccaatgtataaccattatcagggatagtattttcaacaatactgtcatctatatcctggtaagccaagcagagagttctcaaagcttcacacgcaaaagaatttataacatccgatacattttttgcctgctgatcagataaatcaataggttctccctttgagtctataaccttgttacacatacttagtattatttcagatgcacctttgcaaaaagcacgcttaccgccattaggacgaccaacaagtacagacatctttttcctggccgaattaaaaggttctatcttaagtatattcatatctttacgctgttctttaaattcagcacccagaagcaagccaaattctaatattgctgtttctgtaggggaaccgaagatggtgaactttccatctacatcagaaacttcacaaccagtattttgaaatattacttggaataggatgcttaaagcatcttcagatagctcagattttacaacattttcactctctttaccttttacctctatagatttgtcagatatccaaactttgttaaccaccatatggtttgtagttaatgtacctgttttatcagtgcaaatgcaactagtagaacccattgtttcacatgcagatagatgcctcacaagtgccctttcactcattaatttgctcattgcaaaagcaagactcagtgttactgccaatggtaacccttcaggaactgcaaccacaataatagttactgcaatagcaaagtaatccaaaagcgtaagcgcatcaactgaagaccaaacagaaatctcattgagaagtgctttgtttatcaaaaatcttgttgtcaataccagaaaagttagcacagcaaaagtcaacccaattttaccaataattgtagccacaccattcaactttacttgtagcggggtctcgtcgtcacctccctcactcaatgtctccatcaacttaccccattcagtcctcatgccaactgtggttaccaacattttcgctgctccgtcctgcactttggttccacatagaagaaaaggtctcccttcatctacattaactggttcactctcacctgacaagcttgattcatcaatcagtaaactataaccagatataaaaatcccatcagctggaacttgatcaccaattgacaaatgaacaatatctccaacaactaagtcataaatggaaagtttctgtctttttccatctctagtgacatgaacaaagatcttttttttctcctcatccaagcgtttgaattgcaaggattgcctgtagtcacttatagcagtaaccatgacaaccaagagaatactaagtaagattcccacaccatcatacataccctttggaaacccttctgtggcaactcctacaccgatagaaaccgcagcacacaccataagaatgattagtgttaagtcgtgtaatgcttcccatacgaacatccaaaatgttctagcttgtttctctgcataacgattaagtccaaaaaccttctgtcggataggtatgtccttttcgctaactccatcatctagtgattccaccttaaccttttttgctattccaggtactctaccatgtacattcatggctctaacatcatgactgcgtatgatagctgccagctcatctgggtgaatatcaaagcctgcttctctggcctcctgagacaacttgtactcaatccgaccaccagctacacgcaacacaaactcaaattaaacaatatataaggagattaaggaatcttacaaggcaaagataataccatcgatgaactgcaatgctgccttctgaacataaagggcaactcgtattttttcctgttagagaaaatgaacgaagaccataagcaaaaaccatacactcaagagccataattgtaggggcattgaaatgctagtgaactacaggcgaataaccaatgtaataataatttggaatttcatagaaagattttcatcttctgcatgaaaaaataaatgtatttcgtgaacataaacagagatttagtggagatctaaacaaccttaacagcacaataatcagtcatccttgcttgctaaacagtagcatatattgttgcaaagatgaattgttttgaatgaatcaaaaatgctaattggcttttataaatgataattcatgcattgactagtagttctaaaatgtatgatagaatagatttcacatgtcacaaaaaaaaagtgtaataaaatggcatgaacgttgcctaactcgtggtctattataacacatttaaactataaattgtttcattcagaactcaactctttgatagactcatgatagatttctataaggacatgttgggaatgctcataagaataagatcggaatggcaaatttatcatgtattttagtcatgtaaataaagagggtgtgtagaaaaaagaaaacctctcaaaaaaaatatttagtggacaaaccacagatacataaattaattaaacaagtatttgtaaacaagtgattcttattttcctttttatttttttttataatttacaaccgaacaccataacttattttactttattttttattttcacacaaaacaatgcgacaccgtatattaattacagcacaagacctaagaaaattagtttcattatttaataaaactagtatgtgaacaaggggcacacttctatattcatcgaaaaataattaaagaaaggtaaactacaaaagcctttgagatttgcagcagcaaaaggataaaaataaaaagaactgtaacttctttatcaaagtatggaatcctagtaaacccagcattagaattgttatgaatattctatagtgtccaacatcataacaattgctatgtaacaccaccatatcttaatagtgggtatcatatattttattttaaattaaaaattaaataacatgaaatcccatactaagttacgacaatatcccttagtattattcataacaatttaacatatcgagattgattctcttgttggagttcgtaataattgtgactacgactacacagtaaaacgtgagtcacacaaagtcaaaagtctaagctataattcagcatgtgtggctttaacaaattgatcaaaagttcatgtcaaaaaaagtgtacatgtaacagaatgtgacaattgaaaaaccgtgcctctgaaccacattagttttattaatctcatctatttttctcttgagaaagaccattaggtttaaagccaataatggtattcgcctttaagatgaagtgacacaaccacaataaataagtaaataatagaataaaataaaatcctgaacataaaattaaaaatcataacaataagattaagcattaatttatttaaaaaatgaggtagaggacaatacataaccaggttattagacaccggaacaaacaaataatttgaatttgaaccctactaataaacggtatccaattgtactacgtacatgctttaaataatttaattttcctaattattcagctttttcatttattattttccttattctgaaaacctaagaaacaacgaggaagtttcg

SEQ ID NO: 42101 - DNA, 965 bp, Cannabis sativa
  modified_base (39)..(44): a, c, t, g, unknown or other
aatttctcataaactaagaattcagttatataggcacannnnnnatagaatagatatatataaattatatatttggacattctattctatctttttattttagtgatatattagttttcaaaatttggtcttttaaaatcccaattaaaaatataaagaaaaaattgtgtagtagcctttatttagtaaaacatgatatattatattaaccaattgtttaaagataaacacttgttacaaaattgacaattgagtaattaacaactttcaaaaccatttcagtacaaataattttaccaaaatataaggccaaagcttagtagagattactattgtcatgctcactcaatacattatcttctaatgatcttttcttgaaaactctttctcttgccaattttgcctgaaattaaaaaaaaaaaaaacaattaaacaaaattgttagaaagattcatttgatctaaactaatatggatttaataataagttaatattattttggattttgtgttttgcaaaatttaccgaatgagtcttctattttattaaatgagattataaaccttgtattttccaaaacggtacaaaaaaactcagtggcagattaaacaaggaggagtcaaataaagtgtattttcacctaattctttttagtatgtagtattttataaattaattagttttatacaactgtatataaaataacgaaaaatgctaagggtcaccttatagtgtcaagtactataaaatgtggcataatattattagtgtaaaataatattaggtctcaaatattttaatttaataaataatataaaaaagcgctaaccaattgtatggtgctacttcgatatggagttggacactataaaaacacatatataaagatacatatgaatatatatcatacaaaagtactcttcaaaaataacttatattattcatttttttttgtcactttttac

SEQ ID NO: 42102 - DNA, 853 bp, Cannabis sativa
aagaaattggtttgttaaatattggtttgtaagaaatgaataggtggcagattttgaggctcctaaggtgggagtagccgttggaatggcaattttaaacattaacaacacttttcaaatggtcggtggaggaagttgccaagtagggtgttcattaaaccgtttatactctacaaactgcacgtaccgcactataccacataaaaatgtagttttaaattttttacggtgtggttataatttgtatttttatcaaactgcgcagtgcaatgcagtttgcagttttgaatttaataattacagttcaaactgcaccgcactatatatttcagagttacactaatttttattcttttttttatataagaataaatatatatgatatatttatatattacattattttttagagacaattcaatataatgacttgatgattattatgtgttatgatgttaaaattttaattagatttttttattatttattatgtttataagaaaaaacaatggtgcgtacaataaaatatgtaaattttatttttattattgtaaaatattcaaattttttaaaaatttacacttagccttaagtacataatatatacgattatgatcataaaaagaaattagactaaatttttttcttaaataccaaaacagataaagagtccatcgggaattctatacgacagacttacccgcagtgtactcatacttgagttgtgacaagtgttcatgatatcttcaaaatcattttctatttatctttagtttgtgtacttaagaataattaaatcttattatataatctatgttcatcaaaggttccatatagtaggcattttgcaaaa

SEQ ID NO: 42103 - DNA, 1160 bp, Cannabis sativa
atatatatatatatatgctgacccacttatcacaacccattttgtcttcttattcatattttctttttggtgatgttgatcatcaaagttgtgtttcttccaattttcaatactttttgttagtttgttttaaatcattccactacctaggatgtgatgtaaatatgttttatttttgtgggtattttaatttactatgggaatggaattcaattcaattacataatgacacattgtttgttaaattgttaatatatacttaaacaccattagtattaggtaatataataattaagagtgttcaatattattataagttagtatttgtttcacaaagatgacaataaatgataaattaggccgatttaataaaaatttaaataattcgggacttatttgataagtcgtagatcgtgtatgaaataacaaatgacaatatatttggataaaaatattgtattgtattgtattaattatttaacaaataataaatgacctgtattagtttgtattgtaatgtttacaaggggtttgggatcaatatcggccctgaccctagcctcggatctcgaacccggacccatatcctaactatggacccggatcccgaccccgaccctgaccttggaccctggaccccatatccaaactcgaatttgggtctgagtctaggtctgggttcgggttcaagtccaagtccatataggtttgggtttgagtccgaggtccaggctccgagtctaagtctgagttcgagtctaaagtcgaggccccaattcgagtttagatttggatcaagatttgggactaggttcaaatttgagtcggggtccaggtctgagtttgactccaggccaaggttgagattggggtcaagtttatcgtaaacaatttataattttacacaacctattagtacaaagtcaatattgaacatagtattatattaaataatactaatacaatctaatacattattatacaatacatcatgtaccaaatgagctttaatgtctaatataaccattttctgcttgattaattatagaaaattttagtgaattaattattaattattataagtgaagtagtttggaataagtagatagatataagttacaacttcttttctttactttcttgttcttttttctttttat

SEQ ID NO: 42104 - DNA, 5126 bp, Cannabis sativa
ttaacgggagatcaaaagtaatcgttaaatttaacagaatattctttttatttttaagtatattctgttaaaccaaaaaatgccgttaataaagatatccgttaataaagatatatatatatatatttatataatatgtagttttcattgaataaggcaattcgatcacattcatcttcccaaaccagtaattgtcatgaaaaatatagtaatggtcatgaaaaatatatttctatatctattgttactatagaagaattgaaatatgagacaattttttgtcattttcttaatctgtttacatttaatcaaatttgtatgacactatggggaaatatgttttctatttttgtctttttgtctttttatctttttcattttcatcaaaaataaatcatctttttgtttttattttttatagactttttaaaacattataacatataaatgattgtataatattagcctttatttaaataatactttaagtttgatctaaatatgccaaattaaaaagtatatgtcctatactatagtgctaaattaatgcatataaagtagaaaactttaactttgattttttttattgacaaactttaagtttgatttaaatatgccaaattaaaaagtatgtcctatactaagaagataagttaaattacaaactagaaaataattaattgtgtgaattgagtccaatgcatttgaagtggcataagataaataattatttcttttaataatttttttataagctttgaggtattttaaattgtattcaattttccaataaatttttaagaaattcaaaaaattaatttaggattccaaaattatgagaaacaatttgagcataacatcttaagttgtgtaatttttcaaaaatttgtaataattactctattactatattatacatcatcataaattttaaaaaaattataattataataacaaaaatataaattgtatttataaatagtgattaaaaacaaaatattctcttaacagaatttatttaacttagattcctactaaatgaaatattacgaagcatgaattattgacagatgaagtacgtcttatttgcgattttcatttagaaactacttatcatgttttatggtgtttcacttcttaatctaagtgtcctaagctttgggatgtttctttggggaaactctaattacgtgtcatgatttttatgagttcggtcataaattttttgatccattatatttagagttgattttagttatcatgtggagaatttggtttaagagaaaccaaatgatgcacaataatacgtttctttcaccaaatattgttatttcttggggtcgtgatttccttcttgattaatagagaataatccatcagtcgactgagactttgcctgtaactcactgtgattcggttggctttatttggatgttgcctgctatatattaggacagtgaaagttaatgttgatgctgaccttggttctttaaatcacaaatgtggtttggatatggtggtttgtgactcttcaggtgtcgttgtggtttctgctatttggttgatcttaggtagtttctttcctaaaatgttagaagttttagcattgaaaaatgtagtaattcaatgtcgcctgttggattttcagaacatttttttgaatctaattatttaaatgtggttctgaagtttaataatgaggtttcattggcttcttctttgaagttggtcttaaaagattttaggaataacttttatgaatttcattttataagtctttctttttgttctagatttattaatgttgttgctcatttcttagctaaatatattttgtgggaagttattaacaaggtttgatagcctgattatcctttttatattcataagtgagattaattaatataatcaatgttccctacctttcaattaagctctttgcttgaaatgtggtttttttgtggttcttcttaaaaaaatacccaacaatttttatataaatatataaatttaaaacatgtttttgctcccctaaagtgtgttgaagcttatcttttccacaataatagagacctcatataagtggtatagatatgaatctcattgctcaaactagagcacaaaattcatatttggaaccattgaaaataacatattactatcttgtattgagaaaaagaacacataagccatcaacaacaaaagaaaaaaaaaaaaaaaaaaagataatggactcaatctaggctggcctagtcaaagctaagctaatacaataataatgcctagcctatgtacaaaccaagctccaaatttcatttcatttctctatccattgcatattcattcacctaatgaatttgctcacttatttcttcttctttaaaaacatgggcaattttgtattatgatgaaattacaatttcccaccttgtatgacaagtgtttttttcttgggtaaattcttcttgtttgtttgcaccacttttttgctagtcattattctcaaactttgcctcaatatatcaacctctctatcccttttgtacatttcttgttccatagaaaccaactttgatttcaactcttttatggtctcttctttggcttggacctctctttttagctcctctgctatgtcttcctcttctgctctccaatacaatccaccttctgcaccaatcacaaaaaagggtaaccgaaaattcgataaaatactaaaaggtaccagtggtattcagcaccacttaaagtgtcataatattattagtacaattaagtattaatttttatgcaaaccatttgtagtgcgtgtctaataacaatgctcgaaaatttatagcaaaaacaaaaaataatgataaagaaattgtacaaataggttcatgtttcagtaaactctcaaaaagtgtcaattttgtaaagcttgtcaggaatataaacactattcataagcacatgtgtgtaccaatacaaaacattttttagccacagcatcaatgttggatctggtcaaatagtatataatacatttttcccacttacaatttattaaatatgaatttattaggtgctagccatttaataaaaagaaaaataaaaaaaaattgtacttttttttttcttatcttttttatgatgcaaaatagtacaataggaataaatactctgagatataggaagttgctaatgaaactaatcacttaacaaaacaaaaaataactatgaagtaaattagacttttgttacttttaacctaaaaaaatcttgaaaaggaggaagtttcttaagacccttttagacttagagttgggaaaaaaacaaaagcacttgcttttctttctttatccacctcttttaacaattttcttttatttattgtgatattttttttggctacaattcatagtgactttaccaatttcattcaattattttttgaagaaagaaagaataacatatgccctccatgaaaggaaagactaactcatacaagaaaagaaagaatcactaaacaatgacttcacaagagaataataattttacttagtaatgaatttagtattgtgtttaatgtgatgagatgtactatgcattgagataatattaataaatagaaaaatagagaaagagaattaccatgagtcctttgaatgagatcatcaagctccatctttatagccaaataaagttgtttccatttctcaatagtttgatctcttctagctctttcttgctccatttgatcaaccaagaaattagcacccaaaaaagcccattctttttcaacactagaattgttattatcattattattattattattattagcaacaaccaaaccttgttgttccatttctctaatcttatcttctttttcatcaactaaagtcttcaacatcttcacctcttctttcaatttcttcttctcttgtttccactcagcctttttgaaagcaaaagccatcatttctttctcataaactattacttttggactttgctctttcatcaccctttggtacttagactcaccactattattagtactacttttctcttcttggattataaacttaaccttgttattcttcttcttcttcactaaccctttctcacatgatgatgataaacccctcttactatgcttgctaggtttcccacccattttgggaacactgataagagtggtagtgatgggaaattctccttgggatttgagaaagtgatgaatagagttgtagtagtgaaaatgtgtgagtgacataaattctaagcaaaggctctcccccacaatcccattcatttaatgaagagaaaaaagctttgcttgggattgcttatataataagatgagttagctccactcacttactcactcactttatctagcataattattgcataaatcctaagggcacttgtaatttattatcgggtctcatataatttaattaaattaataatacgagaaactgctaactacttacaaattacaacacgctatatcggtattgtgttgggtacctgtgcttaatagcaatactcgcaattgatatttgacaccttaaaatacctaacaccatatcaatatgatacattataattggttagcgatttaaggttcatattatttattaaataaaaatatgtaggacctaatattttatttttgataaagattagaataaccataagtgattgtttaaccaaatcaaaaatcacaaataaaagattgtaaatttttgaaccatcatttgaccaaactatccctgatgaatttagataatcgccaacgcaataacatatcaaaaatgattcaagaaatatttgtaaaacaaaaataaggcaaagaaaaataaattaacccccaaacaataatattaaaaactaataaaagaaaattttcaacaatattaaaatatgtaaaactcgatattaaaatgcagtaagcaatgatgagtgaggcctaacattttggtaattattaagggagagagagagtgaatgaagtctcgtgaagggttgtctttgagtgatttatacaaacagattggacacacaagacatgaccaatatgcaactatatataaatgggaacaatcaagtcacatgcataatatatatat

SEQ ID NO: 42105 - DNA, 888 bp, Cannabis sativa
  modified_base (848)..(862): a, c, t, g, unknown or other
aattatatatacaaaaacttaacataacaaaaacaacgttatttttgaaaataattgccaaaataaggtggcccatgaaaatttcccttttttttatttgtaaatttgtaactattttgtaatagtagtatagtattgtatgttttgacaaggtccccgttaatttgtttgtgaaagcctttttgggcttaggaaatggttaaagaccaaaatactcttggtgagtgggttgccttttacttgacttagctcgatggactataatttcacttgggccgataaggcctttgctttgggcatggtaccacttttggccactataaatagtaggatattctagtcacttttttttttaaaaaaaaaaaatagtaatattttctggtcactttagttttacactgaatttggtaatcatctacaacttttgttttcttttgaaaggatcatctacaactacaacttgtttaccaatgccatttattaaggcggcgaatcatgtctgaattttctcaattgctcaactctcatatttttcaaacgagaaacttatttatttttattgttattttcttaaaaaggtagcgacaatttaatgatgagtctttcggcggtatctctttgacccttttcgatcttttaattaataatatgattaaaaagataaagactcaactttttttctttgattcctttcgttaagctgtggcttggctatcatttcacaatattattccttattctttttctttaatcctttattttaccttttactttctcaaatttacatccaaacttggtattaaataagatttattgggctcgtttggaacgccgtattaagtcgtatnnnnnnnnnnnnnnntatattgaattggattatatatcata

SEQ ID NO: 42106 - DNA, 930 bp, Cannabis sativa
tttggagggttttcccaccaaaatatgaggttggatgattttttagatgattttttacaagtaaattaacagttgagggggttttgccgcaaattactctattattatacaacacattttttcaaatcagaaacaaactttataaaactttaaatcaacaaacaaattggtgatcacatttcctaaagttgaaaacaccacaaagactcttgtcttttgctagtcacaccacatagtaagaaagtgagtagttgcttgcttgccttgttatagtccctaattaaccgaccaacaagaaaatttaaccaagtaaaaagaaagtttaacataagccaagataggcaacaatcatcatctataactctactcacaacaaacaatcattaaggaaaacaccattctatactcattttcaaatactaaagtagccacgagtgaaaaactaacattttgcttcaaacacaaattttgcaaaaatataggatgttgccaatcaaggacgacctgacttttagcaggccataaaaaaaactacgtacctttatttagaaaaaaatataatattttaaaaaatcgctaagaaaaaaaatgattttttttggacctataagctaagtgtgccttaagtacaaaatttaatatccaataaataaataattggattagattggttgggtccgaattcattaaatgtgattcaataaacactcctactcctatatatatatatttttaaaaaaattatattgaattttttacattttctttaatttctttgaaaaattatgtttggactcttctgtcttaatttgggactctaacttcgaatatgatgaatggcacttgtgctatcttttaaagcaacattcacaaaactgcaaatgtgtgtttagtaaggagaattgaaaataaaataatatgattttgtat

SEQ ID NO: 42107 - DNA, 4076 bp, Cannabis sativa
agttagttagggtgttacattttccaactacaaaatcaataccagctttgaccatatctaaagccaactgaggtgagatcactatggtactaaaaacttacccataaccttttttgctcataacatatgccactacattgacttttctatggtgataaaaaatctcatagtcataattcttgactaattctaaccaccgtctttatcttatattcaaattttattgagtgaagaagtacttgagactcttgtggtcagtatagatctcacacttctctccgtacaaataatgccaccaaaacttcagagcaaatacaacagcagcaagttctaaatcatatgtcacatatcgttactcatactcctttaactgtcgggaagcataggcaataacgctgtcagcttgcatcagaataccacaaaccctatttggatgcatcacaatataccacaaaattttcttgatatgatggcaaagttggcactattgtcataatcaattgttgctttaactcttggaagcttgttttacacttgtctaactacacaaattgttgattcttcttagtcaattctattaatggcatcaaaatcttaaaaagttcttccataaaatgctgataatatcatgccaatacaaggaaacttcgaaccgcattaaccgtccttggcctcgatcaattcttagcggattcaatttttccctagatcgaccataattttatatttttcgacaatatgccctaggaaggacgattctgataaccaaaactcacacttcttaaactttacatacaccttatgatctctgagtcgttacaaaaatatttggaaatattgctcatgcttcacttctatctaagagtatacaaggatgtcatcgataaacactataacacagttatcgagaaaatctttgaacaccttattcatgagatccataaaagttgtcagagtgtttgtcaatctaaatgaaatcaccaagaactcatagtgatcataccttgttcgaaatgaaatcaccagaatatcttccacttgaattctcaactgatgataacctaaacgtaagtcaatcttgaagaaaacagtcttaccctaaagttgatcgaacaagtcatcaatcataggcaatggatacatattcttgattgtcaactcgttcaattctcaataattaatacacattctaagggatatatccttctttttcataaacaaaatggagctccccagggtgacacactgggtcaggtaaatcctagatccaacatcctctgaagttgtattttcagctccttaagctctattaaagccttccaatatgatgtatttaaaacaggctcagctccaggtgcccagtcaaagataaaatctaactctcattgtaatggcaatcccgataactcttcgggaaatacatttaggaattcttctactatccaaacgttcacaggcccaaatattttaggtctactggattcaatcacaattgctggaaaccatatgcactaatatgccataggttcctaatcttttgatcgagaagtcaactccttctcttttgattcatactaattgcatgcttaaacgagaagtccattctcaaaataacaccgaagtttgttaaaatattttaataagattagggcttctcttttcaattatcaactctaaactataatagatctaatacacttattggaggtgactaattctccgctaggtaatagggtctcaaaccccaaattatgataatcatgaggcctacccagtttattactcactttaggtaccacatgcaaatgtgtagctctagattcaactaaggttgaataagagaaatcagtattaagatattgacctgccacctcagatgaactaactactgcatcaacctgagtaggccaacctcaaagactagagtaggtttttcttctttctcctaattttcctttttcaactgaggataagtcttctttaaatgatcaataattctacactgaaaacatgattcttgtaactctggtcgtggacaattcctcttgtaatgtcccattataccacatcgaaaacacatttttcctttacactcaccctgatgataattcttataactgagacattttgggaaggtataagggtattcaaagctacatcatttttctctttgtacctgctttcctcgaaactttttgtgtggtgactccgtccaattagtaacaataaaccatcctgctggaagctctgaggtaagaacaatgggtgccagtgaaatgaaagaggtgcaacaaatgaatcttattgccacaacctctgaatttcctcaccttgtctctaaatttcatcttgcatttctataaacttctactcccaaccttgcagattctgtggtggattaacataactcccaccataagccctctaatggcttctaatttggttagagggacaactgaaattctaatatctccaaccgttactagccttgaccacattatcttgacttcctacattgtgcaggtatccattctataggacaaagctaccaattcataagtcaacctggtcaggcaacgatccaagttgtaatcttactactgcatacgtggaatcttaggcaatgcattatccaactaacatattactaacatgcttccgatcatgcttttcaaatcaaataaattactaaccaagtaaaggcttattgaactgtgagtcgagcctgtctctgataatgattgtacatattttgaaagtctttagtaaacaacctacttattttaatttgagtaatttgtggcataaatacctaagtttaacttctggttgtaaatatatacctaagtttaattttttagcggcaataatacctaagttatatttctgaaactctataaatacatggttgttaaatattaagtaaattgccacatgtcaatccttgattggtccacatcatgaatttttatttttattttttttaaaaaaataattttaaatactaataagaaaatgacacatggataatgacttgacatttaacggacatgtagctacaaagttctagaaatataatttaagtattattaccaccaaaaattaaacttaagtatttatttacaattgagagttaaacttaagtatttatgccgtaaattactcttttttaattttgattaatgggattgttaattcccatggaattattgatttccaagttgtcttgaataatatttttggttgatattattgataaattttgtcagccatatattcatttgaattagagatttgactttcttcacactcttttgatgcttcaaagttggtaacttattagatctttggttgaggtagctattagagagtttttttcattttattgtaaatagcttagttagcttatatgagatattttttcttattgagccttattttcatgtaatgaattaattcttatttgtctattaacagatatttttattaacctttcaatcaaacaaaattactatgaagaaaaagacttaagtattaagagttttttttttttttttgaaagggaagtattaagagtttgaatcacaaaaaattatatatttacttttatggtagtaaaaacagaatttagcatttaagtgcttcaattgtcattatttaagtattttagtggtatatttctaaagttaaataatttcaaacttttaaataattgtgaatttcttaattacctaacacatgcaatttatgattaaatattaaaaattaataaatattacttaacataaagttaaatattttaaaaatagcttttcaactgtatctaaatattacaattagactgataaattaaacattatgactaaaataaatttcataataaatcaaacttgtacttacgattacttttataataataaaaatttgaaagatattatttcacacatatttatatttatatatttgtcaataatatttataacaatatctaatttattgaaataaaagtttattatgaaaactacataagtttacaaaatatttaaacttgagatattggcggctaaaccacttga

SEQ ID NO: 42108 - DNA, 1330 bp, Cannabis sativa
aaaataatttccaacagaacagaaaatgccatgtttgtgttcattgaagtgaagaggctccgctcctctcctgagtagccaggtgagaatgtgaccaaggcagtcaaggaaaagtgtgagagtaacacttattgaggagtcaacataaaatcttctctcgactgtattgtacctattcttactcaattaataaagaaggattacggtggtgtttcagaactagagtagagtcataaatcacatcgatctataggacttgaaccatatatatcttggtgttgatttctttatttttttgtatttattgtttttgtatttatgtattgtgttgcccattatttagattgttgttcttgatttgttaatattgtcattgataatcgtttggttgtttagagtttcattattttcattctccactgttagttgtaattttcttacaaaatacatgtgtaatttttataatttggacctgaaaaaatattatgttgacattattatatttcgcttgaattattaaacactagcaataaattggttggagttatgattagtgtgtaaaataaagtattattaattgtatttttgtgtgaataattagaattaaattatttattgtcatgactttaaatgaataaaaaaattattctattttataatatataatttatcgaattttgtgctatttttcatatttgatgtacaaattggtaaaagtgaaagatggcaagatcaccaagtaaattgaccgaagcccaatttgcaaatccaccatgtacattgtatattcataacgcctcaaatagagaaaattcattttggacaattaatttgggggaattttctaaatatgagaattgagtgtatattttactgtttatggcataaataaataatgagaaaaatacgggattaaaaaatatttaatatttaaaatatgggaaaaaatatataaatttaataaaacttgtaataataagttctaccggaaaagtcattagcgacagaaaagtcacctgaaaagtcatcgatggtggaaaagtcgccaaaaaattagtgtccccagtaaagtcaccgaaaagtcatcgtcgccgaaaaaatcgccagaaaattcattaaaaaaatcacctgaagtagatgtctcagatataactaaaaatagaaccaaatctataacataatgaataaaaataaataacttaaaccgattataactgaaatataaccggttctgtaacataatgaataaaaaaataacacaaaataactcatactagttataattaaagtagatatggttatataacaatgttataatgaataaaaataa

SEQ ID NO: 42109 - DNA, 3638 bp, Cannabis sativa
  modified_base (3292)..(3296): a, c, t, g, unknown or other
tgtgtgtgtgtgtgtgttttcttctcggattccacttgttgaggagtaagtcttggcctctttattgggagttccttgggtgccttatcatgaaaagtatttgggtttgccatatttttctacttgtagcaaatctatcttgtttcaatccatctgtgatcatatgttgaataagctgtttgtgtgaagtctaaaccttctcggtcactggaagggaggttcttactaaatcaactattcaggctttccttacttatgtgatgaatttgtttcagctccttgtgctcagttttaatcggggtgatggcagtgataggaagatgcactagtgtacatgggagagattgtgttggcataagtctgatgggggtttagggtgtcgagatctgtttttgttttcaataaagttgtccttactaaaaaagcttggagattatgtaattttcatgattctcttgcagcttgagttatgaaaggtttatattatccccatagtaacttcctccatgttgattatagaggttcttttattgggagctttttgttaaaggtggtagatgtttcatgggtgatggtaattctattagtcttaggaatgatgtttggattcctagaaacaaggatactattactttctcattctttgttcacccaatttttcaacaggttcgtgatctgtttaaccatctcggggttggaataaggatttgattctcttccttttcttagaggatgaagcacatgctattttgtctattcctttcgtatcttttgggtgttaggattgtcttttttatctgacactataatgcgttggaagattacacggctaagagtgtttattggaatgttatatgttttttgggcatggtctacgttcaggactcgaagattagtcttcttagtggaaaaaaattgtggtctttgcatcttccttcaaaagtgaagaattttgtgtggcaagcgagtcttcattggatttctactatggagaacttggctaatcaccatgtgctcctacatcaggaatttatcctatttgtaatattattattgaaaccacttttcatgctttttggggttgtccaagtttacataccattattttttcttccccttgctttgcgattgttacattttctcctctcactgatttttactcatttcttcgtgaatgtgttgatagtatgcataaggaaaattggaggtgttgttgatagtggtttgaagaatttggttttatcttaaaaaggtggttcatgaaaataagattttggatgtggaaggtgtcattgggtggtcaatgaatttccaccgggagtttgttgaggcgaatgtttcttctccctcgtctttggttggcatgcgtggggtgacgattagaacccttcttactcggcctgattgcctgaaacttaatgtggatgtgggtactacggtggagaacttgaagatcaagtgtggggcgacggctcatgactctcttggccattgtcttgcctccacgtctgttcccttaatttttcatctatgtgccctcagctgctgaagctatggctgtgctccaaggtttgctccttttctctcgtttggggtttcagaatccaaaggttaagttgattgtttgcgtgtttgtgagattttttcatataatactcctcttgttgtggagtttaataatattattgtagaatttttttttttttttagaaaaaaaaaaaaaaaaattggtaatgtgtccagtttttttttctaattccacagctcataatttggctacattagccctctcctttgatgctgctttagtttggtggctccaaattgttttgaacttatgcattttttggcatatgtcttttaattatcattatcattttattaaaacaaaagatcattaaaaaaaacatattattaaaattctgaatttccaacggcggattaagccaccacttgctgaaacgtgtccctatagtgggcctacaacatttaattggcatgtgacttcaaatttataacattattaatcatttataattttagtattctttattatttcattttttctaaataaattttgttgctgacaatgtaagaaattaaataagaagagcctgaataaaacaataacataaattagaatgacaaacttgcaagttaatcatctaaataagtattaatctaatatcacaattaaatattagttatgaactagttataagaagccaaatatatgattttctgccgtatataatattttatattagaaaataaagtcaatggtggatcgttatagtctatggtgtgaatcaagtatataatttttcttttcttttttcaaaaaaaaaaaattattgtaattagctacgtaataacacgtgtttaacaaatattaaaaattaaaataaaaaagaatatttatattaagatcaaatttcttggtaatgacgttattggaggagactaaagaatagtggtgatgaaaggcctaaaaatgtagctatcaaattatagtaaaaaagtgtcagactttagagtcagtcaatgaacatatttttaagtgacttttttggtaaaaataaattaatttatgaaaaagattgacgttagttttatatgtcattttccattaaaacgcaataaatttcaaacccaactattatgatgatattaaataaataactaaactatgttaattgtcaaattattttgtatgctcaataatgatttgtctgagagtaaaagtggagcctatttaatttaagaaaattttgtaaactattaatattattaaggccagctaatctaatttaccagtggtttggtaggcatcattaaattaaatacaattgaatcgaaccgattcaatccaatttaattataaaaagttgaatattcaattacaattggattcgattggatgttaaaagttggattctaattggattggatcagttattggatgtcaatctcaaaatctaattaaaaaccgatctaatctaattacatttatatatgttaaaaaattatttatataataaaaaatataatatatattaattatatttttcttaaatttttttgtgtgttgaatttgtattacttggttattttgtgtatttattttcgtgatgttttgttctattttattacttagaaatattgttattttattttatttaaaacttttggctacattacacttgtaacgacattatgtttatgaagtattaaacttaaataaaaggtatatttaatttttacgtagttttcttcatatttttaagttaannnnnaaatttaagtgtgtaattgaatatctaattaaaaaattgatccgagctagcttctgtgagtcaggtctctggcaatgcaattaatcgactggcctcaattgagactggtctagttgttggtgagttcaatctttttgtggatgttggggtgtgtgttgagaaccaaaaaatagggatgggggctttggtttccaatcgtatggggcatgtcctattctcgagtgcgcctccttacgtgggattgttggaacctcacgtggccgaagccaaagctcggctctatgggctttcttgctgcatgcagatggggtatacggtgattactgccttctctgattgtca

SEQ ID NO: 42110 - DNA, 1405 bp, Cannabis sativa
ttcttctttactatgaactaagattatagccaccaagaattcatacatgtcaaaaggtggagcaaagttgttatggattggatggaaaaagctacctttacaaagcatgaaaagtagactcatgggcagatagaacctttacgaagcatgagaagtaggctcatgggcagagattcaaggcaaaatattaaagttccaaattgtctccaccataccgaataacctaagaaattcgaggcttgtcctagtctggctaatcggcggctgcctaaaaccacttccattaacttttctacattatctttcaaaatatatcactattttttttacctcaaatttttattttacgccatatattaacttctttaaaaaatatattatcaaaactctttttttttttcaaacattgatataaaacaaagtttctgttgaaaattgaattaaagaaaacttgtcttaaaaaagttgatttatttcaaaattcattcaagcttacttttacttttgactaatattaatatctcaaaaaaatatctcaatttaaaacataaagaattgcatattagtagttctaaatcaatcatcttgaaaatgataattcacctacacatctcttagtctactctaagcagtgtttatttggttctttaacttggttgtttgtttgcttctttcctgtattagaaaaagaaatcaagtaatctctaactaattagtcatacctttatcattagtgacaaggtgaattaaatagagtcaggagtcattaagtagcacttgagttttttcttttaatcaatttggcaatattttaaagttgttgattgttttaataacgaggtttcttcaatagacacaattttgacattaatttatccacaaattctaaatctttggatgaaacttaatctaaaggttcaaattaaaacatatattaataaaaaaaaaatatagtgaaagcaagaataaagaaaataaatttaggtggtgtttggttgagaagaataaacatataggaatatgaatgagaatgagaataaaaataggaatggaataaaatttaaaatgtataaaaaaattgataagaaaatgattaaattttttctcttgttatattagaataatctttcattcctttttaaaatagaatagtcattccaccacctttcaaaaaaaaaaaaaaaaaaagaatagtcattccaccaaaatggtataaaggacattctattagaatgacatttcaataatttaaaatgtaaccatataaatgaatgaaataaaaattgtttcatttccatttcattaattttcattacttccaaccaaataccatcttagtttttttttttttcttctgtgactaaaatataaaaaaattgcgttggtgtttcatggttcaaacaca

SEQ ID NO: 42111 - DNA, 1989 bp, Cannabis sativa
attttttgaataacagaattcaaagattcagttacgcgagtgcttgtatctttttgcatgaatgtttgaatattattttcgagacggtaaattttttgaaaattttaatcattatttttcgtagcattaaaaataaaacatactaatgaagacaaaagtgatatccctacaataatagtgtgtttacttacacgtaatcgaaatgaccaaaatttgaattgaatagaaattggattcacccaatcaaaatgactaaatagtggcatgtttacttacacgtaatcagaatgactaagaattgtattgactagaaattaaattcaccttcaatcggactgacttagaaatggtaatcccaccaacctcataggatggccaattctaaataggactcacatatttcattctcattctttaataaaattagagaagtaaacaagataataaatcacattctttattcccattccctaattccataacttgagaattgattcagatcccatatttcataatataacgatatccctcgagtacaatcatcaatacaaataaatttccttctaaatctgtaatgttctgaaccagagctaatgttcataatcataaggtaatgatgatacacttacaactatcctaatgtgttgccatagtgaccagtacaataataaatcctcacacaatggggaaaggaaaaaccaaattatgccatttttttatagctttgttgttctctcttctagaatctagctcacctaatctaatagctgctgttattgatcatctagcagaaactgcatcagttcttgtgcttggatttaacaactgatgaagcttggcttcaggattatctgagttctcattcctattagaatcattagaaatttcaactactttctcagtactactattcagtaaggccgaattagtttcggccttatctgaaactgtgtctccttgctgatccaccgctgcacatcccagcttcgcctgtgaattcaaactcgggttaacaaaggagtaactcgatcaatacagcttgcttggttggccaaactatggagaagtatgtgataataataataatgcttggatattggcaaaatggagaatagtataatgaggaagttagaagaagtaccattagtgcagcattttcaagcctcaatttttctgaatcgcctttgagttgtcctaattcggacttaagggcattattctccatattcaaggagtcccaccttctcacgagttcctcgtactcagcctgtttcctcatcctagacctccttgcggattctctattagcctgtttccttctctcacgtttcaaaagcctttcatcctgatgaaattaacatcgagatgcataacataacgtaaatatctaaagatcacttctaatctttcaagtgttcttataaatcaagctcagctcaaagtcaccaactactcaaaacaatgtttcagaataactaccctgtagggtcttaaggttggctctttttcagcaaagcaagcctctaaaaatctgaagaaattccaaacctctttcattaatccgatagcatcattttaaacaagcagacaagtactaatggttcaaatctttacgttggtcatcatatttcaaaataagtcagcaaaagagctaaattgtcaatttttacataccatagtcatgccattagaagacgtccctgctcccacagaagcaacacaatcggacatatttcctgttttctcgcatgaggatccaacatacccaataaaattcataggaggcaccgtattgtcagagaaatttgaagaagtctcgtttgcctcccaatctgttgaagaagtgacctgagcaaggactctcctatcaatatctgccacccaaatgattgagcaaacaatcagtcagcatgaaataaatccatacggctccaacaggttccaaacaaaaagaaccagaaacacaaataacataattcctagcttgcc

SEQ ID NO: 42112 - DNA, 5644 bp, Cannabis sativa
  modified_base (4324)..(4334): a, c, t, g, unknown or other
taacccaacgtataggttttacttatcttctattcctttttggttttttcttgatttctagtactgtcattgtctgtttggtctttgggattttgttggtgaatgtactagatcttctctgatcagaaaatcttggctttgctcagttttggcgctaacaacttttaaggaagctatatacgaagacccacatctggttttgtccaattggaatgctttagacttcgatccttgtgactggaatggaatttcatgtactgggtctcgagaccatgttataaagatgtaagatatcagatatggtctatctatgttagtacaagtcatattaattttttttgtaattagattctttgtttttgggaatttttaacaagggtgatttcattatttgttttctggttttggaactgtttttgcagtaatataactggggcatctctaaggggatttattgctccagaattgggacaacttagcttcttgcaagaactgtatggttcttctttacatgtcatactcttgttttttctcttcttcttctattggatgtttacttctaactccaaagcatgctatattgaactgaagaatatttttatcggttgctgtttgtagagttatgcatggaaacaagctgcttggagtaattcccaaggaactgagtttgttaaagaacctcctggtcttggatttggggataaatgagctcactggtccaattcctccagagtttgggaacttaactagtattatgaaaatgtaattagagtataattatatgccatttttattcgagtgcagtttatcgatcattttggatttgatttattggtgcactatacttttactcttgcagaaaccttgaatccaatgggttgactggctctcttcctgctgagcttggaaacttgagaaacctcaaggagcttcggttggacaggaataggcttcaaggaactattcctgctggtagcaatgttggttggacctctaatatgcatagaatgtaagctagatatctttgatctttcacaaatatttttattactatgaatgcttacaagcatgtcatattgaaaccttcgaagaaacacataatgttagcctgtattcatgtacataattcaatatttccagtagcattacaatcattgatggaaatgtttaagattactatgcatgttgactgtaacatgtaactgtacatgttagaccaacagtctatgcatcctaaacgcttttcgcaacagctaccagaaagcagtatttcatatattgatcttaggattagtgtccttaaaatttgtctcttattacttgttttttcttaaggtatgcaccagggtcaaactcaacaggtttctgccgttcatctcagtttcacaaggcagatttctcgtacaacttttttgttggtagtatacctaagtgcttggagtatcttccaaggtacttttatgactgtcttgtttggcttgtgtgttagtaaacattgtctcacaatatcatttaatccaggacaagttttcaagggaactgcctccagcacaaagatataaaacagcgccctaaaaagcaatgcggtatgtaacaataattagtgtcttgttttaagtagctgaaatctaaggagtatctcttatccaagttagaagttatgtttaaaacaacagaaatgaatccgagtctgacattcactgtgtattttaactgctgatttttcttttgttcatctattattcttagttgcgagtggcttgtttttttcttgtcagatggtgtttcccctatcaaaagccatgcagaagccaatcaaaagcaccagccactcgactatcagtccaagcatcagggaacatccagacctacctggcttctggctctggaagtagtgacaggagtcatggtgggctctctctttttagttgcacttctcacagccttccagaaatgcaatacaaaatcgtcccttattattccttggaagaaatcagcaagtgagaaggaacatgttagtgtatacataggtcagtacatgccacatatcttcagatgaagtttttgtaattgaagatgctgagttttttgtacaactattgattagtttgctaaagtatctttcttctttttctctttcacagattctgagttgttaaaagatgttgttagattcagtagaccagatcttgaagtagcctgtgaagacttcagtaacattattggaacttcaccagatagtgttgtctacaaaggaaacatgagaggagggtctgagattgcagtgatatccctctgcatcaaagaagagaattggactggttttcttgaactctattttcagaaagaggtattgttctctgttacataaaagaaccttttaccactaaaagtcctagctaactctgaagatttaagttgtgaaacctttctaaagactgagtgttgtagttccactaattttcattcaggttgcggatttggcaagattaggtcatgagaatacagggaaattgctcggttattgtagtgagagtgttccatttacaaggatgctagtttttgaatatgcatgtaatggaacactgtatgagcaccttcattgtaagttgtgatgctttctcctttcaacatgtgcttgcttgattgtgttttgttagctcatgagtgataatttcaccacagatggagaaggatgccagttatcttggacacggcgaatgaaaattataataggcattgctcgaggactgaagtatcttcactcagaaattgagccaccatttaccatatcagagttgaattctagtgctgtataccttactgaggatttttcccctaaggtataccaatgaatttatttttctccaaatttgtcatttctaaaattaagaacaatttcccattgtaatgagactgtagtccatagtttccatatatagctgattcaaatttgagaaattaactgaaaaattccaactttaagaacgctgtcttgaattgaaatgcagcttgttgactttgaaagctggaagggagttattgctaggtctgaaaaatattcaggctccattgacaaccaaggctctatttgtgttcttccaaattctttggaagctcgctatctcgatattcaagggaatctttatgcatttggtgttcttttactggaaataatcagtgggagacctccatactgcaaagataaaggatgcttgttggattgggtaatgaaactctctgaaattcaaattctattatttgttttctttttctaggtgactttgaatatattattatgcatcaaagcctaaagggttttctgtgctgcaggccaaggagtacattgaactgccagaagtgatgtcttatctggtggatcctgaactgaaacattttaagtatgaagatctcatggtcatatgtgaggtggtgaatctttgcataaatgaagatcccaccaagcgaccgcagatgcaggtgatatgcaacatgttggagacccgaattgacactacagtcgccatcgagctcaagtcatcatctttagcatgggctgaacttgcactctcatcctaatatcaagttgaagctaacacaccttgtaaagcagaattatatacagttttactattttctttttctgccccactcaccaccacattgagtttcatttcaagttaccattttgttttaatcttttgtaaatgttgtgttgaagagaagagttgagagagtttcatgcaagactagtctccttgtatactaacaagtgaattaatatatagccattttttttttccatgcttttgcttgaacataaaagtactttgattatttgttacttgttttgaaggatttgccagttgtaagctcaatttaaatcttagtcgttatatatgtaatgaaagtgtgatattatcaactcttgttttcaaaagatagaaaaatatttaattaatgtttggaatgagtgctacctgtatcataaatataaagctaaaaaagagacaagaatcttaaattgtggtgcagccttaaattgcacacaggttctatgcaacatcatttaaagattccttgagtaaataaagccgttgggagaggaaattaaaattgtatagagctagacaaaaagtaaaaataataatataaaagggaaaattagaatgcactcaaccaaatttgaccacttcttggcaaaatgactttaatgtatcaaaacaatttaagaaatagaaacatttatcgtattatttcacaaatacataaatataataaaaaaaattataaaaatataatttcatgaaattttaaatatttnnnnnnnnnnnttttttttttttataaaaaatatggtctttttatattgtactcttgttaatttattgttaattttttattatcggtatgttatttaaatgttatttttatgtagttttttttgttgtttttattttatttctattgaaaaacgtaaaaaaaattctttaaacgtaaaaaatataatttttttttataaaaaataataccttatgtaaatatcccaacatttattagtgctaataacgagtaattattatcattaagatttctcttgccactgaaagcagcaaatgccttcctcactgtggtgttggctgaagaggtcatccacctgaaagtaaaaatatgcagtaaccttcagttaaaaaaaccagacatgtgatatttccattggaataaaaatcaactaaagaagaaaccacatcccaacctctttagctgctgctttcttctttccgtttgatgtagcatcttcaaggccactccaagcttttgagtggggcaaaatttgaaaatgggacttttctaattttttctttaatatacactaacttgcatagaatagaatggggtttgaacccttcacctccaacacaacataaaatttttccaaccacctaagctaacttattacaaattagggtggcaaaacgggtttcgacacgacataggacacattttacaggtaaaggtcggaaaaattagatgcaagtcaaaaatgggtcgacactacttaacacaaaatacaaatgggtcaaacacgacacgactcgtttaacacgaatttaatacgtttgataccatttttttttagtaaataaaataaaaaattattaataataatataactatctaaaagtatatatttagtgatttaatattgtgttaaaattttttaaatttaactttaaaatttgaaatatctgaaaacttttaatttttataataataataattattattataaaactatatatataagttttctaatggaacttatatttatataaaatattggtggtaaaactacccgaactttatattttttaatacttaactacataaattaataattttttgacggcaaaacctaccaaactcacattctgtttagctctttacacttccataaaaaaacctcaattaagtgccacggtggactgcccacgtgtacactattgtacacttccataaaaaaacctcagttaagtgtcacggtggactgcctatgtgtacacatttttagtggtccacataatattaattgtttaaatattataaaatttgtaagcaatatttaaaatttagaaaataattt

SEQ ID NO: 42113 - DNA, 590 bp, Cannabis sativa
  modified_base (408)..(408): a, c, t, g, unknown or other
ctctctctctctctctcttgtatgtatgtatacatgtgaatatataatgagatctaacgaatagaatttgaatgtacagttgtatagatcaatgactatatacgtacctattattattagatacacgatattcttataaattttggatgatagtctctttaatttggaacaatgccgttgcacaaatgatatgtgggcaacgaaaccggctccaaaaatgaaccatttttctcttatatacatacatttatagagttacatggcaagtcacttttaatagatagggtccattttaaatataaataaagacttttccagtgttaactaaaaaaaatattaatattacaaaaatacttttagctgaacaaaaatcaaatatacaacccaaataaaaaaaaattacacaantaccacttacacacaccttcaatccaggtaccatgcttcttgggcaactaccgcgcaaccactcaacaacccaacacaatcaaaatgaaaattcaaccagataggaaaccaacattaattctggtgacttcacctgaaaagacaaccagaatcaatcaaaataggggctatttcgaattcat

SEQ ID NO: 42114 - DNA, 1099 bp, Cannabis sativa
ttgatagtcatgaagaggtatatattcttatcttatattttatgctttgatttaatgtatatccctgatagtcatcaaaaggtatatattcttatcttctattttatgctttgatttaatgtatgcacatttggagattcattgagttatggtacaatgataatcatataatatgaactctttcgttacatacctatttagtaccataaaaccaatagatgcagataaggagtcaatgtcgaagaaccctagggttttcattcctttacttatggccaatttttgcaatgtgtttataagtattgtgcgccttacaaacttacctcatatgatacctcttaaaatgatgtaattattctcgggccttagtgacatacaccattatcttctctccttgagcctagtattccccaaagatttggttcaccattagttgggaatcaatgtgcattttgatattcacagctcccacttctcgagctagcctttaagtggctaagaaagattcgtgctctacctcattgttggatgtttcaaaatttgaaggtaaggaactttttaattggtgtccttgaggagataacaggatgatttcacctccggatcaattttcactggatgctccttccgaaaaaaatttccatacagatgttggtagatgacttttttccagagacttagttatcccagtgcactcaactatgaaattttttagggcttggccctttattgagacttgcaagtggtaagagatgtcaaactgactcagctccatcactcagtttaacaatcatcttgatgactccagtttctaaagcagttgcttgagtggatggttaaaatatggcccaaacatgtaggcctagcccacatgtgtagggtgacatatataggtccataattagtttggtttaattattttattggttgaaatgatttaaattaaattaagctaattatattttaattattaattaaataaattattagataaaattttttaattaaaaagataataattaaaataaaagatctagctaatatttgttattcagttattagatatttacatttgaatttgaattctgaattcaaatca

SEQ ID NO: 42115 - DNA, 581 bp, Cannabis sativa
agaacacagatatcattagcaaggaatcagtataaaaaacagcttaaaaaaaggcccaaaaactggccccaattaaacaacttctcaataaatgtgcaaaacttctccatacaaaagtgtatggattacatgtttgatacaacaacaacaataatcttattttagattctctctttcagaaaatgttaaaactaactttctaaagactggtggcaatggcatgaccatagcgactagaacaaaattagacatggatgaacatgatctaaaatagataaaagaaagataagacattctcaagactcttctttgttgagtttaccaagtgccctctgcgccgcatagaattgcttttcccgagcctttttagcagcaagctcttcctcgtcaagcactttgattggagaccagtcaggcaatttaaaccaatctttgtgcttttcctccgatgcagattcagtataatctttcaattcatcttttagtttgcttaaagcatagtctaacgttgtaccggcgacagcaaacatagccgagtatcgggcagcaccaactggaccagctacctcaccaaaaaaaaa

SEQ ID NO: 42116 - DNA, 2503 bp, Cannabis sativa
  modified_base (1310)..(1313): a, c, t, g, unknown or other
ctaaatgataaaatatttttcttatcatataattttatcgtcattattgatagcaatttatgtataattttgtctttgtcatcacaaatattttttattaacgatgatgaaattttgtcgacgatgatctttcttgacgcaaaacacgacatctgaaagatttttggcattgaaaacaaaattaattctgatcattttttagtgaaaagatcatcactttaattaattaatcatttgattgatgcaacagctgaagaattatgtgttatatatataattatttgtaaagggagataaaataccaaccatataattattagtagcaaagggatgataataaagacacgacaaaattcttcataagatcttaagaaagatacaaaggaagaataataaagtgagaatggctccaaaatattgcaacattattaatagtaagaacatctttatatctacacatataacatcaattaaaatcatgtaataagttaggagacattatgtttatttatttatcaatttaatttaagaaaaattactaacatgtgacattatttggacaaattataataaaaatactatatataatttgtcaggtacaatatgaattacagttctttattcaattattgttttataacttttagacaaatctactcaaaatcttttagtaaagaaagatgtctacatcatttgatcagaatcttgggaaactttagttgttgttgaattgccctatctatcatttgtttgagaattttaagattatataaaactattaattaattaataaagctcattagtgttaattatcaaatatattattggaaaactttttaataaatattattcattgatggttattaaaattatttaactataaatattactttcaaaagtattaaattattaaattttcattcaataacaaatgataaaagaatttttttaatttttatacttaatttaactagcttattaattaattaaaaaatataaaaaatatatatttttagactatattaaaaatatatttatactttatatacaaaatacttaaatttttttttttttgataatttttttcagctgatataatataaaataagagatttttttaaattaaaaaaattaaacacttaatattatctagactaattaagattttttttttccgaactttgacacgtaccaaatcatgccccctaattttttttttttgccgttaaaaattctccctgaactattaagattgttagatttaagaacttttatctaattttagtaaaaaaatctaacatggatgaaannnnagggggcatgatttagtacatatcaaagttaaggggtatgatttggtagatatcaaagtctgaggagcatggtttagtacataaattaacaatcactgaaacagtaaaattgaatgaaattaattagacaaaagtctttgaatctaacaatctcaatagttcagaggaaatttttaatggtcaaaaaagtttaaggggcatttggtacatgtcaaaattcgagggaaattaaaaaatcctaattagcctatgatctattcatgaacattaggcctcgtttggaacgttgtattaggtcgtactgtattgtattatattaaattggattatatatcatattttttttatataatactatgttaaactttactttatatattaaaatataattatatatatttatgtgtccatcaaagttaataccacgtagttttacataaaaatattgcataaaatacaatttaatataatattatacaatacatacaatacggtctagtctaatataatacggcgtaccaaacgaaccctaaaaataaaaatatataaatatttacatatattctactattatatgttgatcacgtgtcttaactttttcaatatcattatatagtattttcctctttcatattgttttattttgtgtaataatattagctctcataccaattgctatatgtttaatttctttcattatttcaataaataattcattggagaaaagttaaagctaataattaattctaatacacaattagcatgattatggcatatgtacggaaaacatgggatgagtatgtgaaaacaactaggaaatatcttaggtttaaccactttataatggaccccatttatagaaacctttgacaaaataaaactataattttatgtttgtcaaaagaaaaaaaaaacatgataaatattaaataataaaaaatttatcatcatcatcaagagggttcaatttattaatatggccatcatgtttatcattttatcgacctattattaaaatactttttatttcaatttataaaatggtatatgagacaattaaaatttctgttgtctttgtttttatctttctaatgtatgtcaatttatggtgtatacttataattttttcaattttagtcttatggaattctttcgaaaatgtcatgtacgatcttgttttggtcttttaa

SEQ ID NO: 42117 - DNA, 717 bp, Cannabis sativa
aagaataaataagaaacaaatgcctatagctaaaagtaagagacaaaactagaaaagttacatgatagatttgaattcccttgaaccggatttatgttactattttttaacagttattttagccccaacaaacttaagcaactcgataattaagttagttaaagtcctcagttgtttagtgcgtctcttgtaacactatagatagtgatcacattcattatgttttagttgagaattcaggaagaaaaattgagagatggaaggatgttaaagacactcgcatttatttaattgagaggatgtcaagtactggaggattttgtaaggaggaagtcttcattgagtcaaccactttgtccttgttttataactctattctggcattaataaagataataccaacaatcattgaaggctgctttctcccgtgaattaagctcatgaacatctccccgattgtataccccaaccctgtaagctttgtattcacttttttcatgttttatgatcaaattatttttttgtttggtatttcattcattgatatgtttaacattgtttctcatattttgttttggttcttattcggagtttgagactccacaattggtatccaagtactactacaaaaaggacttgtaaaacaaatttttttctatcactaaaaaaaatattacaatagctctaaaaggtaaaaaaatatgttgaaacccttta

SEQ ID NO: 42118 - DNA, 700 bp, Cannabis sativa
cccaaaccctaaccccccgccttcctatcccccccacccgatttactaccagccaccgcctgttccgtctttgtttcgcggtggcgggatgtacccgggtccgggccctgttaatggtaactgggtcgggcctcagtacccttacggagccccggttcctcatccgggtgctggtccttatatggatcatcagaaagctgttactataaggaatgatgtcaatgtgaagaaggagactctaaaggtcgagcctgatgaggagaatccgggaaagtttctagttgctttcacttttgatgccacagctcctggaaggtaaagagttttgtttgaattttgtgttttgactttgaatgaggtttgaaatgtgtagtttgacttgttgtagtgatgtgttttgagttgactatggatttttagaattttatgtttgtattgtactttagaaatgttaagggcatagtgttattggtgcaatttaacatctcgggttccatacattttaataataatataggaaactgctaacggatatagtgttaggcgctgaataggaatactcataatacacaggtatatttatgtcgctttgcgattggttagtgatactttatacttaaactaatagcgaaattgatacataggaggggtgctaggcactactgctgccttttaacatttctctaagacaacccatgag

SEQ ID NO: 42119 - DNA, 902 bp, Cannabis sativa
ttttttatatattttcagtgggtccgcccatgaatcctacaagtgtagaataatatattggatcataatgttcaacaaattaattatgaaaaacagatataatgatgggtcaaaaacgatcgattggtttgagagagtcatgaaattaaatatttataatggaacacaaaggtgagtactgagtacaacgtgaatttgttccatccagtcatcgatcgagaatccaagaatacattatcatccattcaagtgtccccacttttgcactttcctactttggttttctctgttgctttgtctgaccaaaattatcacttcttctatgcctgcctgaccttattggtggtttttatttctccctcttttttttttttttttcaattgagaaaaattgttttgatttccttagcaagtaaacataaaatttgggtcgaaagttcaaaaacttttaagaaaaaagtgaaagtacagtttttgttttgtactccttaacgtgatgcatacaaggaggtcatatagccaggttatatatggtgctagcaccattttatctagattagtataatttaatatgaaattgctattatgcaacaaatgtataggagaattttatttacaatttaatctgaaaaatttatttacaaaaatatatttgtaaaattttaaaattaagtaaatacattttttttcaaaaaaaaaaaaaactaaaaaataacgataaattaatcttataataaatataaataaactataaaacaaccaaaaataattccttaacaacctataatacaaatacagaaaatactataaacaactagaaaaaagaatttattaattttactaaaaatgtaattttataaataaaaaaagtttaaagcataaaaacaaaaaataaaaaataa

SEQ ID NO: 42120 - DNA, 2881 bp, Cannabis sativa
tcggcaattaagcgtttttaagcgagaataagaaactcaaaaaaataataatattggtagcgtttggtaacactttttcaattagttttttgtttttaaaattaaaaaaagtaaaaatatttttcaaaaatatattctataagattattttcacttttcaatttttaaattgagaatcaaattttttttttttaaaaaaaaaaaaattattttaaatatttttttaaattgtttttttttttcttaataaatatttgatactccaactaaatccgaaccaaaatctccttacggtccggacactgaactcggcctttgacccgaacccgaatccaatatcagacatagacccgactgaaataaaataaaaaaataaaaataaaaaataaattttacaaaataacttttaaaattgaaaaacaaaaatggttacataacgtatttttgtttttcaaaaataaagtttttaataaataaaaattttacttttattttctgattaaaaaattagaatgcgcaagtgttaccaaacggcaccatggttattacttattagcacaaagtgagctattaataatttgattaatttgtggcgtaaatatttaattttaattctcggttgaaaataaatatataattttaattttttacggtaataatacttaaattataattttagaacttccgtaagtacttgactattaaatattgtcaatgaccacatggtagtccttgattagtccaagtaattaaatttttaatttttatttaaaaattcattaaaatatgccaataaaaaaatgatatgtagatattaaattgatacttaacggtcaagtatttacggaagtttcaaaaatataacttaagtattattactattataaaattaaatttaagtatttatatgtaactaatagttaaatttaaatatttatactataaattattgttaataattcatgtagaaaagatattgaattgtactaatgtatgaatatagagtttgatatttggggtgagaaattcgaatggatctactaataggcagttgtgtctatgaagtattctaatttaaagtgtaattttatttatggtatagatatatatgtagttcattttgttatattttattggagctcgtaatcaaaacaaatccctttaattaactttaactaatttccttttacacgcccccacaaacttagaattggtactatcattaatgacatggatttttttaaatagattgaacctcaagttggaaatggctttagtgagaccattagctatctaatctacaacaagaacatgattaactcgaaatattgttgagacaacttttcacaaacaaaatataaacccaactcactatgttttgttcggacatgtaaaataaaggctaaaagttaacaaaacagtacttaggttatcacgccaaatgataggaggtcaaagtagatgcacacgaagttccctaaaaaaagagtgcaaccaagtgattttagacacaacttgagttaggcttcgaaattatgcttccaaactggatctcgacatagtgtgttgcttcttaaattgtcaagcaacaaggtttgagctagagaaaatggagtatcttagagtggagcatctatcatcaggatcactcgcccaatcaacatcacaaaatgttgtgacctcatattcaatagggcgctttagatgcaagcaatgagtaacagtgccattgagatacatgagaattcttttcattgtattccaatttccaatgagtgtgaagaggattagctataaattagcacaccttgttaacattgaaagagatctcatgccttgtaaaacccaaatacttgagtgcaccaactatagaccaacgtaactgaggattggcagcacgatcaccattgaaggcataaaatttcaagtcattggtcatgggagttggtgcggtttgacatcccacatttgagctttgcataataagcctatggatttctttgctcttttaagagttttcagaaactgaattaaaggagttgatgtagttctccaaccaagccagtttatagtagcttcaagatattttctgctaaaatggcaatcaaagaataagtgtaaattgctttcatccccttgatcacaaatcaagcacctctcatttatgacaatgttgaaatgaaataacctattctttttttgtagtcgtataagattagcaagtcaaataaagaatcgatgtttagggattaaaaatcttcttcaaatctctccataccagctttgagattcatatttcggagcaagcaaggagtaatcttgttgaattgtatacctttgtagcataaattgttgcatataacacatataaaactgtataattatcttcaatgttacctaattttaattttgtgttggctttcaaaagtgaataaattagaaatggtgaaaatgatgtatttatctcatataggtgtagtatcctaagttttacacataattattaggaatgggcctatatatccctaaatataaacatctgccagcaaaatacggcggcccaccatatttagaattaggacacgtgcgcatatccaatagtctaaacacataaatgacatagtacactcttcaattctcttctcttctggttgggttgcatttatcatttcacaccatcaaactcaaacttttcttactcttttatcctatgctaaacttcttctctcattctaactccccaaatttacatttatatataactactagtactaggtgtgagctatatagatatattatggccaagaaatttaatggttcataaaaaaaattatttttatttttatatagaaaatggtatttttcaaaaaatttgaaagaa

SEQ ID NO: 42121 - DNA, 4140 bp, Cannabis sativa
aaaaaatttatttttagtggcaactggagtgacctaaagaacttccaccactggtttgccgaagaggagcatgagctattgtcaatatcttcaagagatgctgcataatgataacctgtttgaaccgagtagaaacctgatgagtgatagtgccagacaagtgtatcattctacctgaagaaacccagaggtattgtcaaaatacgatcaacatcaagggggaagaaccattgatttaggagtgtgacatcccattgtccatcatcagttttaaggtttgaaaccacaccatccaaaggacccgaatagaagattggttaaaaagtggagtgtcctgtgatccaaaggtcaacaccacatttaactcgacaaccctcaccaattttccatctcaaacccgatgacagcaattcttgaccccaatgtatgccttgccatgttaaggagggggagtgtccaagattagcctcaaggaaagtgatatgggaaaagtatcgacatttcaacagcttggcaagaagagagtcaggttgagtaagaagtctccaagcttgttttgcgagcagaacctgattaaaatgtacaaacaagcaaaattccatacatccgttatcctttctcttgcacaataggttccatgagcgccaatgtattttagtgccattctcttatagaccccaccaaaaattagacatcatggattcaagttgattacaaaaataaattggcaagcgaaagcaactcatggcgcatgtaggaattgattagacaacaactttgaggaacacttcacgtccacctgccgagaagatcttttcactctaagtgtgcatcagtctccatattttctctttaatgtcgctggaaaatttctttttatctctcccagagtatgaaggcagacctaggtacttctcatggaactcacaaattggcattgataattgtttgtgaaagaaaacatgggtagctagcgttgtgtttggcaaaaatgacattactgacttgtcaaagttgagaacttgacgtgatgctctgtggtaaatatccaagactctctttatggaaagacaagatctctcgtttgcttaacagaagaggagactgtcaccaacaaaaaataaataagaaattggtggagcatgtccagtaagtttgaacccacttagttgaccaatgttctgttcttgctgcaacaacctttgtaatcctttagaggaaataagaattaagtaaggagataatgggcaaccctattgaaggcctcttgttggagttagcgaactcgtgacttccccattcaagagaaaatagaaactatttgtagtcaagcaacccataataagagatatcaatctatcttcaaaccccatttttgcatgactttttcaatgaaatgccattcgacatgatcaaatactttactgatatccaacttcaaggaagtaatgtcgtttccactcgttattttgtttttgatagcactgatcagttagaaggctacaagaacattgtctgtgatcaaacaattaagcaagaaagcactttgcgtgtctaagataaccatagggagaacttctttgaatcagttgagacaagtaccttagtgattagagcttggaaataacattgcataggctgattggatgatagtcttggagtcgctaaggctttttgatcttaggtatgagagtgataagtgtcttattcaaaatagttggattagcttcatcattcaaaatatttaaaacagccttagtgaccaaatctcccacaacacgctaattttgttggtaaaatatcaaagacattccatcaatacctaggcttttttctggagccataaaatgaaaagcctgctttatttcaacaataagaaaaggttgagtaagattgtaattctttgccggtgtaaccttggagggaattgcatttaaagtagtagagagagcatcttcatcaattgctgaggctataaaaatggtagaaaaatagtcttgtatagtagctgccatgtatgcttttggagcgatcggaacccctacaacactatgaagaaatttaactatgttattagatttccttgctgaagctttagaatgaaaaaaattagtgttttgatctcctcaattcagccagtcaatacatgatcgctgctactaatagactttttctcttgttccaatagatcatcaagtatttctcagcttgcttcaaagtattcattgtgtcatcagttcgagaagggaggttattcaaagctgccactattgattgagtttctacaatttgcttcttcatttgtccatattttccaatgtgccatctttgtaagttggttgcacatgtgccatattttccagctattggcaataatttcagcactttcaaggtcagataaccatattttttcaaagcataattgacttcatcttttttcctgttgtgacctattgcctattggtgcaaaaagagcaagaatcgctctatggtttgaatggtagtagtcaagatggtgagtttagggtatgtcgaagtggttcacccaataattgttcataaaacaccaatccaagcattctttaattatatccacacttgatcgatttttaatccaattgaaagggtccccctcggaaggggttccatgaagcaagcaatggtcaagagcctttcgaaaaccttccatctgttgctcatttctaaggtagccccctaatttgttgttattagaaagaacttcaatgaaatctccaattgataaccatggttgaatgggagaaacatcagtaaatcactttcaatgtgtccaacaattggcactgttttgaacatttggagccccgtaaagggctgtaaaatggaagcttgcttcaccatatgccctcaaataacaatcaagaagttatgtccataggtaagaagggtaatatcaacactatcaagtcaaagaagcattatgcccccgctaagaccaatgtgaggtgattcaagagcattgttgaaatgaagggactctcaaagacgggaaataaagtcagtaggaagttttgtttccataagaaacaaaacatggggaaattgttatttgacaagcaatcgaaggtgtctaaacgcactcgggttccccaaaccccatgcattctaactcaggatttttatgatgagtagtgggattgcaaaccaatctctgctaagttgtcaaccaagccatcgaatcatgtcatcgtaggaaacaaaataactagagctttctccttgtgacggaggagaagcgtccatggtggagggttggtttcgacattgtttaagaaattgtctcatagttatagacttacattgtcttttaggtaaattggcaggggagacattttccttattcattgttggtgacaaaacttgtgatgtggtgatcaatggggtagatgtggtcaaaggtgtggatatggaggaaagagttcttgtgaagatgctatgagggatggatattgttgtcgatgtttgaggataaggggcaatggggaagatagggcttgcaacagtcccaatatctggtgtgaaaatgttgtaaaggttggtggttggtgattggctactgtcatggagaatggaggaagtctagtctgtggttgtaatgcaacaacttgtggaagagttaggcagtgaggagggtatgtttggtgtgtttgttaggttaaaaattgtgtctaaagtctgtaatgcaggacgtgtggttagagattggttactgtcatgggatatggttgaattctagtgtggggttgtattgcagcaactagtgaaagagttaggcattgaggagggtctgttttgtgagtttatttggtttgtattggtgtgtaaagttggtaatgcatgccgtggagaagcaatctgaggaggggcgacaaggatcgaagaagattctcccccaatcaggattcgtggctgtggttgggcaacgttgtgtaaacgaggtatagttgaatgaagagtgtttcgagcaagacgtgtcaaaagagtccaagcatttcctttagagtaatcagttctatattttccataacccgtagtaggaagtttggctcctttcatccaaggtccataaagaaagttgtcatcattacccatatccatacg

SEQ ID NO: 42122 - DNA, 874 bp, Cannabis sativa
  modified_base (28)..(56): a, c, t, g, unknown or other
atatgatatataatccaattcaatatannnnnnnnnnnnnnnnnnnnnnnnnnnnnggcgttccaaacgagcccataaattaataattaaggttaattacttacattgacaaagcaatcatgaaagtgaaggcgaatgagagaagcagccattctcatctcactcttgagagcattcatgacttgttttctgatgattttggtaagatttgggcaacttgagctgtagaaatctgtggttagttggcatctacatgacccaacaaacaacataatcactactactactacaacacccaaactactaaatttataatttgatctctccataactatagctacttactatattaattaactctctctgtattatatgataagaactactatatactactctacttatttataggcaaaatcatgttatattataatagtattaattagtggtttggtgacgtttttggcggctgtgaatgtatatggagaggttgtggtgtacaattagtcttgcttgagttgagtttaattaaacgtaatagtgcattatctctagttcaaaacggtgcaatgggattatagtttatataactaagaggttagtggtttaatatttaactaaatttaaaatctattatgatatatttatatagctgaaactagtgctgaaaatatgtatagattttttgacacgatacgaaactgacacaattttaaaaagtacgatcgagtatgatccagtataaaaaaatatgcgcttagatacgtaaatacgaataaattagttcgaaagcacaatacattaaaatgtcttataattatatgataataataccaatgaatgataaatatatatttattaattaaaattgtaa

SEQ ID NO: 42123 - DNA, 4064 bp, Cannabis sativa
  modified_base (141)..(143): a, c, t, g, unknown or other
tactgtaattgtgaattataatatattctgaatttagcaaaaattgtatattaaaccataaacataaataatacatgtaaaaataaatgacttctaatcttctattaataacaaataagattatattaaaatgagttttannnagggcataaaatcccaatagttcaagctttacatagagctccactgtgtgaggttgccccgtccatgtggaataaactctagaatagtaaaattttagagaggcataagattttttaatggtgtatattgtctaaagccctcccgaccatcgcgattcttaataaaagactacaagttgaagatgttaattgccctttgtgtagggtggaggaagaatctttggagcacctatttctcaaatgtgatccgactttctatttgtggggatcttctccgtggggtatatttctagtgtttgattcaggcatccgtatgtgagaataggtcaagtttatttggagtcttaataataggggcatcaatgtttgatgaggtctttatacatgcttctattgtaattgatactatatgacgagtacgaaacaaaaaggtttataatcttaagttgcttagtatgaatcattgtcttgactatattcgttattcttatgcagacttgagagctactcttatttccactccctctcctttccaagtggaggtttgacgccctcctcctcaagagattgatctcaaactgaattgtgatgttaaagattcgaaagctcgtgtatagcggttgttgctagaaactatttgggtgagatgatctgggttagcacagtagacttggctttttcggatgctctttgtggagatgcggcaacgtattgtttggcgattgagttggtaaagctcaaagattacaagtttatctttgtggagagcaattctagagtaatcatcaattctctcacttgcagatttgcgggagattgagaactattcgtccttttgtcatatgatttctactaattttgttggttgtgtgttttttttttttttgtatttttaaaatttataattttcctactcataatgtggttaagtagatttttaggcataaataatttagtaacttgcttatccattagaatttatttgtaaggagcttgaggtttaattttgaaaaaaaaaaccgagttggtgaaatttttcagttaaaaaaaactatgattaatacgatccgagaaataaaaaaaataaaactgtgtgcggtaaaagtttcaatattggcagaagcttaaaagcaaagctaagctgcgactaacccatcagtcctctcctctccctagtccgaactcccgcctctgctcctcccacgaagctttccagttttgattctgagatttcacaacaaagcaggatcagtttcggaagagagagagagagagagagacgtttccaatggcagacactgcggtacaaccaagccgatcgagggacctcgacaagctcctcctcaggcctggaaatctcgtcggacccagcttcgaacctggccccgaagtaaaatgaatcttctctttctaactctcttttcgacattcttacatatactcggtctgcttttaaattctggttcagggtttagtttaattgattattctgacccaagaattcttggttttgatttaatgctaaataatttttgattattttcttttttggggttgcagctgagggaggaccttaaggagtatgcgaaagtgttggtggtaggggctggtggattagggtgtgaactactaaaagacttggctttgtctggttttcgggagctcgaagttatagacatggaccgcattgaggtctccaatctcaatcgtcaatttctcttcaggttctttttatcttcacatggtgctatgccaattgacataacacacaagccatttatgtacaggaattactatttgtttgaagagaaatgctaaaaggaaccagtagtgcctaagtatttgatcccatataatcgaatgaaataatttataaggagtattgctaatccatttcaaggtggaaggtgctaggcaccaatgctcttgtttgaatatgttgactatgcaacaagcaaatatgagcagtttttaaatttttattattattctttatcatcgttgatactatatgctaacagactaatcttttcagtttatatgcaagtatttagctggaatttcagtttctagtaagcatgtttaccttagtagtccttaatattgtagactcgaagatgtcggtaagccgaaggctgaggtagctgcaaaacgtgtcatggaaagagttagtggtgtgaatattgtgccacacttttgccggattgaagacaaggagctttccttttttagtaattttagtattattgccctcggtctcgattctattgaggctcgaagttacattaatgccgtagtatgtggctttctaggttggtaacttaacttcctgattttcatctcttggtaatgcacaagttcatcttcccaatttaaaatggtcatttgtaaataatcctgttgttgctttatcctattatgctaaggtggtatgtgttgctgattttttcttcgttttcatcttttagagtacgattcagatgataacccactagaagaaacagtcaaacctatggtagatggcggcacagaaggatttaaaggccacgcaagggtcattatgccagggctcacaccatgctttgagtgtaccatctggcttttcccacctcaagtgaagtttcctttatgcacccttgcagaaacccctagaactgccgcacattgtattgaatatgcccacttaatcaaatgggatgaggtgatgtttactgttggtttatgttcaattttctttttggtattattttcattatctttccagataatttgatctaaaattgattgctttgaggtgaggtttactagtggatttatctttaacttgtatcgttgttattttcattacagtaaaatttatctaaaattaattgttgtgctgttgtaaatgcatttcacttgcaggttcatagtgggaaggccttcgatcctgatgacccaaagcatatgaaatgggtttatgatgaggttgataaacaattttctagtaatgttttccttcttttccttaggtccacaattttaatccttctgctaccgttctttatatgttgtaggctatcaagagggctgagctttttggtattccaggtgttacttattctcttactcaggtatatacatgctaaagaaagtctctctgaaacagtgacattttaagaatagacaatgtttctgatatgctaattatttttggtctctttcctttgctgtcatgttactttagacctgatttttgtcaattttatcacttgatatgttgacattctttattgaaaggtgattcaacattttattccattttatattttgcgaggtaaaggaataaaaaataaaagtgaggagatttgaaagctatgagtcattaaggggctttaatatctttggtgttgtgtatctgtttctcttatgattatgagaagatttttaatccatgtattttacagggtgttgtgaagaatatcataccggcaattgcttccaccaatgcaattatttcagctgcatgtgcaatggaaacattaaagattgcatcaggatgcagcaaaactctgtcaaactacttaacgtgagtcctttttacagtcctgattttcatttataactgtgatgttatacttctctgttatatcatgggttctttatatgtgaatataatattagtaataatacactcttctccttatcaatggatatcttactttcctctgccgccataagtgagtgctctcaataggtcagtcatagacatatgacctctttaaaagaaaatgaatatcttactttccttttagtaactcttatccataagagaaaattaatagaacgcaagaagtgaagataaccaataacatgaataataaaacatttttctctttgctttcctttttttttttttaattatggatttttagataatta

SEQ ID NO: 42124 - DNA, 1442 bp, Cannabis sativa
ggctgcagccgctcggcgctggagggagtactcaaggaagggtgctgataaacgtccaacatttaaacttccggaggcaatgtccaacaacgaaaaaaactaaccatttatttaattgggttccttagtaagtaattaaattatgattatgctataataaaactgtaattggaattgattagtctacaaattttcactggagacaatccttagctcttcatataaacctcaggtcttggtcttgtacaattcaatctgatccgggatctctgtaattatacatattgtatataaacaatatttatagatttgtaaattgcataaatttaaatagttgtctcgtgataatctatcctatatttacattcaaaactcgcacaggcaataatttaatcaagtataaattttgttttccttgccacatctatttgagatttgatttgaggcttatttttcttgacacaaagacttgcgtctaattaagaaaacaacttgccagtgtaaaaggtcagatgacttattggttcgatttgtttttaattagtttctttttttttaatggtcaaagctggttcaacttcaacacattgatatattttatatatttatacatcttttatttatttatcctacttgtaaaatgtcaactgagaaggagagcaatacttttggtttaatttattcgactaaaaatacgtgcagctgaagctatgatgtatgagtaaataaaaagcgacccttctttactcttcagttatctcatctctcataatcaattaattgtaaactgtgaatggacttatagtgttctgcatctaaatatttctgtgttccctatcttaatgggaatggaagaagaaaaataaaaatcccatcaggacacatgtatgaaaataaggcaaatatatcattaaaaaagaaagggaccaggtattgtggcaccacacatttatggacacgtgataatcacataaagaaataaaaatgagccaattttataatgtatgatataatactctaaagttgatttgaataaatttataaaatacaatataatgtttaccttttagttaagccaagatttggaatatccaatggaagttagaacatcttaatatgccattatttcttgcgttagatgaggtgagtgagctaagcagtgatgtgaagcccaactaccaatctcaccatttcattatgtattatccttttaaattacttttcatttttgttttccaaatgcccattttgaaatgattcctagtatattctgcgaattgggttttttaaaacatttgcctagcatgccaatagcaacgtattttactattattgtgctaaaaaaaatacaaaaatcaatctaaccaactgcatattctaattgtagtattctataatgcaaaattatatatgatgatattaaacatgacactgtagtctgt

SEQ ID NO: 42125 - DNA, 4045 bp, Cannabis sativa
gtattagttcagccaccaaattggcctactctagttcctttttgagggatcattataaaatcacgtctgttataatcgaaggctcaagagtttttgagcaataaacaaccagtacagagatttactcaaacatgaacagtagagacacttttacaactcaatccttacaatccttctctctctcacttgctacccttacagaatctttcaatgtgttttccaaataaaaaaaagtaataaagatcaatatttattaaaaaagaggtatgtagtgtaatttcctcctagttaaatagccagctacctagggaacaagtaaagttgtatcaaacaaaacggatgaattgactagaaacagatgtaaaaaccaactgttaggcataacaaactaaccaagaattggttattagttaaaacagttgagttagttatgtggaaaataaaactacctcatttatgaaaattattgatatatattaattcttggagataattttgtatataggaccttctcattgaacaatttctctggtccgctaccgcctgaactagggaatttaaacaagttggaacaactgtaagttgcttacatttcgtctttgtttcatttcttcttctaataaaaaattaaagttcttatttgtctacattttgttatagtgcgtaaagccaacatgaacaccattgagatttcctattcaacttgaatgattacaactgtacattgttcccatcttgattcctttgcttttcattattgtttattatttgataggcttattacgagttctggagttagtggcgagattccatcaacatttgcaaatctccaaagcatgcaaacattgtaaactatatcttctacctaatgatcatccatatttaacaggcatactattatataagaagaaaaaagtattgtctaatgacatctttaacatgtagttgggtggacgataatgagctcaccggcaagatacctaatttcgtaggaagttggtcaaatcttactagcttgtaagaaaattgaaccgatatgtgtgtgtgtgtgttatgattatacaacataagttagctctacttaaatatgttaatgcagggcactttcagggaactctattcaagggcccataccttcaacgtttgcgaatctaacttctttaacagatatgtgagtaacatgctcaacaaatcgaattctattcacaaatatttaaagctaataaccttaagtgtaaactatataaatgtaggtggttgagtgaaatttctaatgcaagttctactcttgcatttctcaccaatatgaagtctctatcattcttgtaagtaaaattttctcaacacataatcatatttatagctggtatatgattttttaatgtaataacttttggattgtaatcaaacaactcataatataacctgtagacagatgaggaatagtgatttctctggctcaattccatcaaatattggcgagcttagagagttgaaacaactgtaagttcattacgggactcaaaactacccaacctacattgttttctaactttgaaattgtactttttctttatagagatttgagcttcaacaagttaaatggacagataccagactccctattcaacatgagttcactttctgctttgtaatatatatcactgtctctctttaattgctttacatcatttgcttcataatagctactattgcactattaaagcaagtaatattgtgcttttacttagatttcttggaaataatagcctaaatggtaccttgcctcagaggaaaattgcatctcttctcacaatgtaagttaattaatatatttcacttatttaatagttattcatggtaatgactaaaattaacacacttgtactattttatgctttcagagatctatcatacaataatttagtgggaaccattccttcttgggtcaacaatcaacaaaatttacaactgtatgtctttgatttttatgaaaaaaaaatggtttctttacttagcttatatatttaatactcatgtgttatgtatttatatgaagataaaactagtactattaattttatacttcacttttctgatacagtaacttggttggcaacaattttattatagataattcaaataacaggtattgtcttttctcaagttatgtaaaataacttcccacattgctgctcttggttaaagttatctctccagttttttaatatctaattattttttggtttgtttttagtactcttcttttaggattgaattgtcttcaaagaaattttccatgtaatcaagaccgtcctctctgtaagtgaagtttggagagtttttctattttatttctttggattgaattaagctgtattactttagaaaattatattatgataggatctgagtgcaagagaaaataactagacatgaataggcatatttgatatttgataatagatgaataaaatgaaaagagaacaatgtaactattcgagagacctcaactctgaaaagagcctaagctcaattccgatacattttccacacccctctcattcaatctcctaacatgttagtgtactatatgcacaaatgattgtgaatacttggtacagtactttctaataaagatttggctaaatgtttgcagattctaactttgccattaattgtggcggtaaagaaataaaatcttctgatggtgttgtgtatgagaaagatgataatcctcttggtccagctactcattttgtcaccagctctaaaagatgggcagtaagcaatgttggacttttcttatggactgaaaatgctaagtatataagtacatcatctcaattcacaagtactttagattcaggactattccagactgcaaggctttctgcttcatcattgagatattatggtttggggcttcaaaatggtaactacaatgtcaaactccagtttgcagaaactgctttcgaaaattctcagacatggaaaagtattggcagacgtgtatttgatatttatatccaagtaatgtgcacattattgttctaagatttctgtctcttagttttctttttgtctaccttttcatgactatttgtagtgtgaatttatgatagggaaatcgcgtaatacaaaattttgatataagaaaagaggcaggcgggatttctttcaaggaagtccagaaggaatttaaggcccgggtttcacagaactacctcgaaatccatcttttttgggctggcgaaggaacttgttgtatgccggtagctggtacttatggaccttccatttcagcaatcagtgccattgcaggtaataacatggtttgataatttgtggaagctgcaaaggtgtctcaacacttacaagtgatcattattttaacaaattaacaaattagggcagctagttacacaaataaaaacttggtcagaaattgatagtttgacctaacaatagttactgtatttaacaccataaaagtataatgtagttgaatattgttgttttgatacagattttactcctaccctccataacattcctccaactttgagcaaaaagaagaaccaaactagtcttattgtggggatcattattgggactgccattttaagctttttatctgttttagtggccttctatgttgttcgaacaagaaagaagtctcagatgtttgatgatgacggtaagcacttttcgatgtatattgcaagttctaagttgttgctttaaagaagaacataataggtaagcttaataagtgttagtttatatacagagtttttggggatggatgttaaaccattcatatttggttatgctgaactaaagacagccacaaatgattttgattcttctaataagttgggagaaggagggtttggacctgtctacaaggtacacagtttcatgccacacaattatctatgtttaaatatgacaatagctcattggtgataagaaaatgcaatacattaatagggaattcttgaagatggaagtgttattgcagtgaagcaattgtccttaa

SEQ ID NO: 42126 - DNA, 1115 bp, Cannabis sativa
  modified_base (946)..(957): a, c, t, g, unknown or other
tgagagtgatgtgagaaaattccaacgtctagttatacaaatcaatattcccattaaataccatggatattggataaggccaaacttagtggacttttctcacattatttttggaaggttagtagaacttagaaggatgtatatatagaatagaagatagaattagacaccatgcatggaaagaaaaaatgtttatatctctcacataagaaacaaagccacctttcttcacttttttggctaggtttggtgctttttttctacactagagggctaatttttgactttgtgcaatcgtttaatatttatttaattagatcaattcgacctcaacaatattaacaatatcaaaaagaagattatacttcgaaaaaacacaatcagcatatatataaacaagatactctaattataaaatgagtagcttaattagcagagcttttgacaaaatataaaaaaatattaacgacactactaaaagtagatgtcaaaatattgaaatttctgacagcttgtactaatactagataatcagattcgataatactaataccaaaaaaaattgcgcttcaacaacacttccttgagagtcacgtcttcaataatttttagaagaacttgcccaatctcttgtaatctcttaaaaaaaaaaaagcttttcgttacttcataattcagattaaaaaaataagtgttactttatatatctagagatataattttttttttttattttgacaaatatgtagaaatataatcatcacttgcaaaacaaataataaaatgataaatgatatgcatttttcttttctttttaaatgatcagatccattgatgaaaaataaaaagaatattccttttattttattagtaaaaggcattagataagtatatatgcactgaactgtaatctatgtcattccaaccacttgaggctagctcaagnnnnnnnnnnnnggtgtgtgagtattagaggtcctggtttcgaatcccaggttaaacatgttgtaatatataaacgcttaaataaaaaaaaaaaagtaatctatgtcattccctaatttatttattataacaatcttactatgttttttttttttttttttttttttttt

SEQ ID NO: 42127 - DNA, 875 bp, Cannabis sativa
  modified_base (27)..(34): a, c, t, g, unknown or other
aaagaagaaaaatatatatatatatannnnnnnntatatatatatatatatagttatgaaaagaaaacagttcagatattaaaagtactcacaaaacgacgacttttccatctgaagaacagtcgaccccgaaccaggagcatggatcaacctctccaatatcatctttccaattagacaaagcgttaaaagggtcacttgtaactccttccttaaaccttaaaagcgccaaaccttaacacaaaaccattaacaaggttgttaaaacattttcccatcagttttcacaactttctagctaaccaaacaagagaattaattaagaagaagagaatatttaatcatacaatctaaaactaaccttcatcattcatagacgaacaaaagatcaaattatgaaccaagaagtatgtcatcaccatagccagcacactcatccgattcctgaatcgattgaatttccatttttcgatcatattttttttttttccaataaaattataaaaacgttgtcacgaaccaaactgggagccaaaaacaagatttcttttttgcttattttttattagaacagaggggataaacaaggttggaactaatcagagacaccaaaatcgaacaatctgatcagttgaataagcaaatgggtaaactaaaagatcgaaaaccatgttcgcgtgcttgttggctaatttagaccccaacaaaatatttgaaaacgcgtctactgttaatgtttctaaaattcatataatataatattatgcttctcttcttttaatcttacttgtttcatgtttgacattgactcactcacattttttttttttaatttctttacttctttatttttataaataaaagtaatttcaatt

SEQ ID NO: 42128 - DNA, 1128 bp, Cannabis sativa
ttgtttctctgttcaatagttaggattaatcagacgtttctgggttgaacaaaagaactagttgcttttcgtttgtttgtttacttttgtctatatataaaagggttttcttgctgcaagctcttgctcaaataaaagttgtagcaaaggttttactttgtggatagttttttgttttctttcatggatcattttccttcataggccatcaaattatgttgttcttttaatttcaatgatgatttaattcaatgacccaaatcaatttggattcagtgctgtgtatggtgaattattttgtaactcgtgattttgctactacagatttgtggtcagctgttgcaggcactatttaacaaatcattaagttcaaaggaatgatttgttaaatttataacataccataaacactcaaaataaattctacttgtcaaacttatctattaatttacataagagaatgacaaagtagagacttgtggtatgtaaaattgactgtagccagaaataatttatttgttatatgctgctgggatatccctaatatctgtttagaggggaaaaactcttgttagataaactgttctgttcctttatgcgtgtctctctgatattttctttctttatgcagatggatgagtgtaataattttgataaactattccttattgcagatggatgaatgtaataatcttgagacttatctttatgttctactgtaatgtttgggtagttcataagtgctaaccagtaaaccatttatatatatatatatatatatatttatataactattttcttttcatttttggtgtgatttgatgatcttttcataacattttactatgaatcattgattataaacatgttaacggaaactttaaaatgggttacaacccaaaccaactcttaatgtatttagtaaagttaagtcacacaatacaaatgatataaatgggttaaatttgtctaccatgatattatggggttggctcattcaaatgcattcaatccagccaacccaaccatatgctgccctactttataatgtcagtgtcactacatgatcttttagccgaggaagaaatagaggatcttcttgccgaggaaggtatcctaaatctacta

SEQ ID NO: 42129 - DNA, 655 bp, Cannabis sativa
gctgccagtctgcattctaccgtcggccatcgtcaacttctagttcattaccttcatgtaagttttcctggtacatttcgcttttgcttttcatttgcgtgttaaggcagagtttttagtagagcttttaatcgtatttgatttctacggtgggataattttggcaaagaccgtcgtgtggtgtagcttttcatctaggctttgatgcttcctttcttttcattttgcaaacgacttttatgcttagggactattgagagcgtgacacggtgaacatacttatatccctctctcttttttcttttccttttgctttcgctgcctttgggatattcgtacccgatgtttgcctaggaaaatccctggatttatttctggcagacatccggactctttccagcggttaggggacctccattccctacttttatgttagggtttggtttggaggctaactgctgcacttctctttttcagaatcttactaatctccttttatgtttgactgtgatatatttagaaatgagatcataattgttaacaaaggttagaaagagaaagttttaaggttagggtaaaaatatttaattacacttagattcaatatatcgttatattttattttgtaaatgttgagaaatatgacttcttagta

SEQ ID NO: 42130 - DNA, 6149 bp, Cannabis sativa
  modified_base (311)..(315): a, c, t, g, unknown or other
cgctatcaagcttacaattttctaaggaattaggttactcattgcattgcgttaaaaaaaaatcacccaataatttctcgtaattatgctattagtataattggttattttttggatgttaacggaatgtgtatttttttttttaaaaaaataatgttatgttaacggaatgtgtgtttttttgaataaatttttgttaaaaaaatagtataaattaattggaactattctgttaaagttaacagaggaaacaaaacaatatggttaaatcaagaattgctgttaaataagcatttttaatatataaagannnnnatatatatatatttatttatatgatcgatctaatctgagtttggtgcaccgaaagcggaccggaaattacttttggtcggaccctgaagttgactttctccacagcttgttgtttcgcatttggctctcttctcattccgctattttcattaacaacaaaattttaagatgaccctgcttttcttttttcttattgagctagaatagaaatgctaattaaaatacatcttataccataaagagacatgatatgtcatatatagctattggttttaggcattttaaggcgccgtattagtaattaacaattctctttcttattactcgtcttccttgttgtttcttttatctctaactaattttagcttgacgtacaactgcttcttcaactgactctttttcttttctctctctttagaccactttttggcctttgccggtttgtctttctattacactcatttaccacacatcacttctcaatgttttgttttttttttttgttgctgctaatttcaagcacaacctattcaattctacatgcatattcatattctttatggtgtcaaaatttctgattctcaatgaaactaagttcgattaatattaatctttttaatcataaccttgttggataatagaactagttgtttagattaaattaattttcataatttaaattaaataataaaaagaaataaagaagagtggggagacagctcaaactttaactaaaagaatgatgagataagaccctagttaacagtccaaaatacctctcacttgattattgctgggccataattgaggaggttaaacaaaacacagtggtgtcagcatgggtgtgcatgtgaagtggctctacctagtgaatcccatcctcaaataggccctaaaaaaagattacctttactttttattcctatttcctctgttgcctaactaatcacttgttgagatgagatatcatctagttttcccaataatatggttctagtttttgtcaattaccgagagacatcaaaattaaaaagtaagatattgagtatcaaaaatcacatctatagtactgtagaatggtacaagttgtttatttttatgggatactatttaaactagaaaatgcaaattacaattttttaataaacttctacattcatgttcaagtctaaaataactaatattgcaaattacaaaatatttttttcgtagtactattcgttatagttacagtattatttttataaatttttaaaaaattataaatagcttacagtatcgaaaatataatttttgatattgtagtttactacaagtgttcaaaattttcaaacttatttttcatactgtaaattatttaaaaattttaaaaaatttacaaaactgatattgtaactataacaaacgtacttttttttagagaaatattcctacacatattttggtcgagtttttatactattatatataattttacaagggacatgcttggcccactgtatgaatttgattccttcattgtcgttcacgttatcacatcaagtcttgtgatgcaagagattggaacacaaggagaatagcataattatgaattatattactggagtgcgatactgtggaaagcccttgtcaatgattatccaggtagtgacacttaaaaaaagaaaaaggaaaaagtagaaccactttcttcatttcttattcttaaggaaaaattgatgaaattggttagtggtccattgaatatataaaatgactatttagtaaatcttgttgtgtctcaatccaaattaagtaaacagacttaaagagaggtttgactccttagttgcaggactcagtttaggccttgcattaaatttgctcaaccttaagtagttcgtggtattacttctatatatatatatatatatatatatatatatagccatagtgtaattggtaactttttttcaaatttccatttatactatatacctaaattcacctaaaatttgtccctatgcagtccttgtagttgtccacacacacgcatttccagtttaaaattatactttttaaactatatgcgtttctttgataacttttgggacgtatattacttgtaagaatatacttgattgtgcataaagatttaaaagtattgtactaaaatgtataagcgtagcgtaaattgtgtaaatgtgttatatcttttatacaaaaaatttacaactaagccatctttaaagagaaaagcaagaaaaaagtgatcaactgacatataaaggtaactcaaataacacccttcaaagaaaaaagaaaaggagtgggcatattatatggagtacacaattatcagaatttaaaagtgggcctagccaaaggcccataagtagagtccatctcgtgttttaaaagtgttactaacaatagcaatggctcattaattcagccaaaaaaagcatggctcattactgtttctatcctctctagtctcttttaataattgagtttttgttattctttaaatcatttccaccttagaggttgtggtgggattgccaaaggtttctcaaaatattctaacatatgggttaactgattggatctaattgagtgtacctgaagtaatgttagagcaaccaccacgaagaaaaaggcagccactgaaaccaaatgagaattgagaagtgagatcattatttatctctgactaatcttagtttagtttagggattagaagagactaattttagctactttttcttgccttctaagttcatctttgacatatttctacatatgacaaataatgatgtctaagtttttattttgagtcttccaaaggggagaatgcttacaattaaaacaagaaaaggaaaggaaaaataggtacgagtttaagagtagttagtaaagtctagtgtagtgtagtgctgttagttgatcaattagacgactaaacaacccttttagtttacctctttgttcttattcattattgaatatgctgaaattaatgccaaccactcggatgaacactgaaacatctatatttctaaaaaaagatataatcatttctgtctttcttatgcacttggaggaaagtgtgtatgtcacttatttagttggtcaccaagcttttctcacatgcgtgttcaccttttataatagagtacccaccctgtaaaggaaaacaaaacatgtggttaggaagttaaagatttcttattaatttgctgttgtagagatataaaattggaagctctagttttgtatttcttccaatgtacattatatagcacattgcttgaatagcaagaacatgaagttttacactatgctggtgatcctgctctaacaatttcagtatcccatgatataaaaaatgtacttctaaattttcaatcataatgagatgggaaacttatatatcttctaccaaacttttatagagaaaagataatctctaataagcaaataattggttcaattcaaccatatctaaaagcgtaagcctgtagctttgatagtgaggtgtgaactaaagaaagatttggaagttggaagcataactgaagatgattcagtgaattaaatgctagctttagtaatctcttcttgctggtattatagagaactatgttttcacaaagttatattcttctcgaacccctcttcaatgcctaaagagaattaatgttactgctcgttacttagatagaactctagctaacaacatcaaagataaacacccaactaggggatcagtttatttcttttctctattgacaaaaatgtaacaacaatccagatctgtatagaaattggagtggctgtgggaaaagtagaaaaatatgcataaaatgtgtaatgaaaaaatgtaataagaagtgaagaagtaaacaagactacgaataaggagaaaaaaatgcatatgcaggcagatgataaaataagaacagtggttcaaaaagaaaagtaacaacaggtgcttcatatttataacgatcccatttgtacaaaattgcttctttgttttaagcactaaaacaataagttgatgttctatttaaactggaagtaagtttaaaattacagttatttatcaatttgttcttcatgcgactttctgatacacattaggttctaaaaatcatagtattgttcttcaagctgtacaagcaaagaatgcattggcatatccacattctgtttagcaagaatttacatggaatccttaagtgaagttgcaagtgttttgaattacaacttcatatcttttaaatcatctctttttaagtcccaagtcataattcatgacttgcccccccctttgttcaactttaattacatctaccactatctaggcaattgatggcatggtttctaaaggtcatgtttggccattgacatggtacatgtgctgtttgtctgaattacaccagtcctagatattatgtcatcagcaacacttggcagaagatactgacctaaataaacttttccgatgggtagagcactgttccaagttgaccaccgatgtaaacaagccacttagtgtgactagaattctttggagaagctagtttacaatcaatgtaggaaaattacgtacacaaaacttctgatccaaataaagccaatgtcaaattgatttccacaattttgaagtgtgattgatctcctgcaacaaagacatgggattcttctctaatttaaatccaactacagccaggaacattcatcaggccctttgttttcatcaaatgcctcacattttttagcttatcccactgtccaacagctgcatatgcatttgaaagtgccacatagtttcctgaattatctggtccaactctaatagctttacagacaaacattttgttaactcagttttgttgtgttctctacaggcagctagttgtgatctaaaaatatgtgcatttggctcaaaaggcatacagttgataagcccttccttgccaagtttcaaattattctgcagaagcagacattaaagatgcaagcgtcacagagagctttgtcaatctttccaattactttcacatagcccgatatgatcaaattccaattgaccgcatatttctcagccatcttactgaaaaccaacccagcatcctctatcagactaaccttagagctgcccaaattgaaggcttcaacaattgccatcgcatgcccttgcttgccctcgtctggagcagctatattagctgaagcagaaagatagctagatatagtaacttaagtgggttcgacgctttccatcatcaaattacaaaacaacttaatcgttttctcattctccccatttagcacatacccaaccatcaatgaactccaagttactacattcttctcaggaattccgtcgaaaaccatccgtgcatcctccatagctccacatttaccatacatatccacaagactactactaaaaaacacacaaatgccattaccataacccatctttatagcatatccatgaatccctttccccatcccaatccactgaagagctccacatgccttcaatgcattgggaacaacaaaattatccggaaaatgcccagaatctagcatttcaagaagacccagcaaagcttcttcacagaaacccatcctacaattcattccaataatggcagcccaagaaaaaacgttctttgagctcaccatttggaacatacgacttgcaacactataagcatcgaatttagagtaaaaaaaaatcaaaagcttaattagtttcgatatactgtttcccagccaaaaactcaccgtttctgatgatccgatccgatcgtggatttgctgaccagtggaaa

SEQ ID NO: 42131 - DNA, 4057 bp, Cannabis sativa
agatgtatctgatctgactgttcgggctccaacagtggacactaatcaagaaagtcttttaacatttaccttaacgtttcattttctacgtgtccaaatacaattggtcacagaaatcggttttaaaatttgcatcggcaccatatcatagctacaactttcgccggactcgtttcccacacagtaataatgagtgagtctacgttccgaaccttctttctgtctataaatatactttagtgtcggctttaaagagctctttttctctccccctttgcaatagctgagagctccgagctctctcttcgtctccctacagctttaccatttgtctctctttcatggcctcacaggcaagcctcctccttctgaaacagctcaaaggtatttgagtatttttcttttcaaatttctttctcattgattcggatagggttactggatttcgattcgtcttgagatgtgatcttaattgatgttaattttttaacttttggaggttaatctgtgtatttgggtttgcagatctttgcaagaatccagtggatgggttttcggccggtctggtagacgagacgaatatatttgaatggagcgttacaattattggacctcccgatacgctttagtacgttttctttttaaaagatttttgccaactcaaaaattcgttttttttttcttgatcaatttttggggtttttcggtttctatattgtctgcctgcgactgtttgtggatgtttggatccttgggtgaaatttgtttatttcttcttgaagttagttgatatttagaattggattgtgctgtccagatatttcaagaaaagaaaattttctcagtttgtggggatggccttctagattagaggcgtaagaaaaacgatgatcggtcggtctggagctttgaacaaccaattttcaagctggttttttgggttcgggttaactttatgttacttatgttaaagatgtatcggaaactgattttagggataagacttagagacggtgggaaaggttgcagttttcattttggaatatattcttggtgtatgctagcgaaagaaacaacttactttctttatttgtgatcctagaaggtgatgatattctcaaaattggaacttttttaaatggctttccgaattctgctccatggcgagttactcattttcttaggcaggtgctaagtgattaacttatatatcgcttactaccagttcttgttatgctggttcatctttttcggcttatcttactagtaatttgacttgttgatttttgttctgttttgtttactgtttttgagggctcgggtggatgtaaactttggcttctttccttattgctgttttattaatttagttttgagtttgtaagcctgaactatatgttctcttatgttctgaggcaagttatgtttatctagaaaacattcttgcttaaaatttttgtatcattcaaagcaatggatgacatgacgttatactgattgttttatatcttattgcagtgatggaggatttttcaatgctattatgagttttccctctaactacccgaacagtcctccatcagtgaagtttacttcggagatttggcatccaaatggtttgttatgctccctaatttccacttgtttgatattcttaacatgatattgagagcgtttttcactttttcatttccagtttatcctgatggacgtgtttgcatatcgattcttcatcctcctggcgatgatccaaatggatatgagcttgcaagtgaacgttggacgcctgttcatacggtatgtgatgtcttaaagatgatctatgtatcatcatcttatagttataggtagttgtgcaatgtctaaactgttatagatttgttgtgaatgagagtatgaagattctcatttattataagtaacccgaactccataatcagacacgaaagttccaactagctatgcgtgaggaagtttgggccttttgggttacagagtttcttgctaatcatttgacaaatgattaaacagtagacagtaatgataaagacaatgagacgagagagataatgctatgagttgaggaattgaagctgtgacctgcatgggtagggagaccagatgtaaattgaagttgtgaccttcatgggtagggagatcagatgtgaagagtctaatcgtggaagcataatgtgtgctcattttgttgcttgcatacctttagaccaccaactgttgtcaactgttaatcatagagaatagccatttaattaagtagaactggtgggaaggggtgtcacctctaagtgatgtgtggaatttattcttgttcattgttttgaaaagagaaaagattctgcattgaatatttgcaatggtaaagaacatggagtttggcaatatggtattgtgacagtttgtttctagtgtgaaagtaacatgcatctatatctttttcatcggttttgtttagagtttagcttttaggaccttgtggaatttttagttttcaagtccagcttctaagtgattcttgattgccattaaaattgtagctgttttgcatttgtgttgcaatttcaatggataaattgttggacatttagaaacattagctaatccttacttcatttaattatggttttctcacaagagctcagtagcactttgctgttacttgagttttgtaatgttattgtgagatgatcttgttatggaagttatcgcagtgaagtcctggttggtctttagctggtgcaagggagtgctgatcctgaatatggatctcttgcaaagtatcaatgacatgtctttgcttgaaaaagaaaatagaagtataggactacaattgttgaatttttcgtctttggaccatataggttatttgcttactatgaacaaaagttaactttgcctactatgaagatgaagcacattaatttgaatacggggctagtaaagtttttcagagttgcaaatcattatatgctaatcacatagcttcaacgtctttcaagcctcatatcttccccccaaggaaaggatcaaaggggctttaaagctttctggatgaaattttgtaacgggaggctgggctctgtggtttcatgctatcattgtaaaatttaggttacttgtctccctttctggaaatagtcaaagtcttcctattacagattaatgattgactacaagttctatatttctcgtctgtgactttacagccttaaattttttatagatgtcctcatgaagtcatggtggttaaagaagggtcctgaggttccgttaacatttttataacattgtcaatgtgtaaattttgtccctgcaggttgaaagcatagttttaagtataatatcaatgctttccagtccgaatgacgagtctcctgccaatgttgaagcagcggtaagtctttccatgttttccctttgaatgcttttgctatgtgatttatctactcattttcttaactactactggacaagttgagaaaatagttaaaaattcttcaaagcaatcaatgctcaaatgtttcagtctgtttttttttttgctctagaagtgttcaattttttttgaaaggcacaatgcatatgtaaaagtggaagagttctaagattgttgttggcttttggtgtgttgcagaaggaatggagagataggagagaggagttcaagaaaaaggtcagccgatgtgtgagaaagtcgcaagaaatgttgtgattcaccattcaaggcgtttcctattcttgcttgggggctaaaagcttgtactaattaattggcttggtgactactgccttgccttggggttggtccatgtagcatgccattgaattctggcatcaatctcttttactttttctttacctattttgttattttatttttacatttgtttttcttttttctctttatgtcacagtatttgctatgactggagacatctttgtattcaaagcgttttcattagtgcttggcaacgaagtgttcttgtcataaacccattctctgtttttgaccgcttttgtttagaatctttagatgttt

SEQ ID NO: 42132 - DNA, 743 bp, Cannabis sativa
atttttttcctaaatttcggtagggatatacgtatatatggtatttttatttttttcagtaactgtaacattaatatgttaatttggtatattagtaaaaattgcccaaacatttaatactttcatttattacatttattcaataacttttatataaatataatttttctatttgtttcttagtgacatgataactttctcaacaaataaacaaataataactttctcataaaacttagaaatgaatatacatgaaaatgaatagtaataataaaaaacagtgaaaaggaacaatgatcaaaataaactacagaaacatagatatttattcatttgttttccttagatctataatatatgactacaaagactcccctaccatagggacaaattaagtgtgcttactataaaaataacctataaatatcaatcgccatgacaattaaatactaatttaatataaacatacaaatttgattaaatattatataatcaacctatttattatgtaaatgaaaaaaacaatcagcaattagtacaaaagggaatatattattttaaatgcaatactcttatagaaactataaacctaaaaaaataattagctatttaagaaacttaaacaacaaacttgatgatactcatccaaaagaagtttaatctttgaaataattacctctgggtgttgcgatacttttccatgagttatactatctctgttcccccaaacataccatgccgaa

SEQ ID NO: 42133 - DNA, 939 bp, Cannabis sativa
atatatatatattaatcaaatatagggtgcactgttcacactacacattcccactaatctagtccatatcccctaagactaaagaatttgtgtgtgttgtttttacttccattagctgttcggtaaagtttgtcgcggatttctttgcccacaaggccagtgttaagaagattcagactcaagattgtctaagggaagtggtccctttttgtggtaactagccaattttagtttatatagtttcaattataaaaaaaaaaaaaaaacacccttttaattataaataagttaattaataaataattttgattttgttatgttattacaaggaatgaaagaggattgaacattgaccttctcctaaagcagaaaatatgtggaaccaagcctaaaccacaaaaataacttcagttatatgttagttaagttatataacttttttttataataatcataataagcccttcatattacaaactaatcactatatatattattggttagttccaaccttatccccacacatattcttatttacaaatgtattacttaattctaatatttttttcttatgttccctcaaccatgtttgatgcatggcttgtgtctacaataagtatacctactaaattgtgtattcaaaattagagacaaacacaattataaataaacaacaaatcatacataaaaatctttaaaaagacaattttattgaaacccaaaacttcgtacgttcaataataatgccacttgtttgtttgatcacgtgctacattcaaagaaaaacacaaataaatcacattctttttttttttctttaaaatgtataacaatgcatctaaaaaaaaaaaataaccttcgattagaggtaataaaatagaatgaaaataatttttattttattctattattttattgcattttatagtattagaatat

SEQ ID NO: 42134 - DNA, 680 bp, Cannabis sativa
attctaattaagatatataataatctcatattatattcatgttttcatcgtataattaatcctctttattttcttttttatagatataggagaaataaataatttgagattgcttgaccatttcaaagagcgctgcctaatacctattaaatgatttatgagaagattgatattgactttgcagttcattttgaataaaattaatataacagacacattaataaagatttctcaataacaaaacatatcggtgcttctatgcaattgtcataagtatttgttggtaatatttttttaatcagtttaaaaattaagaaaataaaaatattttaaaaaaatatattttataaaattgtttcactttttaattttttaattaaaaattaaaattttaaaatttttgaaaataaaaaaaaaaaatcacttttattatttttttaaatgatatttctaattaatgtttgtactcagacccagatccaaacttgatcttggtcctggtacgtcccggactcggaccttgcatcagatttagacccaaacccgacttaaataaaatcaaaaaataaaaataaatctttataggatataattgtatttttatttttaaaattaaaaattgaaaaacaaaagtagttaccgaaggtatttttattttttaaaaataaattaattttatt

SEQ ID NO: 42135 - DNA, 3367 bp, Cannabis sativa
tttctttaaagaataataaattttaataactccactaccacaagtcttataataagctaggagaggccaaaaaccaacctttattttttagttaaggaataatgtctctttagcatgtaatattattaactgaaattaaaataaaaaagctataataaaaataatgtaggtaaccattggttagtaatttgtttttattatacaaaattccaaacatgaacctccaggggttccagagccctccccacccaaaaaaaaaagcacttttactatgttgctgaggtagtaagaggcctaataagatgatggtggccccagtttgtgatcagtgtgattggttttagtttagctttttgccttttttttttcttttcttggatgagaaagaatgattcttcagccagagagctaaacctcaccaccacaacaaagctccacagcaactgaagaggcagacaagaataaggggtgtggatccttaacttcttcttctcctctttctcatactcatccactctcattcttcttacgctactttttgcctttaccacatctcatctcttattttcttttaccttttccatctcaactttaccttaatatatattattagttcagagtgctcttctagttttggaagtttggggtttaggtttttgcttcaagttgtattagagattattttctggttatgttgtggtttttagcttcttttaccgactaataaagctactaactttatactacttttttggatttgtcttggtggtttctgtctgttggaacattatctctatttctcattcatgggttggtttctatttctgtcttaatgtgtttttctttcctgctaaaccatctaaaggcttctctttttttgctgttctttgcttcttcacactcctgctgacttactcagttggggaaaaaagcttctacgtacgttataatttgtgatttgggagatggggtggggctcttctttgggtgtggtattattgtgtttagtctcagtttctatggtgtggagtagtgtgaatggcataggtgctaactggggtacacaagccagtcaccgtctgtctccagatattgtagtgaagcttctgaggcagaatgggattcaaaaggttaagctttttgatgctgagtacgacactcttagggctctgggtagatctggtattgaggtcatggtgggtattccaaacgacatgcttttgacaatcgccaccagtgtcaaggctgctgagaaatgggttgccaagaatgtttcaactcatatctccaacaacaatgtaaacatcaggttacctcgctcatttgactacttaaatttctttgcttttttgttttttccttctttaatgtttttatgtttacattcatttactcagaatatgatatttatggtttatgtgatgttaccaataatttttgcttaaaaagagtaggaccaaaacatgttatgttttggtttgttctaaaaatggtgattttcaaattatacttaatcatttggatcttcttgctctttgttaagtataaagaatgtaattaattaatacagaaaccacttggaggtcttgcttattatattatgactcattcgttttatattaggagaaatttatgtttgcgtagtaagtagtgcttctcaagctttgtatgaatccacaggtatgttgctgttggtaatgaacctttcttggagacctacaatggaaccttcatacaatcaacataccctgctctacagaatatccaatctgctctcataaaagctggcctcagcaaccaagtaaaggcaactgtccccctcaacgccgatgtctatgcaagctcaggtgggcttccatctgggggtgatttccgaactgatatccgcgaccttatgattgccattgtcaagtatttgagcgacaatggtgccccctttactgtgaacatttaccctttcataagcctctacacagatgataacttccctgttgagtatgctttctttgatggaaatgcctcaccaattgttgatggcaaggcaacctattacaacatgtttgatgcaaattatgacactcttgtatgggctcttcaaaagaatggttttggaaacttaccaatcatagtaggagaaattggatggccaacagatggagatcgcaatgctaatctagtttatgcccagcgcttcaacgcaggcttcatgtctcacatagcaggtggaaaaggaactcccatgagagccgggcctattgatgcctacttgtttagcttaatcgatgaggatgcaaaaagcattcaacctggaaatttcgagcgccattgggggatattctactatgatggctcgccaaaataccaacttaatcttggtactacaaatacaggaacactggttaaagctcagggtgtggagtatttggaaccaaagtggtgtgtgatgaggccatcggccaaacttgacgacccacaaattccaccgagtatgagctatgcgtgtggactaggtgattgcactagcctcgggtatgggacttcctgtggcaacttggatgctcgggggaatatttcatttgcgtttaacagttactttcagataaataatcaacttgacactgcttgcaagtttccaaacctttcaatgaccacaaaaacgaatccatcagttgggacttgccgatttccaataatgattaaaccgtactatggcggagcagggaggctccagaagctaccaggaggcttggttgcagcacttgttctgttgttggtaacacttgtgtgaaatcttcttgagatccaatcctcatgtaaggtgaggtacctaccattatccctctgtagaggaaaggaaagtaaggccagttgattgagaattggcgttgaaatgttgtacaaatttttggggttaagctaaggaatgcttgaaatttgtctggattatgcataatgcatatttgaaactagaatgaactctttattgaactattttatgagattagccatattattgtgaaatttgaagagcatagaaaaacaaccattctcctcaggatcggaaggattttgctataatttgaattaaatggtatatttggctctactttcacatgcaaataaagtgaaaaataatacctgctaggtttatgatgaaatatcattgcttttcgttttggtgcaaaatttgaagtcaattgatgttgaaagtgatggtaatagatttttcctttttctattttcttttcaaggaggcattaaaagagggtggcattactgaggataaattaacgagtagcgaagtggacgagtcgtgaaaggaaaaaaaaaaaagtaataaaattaaaatgtggttttttctcttttt

SEQ ID NO: 42136 - DNA, 1277 bp, Cannabis sativa
  modified_base (52)..(61): a, c, t, g, unknown or other
  modified_base (421)..(422): a, c, t, g, unknown or other
acccttattgcaactagcgctgcaaccacttagaaacccaaaccgtaaattnnnnnnnnnnaaaaaaaaaaaaatagtataaaaactataaaaattagatattggattattaaaatttgaacaaaaaagaaaggacatcttccctattttggtgatgctttcttggagtgtcgtatctagcagagaatgttaattgtgtccggatatctatattaatttactattattcagttgtttctttatgggttgtaaattggtctgagtggaggctaagaaaaaaatagagattagatagtacaactacgacaatcaaaacaatgaacggaacagcttgctggggcttaagtggtcccataatatttattagttctttttctactctttcaacttcaactctcataaaaaaaaaaaaaattaaaannaaaaaaaagaaagaaaaaggaagcacccagccactatcttttgataaagagaattgttaaaaaaaatataaatttgatcaaaacaactacaataagatgatacattgtttgttataaatacatatatggttcaaacactacatagagtaatttgcggctaaattctcttaataattattttacttgcatttaatctttcaatctcaaattttaatagtaaaatttatcaaattattaaaccgttaacaaatttaaggtatcattaactgccaacgtagctccttacgtgtaccacttgtacatatatcacatttgtattagtacacctattataattattttaagatttattttaaaattaaaaaataaaataaaattataaaaataaaaaagaattactccatatactattttcttaacttttttttttaaaaaaaacaaaattacggtttaggtttttaaagtgattacagcgctagttgccataggagtttctgtacgatttttgttgcaatttaggttgcagtgctctatgtaaaattccgtaaaaatacaaaaaaaaactattttgaaaaataaaataaaaaaaaaaccttttattttttagaagaaaaataaatttttttatcaatagataataatttattagacgataataaattataaattttatctttatttaaaaactaaatattgtaaaatcatttcaacagttcgatgtactatcacctaagagaatctccaaagagacaccaattttggtgttacactatcaccaaatttggtgtcaaaaattatttctactccaaccacaacaccaaaaattacactaaaaaaaatattctttattattat

SEQ ID NO: 42137 - DNA, 4029 bp, Cannabis sativa
aagaaaaaaatatgtaaatatatatatatatatacatatatatccattaaaccactagtgcatcaacaaaatcagccatctgccatttcatcgtatccacctcctccactaatagcattaataggaggctaatattttaatcacttgatcaatctcaatccagaaaacctcataagatgttactgttatctcaccctagtgaaattttaactccttaatattagaattagttatgataaagttgttatttttgttgtctctttttttgatcagtaaggcccaattgtttggcctttgtaaatgcaggcccatttcagtacttagttattcagcttattttctcttcccaatacataatcaactttctataaattctatccctattaaaagaggtacgaataaaacggccaattatttatgtttttttgtcccaactgatcttcgtactattttgttagcagatttgtcattttaattaataatacaacaaactttcagtaaaaaaaaaccaactttctgatcaaactgtcataaacctcaccaatgaatgtctccacttcagccgtaaattatcacaccctcctttaatattatctctacttgggtccatcactaggtgtatacaactcatacaaattcctctaactacataaataaataaaaaatattaaaattcccatacaattacttttaaaactgtcccccatacaaaataaatataaatacagaaactatacttgcctattgaatgaagagtgataatgtgatatcatagtaatagatttcagcaaaatatgaaatatctattacattttaagatttttgggtatatggcatcaaagtcaactcaaatggccctctgaattctgacaacccatttcaatgtttcaaagggaccaatagaatgtagagtacaaacgggttgagcatctaaaataggtagggtaaggaagaagaagaagaagaagagagagaaagagagtagcgcaaaatgagtaaagaagagattatgggatgagtttatacgacaaacagcaatgaagggagtcaaaagaagagcgaagtcaaagtttacacagaagttgtgggatctggttaatcaaagtggataattaattggctctttaaagagctaactacaatccattgctctaaacaggcatgtttaattacttggcagttggcacagatttcagaagtacaagaaaaaggcaacacagaatttaatctgaaatgctcaacagtaaaatgaattcaataatacacatttttccttattaagcctttgagaataataatggaaaccaagttacaagtacctcttcagtcaccacaccaaagactatcttctgtataaatattttgacagggggaacttaacgctccttgctacctgtgcaagcccaaacaaaaatcacgtctaaacaagatgtacaaaaaagaatgcttcaactataagagaaatgtaaacgatcaatatgagaaggtaaataatgttttaccttcaagaccatatcttcagagactgtagatcgatatcgagttgagccctctaatggacaacttccccctttgacaataaagtttgcattgcatagactggatagttgcaaaaggacatcagacatgaggctatcatctccagtttgaactcctatgccatcattttctggttcttcctcttcaaatgaaccttctgctacagatgtaatacattgaaatattgctaatagtctctctaatggaaacgttccaggtcctttcatcattaactcctgttctgcactttccttcagatccaatgatttttctgatggtctaagtacacatagtaaattattatatattagtgactacaaatgatccatagtgacccatttatagcatcaagtaatataagttgttcctgattattatctatcacattttaaatcattgcaaaaaataaaaaagttcattgagtgaagtattacagatagatttctcaaatatctttgaaaacagagcgcacactatattataagaaacaaaagtaatgtattagtcccattacattattaatattatgttgagagaaagaaaaaaaataccatgcaactgtaggttcctttagacagtgtaaggcacaggtttaaagaacttctcagtgaggttattcgaagcaaaaaagtatgtatatgcgcatataattacattatagacatacatacataaatatatatatatgcataacttgtttggcagtgcataaaaagtatgtatatccacacacatataattatattatttattatagacatacataaatatatacataacttgtatggccctgcatacgacagaaaagtactaaagtattttaatgttgtcacgaaaagttttgcatactaccacctgcatttatgaagtgaagagcatcatataaaatgtgaagaggaaaagaacacaggcagaaacaaccgttgcaaataatgacaagactgatggaaatccatattctacttccgtggaaagtttatgctaaggaactacagtacgaacgtataatgttgataaatcaaaattcagattataaaatgcactcacttccgctttcgtttccgattatctgagcccccagtagaatcaaacagagaggcatcaagagtagctgggtttcttgaagcaaggaatgctgaaataagaagatacttggcagatgtggacatatgcaaatctaactgatcactaacttcaagacttgatttcttactgctacttttgtgcttggtagctccaccttcagtaaaagctcgagaagaaaccttgaatatctcattcatagctggtgcaatatgtggttgaagagtactaaacagccttcttttcatttcttcattgggaacaacacctaaatcattcaaaggctcgcagtattttcgaaataattgagaaaaggatgtagacaattcatctacacgtctggtaattcgaaagaaagacttcagtacaacactgcaaaaaaaagaacgtacacatcaataattggaaaaagtataagatcagcagaaaagggaagaaataaaaatatatatgattttcttactctagaaaagaggaataaagcttcttgttttcttgttttagcaataagatttggcgaaggtcatcttctgtataatcaggaaaatatacagtggcaggttccaagtatcccatactagtgtaatatgtatccggtgaagtattgctaatgaagatcaaaccaacttcaggcattttcagaatatcatggagattgaacaaaaagggtaggatagtagaactcttatcccactctctaacaagctctagattgtcaaatatcaagtaaatcatatttccacaagctcgtctacccaattttttggagcttgatttgtccgagtttccctggagactactagtaacactaatcaaagcttcacgaagaagattaacgaaatcagatggcttctcacagcgctttgcgctggagtaaccatttgctgcattctttctatgaaacaagagttgattcagaacagattcaaacaagattcttggactataacaggtaaggcaacttgaataaacaaaagggcgattaagatgtcgaaatatctggttggttatacttgttttcccggtagaactatctccataaacaaaaagaggaaccatggggcaattcacaggacccaaaatgcgcataacctctataatctgaacacgtctaccagggaaactagacaccacattatcgaggctaatgggtttttctttttcaccaaggaaaaggtcattgagagtgggagggagcggttgatcacttgctttagtttcagtctcattttttgaaacattagctgaagaatgcctggtcgcccttcttgtaatctgcggggtttcctcttttcccattacttcaaaatagaatcataaattaaaacagatactacaatgaaaatgaaatggaaacgatacccagaggaaaattaatgactaattcaacaacaacaacaaaaaaaa

SEQ ID NO: 42138 - DNA, 886 bp, Cannabis sativa
  modified_base (36)..(41): a, c, t, g, unknown or other
  modified_base (843)..(847): a, c, t, g, unknown or other
ctgctattacaggttaaagaaaaatgtaaccatatnnnnnnaataaaaatataaccattgaatagtcacccatatataattttgatattgattaaaaaatagatatattaattatgtacctgagaaaattgtatatgatttgataacgcaaacattctttattttttattaacaaatatatcacttatgttactatctatctattttgggctcaacccaactaaattctattcttaacaaatacatcacttatatttgagttatattgaaaaatacctcttttatttatcaattaatcaatcaaatttacctctaatttatatttaattgaaacatacctctttttatatgtattgtacccaaaatactctgatataaaagagtcacatggagagtatattgaagtgacaagggcaaaattgtcaaagtatttttttaaaaaaaaagaaaaaaatgaaagactttaaaaaagagggtaaaaataaaagatgacaatataaaagggataagttgaaaaatacctcttttattaatcaattaaccaaatttacctttaatttttatttaattgaaattacatacctctttttatatgtattgtacctaaaatatcctgatataagggagtcacatcatggagagtatcttgatgagacaggagcaaaattgtgatatacaatgttttaaaaaaaaaaggtaaaaataatagattttaaacaagggggtaaaaataaaagaggacaataaaaaaaggatataaagtctaatttcctcagggaaatttgattttctatcattaaatatacctaatattttatttctaaactaatacatatcaccatnnnnnatatatgaccaatttatctaaaacccaaaaatacccctc

SEQ ID NO: 42139 - DNA, 1765 bp, Cannabis sativa
attattttgtactttatataggggccagaacaaaatgccttgggaaatctgctggtgctgtttctagttggaggtatatttgcaggggtaacacttgactggttgtggctaataggcaaaggttggtgaggactggatagcatggcctaaatcaaaggcaggcccattaagacagtgggagcttggattcatttgttttcttctagttattttcatttatatatttttttaattcactcaaatatttcgtgtagacttgaatccgtgtaatttgtacagtgttttttcttaatggtcagttttctcaaagttctgatttatttggtggtgttttgctgttctttattggataatgggaatcatttgagactgaatcaagttcatttacctttatgaggcccttagtcaaatcaaatcaaatctgaaaatgggccttgtttctactcaatcttattacggcattttaaaccaaacaaacttgataaaatcagctaagaaacagtcctagactacctttcatataaaaattaataatgtaaagataaagaaagaaatatctgtaattatgattaaaggaagcgaattagcatatttatttacaggtaccaatgggtccacattgtgaagagtaccacaataagacaaacatttaaccgtgattccctcccttgaacatgtgcaatactagtgttaattacaccaaataaagcataaactaatacaagaacttggataaaatattaagggtattcttgatataataatacctgttttttgttcccaatttttcaagtgtcgacgcgaccaacatactcaagtcatagggagttgctaattctgattaaaacctttttaactgccaccaataatatcagtactgcctaattttctcgataatggtttttctcatttgtggagaagtgggtccgccgtcgtttgggaaagtaggcttcaggctttgtagcaattaggtcccaaagaatgaaatggacgttttactaaaactatacaacaacaaccccattagccacataaaccacaacaccatatatatgtacatatactcaccttgcatagaaatggaagtttattatgctttacacattaataaattttgtctatatgacgcaaaacaaccatccatttgccaataacatggtaacatgttaaaaattatgaactttgtattccaattttcgaaaagatggtagtaatatgtaaaaagaaaaataagtaagacgagctgaaatttacagtgggggtgtgaaaaaggacaaaaacaacccaataagctcgtttgtctagtagcatcacgtgacccgacaaccactaccgaaaaaaaaaatacaaggcagagagagtagaaagttgagaagggagattagaaagagataaacaggccctacaatcctatatatactaaacaaacagagtcaccaaaattattaggggtagaatcggaaaccaaattatggacggtgacgatgaggcttgggccttctcgaactgcagtgaatcaacggccagtggcatgttctcttggtccggactgcacttggactcgtgtggtgggtgcgcactgtacatgatggcgcgcagtacagccgagacggtgggtatgtaagccgttttgtttcgtgccagaagccacgtcagccccatgagctggcaatccctgttgaacatcttgctcgcccggtcacttggtcgttcaccgttagtgccgtttttgtatcctcccttaatctgagaagattttagagac

SEQ ID NO: 42140 - DNA, 1224 bp, Cannabis sativa
attgagttgtgagtttatatacaaacaatagataacaagttaacaactaattgaaccaaatcataacaaattctctaatgatatctaactagaattaacagcactaacactcatatatagtctctggctagctcaaattagaataatatactcattttgtttaatataatagataagactattgcatagtatgaagagaattatacatttattaatcaattatttcaacagttatataaaaacttagtctactagtactaatagtttggttctatatattcattcccatctgaggtgaggtaaactagcttcttcctaaaataggaaaatgaaaatagaactagcatcaatccttttgttgtgaaactattcttcgatcatcttttgatgtagtcgtgtatattttgtaggcaaattcaagtactccaaaaaaagtaccccattgcaaaaatatttatacttaagatacctgttagctaagcattctgttactttctgttagttagttaatattagttaagttcagttttggttgttattttcctattcagcacgtgtactttgtatcatctttatatataataaagaggtctcaaagctaaccagttggttaagcttttcttggcattttcattctttggctctgcctttatgctctgctttgttttctcttctttgtttttgttttctgccattaataagcttctacatggtatcaatcgccattgacctctgtcattaatggcttccactggaaccaacatcgatccttcaaactctactgctaccgctgctactactcaacaaatctcttcgtctacatggagtcctttctccaattctctttctgcctctcttactgtcaaattagatcgtaccaattttcttgcttggaaatctcaggttgttcctacggtcattgggcatgaccttgatgatactctgtttacaggagttcctcctcctcagcatcttgttaatggtgtctccaaccctcagtatcaacaatggaagaagaacgatcagcttcttctttcttggttgcgatcttcgatgtccgaaggagttcttgcgtctgttgcgaattataccagctcttactctgtttggaaggctcttgaacagaaattcaccagtcaatcacgtgcgcgtctcctacaactcaaaggtgaattttctcacatcaagaaagggtctctgtcaatatctgattatattgataaa

SEQ ID NO: 42141 - DNA, 508 bp, Cannabis sativa
tgtaatgagttggttaaagttgagagaggcataggcacacgtgtaaggcattaaaagaaaaagatatgaaagatatgcatagagccaaacaatatgaatagaaattacaaattcgttcgtacggttatgtcacatggcttccataatctaataatcttcaacgtgcacttggttttaatttgctgttcgaatatgttgtcgttttccctttatttaaatttcatattattattatctatatcgctgcactaatcattagtgcatatatttaaagggtccattaaaaaataagtatacacctgttaagcaaaacaatataaaataagtgtacaccttatttctctaataatctcccaaataattataatgtctaacaattttaaattaaaattatttcaatatggaatacacaaagcgtaaatttagaacgccgtgttaatttgtattgtatcgtattgtattgtattgtattatattgaattgtattttatgcaatatttttatgtaa

SEQ ID NO: 42142 - DNA, 1189 bp, Cannabis sativa
ccttataattaccacaaaatttgccatgtaaaattatgaaagattgatgacaatatggatactctaataataagaatgtaaataaaaattaaacacatcaaaaatatagttgtggaaatggttaataaaaatgtgaattttgaataaatataagtaggataatctaaatttaagttaataactcatgatttgttaaattttgactggtgagaaagacttataatacacaaagatacaaaataattttattcataaaactttgacaataacaacaactaaccttttttaacaagtgatattttgagagctattgtatatcagctctttatttgaaatttcttattcttgtcttcaaaattcaaagaacttataatcattattatatgtatacatataaatttttgtcttttttatatgacacattctttaggaaaatttgaagaaaaaaatggcacactttctggtgaaaaacagagaagagagagaatatataaatgtataatatttgaaaatgaaaatgatgcactaaaaataagcatatgaatgtatgtatgtataatgattaattaccaagtacatctccagctttgaatttcttgcctttggtccaactctgaacattataagtccagccagaggtatcaccaacaacataggtagcaccttcaatagtagtactcaaacaagaaagaaacacactcaaaaacactacaataactcctactcctactactgcactgcttcttccctgtttcccactcattcttccttaattcctctcacttttcacactcacaaaatgtttgtcaccacagctttgttttttttttttaacctatttttggttgcttgggctagatgcttaaccccttatttatatatgcaagtttcttttttcttttccttattatatataaaaaataatcttggggtgaacttctaggtaagtctataggacatctctcaaaaaaaatttgtatatttgtacacattttatttatttcgtaaattttgaatagtttatacagttaaaaataagatttaaataattaattaaaaaataattacagtgcaacaaaatatttaaattttattttcgagactataaattattcagaattttttaaaaatttataaacaaacttaattaattacaacgtacactatcataaaaaaaaattaaactaaa

SEQ ID NO: 42143 - DNA, 580 bp, Cannabis sativa
ttattaaaatttaggtatgatcgtgatatgtacatcataaaatttatggagatgttgatgtccagcatagatttttttgacatttgtcctcaaaacattctataaatgagacacaaaatagcaattgaattttttcttcatgcgcaaatgaagctgaatggatatgaaactctatgaaaggtacgtaaatggtatacttttttataagatttttataatttttgcgctttttatttgaatgtcaaacaaatttcaacctgcctaatgttttttggttaggagttttagaaaagtgatgcactactactttgagttcaaaaaataccaagattgctcttagctcagatgaccttgcctttgataccatatggattgtattcactgaaagctccgctgctaactattcaatatcatcagtggcgaaatatccttatgtcatgcagtggccatggcccctttaaatttttataataaatatatacgtgtatatataaagggagagaaaggaaatacaaaaaaaaatatatattattgttggaaattattttaccaggattttcgatctactcacaagtatgtt

SEQ ID NO: 42144 - DNA, 994 bp, Cannabis sativa
gtaggagataccggttcaacaactgtaggaatctcaacagaactgtcatcagagtgaggttgctgctggtttggtaagataggtgcaacaggtggttgttctcgagcaataatgggaatggtggatgatgcatttggtgaaacataagagcaagaaacagagttattagtagagatatcagtaaatggaaagtgaaattcatcaaacaaaacatctctagaaataaaatttctcccagaggaagaaagacacttgtatcatttgtgttttaacctataaccaatgaaggtacacctttcagacctaaactccaatttgtttttattataaggtctggtatttggataacaagcacaaccaaatacctttaaattggagtaatcgggtgttttgtggaacaatttgtgaaggggattgtcattggctatgacaggtgtgggaagcttatttatgatatagcaggaagctcttatagcctcatcccaataagtgagaggcatagaagcctgagctagtaaagtcaaggccgactcaacaacatgtttgtgttttctttcagctataccattttgttaatgagtagttggacaagaaaacttatgagagataccatttgtgattaagtgtggttctaaagcttggtattcaccaccccaatcggattggaaagatattataggtagatttagctctttttctatttgggttctgaagttaatgaaggtttgcaaagcttcaaatctggctttgagaaggaaaacccaagtgtacctagaaaaagcatcaataaagtgtatatagtacctataaccacaagatgaaagcatgggacagggcccccaaatgtcagtgtgaattaattggaggggtcttgtgtacacagtaatagaaatggggaaaaggaaacttgtgaaatttcctttgcaacaagcatcacagaaaatcagttatgcttttatttctttggggaatattacattgggccattatggca

SEQ ID NO: 42145 - DNA, 2331 bp, Cannabis sativa
tttattttaaaaacaagtaataataaattaaaaaaagaaaaaagaagaagggtatagaagagaaagcgtgaccacgtcatttactttattagtttttcccaaccataaatatcaccatccaatctgatgtgtaaagagtaagtcaacggctgagatgattccacttagcgagctctcattggctacaaatcacatcaaggtgtttttccctgaaatatgattggaccacgtttcgagctttggatggatctaagggctcagctcccaatactaaaaaaaaaaaaataaacaaatgaaaattccgaaacgcaagttttcggtctctctccttaaatggcgactcgtgtcgagactgcagtagacacttgtcgccattaccactctccatacaatctcaatttcagacctctcacatacagacactcttccaaatttccacgcttcagaaaaaaaaaaagaaaaaaaaacaataaaaaggtaattttttttttctttttttaagaaaactaaataaaaatccaagctttctctctcattgtaaccaattttaattttttataattattttatttatttttcctgatttttctcacttttgacttgtcttttctgatactattcttaatttctgttaccaattctgggtttttattctttaattttcttcatgcttttattagtatagtttttggttgtatgggattttctttgttttaatgattgttaatggtgatcatgttgttatgttaagttagatcagggataattgtttgtttattaatgaaggtggaaagtattttttgtttgttatgcattaattgttttagtttgatttatttggatctgaataaatacataaagagctagaagtagtaatagtagtactagctaacgatctgtatatcttttggtatatatagctaatttggatttgtttgattctgatcatttttgcaatttttttacctcatcttaaaaatgagatcttctctgaagaaatattggtttttcatgtacatgtatcaaggctattattggaagaaaaataagtcaatatatagtttagctatctatatgtgtatctatgtatgtatgtattgataatcagtaattaacaagaccatttttgtacttctcatgtgagaaaagacatgctgcacttattttcctttatttcccctcttttgttgttactttgttcataaattgtcttatgctatatctgttttgatgttaatcggtttattattaaatttatttcatatcatagctttagaatctgagttttagtaatatgtttcactaatcccatctttttgttttaatgtttttgttcttctgttttgtatagaaaccaagataaagcaaaaaccaaaactgaagtagtgctttattggatgggcatataaacttgactttatataaagctgaggtagttgttgtaacaatttctcaatttgtctaaacaaatggggtcacacatgaacttcaatggctttggggatgcaccattaggtgaaagtggtagtggtggaggaagtggaaagccaatagggaataataatatgttggctaggcagtcttctgtgtactcattgacttttgatgagtttcaaaacaccataggtggagggtatggaaaagattttggatcaatgaatatggatgaactcttgaaaaatatctggactgctgaagagactcaaatattgtctgcttccgttggaatgggaggtggtaatggtgttggtgttggtgctggtggcagtggtagtggtggtggtgtgaatatgaatggaaatatacagagacaaggctcaataactttgccccgaacactgagtcaaatgacagtagatgaggtgtggagagacttgtttaaagacagtgataatggagctaaagttggtggtagtggtagtaatggtactacttcagtgggggaagcaaacatgcctcagaggcaacaaactttgggagagatgactttggaggagtttcttgtcagagcagggattgtgagagaagatgctcatgaaattggaaggccttccattaataatggaagtaacaaccatgccaatgccaatgccaatgctaatgctaatgctaatgctttagcttttggattccaacagccaagtcggaacaatggattagtagataatcgaatgcccacgatgactaatcctactacaaaccggcctttaaatttgccaattaacaatggtggagtcagatcttctcaacaagtacaaatgcagcagcaacagctacagcaacagcagctgaagccccaacaacaacagcagcagcagccgctctatccca

SEQ ID NO: 42146 - DNA, 1733 bp, Cannabis sativa
  modified_base (97)..(133): a, c, t, g, unknown or other
taattaatcacatctcttactgataaaaaaaaaattaatcacatctctttctctttccccctctctgtctcccgctccctctctctctctctctctnnnnnnnnnnnnnnnnnnnnnnnnnnnnnnnnnnnnntctctctctctctctctcctcaacaaatgagtccctccaaccacacgataaaaaccataaagactcaaattaaatatggctatagtgtagtagtactagagaaatagtatttgtctcacacttttatttttactttctttgtgaaaaaaaatctatattattaattacatagtggttattattattaaatattattacatgtatatctattgtttttttttaaaaaaaaaaaatctcattattcatatatatatatatatacataattcatgtcatgcagttcagaactcttatcactgtttcattagctagctcatcgatcgagttgcaagtactgttaacctagctagctttttttaatttttccatgcatgcatgcacactgtactagtcattatatatatttatattatatattattaagtaattagggttattaataataatagtgataatgatcacaatatttgtggaaattgattttaatgacttgagtggttgacctgtctcgtatgtcaaaatatatggtgcaactttttcttgtaattagaaaaaaaaaatatactatttgcctaactcgtatataacggttttgtattcttttggtaagactagtcatttcaaaacatgtatttaggtgcaacatctagtcatagctagcaaatagaataatataattaaatttatataaaataaataatataattaatagtagttcctataataatatgctagtgattaaagtatatagtaacaagtacgtactgcacttttgtttctggagaaaataatgaatagtttcgtaataatccaactaaaaagatcgattgactactgctataattcaataatatatataacagccttattattatttttgacaaagagagaggtataccccaatatgggtctttttgtacacattcatatatacaaaataataaatattaattaattattaactttgttattattatatatatattcaggtttcaaactggttcataaatgcaagggttaggttgtggaaacccatggtggaagagatgtaccaacaagaagcaaaagaagaagaaacagtctcatcagatcaagaaataaggtcagatcatcatcaccatcaacacaaccatgatcatcagatgatcgatagtaatactaataataataggaacaataatattattattaataacagccaaaatagtatgactagtggtcaccaccatcaaatgctcgcacaaactccaacgacaactctcgcaacgcaaacgacaacaacagatatcaatgccatggaaagtgacccttcactcgttgcaatcaataacaataatagtaacaacaccaacaacaacaacagcagcaacagcaacagcaacagaaatattattattaataataataataataatattcataggcaacccttctcggaaaaccaagctgtgatcatgcaacaacaacaggcctttcccacaacgacgtcgtctgaactacttgcgccaccacttgtccaacagagtttcgccgccgcagaagacacgtgtcgacgtgtcagcttagttcataataataatgcaggtgattttgggaccac

SEQ ID NO: 42147 - DNA, 3815 bp, Cannabis sativa
taaagagaagagcaagtgcctacctaacctacacacatgctcctcaaccatattacaaataggtgaattaaaatcttattgtctcctaatatatcacctatataataaagacacctcataaaatgatatagataataatagtaaatgatatattttttctaaatttttagtgttaaatgattgatctaatccaagatcaaccttaaggttaaataggctttagagaagaaaaaaaaatagacttttatggtaaaaataaaaagtatctttaaaaattattaacaaaatatatatacttttgaaaagacatttttgttatttaagctcttaaaatgaatggattcgggcacgaacctagcctgccttagccaagggctagtcctgatctaatttaatactatttcttatatatttaaattttatataaaatatataaaacaagatattaaagtgtattaagaaaaacaatttgattagatgaagaccaaaatgttaggcaaaaacaaaattgtacaaatctcacaaaaaaaaaaggtcaaataataatcaaaccaagtcaattataataaacgtcctaaagccaacgtccaaggaacaaaggtgataaatttaaattagacttagcaaaaagaagacaccatctaaacaaaaaaaaaaactagtcggagtaaacctccatcctaccccaaattcacaaatgctagtggatccaaatggataccattgaccatgatcggggatgaaagaaatccccgacatgcaaagccacaacccaacaccaacctcccgtcgtaagaatagccaccaccaccacaaacacctttaggaggggaggcatctgaccccaacaccaacatcaaagcggtcaactgccacaaccaactcattgacacccgaaagcacaaccctaaaacccaactctacctaatattagcacctttcgaagtttgcccaatatgagcacctcccgaatatcaaactggtggtgactgaagcgaaggagacgcccaagaaaaggggaaagttgtacccgaaaaacagcccacacacatgggtatcaaacatcgacccgtgaacggataagccccacaatcagtgtcctagtcttagacaccatatcatatggtgttgataggcatagtagtattctttaatttgttgtgcacacaaatcatagttaagaaagaaacgataggatagaacaagtgtatatacaaaaagaaaaacaatagtgcatatattagaggatcaaaatatcatctggtacataaactaacaaattaacaagttcttttttttttcgttttttttggggtcatttttttttttaagtactaaattcattcatacattggagcatcaaagatctgcagggttaagactaaccgttaacatgaggatcagtcatcttttaggccatttttactaactaatgaagataagcggtctggaccgcctggtactgatagccattcgcaaagtagttgccatgtgcgggggagagactgtatgttgcagaaccgatcagggaaggacaatggttgtcatttggtccggggtagacatagggtcgttcatacatgtactgcggatacctgttttcagcaactctaggataaaacgtcttttcagcaggaatattagtaacacgaggcccagcgccaaccccattagcccgaggtctctttggttgaggctttgctgcttcagtcacccttttcttgtctgccttggccttctccagctggacaacctttttctgcaatggatccaccgggtactgctcctcaagcttatgctcttcaatgcacttcaccacagtcttaagagcagtcaactctcgctcattcacctcattcttaaacaaaacaacaacacaacagttaggtacactcgctggtttcgccaacacactcctattttggtgttgaaccattaaaaaatgtctactcacctgaacagtaggagatgtattccctggtttggatggcgaaacagcttttcttgcctccttcaagtaagatttcagtaaagccacaggagaaaattgctgtgtcagttcaaatgcaaaagccaagttgacagcatcaatttgtcttccactgttaacaagtacttcaattacacctgtagtagaatccaatgaaaacaaaaaagtgaattggaatttgaaagtccatcaaaagctagaattgtcatctatctatcccaccaagcaatgagagcctcgtcagaattgtcagctaatgcaaagtgagcttcactttattagctggatttcacaaaggggcaagtgcaagatccacatattcacactattttacaatcaatcaggataaacatatgaggtatgacaaaaaaaaaatcaaagggaaagaaaaacctctaattttgacaagcttaggctcttactagttctaatatcaacataaataaaaatgatctatgacatgctctaattcatataacaaacctggcattttctcggatagtccaagggaacgacacagatcagctgtttggcgacgacgggaaaccattggtactagcctggacaattcttcctcgtcaaaatcagaggcaataccaaaagtggccagaagttgcagaaatgcgtgagcttctaatgagttcccattgctgtcatccagatcaagagcatccaactttggcttccattcttcagcaatttcttttgcttgctccttaacctcttctgtgataacctcagaagcagaagccaaatctaggcttgttaacaaagtgctcagacattccatcaacatgatacatgtacggcgaagacccaagagatttgaatccttctttccatcagtattggtagattcagcgcggtaaaagtcttccaaagactctaacaccaaagatgcaggattgattgcagctcttaatgcaaatggaatctcttcccttatggcagcaagattttttctgttgtctgatataaatttgtgaagcccttctgagtccatctctttacatagtatcactaactgaggataagacttcacaccctcatgctcattttcaggacttttcatttcctctaagtcaccatcagaaattgtattctcttgtggtgtctcttcagtgcttggctgtgcattttgaccctcagtagtcacaacagccggatcatcagacgatactttcctgtgcttatctcgagcactagcaatggcaaatacagcagcatccctcttctcttgaagcttgtccaatgaagcttgttccttggccactatatctgcttccttcttcaccagcaaatcacgggcttttattgttctgttctcaaactccttttcttggtcttccaactcatgaaaacgcctctttaaagacttttcaagcccgtgaaaatgttcttcgagttctttccattttaaattaagggtcactgccctgtgactttcaagttcagcaaatgctttctgaagctgttgtatcttcgaggtcgtagagtctatcagcgtagcaacagaatgagtattatccatgacagaaaatctgcaggcaatacaaagtgataagaaaagaacaatgtaagatttgaatgaatccaataaatatacaatgcaacccaatacgacattaaaccaggctaatcaaatgggtgctctaacaaaagaaaagacctcttattgaaaccatgatgcctaacccaaaatatcaaccattaacaaggaaggcactgaacttaaaaccccaaaaaaggactatagaatatgtaccaaaacaacatttactcaatacaaaacttctgatccatataaaagtacaaatccagacaa

SEQ ID NO: 42148 - DNA, 3040 bp, Cannabis sativa
  modified_base (2557)..(2579): a, c, t, g, unknown or other
ctgctatgtagaaagcatttctcaactagttatctcaatccaactttttccggcttccttagatcctacttctttggcagtttttctagctttgcataaactatcccacataccaagctcagcataaacatttgaaagtgttacataagtagaagaatcttcaggtaaggttgcaagaatatttttatcaataacattaagcagttcagcatttttataagttccacaagccccgagcaaggatctccatatggtttcgttaggctcacatggcatgtcggcgattaacttctttgcctctttaaaacacccagcttgactaagaagatcaaccatgcagttataatgctctaatagaggttctagtccatactcaagtttcattgagctaaaaatggcctgtgcttctttaacaagaccagcatgtctacaggctgaaagtacaccgaggtaggtgatttcattcggcttcattcccgactctctcatctcatggaaataatgaatagcttctttggctcttccgttttggccacacccaacaattattcccgtccaacatacagtatcgcgatctgtcgtgctttcaaacaaagctagtccatcctcaatctcaccgcatttcgtgtacatatctattagagaagtgatcacaactccctcatagtcatatcctttcttggtgcagaaagcatgaatttgtttgccatttctaagagaagttaaggtggagcaaactttgagaacacttgaaacaacaaactgatctacttcaagattcaaattatgcatatttcggaaaagtgacaaagctaactcactaaaccccattttagaacaccctgtgatcaaaccagaccaggctacaatatcttttttaggaagtatatgaaacaattgtaaggcatggttaatcttcccaactcttgcataaaggtctacaagaacacttccaacaacatgatcaaactcatgcccagaagttacaaccaaaccatggacttgtagcccaagtcttgagttgagcaaattgatacaggccttcaaagcagcactgaaagtgtaagagtccatcactgcaccagacctatgaacaattgaaactaaatctaaagctgttttgttatgcatattaacaacatatccagagagcattgaattccaaagagctaagttatcacatatagaagaattacagctagagtactgcttaaaaagctttttcgctgaaattaatttattgcaatcggaatacatatcaaccagagctgatacagtgaacctaccagactcaaaaccagacctgatgacataacagtgtatctgttctccaaattctaacagaccatgacggccacaagttttaagagcacacgggaatgtaaatccatcgagtttaaaaccttctcggtgcatttcgtgcaagaactcagaagcacgcagactacccttatctgcaaaaccagcaatgatgctgttccaagaaacaacattaggttcgggcattcgttgaaataaatccactgcttcattcattaaaccagacttactataacctgaaataatagtattccaagtagttgaattcgcaaacaaaatctcatcaaaaaccgccttggcattactcaaacttccacatttaacatacatatccaaaagggtattcatcaaaacagtgtcagactccaacccatcattacatattccttcatgtatcattttaccaaacttcaggtcacccaaaagcccacaagctttgagcacagcagagtacatgaaaccgttcggtatgtcagatttggagtccaacatacgagtgtacaacccgagtgcttcgcggggtgttccacaatcagcataggcagaaaccatagtggtccatgtaacaatattcttaacaggcatttcatcaaacaccttccgtgcatctttcaaaattttaaattccatatacattgaaatcaagttattagcaaggaacatatcgttaaacatgccaagtttgaacaaatgggaatgaagtacctttcctggattgaaggcgccaactcgaccacaatggcgcaaagccttggctacactattcagctccataactaattttttatgagaatttcaaaagtacatagaatgcacgtacttcaaaccataatgataataataaagctaattaaattttcttttcaatcaactttgatatgtactaacaattatttaaaaaatttctaaaatattaagattgttgaattagttaatttcgttcaatttaactaaggaatagctaatataacgattgtctatttgtcaaagagattatttcacatttacatacaaacaacaaaaaaaaattataaaatactttgaaattttaaatatttttataattttatttaaaaaaatatataaatttttttatgttgtatttttattaatttatcgttaattttttgttatttgtatgttatttttttttgttaatgttatttaaatattatttttatgttacttttatataatttttttattatttttataaaaaattataaaaatgtaaaannnnnnnnnnnnnnnnnnnnnnnataatttttttttacaaaaaaaataatactttatataattatccttttactaaatagtgttttcaaagagagagagagggatgggaaaaagagagaggtcatggcttcgaacctaagacctttaagctattaagctaatatgtaaaaaccattacgctacactaaaaaaaaatagtattttcaaattttgaaatgtactaaatagtaattatgctttcgaacttctatctacatcaatcacttgttaattaaaataaactgaattcagtaaaaaaatcattacattcaactatagtacttaaataatcataacaaactttgatgggaacttcttactcgaagccacctatctaaatgaattcatttctattgataagctccaattgcagaataaaattactttcgaaagaattttgaacggttttaaaaatttaaaaacataatttagtgggaaaaaaatc

SEQ ID NO: 42149 - DNA, 1781 bp, Cannabis sativa
tatatccttccaatatatatatatatatgatggatatctaatatatagatataaaaaattcaataaatatatacatgacgagtttgatcacaaagtattgatccttttttttcgattcgtatatatatatcatcaaggtacttactagacatacaaaggaatcatcaaatcaatccaattaccgacaaaacttaattattattctcttacatatatatattatatataaatattatattaatgtttttagaaaagaagaaagaaataaaaacattattatccattaataatccctaaacctagctataatataatgattttatatatacacataataaagacatctaatacacaagtgatcaatccaataattagggtcttgtcctgtgacatgagtaaaaagtttgaaaagttttagaagttatagaattctgttttgtctttgtcttatggcttcctctagtcaacaagtggattcactaaacgataactatgattctatacatctggaagaagaagatgaaggagaactactgtgtgattccattgaagatgtgggtcagcctatagatgataggtggtgtttggtggggaaatttctaacaaggagacatgtagatgttgatgcaatgaaacatacgctggcctctctatggcaacctggcaaaggtgtattcatcaaagaattagagcctaatctatatgtcttccaattctatcacgaaatcgatattcagcgagtaattgatggtagtccctggactttcaatagaaaccaactgatatttgaaaggctcaagaaaggtgaaaatctgcgaagtatcatactgtctcgaatggatttgtgggttcaactgcataatctcagaactggtttcatgacagatgttgtggtgaagaatgtggctaattacataggtacctttgtcaagtcagatcctaaaaatttcatgggcatctggcgtgactacctacgtgttagagtcaccattaatattgagaagcctctaaaaagaaggatgaaattgaagaagacgaatggagaatggatttggtgtaatttcaagtatgagtttctccccactttttgtttcatatgtggtttaataggacatactgagagattctgttcgcgcttattcgataaaccacttgaagaaatagataaaccatatggcatttggatgaaagcagagcaaagaagacataatcatgctggctcacggtggttgcgtactggaacggaagcagatgcccagtttttcgatgctacagttgtccaagatgtgaacacggaatcagttaatgcagttaattctcaagataacggtatcaacaattgtaatgtcagagctgtcaatgctgagatcgtgggcagaagaggaaatcatggagtaaatcagcaagtaatgttgaatgacagtaacaataatactaatatgctctgtcatggtcaatctaacgaaattgaaggctacataggagatcgcacattaattatttcagattctaaaagaaggaggactaatgctgatggaattgaaaattcaagtgaaaatgaagaagatatgaatgtagatagttctggtgggctgtcaaaaaatgggcaaaaggtgggttctggggtccaggcccacctagggtcatgagtatccttagttggaattgccgtgggcttgggaacccacgggctttacaattcctaaaggatattgtgatccaaaagaggcccaaattcatttttctatgtgaaactctaagtaaaaaagatgttcttgaaa

SEQ ID NO: 42150 - DNA, 3052 bp, Cannabis sativa
gatatcctacaaaattttgagaaattctaaaaaatttaacacgctgaaaatatagttcaagttcaaatagtctacttcgtacgcgtataaaataaaagagtctcgcatgcaacagactgtttgaaccctattttttgtgtgttatattttttcaaatctctcaatattttgcaggataatttaaataaatacaatgtaagaaaaaaattaggctaaaaaattctctcagatgcggaaataggtaaagagtgcattgatgaaccccttttaaaggatgcattgtattttgagaggagcttaccgttgaaatattttaaatgtgatgtggatgagatttaaaataaaatattgtaattttaaatgatgtggaagtttttaatatcttaaaaatactactattagagatgaaaagaaaattgtcaacagctttcatttaagggactgaaaacagaaatacttggaaatgtttggttaaaaatataaaattgaaaaaagagaaggaccaaatgagaaaataaaaaaactgccaacgaacaacggcagcatcaattatttaattttttgggttttttttgcataaactgagtgtaaataaaggataataaataataattaaaaaaaaggataataaataataataataaagatgccaaataaaatgtttttgtccttttaagtaagtctcacccaaatcccaatcctaaaatatatttcttaaaattatcaaatttattattaatttttttggtaaggaattatcaaatttatttatgaacacatgaaaatcctttcaaaatcattttttttttaatccattcctcaaaaacctttctttctttctttctctttctctctctaggatcatcaccaccagctccctctcctccagaggcttctgggtcgcttttaaagggctttttcaatctgaatatttgattttcaggtaaacccttttgtaaaaattccacctttctactgttaatccttcaattttagtgtctcttgggttgaatttcaggtatttcttgtttttactataattagctatgaaggtgtatttagttaatgggttgaggctctactactgtttggttgctgggaaaattgagaagaaaaagtgggaagggaaatgaaaatgatgattggttttgtataatttaacataaagttagcttctttatatgattgtcattactgttatgtagtgttattagttattaaaaacaataacatggattttcagtttcagctttttagtttaatttgctagattttcttagctatcatattgagcttgtgttatggaattttgaaggtgagcttttgagtttgtggaaatggcttctggagctgtaccagcatcaatttcatatctgaaaagcagagactctggcttgagctttgctaaaagttctgattttgtgaggctttctgatttaaagagggttggttcatctagaacaagagtttcaattatccgaaattcgaatcctggttcagatattgctgaacttcagcctgcatcaaaaggaagccctctattaggtactaatttctttgatctttcagtctttgttgattatttaaactcatgaggccttagaagaacaacagaacatttgtgacaagaggatatatctgcataaatctaagcttaataactgacttttaagtgtttgttatgttgaaaatggaagtaataaacaacttcgaaataaattcggtaggtctgtgtttgttgcttgttttgtttttctgatgaaaaaatcgtttggatgtagttcctagacagaaatactgtgagtccttacacaaaactgttaggaggaaaacgcgaactgtgatggtgggaaatgtggctcttggcagtgagcatcccataagaattcaaacgatgacgacaaatgataccaaggatgttgctggaacagttgaagaggttttataatttctctaatcgaaaaatattacaattattcattggctcaactgcacaagcataagtttgatactaattagaatttattagtatgacatttagctcacttttgaaggggtagttagttagttcttgttaatccatttttttttctattttttttttggtggtggtggtgaattcttctggaatttcgggttagtagaaacatgagtataacgaattttagaagagtttaaccttgtcaatagttcaaaggtggaagtaatcactttttatatcgaggcggtttacattactgtatctattcaatttacaggtgatgagaatagctgataagggagctgatattgttcggataacagttcagggaagaaaagaagcagatgcttgtttcgaaataaaaaattcacttgtgcagaagaagtaagttatgtttattctttgcttattggttttcgaaactttaaggtacatataatttgaaggattgattatgttaccatctcatttgttgtatgtgcagttataatatacctcttgtggcagatattcattttgctcccccagttgcattaagagttgctgaatgcttcgataaaattcgtgtcaatcctggaaatttcggtaaaggctttgtgattcagttgatttatttgtgtagtaaataaaggcatttcttctggatttatctaagcagtttgttacagctgacagacgggctcagtttgagacgcttgagtacacagacgacgactatcagaaagaacttgagcatattgagcaggttaaatccattcattgtcgatttgtgatcattgtttatgtaaataaatcatttgtccataaattcattgaagctttcttttagcatacatgtgattgccccgattgaacttggaaaataaaagacgatatatatttttcattgtttatgtgttgtttctatttctgaaacaaaatcggttctttctcacttcacaccaggttttttctccattggttgagaaatgtaagaaatatggtagagcaatgcgtatcgggacaaatcatgggagtctttcagatcgtatcatgagctactatggagattctcctaggggaatggtaaat

SEQ ID NO: 42151 - DNA, 949 bp, Cannabis sativa
tactactagtactgctacctctaacattttctcaagtggggattatgcaactaaggtccaaatggtagaagcaggaacaagctttcatgaggttccaattccacctcccaaaccacttttgattgctatgcctatgcctttgccatctcaatctcaagatggagaattcccacttctagttttctcccatggcttccttctctacaactctttctactctcaactccttcgacatgttgcttctcatggcttcatagttgttgctcctcaggtatttctatctatctataaatttctctagatatatttgttttggtgattagccagtggaaattcatctattgggttcgttttgtttatgaatatgattcatttggtcagaattatgctttgaaacaatccatagtgatttttgctgttgattctgactttctgaggtactatttttcaacattctatgctgtcatgtgtgcagctcttaaaatggttgtactcgcttagtgatgacccaatgaaattagtaacatttttttttatctaaacaataaaattagtaacatttgatttatttggttttgagaaaatgattcagtaaagttgaattttctggctttaagctagtgtcactgcgcttttcttgaggacaaattatctgtaaaaagttcttttcaaatattttcatgtgcttgccttgccttactccctaagctaggacaaattattataaagagaacactttggtgtggcagtgatatgtatttgattagtaatgtgtgaactgaaatgggccatgtggacgtccttgtcagttgtcagcaacacttctcacccaaaattcaatactttgtgtttttattccctgtaagtgatctttggctttttcctcaacaaacgtggctgctttcaggacatgcattcataataagtatttatttattagtagtttcct

SEQ ID NO: 42152 - DNA, 1490 bp, Cannabis sativa
ttcctacaagggtcaaagtgtgacctttgaccacccaagttatggatattacatatctaccacagcttagggctcgggtcgtgacaaaagcagacccaaagaaacttgccgaaatagtctttgccagaattttcattaacttcaatcatcggtctgagaagaccacccaattcatgctccatatcaattatcatgcacaagatgggtatcaaatgtatttgaacccaaaattttaccctatgaaaagaaatcttgtggtaatcatcaacacctgtaggaatctccaaagccaataattggtgttcaagcaaccaagggcagccaccaaataccttgcgcttattgccaaagttcgaaatatgaaacaaaaatgtatcacgaccaatgctctcaattttcaccgtgccaataatctttcaaaaaccttttattgcaagaacaatgctcacgagagataacattgacataatcattttttcaacgagggtgcgagccataatatctatgccaaactccaaaaaagtcgattcaagatctgcgtcattcacctcttcatcactatcatcacaaccaaacgaatcatacaaagctgcccaatcattatgatccatgttaaatattcaactactctaataaacacacttctaacccttcctcaatcaaacttgtcaaaaaaaaaaaaaaaaaaaagaaaaaagagaccaagagaaaatcacttgtacaattttttttttctttctttttcagtgtattgtagataattgcaaatttatttacattattttttttttcacatatctctttatctcctcttttgtttaaataaaaaatagtatgatcaattttttttgagtaaagttccatagagttttatgctttaattatcattaaacaaaatacaattagaaagcacattgtttcttagttattaacaatcttatttaaatacagcataacaagaatcattaatatagtccatagaaaaaaaaaattatggatgctaattgtgtaatatagtatagactaatgcgcatataatgcagtgaatttattatatttatatataaagagtttgggtcactaccacaataaaaaaaaaaaagaaaaaaatggtcaaaatgggtgttgctcatttctcaggctcttactcccctgtccccagtgatactatgtattcttccacattactatcaaagtcatctataaaaacctctcctgtgttcactctcaacaaccaagtctttcagacccatatcccaaaaccccttaacaacaacttccattcttcacaacctttgactctcaagtctctcaaagttagagcaatggacacccaagaaggagttccatcgatgccctccttcgattttcatgggattgatcagaaactggttgacagaatggtgtacgactctcttgtttggagttcacttcacggccttgttgttggtgacaaatctgttcaggctagttctctctctctctctctc

SEQ ID NO: 42153 - DNA, 2324 bp, Cannabis sativa
  modified_base (1680)..(1706): a, c, t, g, unknown or other
tacctatttatagactcatcttataatgagtttaggttatttataatttgacatctcaacaaattataaattaacttagggtgatctacacattattttcatacaatttaatacctttttgatactcataacattggtcacttaattttatatcacactttataatagcatatataccttatacatatctgcccaatatgatgtttaatctaacatatctttgtcaaagttcataaccaagtaataagttgtagttatttttaataatctaatatgtgggcttacaaattaataaaatttatttgagctaatattttaaattgagttaaataattgatctaattaaatgagcccaataaacattttatttagtatatgttttgtgtaatacccgtaaacttaattagagtttatggagctctaattagtttgctatataaaaaatattagggtttggttcccaagactaatttcaaccattgttatgtgttctcctccattctcatcaattgagtgggatcttatagagagaagattagtctgtagaagactatatagtaggagtgggcatcatccaacccaatctaattgaaccgaaccgatccaatccaatccaattacaaaaagttggatatccaattacaattggattggattggatgtcaaaagttggattctaattggattggatcggttattggatgtcaatctcaaaattcaattaaaaaccgatctaatctaattacatttatatacattaaaaaattatttatataataaaaaatattgaaaaatataatatatatttattatatttttattagatttgttttgcatgttaaatttgtaacacttgattgttttgtgtatttattttcatgatgttttgttcaattttattacttagaaatgttgttgttgttttaattatttaaaacttttagctacattacacttgtaagaatagtatgtttatgaagtattaaacttaaacaaaatgtaatacttagtttttacgtatttttcttcataatttttaagtttatattaaaatttaagtgtgtaattagatatccaattaaaaaactgatccaatccaattagtaattggattggattggattagattttgaggtctaattggattgggtcagatagtgattttctaaatccaattactaattggactggatcgcataagaaaaaaaaagattggatcggatcggatgtccacccctactatatagtatatacccacaatcacatctcgcattcaatactatcaagtatgtcttctattttattaattcatatagaataactttaatattttgacataaatttaagattcatacaaattttagatctaatttcaaacagcatacatagtgtgcatgagaaacttttatagcaagaagataattatttatttatttatttatttttacttttcttccattattttcagataagttttagttttggaaagaaaaagaaaatgtccaaaaccattagccatgctatggatgaaaacaaagctatgaaagtgaaaaaagatagtgaaatacgtaagtggtgatttcatgcataaaattaagtagggaaattatggcgtggagcctctaataagtgtgaccactttgaagaagaggtagtacttgatatatataaatatatatnnnnnnnnnnnnnnnnnnnnnnnnnnntatatatatatatatattatgaatgaataaaacctagcccagatacaactcttttgtctacaatcaaattatatcaattcatatacattttcatttattcactccaatcatattttaatttattcttgtatttaatggaaataacgacacttaacggtaagcgcgtaccatgcgtgtcactaaaatctatctatgtgtagtattattagtagctcccacgaacacacaaattgaatttgaaccaaaatttccaaatttcaaaatattgctattatcactatgagtactattatttagtaccaagtgtgtttagtatttttaaacatactagtgaaaataacacgtacgcgtggaacaaaatatttatgaaaaaatacaattggtacttaatattactacaagatattatatatatcactgtataatataatatacatcgttatcgtattttaagcatataataagttttcgttctattatttttatatgatagtgcacactttgattatttacattttatatttttttaaaaaaaaatctaaataatcttaataagacataattttgttacactttacttgttatttttaatagtttgtaaaacaaattatttaaata

SEQ ID NO: 42154 - DNA, 2014 bp, Cannabis sativa
atatatatataaatacccaacttaattagtatatataaacctaattacttaagcaaattcactaatattatgtattaaataatcacatgtatgcataaaatatagttaccttgaacaaggtttcaagcttgtttttcacaagggtatactcttgtttcacttgttgcaaacagtttaagcacctgttacatacacacatatattatacatatatatatattatattagttcattacattatatattaatcacaacatgaaaccatacacatatatatatatgtatgtatatataacacagttataagtaagattaattaattattagttaaattaaatatattacatatattacccttcaatgttctgtgcctcacagtggttacggaaagcaatgcagactctttgaactctctgagcaccaatgctgttaattaaatcacccagtattttttttaattaggtcatcatgattattaaacagaattatatattgcatatatcattaattaagcaaaaaaaacactatttaaactgaaaagagagaaacttttcgatcgatctcattattattattaattaccatcatatatagtacttattaactatgtttattagcatttattcgattcaggattactaccattataaattgcaagatagataaattgtgtggcctgtcttccaaaagtgcaaaaggaagtattttttattttttattttttattttttataaaagaataattaatagatcatttgtggatgacaaaaactcatgaaagggatatatttgtttgtctatttttgtaaatatatatgtggatgagtttgaactttgaactaacagtatatcaatatcagatctggatgaaattaagtccatctaattcctaggtcttaacaaaatttgaatatatggactaataattattaataataattaatttcaagatccaatcaagtactattacttacagtgacatgcactccaaaatgatatgtaattaagagagaatataaacaaagaaattataagaattaagaaagaaagaaaaaggaaaaaaaaaactatatctgcagtgatgaaatacctggagctgctacccttaagctggtgaacatgggcatctaccttcctaaaatcagtattctgataattcctgcaaccattattttttttgtttttcccaaaaggagaaagatgtgcaaataataaattaaagaatttaaattattaattggtttatatatccttacatgatatttaaaaaattaaacaatattataatcctcacaaagctttggccagttcattaagaagcctgtcagaatcttcaaaaaatagtgaaactacttcaaccacaaagtctgggttactttcgtcttggagttgctgaagttggttaaattgatcatctaagaaaccctttatatattccccaaaaataacaaagattcatcatcatcgtcaaaagattaacccagaaaagaaaaagaagaaagaaattaaaagatcaaaaagtacaaaatatatataggaatccataaacacaaattaattagcaaattaactgacctcattaaacagtgaagttgtgtaatctcccaactgcttctgcaactgaagtaccaaaccagaaccagccatattatatataaggacaatttataaaaatatttagtagccgtattatgtagggggtttgagcttcaatgatcttgttgtgggcatggactagctctggctcataatataatttctatatagaaatgaaaagtagtagtagtagagaagtacccagtataataaagagagatttggtaaaaataaaaagaaaacaaatggagtttggagaaggaatttaatactttaatttgaagattccagctgcctttggtgcgtgggctaataatattggctataatacatgcatatagtatagtacagtacaaaaagtcaggtcttgttcatttgactagctagctacataggggggccaacaagagtaatatat

SEQ ID NO: 42155 - DNA, 1741 bp, Cannabis sativa
tgtatttataaacacccatacccgggcacctctttgtaagcttgaagctggaactgtatatggctgcttattatgcttaatactttctcttcctctctctcctttttgaggaaggaggattttttgttcttcaaagagcaagggtaggatactaacacaatgttcatcacagtagtaaacaaaatgtatgttacttaatagctgatttctcctctgtgtgttattattttctcatttgggtggttttagttgtttactttagttttcatgagtggaatgctaactgtgtttgtaagcttgaagttaaaacaatacacggcctggtagccctcacctcccttctttatgggaggatggtaacaatgaaccttccagtactttaaaaattgtttcattaatacctcattaatatgttcttattctcatttaggataggacggtttacgcatattgatgatacatttggaatagggggatctgggtggcagtggagttttagagttttcaaaaaaaatttcttgtttttttattttcatgagtgaatgcagggattctcagtttatgttctctcttttggtctgatagtacattggttggtctttattaacatgtctgatctatgtcagacttatatgttgtgaccaaggatttcagaacttgtagcttacaatttatatcttggatcgtcacagtttatatcattgtgaataacttggatcttcacagttaatcagcttaggtttcaataactcaaaagttatggtcacttgaggattgcaaaatttgttggataggtagattaaatgtgtgtgtgagtggtccaaaattattgaaaagagaaaagggaaaagaagattatgaaagttgtgtgcagcatcacttggttccagaattgctaattgtactttttttttgtcaacatcactctattggattgaaaaaataaaggagcaccataacagattattgccaaatgtacttttaatatcattaaaaagaaagaaaaaaagaaaagaaaagaagacgacaagagaatagaaagaagctaactgaccatcgttggtctttagaaacttttttcaagcaaaatttctagttgtctatcttcatttacttgacaatttccactagcacaaagccaccttttatataggcccaaatttcataacctaggctggaagataagagggaaatctgtaccttgcctgaaatggggacaactaaaacccatctataaagaactgaataagttttctctgattaaacaaaaatctgagtttattgtaatagttagttgcatggattgccatgcttgaaatgaccacaacagtttgatggtgctctgctatgtgttagtgtgtatggtagctgtataatgaagttgaataataacaagtctgtagtagcttttcacagcccagctgtgtctattttttttctgcatatggctgaggattgtagagtagatgcttatttaactggcttatggacaaagtggatgctaatcacaaagaacttaaaaaaaaatatacattttttgtgctttccaatctacaaaagacataaacaaagagatttcatgtaaaacctaatgaaattagaaaccgattgccttggtttcttcttcatggattctaactgtcgatgctgtttctagtagggtttttgttccacatctataattggtaaaaggaacaaatgtagcttgctgtctttatctgtttctccacttccacttcca

SEQ ID NO: 42156 - DNA, 678 bp, Cannabis sativa
tattttatgcaatatttttatgtaaaattatatgtagtattaacttgtgtctagtattatatgaaaatattagaatatcagttagtttattttgttatttctgttatttgtgtcagtaggtaatttagctgttagttgttttggttgttagcttggtcaaggttgttatgtttgttatgtaaagtcggttcccctgttagtcggttcccctgtttctgtaaagctatatctatatagctctctttcccttgtaataattaattcaattaatatagaattcactttctttttcctatggtatcagagcggggaataaatgctttcccctgatcgattcgaaattcctccgctgcactcgccgtgttcttgtctccagtgacgccatcaccactgcaacttcttcccgagctcttcactcggcgcaacctatactgctgttcaacgtttcattctttttgagtcttcaccatgtcaagtgaggatcaatccccatctcagacagaaatcagagattctactccatctgcaacacataatcccacactacaaatgaatccaaatttacaaattggaaatgtgaagaaccctcttgaagacccaacaaatccatattatctccaccatggagataacccaggtaatgttcttgtatcccaattactaactggccaagataat

SEQ ID NO: 42157 - DNA, 956 bp, Cannabis sativa
aaaaaaaaaaaaaaactatgataataataatagaaagaaggaaatgtattttaatctctaattaatatttctatcttgtaattaaatagaataagcaatgaaattaattaatgtaatattattaattattttgtaggtgtgatcgcataatttggttgggtaaaggattgaagcaaaatcattatggaagaagagaaatgcaattgtctgatcatagacctgtctgttctttttttacctatcacactaatttataataaatatttaatttaattaattaactttaattttaacttatatatgcttgattatatatattggtctataattactacaaatatattttgcaatattttcaacaaaattcataaaatgttgttgaagcttattagttattggttgtttgtaacttatagtagatgttttattgatttttaaaaattgcaaattaataatttataatatcaaaaataaaatttaaaccttaaagatgtattgcataagtagtattatatccgatttttgagaaattaaaagtcaaactttaatactttaatcaagatgtaagaagacaagataggtaaaaacccaaagaagaaccatatatagcacattgcttgagtgccacgtggcacaggaaatgtgctatgtgagcactgacaccccgccgtgtcagtacttgctccttagctagggtttccgacttaggattagcattttctgtaaatacgagataaggttattcatcctgaaaccctaatctaagaagaaatccaacaagtagctaaaaatacttaaatttgttggagtacaagagaacaaaggataagataataacatcacaaaatacaaatatattgacaccttctgagtgtcaatagtcgcatattacaagatttttaagaagacttggcaccttaacaaaaatatcacatgcacttaaacttgaattctaa

SEQ ID NO: 42158 - DNA, 852 bp, Cannabis sativa
aggaaatgagtgaatgcaaaacatttcatgttttgtctgtgtggtctggtctgggggtattttattctggcttttacactcacagtgatggaaaataagttgaaaaataaggcctttgttgtataacaaaaatagaagtatttatggaaatggtaggggagaaaagaacaagaataagaataacaagtgtagtttgtccgaatgctgatgtaccaacaaatattagaacttgtgtattacatgattgatttcacataatgaatagataggtgaaatttccacagttatgtttgtttgtttgcatcaagcattgggcccttttcaaaacaaacacaaattcttcacattgaacgttgttaattagtttatggatccaaagaagggaataatgaagggcccaaatctactttagggctttcgtacagagaaggggttttttttttcataaatgtgggaaaatgtagtaaagtttacttttatatcacataaataaataatgcaaaaaatatgagattaaaaaaataattaaagtttaaaatatggggaaaagaacaataaataaacttattaaaacttgtaataataagtttgttgaaaaagttattggtgctggaaaaatcgtcggaaaagttgcaggttctggaaaagtcgttagaaaagttattgttgttggaaaagtcactgttatcggaaaattcactgtcatcggaaaaatcactggaaaggttaccaaaagtagatgtctcacatataaataaaaatagaatcaattctataacataatgaatgaaaataaataactcatatagctgttataattgaaatataaccggttctgtaacataatgaata

SEQ ID NO: 42159 - DNA, 1898 bp, Cannabis sativa
aacacaagttgattagcttgaattaggtgcactaaaaatgtgtacaagtttaattattattgtataatttatttggctgagaattggtttcgaccaaattaagaagttatggtgaccaaattgaatgcaaagaaccatataaatttgtatcgtgagattgcagcaattaagaagcgttaattttgcagtgataagaggaagaaaatggctttaatacactctacaatatgtatatatataccatagagcttactagctagctagctagcttttgtttgtcatcatgcttaaaagctctagatactttgtattgattccgaaaagatagtacaacattcaacatttcaaattagtatatatatttaatacacatttactattataagaaattaatccccttgttctatattatatatccaattccttttgtcctccgctgcctaataatgatcatgatcaaatataaactattattgtatactaaatttgtcctttgtgttgatttctttaatggtaatttataattatagatctatacacaattaatatggttgaccaaaatttatcaaactcatctttaatcacaagctaacagacggcgtaggcatcaatatatgcatgatatgatgatgatgatgatacgaatcaaacatatttatataatcaaataaatgaagtatattaccaaagaaagagactatgaagattgaagatgctttttaaaccggtattgttggttcctatagtaaaagaatcttcttttgtatatttcattcatatatatataaatataaaaacacacacaaacaaaccttatacccggcgcaacaataggaaatgtcatgtgctttctctctccccatacctatatttatatgcttaatgttttcacatcatacccttctcatctctctttctctatctctctctaagttttggggtaattatcataatgggaaattgcataacaagtaagcaccaaatctcaggagaagatcatgtccagtatgatcatgaagtacaagactcatcagaaacacagttggcacttagtactccatcaaagcttgaagatttgaagaaggtggctaagaagaagaatagggttaggttcaaagttgaagaagaagaagaagatcgtgatgatcaagatgacggtgtgtcaaaatgtagtagtagtagtagtagcattggtaatattgattctaaaagtggggttgtgagaattagattggttgtaactcaacaagagttgaaacaaatattgaattataagaagaataatgattgtaaggtgtcttcattggagcaattgttgagtgaaatgaagttgagtagaagaagtaaggttttggaagttgaagaaaaaagtagtgataataatggtacctggagcccagccttggaaaccattccagaagaccattaatactgctgatgattaacaactttatttctctctctttctgatccatatatatagctagctagctcgtctcttctcccactttcatgatgacttgtattggtgtggctattttagtctctcccatatcattttactacttgtttaatttgggtagaagtactaaatttgtagttgattactttgtgcccttaatgaatttttgttctgattcaagtttttccatttgtaatctgtaattgtaattcgtggtagaagtttctagttgtatattatccaataaaaaaaaatcaattcaggttgaagttaatatgcactaatttctctttataaaattttagagaatgtcttatataataaaaaattatatatatatatatgaaatacttttgaataatggatattatatattgatgattacaataaaaatttaattatatataaatattaaactattttttttttaataaaa

SEQ ID NO: 42160 - DNA, 2200 bp, Cannabis sativa
acaaaaattcttggcagaaaatttaccaatcttaagaaaaacctcatgaataacttagctatacaaatataatacaccatcttgtgtaaattagttacaacatggaggactgagtcagcatggaattaaagaaggaagcttttggattttatgttctgttattgcgagtcatctgaagtttgactcccttcgttgctgtcgccagtgtttgtaggagtctcggctgttgaactcagcgaacttgaccgattctcacccttgttctcggtttcattatttctggattcttcttccatgaaggagttgatggctagctgaccagcataaagaactaagccgactgagttgataccgaaaacaaatgttgcaaggtagcacaaaccatttatgatagtcctgcaaaatgaaaaatgaaaagatgaagcaaaatagaaaaaacagcaaggaatgtagatagaaataatcaaaagaggaataccttatggttatagtaatctgttgaacctgaaattgggagactagttgtgtgttagaagaactttacataaattgtaagaaacttatgtgaattttatctcatacaaatcaaatgctatagcactttcactatcacatcataaattactcttctttaagagaaatcaaatcagtaacttaacagcagatgagatatttcacttaacaccattacactagcaagtgacaacaatgaatggtaaaggtagcaactttaaatctttaaccactcatttagaaaaacaagaaattcttgcatatcatctacacatgtaattgttaaatctagtgattattagacagtctcacattgatttgataataagtggaaatttaatatcatacatacgatgcatatgcgactccactcgttgccaattgatttttacatgaaaccccatatatcttaccatataacttaccttattctacattctcaacctcactttcacacctatatcttagtaccatatataagatacatcattgtcgattggtttcagtatggaaactcatacatcttatcatgactgatttgaaggtcacaaagttcacaatttcataatgaaataaacatgaatggacaggattgtacaatggccttagattagtcatcaaacattgtatacaataacctaaacaaaactacatatttgactgaattttcctagtaaaattgtgcagggaaagaaggttgtaccgagaaattatctgaaagtgtttgtctattaagagcagcctcaatagttgtagtgaatttgtaaagaataagagcaataacaccagctgatatgcctcccaacaaagcttgaacaggtgaaggtggtgacttagcttcagtcactgaagctgatctcattgcctttaagctttcaagtgcttcttccttcactgatttcttcactccatctcacctaaatttctacacaccaaattcaaaatcaaaacccccatttcttgaaaatttgaaaacttgaaccaatcccaccaaattcaaaaccctaattgttgaaaaagtcaataacttgaaccaaacccaccaaatttaaaatcacaaaaacaaaaacccatttcttaaaaattcaataactgaaaccaatccccaccaaattcaaaaccctagtttttcataaagtcagtaacttgaacccaaacccatcaaattcttcaatcaatgttctgttttaaagataaaaaggggagaaatttacaagttgtttagcgtgtcgggcttggcgacggagcgagcgggagaggaagatagcaatggaaccggtgagtagaacactggtggcgacttggagagaagaaggttcgtcggaagtggcaaaaatcagagctgtagattggaaaaactctacaggaccttcttcttcctcttctggaacattgtttgttgttgttgtgggttcaaaagctagagctagccatggttcaggtcgggttcaggttcgtaagggagcagagatgggtctgagagtaagtggaggagagagaaagtggttatggagatgatgatgatgagagaagggaaaatgggtggtggcttggggtggtcggagatctgctgaggtggcttgggatggtgagagatcgagagagaggtggttgccgaggagatcgagagagtgatagagagagagagtgatagagcgagatgaacagaaaaagaaagaaaagaaaa

SEQ ID NO: 42161 - DNA, 1846 bp, Cannabis sativa
taattgccatccctaaaaagactgcattaatatcttggtgaactttgtattgagtacaaacatagaaataacagtaaagttattcttaaatgctttgttatacaaaaatgcaagccataaccccattaggagtgtaactgaaatttatcaaacaaaaagaaaaaatgcatttgtatcaaagttccaataattgcacttctaaaatatcattcttaaatcgacagttttcttcctttttatttttttcgagggaaagtgagcttttcaagttgtttccaatccaagttgttaaaagcacactaaaatacaaataggcgtctaggttcatccttttgaatagagaccaaatggcctattgttatttccttaacaaatgatcctcttaatttcctttataagaaaaccacaacatcccttagcaaaggaaaaatagaataccactagcacatttgcacattattattcatttattaattattaattacagattagggtctaatcccatctttttatttgctaaaacacccttctccactttaataataaaagccccttctccattaaaactgccactaacacataaagagagaaaaaaaaaaaaaaaaccaggccttggtcttcaccttcaatggcgtccatggcgacccttttcgccaaaactccattcccatctcaaactcttccaaaaacattcaatacccatttcgttccaagtcttaaagtttcgttttcccgttgttccgggtcgcgggttgggaggaggctacgcgtttcttgcggtttgatcgaaccggacggtgggaagctcgtagagctcttcgttgatgagtctctaaggagagagaagaagaaagaaggtctggacttgcccagaatcaagctctcccggatcgatctccaatgggtccatgtactcagcgaaggttgggccagccctcttcgtgggttcatgagagaatccgagttcctccaaacgcttcatttcaactcgctccgactcgatgacgggtcggcagtgaacatgtcggtgccgattgttttggccatcgatgattctcagaaacgccgtattggcgagtcgacccgggtcgctcttgttgactcggacgatcaacttgtggcgattctcaacgagtaagtcgtttatgtctcatttaaagttttcatttttattacacaagttttaaccattttgtatatgttaaagaacaattcgtttatgtctcatatgatgttttttttttaattaagttttaacctttttgtcatgattcatgaagttgttggagagattcatttcgaagaaatttatagaattagttttttggtcttgttgttttggttaattttggtgatgttagattggtatatacttatattgaattttatgtgagtaaatactgcaaattatgaggctcaggttttgatgataaagaacttgaattttgtttttatctatgatatgctagtctaaatcttagtcttacagtacattaaacgtgcacggttgttaatagtgagtctcaatttatagcttggttaagaatcgttgtataatgttgaagattcaatataacgggtgtctattgtttgaagtttagttgaaagatactaagaaaaagtagggagcgtttgagtctttctacatgggtcattttcaaatatgattttgtgttctttatatctggacttctgtatggtggggtataaaatgtttgaaactgtaatgactttttccacatactttcacaattcaataattggtatttaatatatactgtataggtaatacgtatatctatataaatattttttaacttctctgattatcattaattcattatgc

SEQ ID NO: 42162 - DNA, 842 bp, Cannabis sativa
aaaataaaaatgagaagcaatcgaacttatcgagcctaacaaaataacacaaaaatacacaccccatcaggcctcatatatatcggaccatacatcggtctaatccaaaaaagtataaaacttaagcacactatcgagtgctcccaggctactattggaccctctatcagacttacgcctttaacttaaaaacttttaatttcataaagtcatcataccaatttctgacctacatctaaccagcatcgagcctgtcataaaaaccaagttctcgcccaaatctaatgccaaaatcgatctctaaatctaacaaaactcacaaatcacatatcaaaaaacactgaatttaaaatagtatcaatataattaaaatgtacataattatgtatagaaaaattgaattttaattctttataaatgtgatatgatcactacttcaatattatcccaaaaaatgtatatctttagtttgtattgtgtaacaaattaacaaagtgacaaaattgtattgtttgaagagtattatttcattaatctttttagaaaaattaattttttgtgcgggagattcctttattgactagttttggccagatcatattaattaattgattttaaataaaatatttgtccatttcgcactctttaatttaaaaatgtacgcatggactctttaattttatttaatatatatttagtctccctaaaatatataaatacatatgatacatacatgcacaatgattttttttttaaataaaatatacatgtaaatgcacaatgatgatatgtgccttctatttcctctattttagaaggaaaatttaattttatatgcttac

SEQ ID NO: 42163 - DNA, 602 bp, Cannabis sativa
atgcatttaattaatagtagttaagcaaaccaaacaaacaatcattactctgtgtcctttcactatggttaaacttttacatctttagtaaatagtaatcgatgcttctattgaaactttattttttaactcggatcccaagatttggatctagactcgggacccgaaccttggagttgagattcaagatttgcgatttggacctgggacccaaattcaaacttggacccagatccgaatctgactcgtagttggtgttggggtcgagtgtattgaaaatatattataattttatacaatttattcatacaagtcaatcttaaatatagtattgtattaaataatactaatataatataatacaatacaatctagcacaatataatacaatacggcatactaaagagctctatatgagtgaaatagtactgaatagattggataaactactcacatattattaatatgggataaacacactcacataagtttccttttctataaatcacactatatagtatttattcaattattaaaattttattataagattatgacttggtaattattcactatacgagtgtaatataaatatgttgtat

SEQ ID NO: 42164 - DNA, 871 bp, Cannabis sativa
attcttcttcagttaacgatagagttgaatgaatggagtgagtaagagagtccattgcagagagatggtacgtgatcagtagagagggatagaggaaggagatgaaaatgcttgagaaaaaaacccagaaaagcggttagagactcatggctcagaagagggaaaagttgttatttgaaaaagtagttaaaaacccaaagaagaagttaaaaaaacataactgctacagacctcacaaaggcaccatatcatctattgtttaagagaacattctaatctattggctttgggctactatattatgaaaactattatacttatagttgcactcataagttatgtagtaaatatttatactttattgtatctcattaaattctcaaatatgtttcgaaagtaatgaaaatgttgatacaaatataaaagtaacatagaattatcttaaataaaatattgttacttaaaataaagttttaataatgtaattaattttgtgatatttaggatactatttagtttctttaggtaatgaactatatatgagataatattatcataaagttacacttagaaaaactaattaatatcttagtgtcttactttttaactacacatagtaacttttaaatataaaataaataaaagattattatgaaatattgaatgctgtttgagtttaagattgagttaattgttatttttttttttgaataaataaaataaaatatgtaaaagaaacttaaaaattacttttaattctaagtattttattgtaagggtgaaaaaatatatatttatcacatgtatttaaataatcaccttaaaaagtaggttgagttggtaccaatcttgagttaaaacagttaatgat

SEQ ID NO: 42165 - DNA, 1002 bp, Cannabis sativa
tttagattaaataatatagtgtgacaaattattaattttatcaaattgtaacatgcattatagaattacaaatgtgttgatattgatcataaaaaatgagttaacaattcttgagaaatgatgattataaattgtgtaactctcctctcaacattatcacttttaaattagtaaaagatgttactaattgtttgtaaatgtgaataaataatagctattgaaagtatagttgttggggacttgatttattcatatttataaagtgtataaatggtttaaaatcaaatagtaatgatttggaatactttagagaaaaattgaccaaagctgaaaaaaaaaaaaatagtaactagtgactagctacagtttttattttcaagaatacaattgtatgtgtttctgaatgtttgtgagcttttctaacatctaaggattttatggtggttatttatgttcatatggaattggaagttaaaaatccataaatagagatcatattgttcatttgcgatactctaattagttgaaataacttttgttgtggttagaacattatgagcatatattcatctttaaatactaggttgaacatgcgaggtttaataaattcttaagaatatttttagagtttcttttaagtatgacttttaggataaaagtcatcagggttggctcaagggtggggcaataggggcccacgcccaatgccttccacccaaatccaaaaattcctttaacaaaaaaagcctcaattctattttttaaaaatatcatattttgtatttttaattattatttattaaaaaatataattattttctaaaagaaatatatactttactttttaaaatactacatttaatattttattaagataaaaggccaaataatatttttaaaatgctatattttagatttttaccactacacgtaaaaaaaataacataaaaaaatgatataaaaaatgctcaattagatttttttgacccaatgtcctcaatt

SEQ ID NO: 42166 - DNA, 1223 bp, Cannabis sativa
  modified_base (1167)..(1174): a, c, t, g, unknown or other
ttcgtcttcgtcgtcatcctcggcaacgaagatgattctgggtaaaatcacgccgtcggaattagggtttgggtttcgaggaagagaagaagatgaggagttacgatggtgatgggaatgggatgaagcgctgcgacagcagatgtaggaagcgagaagaagaatggaaagtaggacaaggaagccgagggctatggcgatgggatagccgaggccgagattggtgaagtagttggatgaagtggaatttgcagaaacagcggcggtggcggaggaagaggaggacattgggagagagaaaagggttgagggggtttagccatttgttatggaaaagagagagagagtgtgtgagagggaaagatttttttttttttttttttttttttggggagagaggagaggagagtggggaaggtgggtggatactccagctgctgcatttaatacgaggtttggaaataaaagagatggcattcaatggagacaacccaacttttcttacctttctcaatccaatttaatctccccttaattcactttaccccatgcccatcacttattttaattttttaattattaatattaactatcttctccaatgcaaattcaatggtaaaacatattacagcattgctaccacaatgtgtttagtatcttcaccacatctaattaatatttgattttttataatttttattaaattaaaataagtggaaattgatattatattgcaaattttacacccatagtgttagagcacacttatcaatttctcttttttatcttttaaaatacattactaatttttttttacagcatacttttatattactgcgtatattttatttattttaaatatataatattaatatatacacatatactcatacaaaatataagagagttttaattggaagcttaaaacatctccaatatgagatgcaaatgttgatctatatttatttggtgcaaataatagttttgtgacatttttacatcaacttttattattatactctgatgcataattataaatcttgatacaaaatttaatatatcatttaatgctcatctaataatttattaaaaatataaaataataataataataatcatacagtagtaaataaaaaatttaataataaaagggtaaataccattttnnnnnnnntgttttgcaaaaattaccaattagaccctgttttgttaaatgacaaaat

SEQ ID NO: 42167 - DNA, 3575 bp, Cannabis sativa
ttttgtacttcatctccaacgtaaactgcacaacacccctttggaacaatattattattcaaagcaatcttcattctaagaagttgcttaggattaacaacattaccaaacctaatagccatgacaaaagttgatacacttgaagaacttgataatgaagagagaaaaggctagggtttaattagctagtaaaggtatgaaattttgatgagttgatatgatacttgagtgaatattatgtgtatatatatgtgtggaatttgatgaatgatattgattagcgtgtggggaatcacatttgtgttataatatatattatgtgtggttcattttgatgagtcataaagtttgattttaagggtgtcattcatagttaaagacaaataatgtccccacatgtttaggggaagtaaccccattacatgtagaaatatctactttgttatgttgtaaagacaatttaaagttgagtacgttttcttcctttatctttagtttataaccaaaagacaaatttaattgcctttattactcaccattgattcatcaactactattattatagcataagaaaagatcttagtgggagggtgggtcttttttgatccattattaacacaagttggctggatattctacttataatcaaagattcttgtcaaaacaacaaaaattaggttctaactaaaagtataaaaaaaaataattaataataattgttgatgagaagtgtaataattaatttttctaatggaatgctaaaatagtgatgtaatactatattttttttttaacaaaaagagatgtatcttattcatgaccagacaaatcatttaccaaaatagcttgaaaagtagtagggacaaaccctctactataggaggaacaagcagtagtcgccaaataattggctgccttgttcccagaatattgtttaacaaaaatacaaaaaatattgttaaaatcaaacattaaagtatgacaataaaaaataactaaaccgacgacaagtttttcttgctaagtgaaacatagagagagatgagaagataaggaggtggcggttgagtatatgttaggggatttcgttagggttttatcatgagcttcgacccattaaaaaacacgagcaccctatagggtaacacatgttactctatggttgcgattatttccaaataatcgtagtttaagggattccacgataactttttcccttctaccttcaattttcttaatgtaaatgaagttatatgtgagtgactaatagttgtgagagtactaggctatgacttcatttttttaatgattgaaaaaatctatagctaaaggtctttttttgtagtagtgtactgctattttattttttaaaaatattgcaattcacttcactttaaaaccgacgacaatgtctaccgtctgtttatagccgatgctaattaaaggggtattattaccgccggtcttcgaaaaaatctaattttctgatcagtgagaattcgctcttttgtagtaatgatcaaatatatgttacgattgttagccattgttgcatgttttacatagccttaagtcaccaataggaaaatgtcgtatttcctcctatgacattaggtgatccccgatgcctagagctttgctccaatccaccccaattggtcagattatttttgccaatccatgaacatgatcaatacaggcacatcgatttacagaatcatacatctcgatcgtaaaaaaatcaatagaaacttaaataattagaattgatcgatatagtttttgaaataaacgaaaaagaaatgaaagattaaacataagttatggatcaactaaacccttcttggaaattttttaagaataagaaaaagaaatctcgtgcaaatatcataaaatacgtacgaaaacattgaatttagcattgaacatgttgcgccggatgccctagatgaattgaagcaatgtcccacacttcataagtgtgtgggtagtgaagatctagtataaaaataaatgaatatagagttataaaaatgtggtgtgcgttggtagatgatgggtaaggtaacaattaaggtccaaattaaggtccaaattcaaaaccagcttacatattgactatatatgtagtagctatagtacggtctatcacatggctttgtccactcgaaacttattgtgaggataagatgtgagatgggatagatttgctgacctatactaccttgtatgtaacaattattataattataaataggaatggttatgaaacttgtttttatattcttttcattccttgtgttcatttttgccaaaaggattctaaaactcaacttttaattctatataattatatattgaactctactgattaaattgaagtatttaaaaaagaaatagtaatgaaaaaataaataaaattcatatgagctaccttttttaagttttaaaagtcagcatattgggtaatgaaagaatcatgccatgtgcaacatgaaaaaacgtgttgtttcttgcaaacgaccaccgtatgaaggatttatatttatttttaaaggaaacatttgttaaggaagaaattagacttttcgatcattacaaaataaatatgttagcaaataagaaacagacaaataattaaattgttgtgggtaaaagcctatttaatcatattatgagcaacaaaattattagttgtagaaatataaataaaaatacaatcaacaaaacatcttgagagatccgaataacaaaacgaagagtagttctcaatctcccaatacaatgctaagtagttgagaaaattgatcaccactctagagtcactcatacatatattatttatatataatatatgtgtgagtacatttacaaagcatccctccaccgattcatcgtgcaatatttcgacatttatgaaaaaaagtttaattttattgtcatgatctagtatgttatagttatttaaaatattttgtaaaattttaagaaattcgaactcttttacattatagaaaacagtgttcaaactatttattttccacacgtgtaactggctctttgaattctatttttgacgtgttaaatttttttgaatttcttaaaattttgtaaaatatcttaaataactataatgtacatgactataaaaaaatagactaaaaaattctcatgcatactgaaacaaatatgggtattcattcaatccaatccgcattattttactcatatgtagtgcatgcattcgatccgcactaaatgcgagtttcatattttggatccaatccaatccgtacaatagctcaatacaattcgatccgcaaaagtgtggattagatcggttattttggatttattacttttcaatatttaattatttaatatttatgaaaaatattttttttcacccaactagcaacaaaataaaataaattattgttattttatgtattcaaacaataaattaaaataaataaaataacagataataaattcaaaaaaataaaaaaaattgtatgtatataaaaaaatgtttaattttttcataaattgtatgtagaaaaagaaaattatat

SEQ ID NO: 42168 - DNA, 4886 bp, Cannabis sativa
gctaatcggcctaaattcttctatcttttggggcttgtcaactttaggaatcaaagctaccatcgtatcaatgagacaactaaaatcagccccattattcagtacattcaagcacacaacaatgacctcatcttttagtttagaccaaaacttctgataaaaaagtgcaggcaacccatccgcacccgatgccttagtggattcatcctcttcactgcttgcacaacatcttcaacagtaaactcaaccattaaatcctcattcattgccaaagtaactttcggctataccacatctagaacctcatgcactatatcctcgtcgatgtctgaccccgtaagcaaacctttgtaatactcttccacaatttggcaaactagcatcttatcatcttgccaaattcccattcggtcttgcaatcccttaatctcattcttctttctacgcgaggacactttgtggtgaaagtatttcgtgtttcgatccccccactgcaaccataaagctctactcctttgtctccaatactgctcatccttttccagcaacccatttaacttatctcccatttgttgtatagcctcccacactcccggttgttgaaccattgtcaattcatgtaacgttttttttgtcttagcaatctcattattcaaccgcgccttcttcttcttattccaatcttgtaatgctttcccacatttattgactttgcatctaaaagacactggccgaccccttccttgccattcctgccacattttatccacaatctcagtacactcctcctcatgacaccaagcttcttcaaaatgaaaccggtttttccttttagacttaccacacttatccccatccaatctcactgggatatcaatcactaaagccctatgatcagattcccaccaatcaagcaacttaacatcagcaccctcaaattgtctcaaccattcttcattacacaaacctctgtccagcctctccataatccgagaagatctatgctcattacaccaagtcaattcatgcttggaagaaccaaaatcaataaaccgacaatcatcaataacctccttaaatccatccatagctcccgaaagtcgatccctaccaccaatcttctcagtaaactcacaatttcattaaaatcccccacacatagccacggtccctgtacctctttcttcagatttcgtagcaattgccatgaaaatctcctcaaattagcttctcgatttccataaaagccagtgaagtaccatggcgaaaacccattccccgccaccgtagcaagaatatgccctggagaactatctaaaacttgcacttttgcatcacttttccacattaacaacaacccccactcatccccattctatcaaccgtccacagtgaatcatacttaagaacattacaaacacgctccgcttgacccctcgtcaacttactttcaattaagaaaatgatgctcggtttagcctcacgtacatgggattgcaacgctctcaatgtccagggattcccaatcccctggaccttccaacttagtagtttcattgcgttcggcggccttgaacaccaaggctcgccgcttcattttcagataaagaaataggtaaatccacacaattagaaacacctaccttagaagaatttcccacatctccatcctttccactcgcaccatcatctccagctgtaaatataacaacctcacccgtccctctcaccccactcccactgaaattgccctctgattgagctccgcccaccctagcttttgcccgagccttattcttaatggatattcgttttctagactctccccctttctttcccagccccttaccgcccatactcttccccacttcgaaccgctctgtatcccccagatccacagccacatcttcaccatgttcacaaagacccccccccccacatcgtcgccatcaactcggcctgaactcgcacaactacgcctacactttctcttccttccttcccttccatcctcctcctcaatttcgaatccagccgattccctctcccagcttcgtgtcccctttcctttgcttccattactacttccatgtgtctgtggtggaacaaacaaagaagacccttctttcaattgggaagtagaaaaaagaggcccattgtccaccggcccaagattagttttaccaactggtgggctttgtgcattatttttaaaaatgccattttggtctatttcagaaaaagtgtcaattttacccttaagtttatcagactcagttgcaccattgacttcactcccacgatcaaccccatcacccactctttgctcaacctgcatcaaccgagaaaactgctccttcccactactcacagcctgatgggaacccctgtgctccgattgaccaatctccggccgactagtctctccgtctatcccatgaccaccgttgctattaacctttcctcctccttgtcgagccatcaactgatcatacgccataaagcaattgggagtcgggtcttcctcttttaaccactgcccatattttggaaccggagtcccttgcgaattcatctccatcaccaacgcctttgtacaaaccgactgatcatgaccccagaacccacatttaaaacaaagcaatggtaatttgtcaaatttgaattgaacccatcttttcccaccatcaaccggaatatatcggccaacaaacacctcccgttgaatcgaaaaaccaatcttcacacgcacataaccattcagaaatatttgttgcggattgttccacactatatcttcaactttccctgccatattgcccaactgtttgatattgtttagagtaagagctttcaaaggcaaacctctcatcctaacccaacaagaaactgaatccaatctcgcgtctctccactgaccactagtcggccattcctccaacatcagcattcctccattgaaaagccacggctgcttctccaatgtcctcttagcttcagctctactgttaaaagacagcccaaaatattgatattctttatcatcattcagacttttgactttccattccccaattgatttccacattctagaaaacatggtcttgaataaccccacactcacactctgtttggatacaattctccctaccagggacttctcaccaaactcagccacttgctcctcattcacttcccactcctcttcttgattcattcccaattgatccgtcaactgcacaatctcatccactgtactttctgccattgtcataaccatgaaaccaacgatcataaaacattcaaacatgttaagagtcacaaagaccattagatatcactcagagccctccagaccattttttttttcattttaaaactcccattaatttaaacatatttttttatcgaagtatctattaaatgaagaaaataggtggcttaaatttattggtgggacagggtggagacatggttttggggacaaaaattttttttctctttaactgccccttgtgtattcaagcttctctaacttcttttgatacgcactaacttgtttcccacatagccaattattgatctacaggtaccccaagtaaaaaaaaaagtcttctaaataatttgaatcaaaattccctttacaaaatttgagtactgaacatttattacagtattatatttcacctcagttttcaagcacctttaagatatatagctgctgatcaatacaactccataagttgtgtcgggcctatttctaatttgtcaagaatactatcaggcccgaccctgaatgatcaacaacaacaatatgcatgaatgaatattaaagagatttctaggattgttctccgcaacgtaagcaatgacgatagcaactataccaacctagaaagataccttgttctttacacagctaaggaataataaatttcattaatttgttactgaaaaacaattcatataaaaagtttactaaaaaaatacagttgacatatattccgttgcgccagcattttggaagctaactgttatatatggctcacttaacaatggccgtccaccacaacgtttcaaacaatagcaattataattaatcaataatatattatatatatatatagactgatgaattaattaaccagtgaaaaataagatcaccagatcaattatggcttctaaagtaaagacaatcaaacttgggtcgcaaggccttgaggtctccgctcagggcctaggctgtatgggcatgtccgccttctacggcccaccaaagcctgaaccagagatgatcaatctcatccaccatgccattaattccggcgtcacctttcttgacacctctgacatttacgggccattcactaatgaaatccttatcggaaaggtcctaattattacggattctcctctctctctctctctctatattttttttccgcgtgctttgtttcttagattataattttggtattgagtatatatatacgtgcaggcgcttaaaggggaaattagagagaaggttcagttggctacaaaatttggagtgaaattgtcggaggatttgaagatggagattcatggggagccggcttatgtgagagctgcgtgtgaagctagcctgaagcgactgggtgtggattgtatcgatctctattaccagcatcgtatagatactactgtcccaattgaagtcacggttagccttcttacttcctccaaagatttcataactttttgcattctttttttctttttcaactgatttttatttctaactattacaaatacaaattgtagacttatgtaaagttttatacagctagctaacaagtattgtgatatctaggggtggacatccgatccaatccaacatttttttc

SEQ ID NO: 42169 - DNA, 552 bp, Cannabis sativa
gaagttcaattatggaattcatttgtggttggatatgttttaggggcaaaccctttactatcagtactagatgggttggctcgcagattatgggattcaaagggctttgatagggttggtttacttgctctaagaaaatcaaatttgattcaattgaagaaagtgatgaactgatgaaaaggggatgcattttctttgaaaggaaacctatggttctaaaaccatgggattcattgatgaatttcgaaagggaagatgtaaattgagtgcatggtttcagctaaaaaaatcttgaggtaaagtagtggagataacgctctctctttaaaattattagtcaattggggaatccgctcatggtagacccaattactaagaacatggagaagctaaactttactagagttttaattgaagtgtctttagaacaagaatttctgaaacttatagagtttgtgaatgaacatactcagaatgttacagtgactgccaactatgaatggaaactaattgtttgtaaacaatgttgatgaatgggccataaaacgattg

SEQ ID NO: 42170 - DNA, 1685 bp, Cannabis sativa
ttaatcaacatacttgtgagcagatctaagatcctggtaaaataatttccaacattgttgttgttatgattgataacaggaatagtaattgggcttacatgctgcataaaacctctgctatttcccctctagaggcagagattaaggctatttctatggctttatcttgggcagtccaaagcaagtggaatcaagtttgtattttatctgattcgaaaattgccactcaagctctccagtagaggaaatacattccaaattggatgctactatctctatctttaagtattttagatactattaaggcttttagtaattgtgatttctattatgttcatcgtagcaatctttcttttgtggattgttcggcaaagaaagctaagttttctagcgatgatattgccgaagtgtatcaagggaagggaattccccctgtggttcccaccagtttttcagcttaattgaacaataattctttcaaaaaaaaaaaattattcaatgacatgtgctcttttattggctaaacaagaaaatcgacagcatttttggacagagaatccaagtcccaatgccaccataatacagataacaaatgggcagtggcattactgattataatgagaaagcttaaacgactcaaacagcctaaggtaatataatatttgaatgtttttccaatcagtaatacaagtagttttgtttcaagaaaaataggtattgctaattttcataaggttcactcaaagacagcctaaggtaagacatcttgcagcaacacaccaaactcagagatcacttcagttgtgccccgaactgcttgcaaagcaagcctgaggcaatcaaagagggcacgaacaagtgccatagcttcggccaatagctgcggcacttgtggtgctttaatgaatatttaatattactaattgtagtattttgtaataatcttatttttgacataggaaaatattatcatagattgcactagatcttcccaacaaaagatacaatccgtttgcaaataatagccacaatatattgtctaatcaatcaaaaatacttcgttaggaaatgcctttcttctgtacattttctagaatgccaatttgtgcagtgcaggccttttaccaaacagaataaacgatattttgcatgacgatgagatcctgagcctatgattggtcttaaatgtttgtcataaacaattttcgttttaaaattcaaccaatacattcaaatgcctgcccataaacaaaaagtggaattaattcatttccacaggcaaattttaaccacaacttcgcatgcatggctttaaatcagaacatatatagagatacgagaataacagtacctagcttctactggacaaagggatatccagaaaggtaatactcttttacacgagacacgccatctctggatagaatgcctttaagatctccaatgattctggccaaccatatttccaaattcctctggatctccttcaagttgtttccaatggaatccaatgatcgttttgtggtgatatttgcatagcttcccatctcatctccatagtagctcttcccaatctcggtttgcaatgccatcagcttctgcccggtttcagatgcacgttgctgaagtctaaatgcttcaagtagaaactccgtctgcctctgtgtacggaaatccagactaac

SEQ ID NO: 42171 - DNA, 2683 bp, Cannabis sativa
atgtataatttaattacgaaacctgaaaaaagttaatcaaaacattattcactcttagagttcttgctcatgtgttgagagaaaatcaagaacatcattatttttagtttatccgaattagctcacgctaatctttgtgtatggtgtagaagacttagaagatcaaggatcaccattatatgatataacttactaaaagattcaaggataccttaattcgcttcaaaaggtaaatgattcatttcatctttttatttcatattaaatatatttacatatggagacctatggggtgtgatacaatgataatatatcaaatgatttcggtgcaaatttgatttagtaccacaattattatcttatctgtttgttgtgtctggttggaaccattcaggcattgaccgtggtggttttttttttccggtgcagtttagcagctagttctagaatattttatctcggggtaagttgaattcagttgaagaagcagccagggttgcttggtcactttagaatattttatctcggggttagtcgaatttagtcgaattagcatttttaccttctaaactttgaacaaaaaaaaatcattaaaaaacaatgatattctatttttttaaataattataatattctattaattcaaaaaaaaattattaaaaaatcaaataaaaatattaaattaattaaataatattaattttatttaaaaaaatattttcaaactttattttatttatcaacacatatcttaaaaattaaaccaaaattattaagaatctaataaataacttaaataaactaagattttttgatgaaaaaattaaacttacctatatttataaactcatatcttaataaataaagaaaaataattaaaaatttaatgaaaatataaaattactaattttttaaaaaaattataaattaataaactaaaaaaatgttatgtatacttaaacaaatctacattttttaaaaaataaaatatactcaaaatttgttcccatgaaatttagtttttacaaattgaatttttaatatattttttttaatatctaaataaatattctaataaaaataaataattttttatatttcttaattagtttcaaaattttaatttattttttaatttttttaatcattcaaaataatttttcttaagatctaaattatttttttaaaatttactaaaaaatgttgaatctttctcatttttattttagagtggtatgatttgataattgtcaaagtttagggggcaaaattattgattgacaaagacacgtcatcattcaaacggaataatgggatggaactttaatagaatgactaaatttctgtaaatgtaaaagttcagaggagaattttaacaagaagtatattttaaggaccaaaatcagtaatattaaaaatttatggagtaaaattactaattatacttaaatatgcacttaaaactcaatttaaatttggcacattttactaaaaatatttttaacatattaactaaattaggtatataatcgttcaaaaactaatatattaattaatttacacatcatcataatcaattaactgcgaaatataattgtcaaaagaaaataaataaatattaattatttagcagaaactctaaaaaaaacttaagatagttcaatatcagtagctgtctggttgtccactccacattgattttttcttttaagatataatattgtggtccataaatatatatatattaatatacataatcagcatatatatttatacataatcagccataataatggtccagagtcttaagaaattattgcacgaaagattgattgaaagtggggatgcaattgggggagtcatactcggccagggtttgtgtatttatataaatatatataacaaaattggagtgatatcatatataaatatgtctatgtctatatttacttatttagtcccttttattcattcagccttaaacaataatcgtttttcaactctgtagtatttggagttatgtggttgtgggtatcgatcattacaaagaattaatttgaggctcaaaaaccatggaagatatgtaattattattgctgtcaccactgaaacatatgtgttctattaaaaagttactgtactatcaatcgaaagtgtaaagtgtcttttgtatgttgggatggtggtggctgcctggctagaattagagagaaaaccctaaaattggaaaccctaattgaaacaagtttgtttcattttaaattggtttagcaattaaatgttataaaagtcggtgcacaaaataaaaatgaatggaattatcgaactattgtatgagacaatggcggaaccagacaataaaggtgctaaataggaaggtcaagcgtacttattttagaaaataataataaaattaggctatttaaaaatttataacattgaactattacaatgatcatatcgtactccttgaaatttttttcgctaaaacatgtcaatgtatagttgatgtgttattgtcagcgtcacatatttaatttaaaattttaaaaaatattttcttattaactatgaattatagggtaaatactaatttggaccctatattttgtaaaagtaattaattagaccctctgttttgttaaatgacaaaatagatcctatattttctaaaatagtaaaa

SEQ ID NO: 42172 - DNA, 1429 bp, Cannabis sativa
gaaaggataatgcgtggtactcagggcgctctcattgtcgcctcaactctccagattgttgttggtttcagtggcctttggcgtaatgtagcaaggtttggaaaggctcttccaatttattgtgtctcaaattcccatttagttaatttgcaatgctatagttagctcttctctaagcatggctacaatttctgtttgtacaggttcttgagtccgttgtcagctgttccattggtagctctatcaggcttcggtttatacgagtttggttttcctgtggtaggagtctttatactttttctcaataagaaaaaaggaaggaaaagtctactcttactgttatctgacttttatgcttttgactatctgtctggatttttagcttgcaaaatgtgtggagatcgggctgcctcaactcatccttctactgttattttcacaagtaattttcacatatatactattcattagtcctatttcaattttcaagatttttgtgtgtacttgattcctttgtcaattgattttcaccccttaattctctcagtacataccacatatgatacgaggcgagagacctgtgtttgatcggttcgctgttattttttctgtggcaattgtttgggtttatgctcatctactcactgtgggcggagcatataagaacgcaggacctaaaactcaaattacctgtcgaactgatcgttctggcattatcggtgctgccccgtggtaagcctcttttgctatttccttgtaactgaattcatgttgctatgacacctttgatttatgtgttgaattacacaggataagagttccatatccctttcaatggggagccccaactttcgatgcaggagaagcttttgctatgatggctgcttcatttgttgcactagtagaggtacgtttgttaagtttctttagcctttcgaatttcgatttcccaaacgactcacttcttaatgagtaaactgatcaatccttgtttatttttcttatgttaacagtccactggtgtattcattgccgtgtcaaggtatgctagcgcgacaccattgccaccttctatacttagccgtggaatcggttggcaggtaaagaaactcaaaaatcttgattacttgcactacaattaatctttgatataacaataaatgaattctctcttgttttagggggttggcattctcttctcgggtatttttggaactggaaatggcccatcggtatcagtgtatgattcttcccaccttatcataaccatacatttatttttcgatttgcttaatcacaatcttccccggctagcatgaggaacatttttttgatactcttgcagtgaaaatgccggtctattagcattgacacgagttggtagccgaagagttgttcagatttcagctggattcatgatcttcttttc

SEQ ID NO: 42173 - DNA, 11367 bp, Cannabis sativa
ttcaatatcatattagcagcatttttcaatcatatgaaagaatataacaatttactcccctgtgattttcttaactactaccaaaacaaccctggatgttttacaaatcagctttaaaaaaaaaattataaataaataatgcttcccctgggactgggactatagcaattgttatgtaggtacgcatgagagactcgaacttcaaaccttgtggaagcaaaccatacacgtgaccatttgaactcttaggttctcctatgcttaatcactataagaatccgacaattggacccaatggtgcataattttgcttggataatacatagatcccatattcacaaacaactagaatgaacaagggaaacacaaacatacaatttgattggatgcagcttcatctattttcacctttcaatttctttagactttcatttgtttttattctttttgctgagttttagaactcaacatgccactaaactaaattaactaatcttcagtaaacataaaagttgtggctattaacccacttggtggccctgagaaattaaaccatagtgataatggtgggacagcccctgagttctgtcataagtttagtactcagatcgcattgtcaatatttttcaaagccactagcatgcacttgggtggtaacattcaaggaaatctagcatagaataggtggcaatgtaccacacatcacatactcaccttaaagatatcaccgaacattccttgcaggggatttctacgtcgtactccatagaacttttcagcaatatcatccagcaactgaaacataatcaacatattagaatcgaacttgctcaaggccaagaacgaatcaaaaaaaatatacattacaagagggtgctcatcacgttactgaaaatgcatacctccttaaaagaaggatctctgtctatacatgatttgtatttcacttttagcatattaaaaagaggtaaagcatctctctgcaacctgtaatgatataggaaattagaaacaaagctacatttcaagcacaatggttatatattagctacaaatctcttctatctacactgaaattaaaaggggaaaaaagaactaagggcaccagattaaatagctcacgtttgcagcagaaaagtaatgaattggatcaaatctgaatgaggaaggtcaagctgcctatcttcaacttgactctttatttcatcgatgagttgattagcatctctgagattacctgaagacaaatacctacagtaacataattattgtaacaggcaagagtcagggcaatctatcagaagaagaaaggagagagagagaaaaatagatggaatgctgattagggagtttgaaattggagatgttgttagcctttaaataatgggagaagtaaccttacattagaattgcccgagaaatagccaaatcatcttctcctggataacactgcatgatcaatatgagtgagtctttaaatcataatgcaacaaaggaataaacacttactatgggagatggaactaagtgcaatctgttatctatcagcaagtttacaagggctatgagttgtattgctaaaaattaccatatatattgtgaatttcaggatttggaatcagggaggacgataaggaatgtgaggggctctatcttctcaagacatctagtaatccagaaaaacaaactccaacagctattattgtcttcatctatttccaataacgagaatgctattatgttgtggcactataagttaggacacccaaaaaatttctacttaagaaacttgtttcctgacttgttcagtatatgcaaaacattttcaatgtgagttttgtcagctttcaaaacatgtgagaaacacatgtcctattgaaggctatagaatctctcatcccttttctatgattcatagtgatatttggggacagtctagagtctctaatatttctggttatcgatggtatttcctttattgatgatcatactagggtaacttgggtgtatctaatgaagcaaaagtcagatgcttgccatatttttaaaaacaagttgcagcatgatccaaattccaaactcagtttcaagaaagaaaaaaaaagttcttaggattgacaatgccaaagattagtacaatttgattgattgtaggtggtttttttcaacagaatggcttaatccaccgaagattttgtgtcaatacactacaacaaaatggggttgctaaaggaaaatcaacaccttgtagagattgctcgatatatcacgttaactattaatgttcttaaacatttttggggagaagcagttctaactgccacttacctcatcaacagccttcgagagtaataaattttcgaaccctttatcgaaagcttcttttatctatcaacaggttcctattatcttgtctctgccaatcaaattttttggatgtacaacctttgtccataatcaccaaccaaatttgagcaaattagatcccaaagctatcaaacgtctcttcttaggatactcttctacacaaaaggttataattgtcattctcctgtcagtcaaatacttacgtctcaaatgaaatcacacatgttgataaggggggaatatcaacgcctagtaggtaagctgacttacctttctcacacgcctaacattagatttgcagtcaagtgttgttggtcaatttatgaatgatcctaaagaagttcaccaacaagttgtttacagatttacaaggtatctgaagatgacacctggtaaagggtcgtacttcaagaagggaactaacaagaacattgagattttttcagatgcagattgggcaggttctattactaacagaatatctactacagggtgctgtacttatgtatgggctaatttagtaacttggagaagtaaaaacaaactgtggttgcaaggagtagtgttgaggctgaattttgtgctttagctcaaggatttgtgaaggaatgtggctcaaaagagtgctcgagaagaattaagaatctcaaactcaacaatgagagtgttctgcggaaatttggctacaatcagtatagcaaaaaatccatgtggagttggatcctcgttttataacagagaagattgaacaaggagtgctcagtcgagtgcatagctgatgttgttacaaaagctcttctaagagtcaaattggacagtatgatatccaagcttggaaagattgacaagtgacatctatctcccagcttgaggggcaagtgttgaaatgtcaaatttattctttgtagttttaggtttacttttacaataaagagaaaatgatctctaagatcttaaatctccttgctgatttgatgtgatcagattttaatttcaataactgatttaagggattattttatcaagtaataaaggagaattagtggcagattttctgtcaaacttctcctctaaattatgtacaatagcctagtctaaatctaggaaaaaagatagtttttcttcattattttcttcaaaactctgctttttaaattctttttttcagagttaaaagtctatgtttgaaaaaggagagtcaagagtataagaaacataaataagtttagttatattaaaaataatctaaaatatttgaataccagtttatatattgtaataccaacaaagaaccccttaaataaagagtacatgcacacaaaacatgcaccaaaaattacatacgtcgatatggcagttttttttttaaccaaacacgttgatttaagatgggacccactttctcaaaatacatgttacgttcctctgtaattttttgttgcgtattatgtgtgcacatattattactcaaaagaatgcaaagaatgtagggtttatcgggagagaacaagaatcaatagtatctacttttaacaacagagaggatacaggacacctcatagcatatttatgaacttgaatcaatgaaccacacaaaggtagagtgagaaaagagaatcactaaccttgcccatgaaatttactaaaacagaagcaaacttttttgggttgtttcctctaatgaaatgatttgatactcgagtcatatcctgtgatagaattaaaattaattgactatatccaagatggaagttatgcaaattgaatagcaataaaactcctataatgaagaatctaaatatatatatatatatgttttacagcacttaaaataattgcactatcctccacctaataatctaaattattcaacaatgagacagaaaagatgtaggagtttgtcagaataataacaccaaacttagaccacatgacatgtatgaattacaaagctcacgtttttatactttcaagtttttgggctaaatcaacaataaaatatttgaagcaaaaagcttcgctgtcacacctaccacctcaggagattcagaatatatatactctgctagcataacatgcagttcaggtgaaccatttctgggtgctccaaactctgcagaccatctaggaaaccagaaaaaacaattagcatacgagtagatagtagggatctgattaagcagaccatatatctgttgaattaaaaacatcaaattgtaaattctgaaaagactctttcatatatgacaaagacagacaaccctgcatatcataaaacatgtatcactattggtttttgttcaagaacgacataccttgtcctaaaacaacacttggaatgatataccctcacaaaaggatttagcatttttttaatacactaccaaccagatagtaaatcctcacctaatagcagcttttaaaaatgatgagcaaccatctacacgtgtttttgctgccccaagtgcttcagaaagctgttgtacatcgtcatcatcagctaaatgttgtggtacagggatctgaggaaacttattgtaaattttcctgacacggtctgagaatattatatggtcatattacaaacacggacaagacaagatcagaaaaaataaagagactaacaagtaaaacaatatgtatatatacatcatcatgttgagcgattacgaattcaaattgtatgaggaattaacatcaaaggggaaaaaacgatatgaaggcagaaagtacttaaaatggggaaaaaacaaatgaaatttgatacacgttgaattgttacatgaaaaagcaagaacttaccaagggtttcatcatcataagaaactcttgctttgacaagtgtatccacaaacaacacagctagctctgctccacatgttacctgagatggattcgagggtatcaaattaacggatgtaacaacagataaaatctaaagaatttcattacatttttacctaaaaatgctatcctgctctaagattccattttctttaattcattttctcattcttctactgcttttttaaactattttattagatagcaggatcaaaaagcttcagccagagcttttacatccaaaactatgatcttgtaaacacaataaagttagattaactaatggcatgtcaggaacaaatacaaggtcaccacttaaaagtttggactacagaagataagctttaagacatggacatccaaatttaatacaacataaaccctatcccatttaaaagacttttcttgaattagatataatctagttagataatcacacaagaataaatgaatttcctcacagacatattataaagttcaacattgttacaatcccaagctttcgagataggtttgttactattccaatcttttgagaggattggggctctccacaatgagtctaaaacctcactaattttctccacaccctctccaatactagggatatattaataagatcctcactgcaatattaacaaaccagtaggaaatccaatgaaacagtaaacgaacagaaattatcaataaaaccgtaacaggtaaagaatgcactggtgagctattattgattgtaattgaaaatgagacactagtctctacaggaaaattgagagtcgaagctcaccaacgatacccaacttacccctgtgtctagtacctatttcctttcctagcataagtgaaataaaccataggcctggcatgcctatcattaacctccccctgctccaaatctcaactttgtcctcaaggtttaaggttaaaaacttgtcacggattacatcaaatttctcccaagtggcttcaatcaagagtaacattatattcttatactagggattttcggttacaagaacaagttggttataagctagtacgtcagccagtgagatcataaatctttccaaaatcacatagcctttatagatcaaccgcccatgctcaagagtgatacctgaaatatccttgccttgttcaaggtcagtcacaatgcgggataagaaggcatcatgggtcatggctgacctcctcccaatccaacagtagtggaggtgagcaaggcacagtatatgtaacacctagacaaagcgttagcagcaacattgctgctcctagatgatattgaatcacaaaatcatagctcaagaatttgaccaaccattttttatggtccagagtcaccaaccgctgctttaaaaagaacttcaaactccgttggtgcgaactacaaaccatcatcccaacaagtacaaacgccacttgagcaccgccaaaacaatagcgctcagctccttctagtaaatggatttcatattagcacaggacttcaaaatatgactgcaataagcaacagaccgcccccaacccataccccaaaccacccgcctcaaccaaaactggcttagaagagagccaacacaggtatagttgtcagtgttgtcttcaaagcagtgaatgctgcagtcgcttcttcataccaactataattatttttttagttgattcgtgagaggctcggcaatggtaccataatctttgacaaatttctgatagtaaccaatacagccaaggaaactccttatcttttaattgatgtaggcaatgaccaatctaacatagcttgaaccttggaagagtccaccaccacaccatgaccggaaactatatggccaagtactcaatttatcgctgcccaaagcaacacttcttcaaattagcaaaaaactaatgattggccagagtttggagaatgatcttgaggtgttccatatgagtaaaccttatctgggctacataccagtatgccatcaaaggagacaaacacaaaaacgatgcagaaaagacctaaaaatctcattcatttgcaattgaaacattgttggagccttggtgaggccaaaaaggcatcactaaaaattcataatggccctcatgtgtcagaaaagtggtcttatgcacatcctctggtcggacttgaattaagtgataacccgagcgcaagtcaagcttaaaggacacatgtgcttcgtataattcatctagcaactcattgatgacacgaatcgagaacttgttagccacaatttcacgattcaaagagcgataacccacaaaagaaccaactaccatctttcttcttgactaacaatactaggcttgaaaaggggttgttacttggccaaataatcttggcaactaacatttcagcaacagaacacatgcgcccaggtgaacacatggatctcgacattttcgtttcaaagtgttttcttcaacagtctaaacaaaaaggtcgtggtgacacaggaatgaaaatcaaaaatcgaagatgccacctgaacatcacaccaccacatctgccccaggtgagcacccagcacccaagtgggctctttgccctagtttgcagcggttttggttcaacatctcaacgcaaaaggcaattgactccataaacgcagcagagaacgcaaaagactagccacactctagtctcgagcctcaaaactcacacactatgagaaggttacctacgggacgcccaggtgagcttcttgctccctaggcagcacgacagctagggtttcggttccaaggtccaaactgtatcttggttctcacaaatcgaccaaggaacgatgtatgcatttgagttttagcatccggtgtccaagtggggcacacgcagcacccagcggtggaccccatgtccatctggattcatttttgtgttagaactagttttgaacttattttctgctcaaaagaccatcggacaactaaggaacaaagtctgagtcgggaccccacgcagggacacttgagtaaactttccctagggtttcgtgacattttactcatttcccttcaaacgggagtgaatacaagtgctcatgcctcaaatgaagctaagaagtcaccatgcaccagggggcgcctaggtggcccttaccctagtaccaacgcctaggtggacacctaatgcatacctaggcttgccatctaatttaccgacacacaagagcaaggggatgttaaaatctagttctattcaagatagatgttgtggcaacttagaatatcacccgaagctgtcgtacccacttggtactccagcactagttggaccatgcatccaggttaacattcacctagcgcatatggttcaattcatcaaattgtcacactagcaatggaaaaatgcttcttcagcatcaacaataccctaacttcgcgtaacctgagaggttgcaccaagtgaactgacaccaggtgcccaagtgacaccatgcgccaagtgaattgacaccaggtgcccaagtgacaccatgcgcccaggtgatctcaatgcatcaccaagtgcatgtagagcgtttctccatcaaaaacacggaacgtcttcaccaaatctccagaattgtcatcagacttggccaattcaccattacattaggaagtctcacatcaaatcaacatcaaggtgcagcataacattcagcacctgcaccacctaggtgcttaatcttgtttttctccaggaaatcatgcacaacttaagcatttgacttagtgatgcaccaatatcacattagcaatccaaaatatgtcaaaatcatgtatttctacgcccaggtgaacaaaaatagctcacttggtcacaggatacaaactaaccaggagacgactgcatacttcacagtgttttaggtacaactcgaattaacacaattccaattgtgttggaaagctctttcaatactttttcaattgatgtttcacaaggaaagccaaatttagactccttcccatcgaaaattgagccgcaaggcaaagtacgaatttcaagtatcagagctctgaaccctccatggattcatatgcaataagcaccggttgtaactccgttgccttgcactcatgccctcagtaccaccttccatcacacttaaagcacacaccacaatcttttctttccttcaattcaactttagtaaatcgtcaataccctgaattttccattgtggatatcaattttatactcgaggatgtcgaagtcgtcgatgaggtagaaaacatggtgcatgtgcctttgctagcttcaagaataattaaagcactattgggccggattgggcttgttttattcagcccaatgatttctagctaaggcatgaatgaccttaatggactctgctgactccatggtctgaattagtccaaagggctctaacacacataatgtggcctaaatttccatttgcaacccttaggcaaaagcaaactgtaaaactacatgatccaatgcacctatcaacgcagccaaggcttcaaattgttggcgatattcctgcacaatcgcaacatgttgaagagcaaagaaatggttgacaaagccctcatgagcaaggcgtaatcgacgtaggagtacagattttaattcctctcaagtcgatatggtctgccttaggtttcccacctgaaccaactcaatgctacccttctaagcaacatacctgcctcaggttgttctgttggtgacaatctttggagcccaaaatatcgatcagcctgatgagtccactcatcaggattggcctctaaataaataggtaattcaattttactagctctaaattacgttctttttactccttcgctggcgcgagaattggaaccagttgctcccgacaatggtgaggcttcaccagtcattcgccaaccggaggtttgggagaccgcaaaagctttgcagatgatggtggtgagttcatcagcaatgggagcttgcccattcgtgagtatcttaagttgtttcgtgatcacgaccaagctttggtcgtgcaatttcaagtgctccttcaagccaccaataatcccttccattcgtgtctccattcttgtcggcgacatttattggagtcggtgctcagtaaaaaatgataagaccttccctataattgtaatatcgacaaactaaaagcaaaacagtaggaaatctaatgaaacagtacacagatgcaacaattctcagtaaaacagtaacaagtggtgaacaaattagttattattgatagtaattgaaaatcagacactagctctacagggaaaattagagtcgaagctctccaagaatgctaagaattactaagttcttgcataaccctcactcagttcacatacattctataagagcaactcaacttacacaaggaattacaaaaacacccctccactcactctaacagccagctcagcaatgatatccaacttacccctgtgtctggttcctatttcctctcctagcgtaagtgaaacaaaccataagcctatgatatatactcaaaaacatttgccacatcagtgaccaagagtgaatacaactcattcaactaatacacatcagcctaaagactaataagagatttccaactgtccaattcattaactagattttcataagcttaaacaacttatcaggaccttttcctttcgtaaacaaatcgaagctagggcttattgcccatctccaattcttttgtaatcaccacatattaccatgtgaactattaaatataaatttcaccatatatattaaatatattatgtactagagtgataaaaagtgtataacctgcccgttatccaattggatgcaagcacctgaatgaataatatccaaagcttcagaaaacctttgggcagatacatatctgcaataaagcatgcatgcttcatcagtgacctgaattggtgataaagtgtaacaagttacatgctaggtgaaaataacatatgacggataccaaatgggcaaagtttgagttgatacaaatgtaggttcgtaaaagttatgatgttatattcctccctcgatagacaaatataaacatcaagagtgcatcgatgtatgtagcaaagaattttatgtgaatctctgatctagattactaaaagaaaccaatgttattggagtctcaccaaataaggaaaaga

SEQ ID NO: 42174 - DNA, 2078 bp, Cannabis sativa
ggtgtgatttaatagttcaaacacataaacaaaagtgtgctttagaatttggctaaagcacactcttatactgttcttgaactttttgactcacttatacaaaattaatatatttattttttctcttggaaaaaaaggcacttggaagtgagtctcaacaattgatgagtggagttgggaattctaattctttaacacctgatattccaagtatgggggaccaaactttcaaagtagggaagctttcagttgaacaaaggaaagaaaagatacacagatacatgaagaaaaggaatgaaaggaacttcagcaagaaaatcaaggttgtctctctcatttctatcatacttttgtgtttcaaatatgaaaaaacaaacaacattgatacatgtaaataatatgttagtttatgttctacattattagctcataacagcactaattgtgcatgaaaatctgcagtatgcctgtcgaaaaacacttgcagatagccgccctcgagttagaggaagatttgcgaaaaatgatgattttggtgagaccccaagaactaattctggcaatcatgaagaggatgatgaagaagaagtaagatttgattctcacatttaccatttttcttttgtgaaatgttagtgtctagcactgtcatcaggtgtcatattactactggtgcatggtgtctggtgcctaatagcaatgctcgttttctttcttcttctttcttcatgtttaacaaattatatgtttcattcatgtcataatctcacattcatttcattctcttgtacaggttgttgtgaaagaggaggatgatatggttgattcatcagatatatttgctcatattagtggagtgaactcattcaagtgtaactatcccattcaatcctggatttgatctagtttttttcattttaatttttcactggtattagaactatctaccaattttgcaggacccttttccaaccaagatttattgtcttggttaaataataaaaaatgaataaatgggtcattatatacaatatatatatgtataattaatgtataaatcatgtcaagcttatgtatatgtagaaagtgaataacaatataatttttgtagatatttattcaaatttcaatgtaccaaagcaacttcaagaaatcctttgatattcaatcctttttcctttctttatgttactaatttgtaactatttttgtttaagtacacaaaatatgtaccaaaaacactgcaccaataacatttgattaagatggacacaaagtttaaatagacattggctttgcacatgtcattcctctttttatttttgaaaaatcctcataaatagtgtgattaacacatatagtacatgcactttttcagaacatgatagatttcttataagcaaaaaaaataaaaaataaaaaagtggcatttaagtactttttcttttgattccattaccattacctttatagtagagatataaataacatgtaaaagaagagaaacatcaaaaagaaaatctctaaggatccaaattatgcatgcatagtaatgtcatatcaatcttgaatctaatggactgaaaaacacacacacatccatccatgcccacaggaaaagaaaataactatgcatcctcaattaaattcttttttttttttcattcaaaaaaaaaaaatctttttaactatcaagtctcattattgcttataaacacataataataatagagcaaaagtaaaaaggcaataatggaaaagggctatgtatataaatgggttagagaatggtaggcccatactattgctggcctggcctgaaattgtattgctaatttgggctacattttactaagcaatagctcttgtttttataaaggttaggtttatttataggttaatagcacacagtgctattaatctacaaaaaattcttccataaagaaagcaatgaaaggtaagtaaagaactttaatgacatatatatctttcatgtatacattcagtacctttcagcagtgacgaagctagaaatttagttgagtgagggcttgaataaatattaagtaaaaactaat

SEQ ID NO: 42175 - DNA, 1762 bp, Cannabis sativa
agaaaatgacataaatatatcatatatagtatccaacaaaccattagatacaaccctgtaaatatacacacaaccctttataaagatagatataaagtgtttcaacatcattgtttactcaaatacaaaatatctccatcatattgttttcttcggtcttctgtttgaaatgaccaaagctaaaaccatggtttccagcaagtgtacaagctcgctgttagcagctttgttgttagttttcatgttttctcatcatgcaggttagtaaagaaaactagctagtgatattgcagtagtaaaatgcttattttaaagtaattatttgatttttgcctctgaatatttttgcttaaacatgagcttatatattgtttagctgcatacgatcccttggatccaaatggcaacattacaattaagtgggatgttatgtcttggactcctgatggctatgtggttagtactttaactaagtaattaccattccatttccatgttatagcttattattcgattcccaaattttatttgataataaataaaaatttcaggcagtggtgacaatgaccaacttccaaatgtaccggcacataatgagtccagggtggagcatggggtgggtttggaccaagaaagaagtaatatggtcaatggttggggcccaagctacagagcaaggagactgttccaagttcaaagatgggaatatgccccactgttgtaagactaatccaacagtggttgatttgcttcctggtgtcccttacaaccagcaaattgccaattgttgcaaagggggtgttgtggcctcttggggccaagacccttctgctgctgtctcttcttttcaagttagtgtgggccgttctggcacttccaacaagactgttaaactacccaagaactttactttaatgggccctgggcctggatacacttgcagccaggctaagattgttacccctactcctttcatctcagccgatggtcgtaggaaaactcaggctttgagtaagtttctttctttctaaacaaaataaattaaaatttccaaagtttgattgaatcctactaaaaaagttgtggaaattgaacactttatttgtttttatacaatatgcaaataattgttttttttttatcaacaaaattattttatgggatgaaacttaaatagcatgagaaaaaaaaagtattagataattggttactaaaatgattttttcatcttctttttaactgtacccactagggaggaaataaagagaaaatttctcccctatttttataaagagtacatttttcttttctaactcacattattttaattttatttttattaattaaaaataaaaatataaatatatctttcaaaaatctataaataaaaaataattacatgttcaaacaataataatttagtcaaattaaaacatttaattttgtaaacaacaaaaaatgattagatttttttttccttttaatttagtaaacaatataatcaaattttgttttcaattattttataatttaaaccgatttatttttttaattgataattttgatttgaattacagtttaataaatgtgccctactagtaaccagtccatctttatatgtttcagcttaaaaatgtattggggcacaattgtgaatataacaattttagaagtagtgttttttttttttttttttttgacaagtttagaagtagtgttttaattggcagtcacatgagtaatttcttcttctttttttttt

SEQ ID NO: 42176 - DNA, 4557 bp, Cannabis sativa
gctcttccgatcttattattattattaataataaattattattattattattattattttggtcaggaataaatagtatgactattaagattgaatagggacaaaattataaatgtttggagggtatgcttaactaatttagtaactatatatatttttttgaaataaaattcattaaacagtagatagattacaaaggaaatggcgacgccaacctataattacatgattttatttgcaatatttatagcttgttatcttcattttctcaagctactattagctatattgtttgagaagcaaatactactactcaccaattagctaaagaagctatttagacacagaacactagccatgctcttcattgtatcctgaatatttaattccccttttttaatggatacaggttttcttttttcaaagaaaaggaaatggcgagtctggataatttgtctcccacaaggtggggggttaccaatagtagtagcctaggttaacaaggtatgattggctaaactatgagccattctattggcttctctaaaaataaaattcaaaccattaattaaagggtattgcagtagttctctaattttttgaaccagaccatctactacccaacaatctttttctcgactttgaataagtagcatcacttgttgacaatttgtttcaactctaaacgaaccaggacatctctgtatagcagcctttaatccatctttaatagcaaaaagttctacaattagtggttcacactcttgagctcgaacaagaccaccccctactatcccttagcaccactcccatcgttgagaccccctcttgagcacggacaccatcatcaacattaactgaataagtgcccatatctggtttctctcatttggcttcctcccttcgacccttatcaattggctttcgatttgcctcttggaactcactcaagaatttccgacaccactctaccacatccctaacccgagccacacaacccccatgatttatagaatttcttatatcccatatatgccaataagccataaggaacggagcaaacgttttaggattccatacttgaagtaaatttcgtagaaacaagatcaaatctttagttttgaattggaaaatttggctccataaaccatacttcttccatatgtccacactccttcgacatccccacaacacatggtatacatcttcttttttctattcattacagcaagtgcgataaggcttcacatccattcctcttttagccaaaatactatttgttgggagccatgaatggaaaactctccatgtaaaatgtttaatcttaaggggtactttagttttccataaggctttccaccaggttgtcatatgttgctggtttgactgtgaaagagtctcaaacatctctattgctgttttgtatccactacgaacaaaatactcactattatgattataatgccacaaaattttatcctcgagtcccaatcaccactaggggtactttatatcacctccgcatcatctccattaagtaccacattagtaaagtccatatcccaagtgccatctgcgagtttcagatctgcaacatatatatggtcaggtaatattggcctatcataaatcttaaaatccaatacaccaacggtaaccttgtaagataagcttttgcccaaatcaaactacgccactaaaaagaagcatggtttccacacttggcttccaaaacacttctattcaggaagtaacaagccttcaaaacttaactacacaaggaattcaatgatcttatgcagcgcaaaatttattttgccagtagagcttgattgaacatacccaaatctctgaaacccattccacccttctcttttagtttgcataattcagcctatttcctctagtgaatttttttactatgtttggattagcccctccaaaaccttgcagccatttgatgcaagctatttattgtacttttttggagcctaaaatagctcatggtgtatgttggcataacttgtaagatggccttaataagaacctccttatatgcacttgagaacataaagcccttccatccttttactttctgccaaacccagattttaatggtgttaaagagctttgttttactatgtcccacaaaggacagaagacccaaatacttcccataattatctacaacccgaacctccattacaacagctagcctacctctcaaagaggtatcaactcgacgaccaaagcacatctcaaatttgtgaaaattcactatttaacctaaagccttcaaaaatttgtccaacaacttcttgcaacactcacactctgcctcagttgcttcaaaaaatacaagactatcatctgtcaaaaatagatgagaaacttttaacccattttggttaaaagacaatccatatagttgattcttttcttcaacctgattaataaagaaagaaaaagcttcaacgcagaacaaaaataagaatggggacaaaggatctccacgtctcagttcacgttgaggcaaaactaagccctaaacctcactattgaccaaggaagaaaaagtcacaaaagtagcgcaagccataactttcgcaacccaaacttcatcaaacctgttgaccttaaaaagtgatcaaatgacagcagagttgtatagatttgatgtttgccacatgttgcacaaacaagtatgaaaagtaataaacatgcagatttattatagaggttcagcccccttgtgatagcgagtaatgacctactccccttttagttatattaataccgaggattaatactatccagatcactatagatgggatctactatagcacccttaaaaatacaaagtatgaatcaagaatggaaaaactcaagtgttgagataattcttgtaggagcatgtgagagaggaagtgaagaagagagaagttgttagacataggcttaaagcttggagacaggtttcatgcttatctgagcttagattttctaggttagagttaatgcctttatataggaggcctaaaccctagattacaacttaaaaccatagatatttgtatattatattaggtaattacaaaagacaaaatgccattgaatataaatattattcagctattctattggacttttagggcccaatttgcagcctagaagatggtgtccacgtgtagaagtgcataggaaatcctgcagaacacctattgctcatccaagtccttatgtgggacagtctggccggccatggggccgaccaccccctcttgtgagggagctggtctatcacttaatgcatgtttaagtgctgagatctccgtttacttaggtgctgacttggccttctcattggtgagctgcataggcacatgacgctgattttgtccatgtaagcatgccatatcaagaggaaaaaaaatgggataacaatacccaagctgcatcatcatatctctaataaactgccactcaaccttatcatacgccgttggtgtatccaatttaagagccacttttgatccattataaactgatttttccttatattatgcaagcctttcaaaccaattatagcattatcatgaattagtcttcccttaaaaaaagtactttgtgattcagaaatcactgcatagtgttagcctaaggtgattagccaagtactttgccacaatcttgtaaatgacattacaaatgctcatgggcctaaactcttcaattttcaaaggtttttcaatcttaggaattagcgaaatgatggtatcatttagacaacccaccttcattccctcattcaaaattccatgcatacaccaatcacatcttttcgaaccaaattttttgatagaaaatcatagggagaccatcaacccctaggaatttttttagatccatgtccttcagtgcactaaccatttcctcttcataaaatacctttgataaattatcattcatagtcgtagtatcactctttagaatagccttcaaaacatcatcaagtatatcttgtcgaatctcattggcagtaagcaaattggtaaaatattcacctacaacattctgtaccacccatatactagttttccatacacccatatgatccaacatacctgtaatctcatttttctttctccttaatgacactttatggtaaaaatatttcgtactttggtccctaatttttaaccataatgcctgattctactgtcgctagtacgtctcgtctttgtcaagcaacccattaagccttttttcttgtattatcccaaaaattttatccacctgatgtggcacatatctaaataagacaaagatagagtataggtcgagtacaactccgtcaatagcagaacagagcctccgtgaaagatatagcaaaattgtcaatagcgaccgaaaggagtgaaacgagcccacaaggagttgtaccaacatccttggccggccaagaggagcctataggctctgtgcacaagctggccagcaaagaattgactttcagacccaaggagactccgttcggccaagagtacctagcctctg

SEQ ID NO: 42177 - DNA, 1646 bp, Cannabis sativa
ttgtgccaccagcggttgtgccacctgctgttgctggtagtttaattggtccagatccaaaactaaatgatcttacacagaataaacccgtggaactgttaggaaatcaagcgactgtcaccagtgaaaccacctctaccattcctgcaacccaatgtcctgatattatatctggttctactgctgtacaaagtactggtggaactgaccatcatgccaatttagatgctaccttaaattctccacaggccaatctccagcttgctgcacctgtatctctctctcctatcccgtctgtgcctgtgcaaacaaaaggacaaggtcggaggaatcaaagtggaggctctggaactcgaaggaggggtaagaaacaagtaccaatggctccccctgtgtctggtgcttcagctggtgaggaattaaaaccaactctgaattcacatgttaactctgacgatatgtcaaagggtgataccgtgagaactaaacaagagaatatttcagaagtgacaaatgttaccaaggagcaagtattcctttcacctgaaggtgtagcagctcaagccataaaaccaactgaaaatacagttgatctttctcaaggaaaacagacagatagctcttcaaccttgcatggcagtgctgatgggtcccatggtgagtactatacatgcctaaagcttataattttttgcacttaggtggtgtttggtttgatggaccaaactaagagcaccatggagctggaatatgaatgggaatatacagaataccggttgaatgctaatcttttctttagttggaaattggaattaatgtttgaccacgattgctatgttcggttagttgtttgaatggaataatatctattttaacaaaaatacccaaattatttcttatttatgttttatattattgaataatgtctattttcaaattatatatgaaaaatttcaaactttttgattaattttaaatatattttattattataaataaatttatataaatatgttcaaagaacactcaacttatttataaaattttgatctatttacttttaggtgattgagtgttgactgcaacaaagatatatttgtgtgtattaatgtatatagtgtttgtatgtgtgtttatatgagaaagtaaccagaaaagtcgtacaatgctgacaaaaatttggttaaatacattacctatttttggtttaatgtaagtaaataatcattgcattgattaaacattggatggaataagtattccactggtcctctttagaaatgtggttttagttcaaattgtggaatagctatttctatgcttttttttttggtcaaaacgaacactaccttaaagcaagaatgaatccaaggttttcaatcttgtgcaggcactatcttggcagataaccaaagtgctggtgtgtgcaatgctgcttctgtggtgaaggaaactttgccttctaaaactgaaactaacgagccttcaagacaggaaggtgtggttgtcccaactgcagctgtatctgataaagcccttcctgaagtgactaagaaccaaactttggaggataaaactcttccagttatttctactttgactgctgcggcttctggtggtgttccttcatctgcttctttctctgg

SEQ ID NO: 42178 - DNA, 6523 bp, Cannabis sativa
  modified_base (1879)..(1881): a, c, t, g, unknown or other
aaaaaaaaaaaaaacattttctcaaaaataaataaatggggaaaaacaattaaagccgcctgtacaacacaaaattatcgttgctaaagctaagacaatgaacgaaattgggagattgacaaagttacagccaggaaccccatccaggaaacatttgacacaaacgttcagaatcaatagcatcttgtattaattgttgaacctgaaaaatgaaatttccaaaatgccaaacatcagattcccaaccctactaggagaagacatgactttctaaccagttctgtttttggctacatttactggtacaaatgtaaaacctataaaagatcttaggctagactggggaaggaaagttacctgcccatgtacacttcgcatttcaccttcttcatatccatccagtttctgtttaactcgcatcagtgcgcgagccgcatccttgttcccttcgtaatcttgagagccttccaagcttgcctctacatcatcatcagattcctaatcaaggatgacaagaaaacaagcatataaggcaaagttggaataattaatgaataattggcaccattgacagacaagagattgtcttatcaatttcccacaccccattgcacctaccactttattgattatgttgttcctcattggtaaggcagtatactgttaaaacattatgcttttgcacaattcattagtgaaatattgaatactcctcaaccctatattttctacttagatgaacagcaagcatgctagaattagattgcatatgcacatgactcagaaccgtcttgcttcttctcattctgagattttgtttaatttttttagtagatagtcctcaaaattgagaaaaataacattcaaagctctcccaaaaaagaagtagcccgtaattgaaaattccgcacattccatacaatattaggaaactaccttctgacgctgtaaagccttcaaaggagataaagcccacttatacagaggatcatgtataaaaacctgcagaaatttctcacatgagatttcaaattaacaaaaagaaaagaatttttgtttttttttttttctgaaaatgactattaattactaatgcaacatacttcaacaatagtcagcagtgcttctttatttgtcctcataacagagagtgtttcctcgcaacatcttctgaaaactccttcgactccacttacacccatgccatcaataatgtcccttgtcaacctgaaaggaacctggaaaaacaagatagcccagagagccatgttttatgtaagtttaaattttaattataaaggggttattttcatctgtgatctccattctttcacttattttactatggtccagctagtttttatttattcataaaaacttaaagaaatgtaaccaaataataagtacaaacccgctctggagtcttcagcatcaagccttgttcgaaagcaacaccaagatctatgtgaacaacttctgccgtggcttgatcaattaagatattcatagaatgtcgatcaccaaggccaacaatatacccaacctgtaaaaggagcaactttatcaaatgattaatgaacctacatatataattgctaataggttattcgtttatcagtacgaagtaaactaaattcattgccagttactttatacacaatatttactaattacaacatgtgtataactatatattagttagttaaacaaatagtggaataacagatataccctatccgtgcacgttgcctattaatgtttctaaacagttactgcaacatataaatatattttattagtttaggataaggcagcataaatgtacggattgaacataatctggttgtacttgccacaaaaatatataaatatatatatnnntatatatatatatataaataatcaggttgcactagctttcacagtagagcatgttctgaaaaaacagcaatacatgcttacatcccaatttcttaggaaaggtgccagttctacaagtgaaaaaaaatagtataacatgacagcactgaccattgaactcgcagccacacttcgcgtgtatgcaagtcttttctcaaaccagtcagctggttgtaaaaatctctccaagaaaaagtaatgcatgacaggcctgcacagtccacattataatgcatgttagaaatcctattttgaatactataaacttttaccataaagaataggataaacctgaatttctcacaaacttcctgaaaagccttgcgcttgtcttttgcctgtcaaaacatcaaagcaacactagttttttagtcctttctttccgcgtgttaaaacaaacattttgaaagagtattatagggagaatatattaaacatccaaacttctttatctacagatacgtgaccatcgttttcattgttatgtgtgtggttgcacattttttcccactatattttcaccagtatttttaataattttgctaaatatacatgtgtcgacaatagaaaacaatgtttcactacagtcatctcctatgagaggctgcattagtaaaatacattttattaatagctgtttctccaaactaatacgctcataaccaaactggtaatatggaagcagagcaaaaacaaatgacatatcttattatgcgtgaagacaacagccaacaaatctgataaagaaatgaagtgaaatatggatagaccaaacataaaatgttgaaactaaggacttgtgaataattactgggttatatatatacacacacactgatacacatatttatggtagaaaacaggacatacacagtacagacagctattgttataaagattacaagaagctttacatttgccatgtgttcccgacatttgagaaatgaccaatcacctactccatatcgaccgtgggcacctccagtcctcatactgaaaaatgaccggatgaaacagttattccactagagcattgttaaataaaagctataagattgaaaatcgtacctccctataaggtattcgccaagaggaagagtaccattaacccattcaagaacaccggcacttggagtaaaaggaacaacctatatcattaaattaataattcagaattaacatgtaaagacaaaatgctataaccatgcttcaagtcttcattgaaccatttttccttttggccggactttttggctctcgtgtatgtgcccattactcatctgtattgtacactatgattctttattttttttgaaaaaagagaatgaggccattgtcatagtacactatgattctttatgtgttcctcaaagaattcttgtcatgtatgaagccaagatagtcatgggcgaaagggccccgttgaggcttatgcttggtgttacacaaaagcacccagatcttctattttaaaataccatatctcaacaaagtgaaaagtgcatataattgaaatgaaaataccttgtatgtccgcacccctaatcttcttttccatgtgtcccgatggttttgtaaaaaagtgttgactaaaccaaaaaactgttccattacctgtaaacattgggaggatttttatcaatataaatccaatagcactagaaaggtttcataatttgttcctatatacataataaacacacacacacacacatgcaatatgcataacttccattccaaaaaatatttggaattcccataagaaaagtttaggggattatattacaggatccaatagcaatgactagcaagtcctttcataataactgatactaagaaaccactagtaaaccagtgatatcaaaagggactagatgagttcagtaaattgtcaaagattattctgcatcagtatttaaggcttcccaattttatatgttggagaaaatttatgtggaggaacttttagacaaatagagagaaaaaaccaagagtaatttttacagcatcttgtcttaggtcgtcgtttccagatttcgccagttgcttatacatacgcccatcagaacccatacactcaaccacctttggagcatttataccattcattaccctgtgcagtaaatcaaccgaaactaactagtgagtatagtacatgtagaaagaatgtgaagtagtttcaaaagtccaagacatacaaaactgaatcaaccaatcctctaaagaatggaaaagagccttcactatattgacaactgcggtcaactggaaaggtggctgtcactacaggcacctaaaagcaaatcaggattcaaattaatctgtaactaatcagcatagcttaaatgcatttgcagaagttctgtgtaatattcagtaatcagataaaaggaatttttccaggtaaaagttcttccttacaagttccaatggtttgagattacgcaaatctctaggtagggtaatccttttatttgtatcctgtttacaggcagaaacatatattaatatcaagacgtaattgtgtctgtaaaaaacttcaacatttttcttcaacaagattttccattatgataaacataattagactactgtgtttaaatagtctaaaaaaaccactttttctatttcaccaacctctcttcttgtttcgagttcagctagtttgatatagatctccaccatttgcttcatctacattcattgatgaatacatgtatataactgtgagaatgtaaacaaccctttttcatatagataagaaactatatatcaaatataaaagtacttaatgaaataaaattgaagttacttgtctgataatagatctatgatatgctgacagctcttctaaaagtttctctgcagcgagctttttatccatgtccaccacaaatgagtttctactgcgttgcttgtccttaatacgattaccattggcaagtgctagaagctagaggtaaccccaccccatcccgcaagagaaatagataaggaaatcaatcaatgcaaataaacttctagcaacttcaaccaagaaacataaaaatcaatacctgaaagattgtatggtatggatgatcaatggccattttcttcaaaagagaaaccaaggcaaactgcaaagtccaaagtttaaaaagcattaggactaaagaactgttcaagaataaaaaaggaagaaaagaaaaaccctaacctggaaagtctgcggcccagagctatcttttgagctacccattcttgaagcaatttggtatactagaggtataaacttgtacgactgaacctgtcataattttgaaaaagcaacaaactatcatttgtaatattttcaaagatctgataagcaaatggagatcataacttgtagttagttagttgtacaggatatttacgctagacttttagtattttaatagctcaaatatcttaaatataacaaaaagactatcctttcatctgttgtgtacctcattactagtgctgagcatgttatctatgatatcttgtctatcagatagagtgaaccacagggaaaccagtcgaaatatctgtaagcacactagttagtttcttgaggaataacaattacaacaatgacaatgttatgagtagtcctttccactaaatcatatacttacagcagtgtataatataaatgaaaatggcaataataccagagtatccgtgaaaaaagtacataccacttttacatcatatttgtcacagacaaccaaagagcgtgaatatccatccaatgctaggctaagaaaattgtccctgtcaacctgatatagatttgcttatatataatttcgcagccttaagcttagtgctagaagatagaaataagaatagaggtcaacctgtagtattaagttaaccttgggaaaatcataactataactagctagctaggctaagcacgagtttaatctgaagagaaaattatatcctacaaattacattcaccagtgtcttctttgacaaatatgtaaaaataaaatatgtgcaaatgaagacaatatttttagctattgttataaaatgaaaatattctttcccccttaattatatatgtataaaaaaaattgtatcagatattttttctccgcttaaaaaaattatatattgtattaaaagtaagcccaaattattaattcgattgctacctgcagttttttagcctcttccttgtccattgcaagctgcttctgcaactcttgtatttttacagaatagtctgtcttatccccctacaattcattaagagagaataaaatacctttttcaaacaaaagcataagagaaacttacatcattatggtatcaacattgaagtctaatgcttcaaattaattgatcttgaattgattggaatataaaagcgagaattctgatgatagcatgtcagcttctcttaaatgaagctctaatataaatagttgcaaattgtttctaataaacaaaacatcaaaccggttttattgataaaggatactcaagacacagtcgcaaattgtaataagtcatgataagccttgaatttggaatcaaatcttggtactcatagggtacttttggttggaatgaatgaaaa

SEQ ID NO: 42179 - DNA, 1516 bp, Cannabis sativa
acccagttctactgagttcgccgctttcaaagtttcatcaaaggtcaaatcggtggctgtcaaaatttcctttggatctgtcttgtatcgtgactgttgtgtctcctttgaagttatcagttttgagccattattcccattgttcttggttctttttgggatcactttccttctcttagccggcccttccatttttatcaaggcttctatgttgctgtcataatttatgggaatgtccataagattagagctatcaattattggggatttgatgggattttcttgaggacatgaatgggagaacttggtagaagtcaaagaattaacaagatcaaccatactctcttctctccaggccccattacgcttaaaacttccctgatttgcacctttcaaatgttcactattatcggctatgtttccaactgtcataggtaatgggactttcatcaacaaaccgtgggactcatcaataaccttttcctttcctttctccgataatctcgacccagctatattcaaagatatccctgaatttggaaaaacctctgagtgaaccccagttctggcttcagttttataattgacacccttgtttccgcccgaatgtagcattcctgaatatgatgaaggtatttccttgaaaccaggaggaggagacattggggaagaactgccagaagaaattttgatatgagaaaagggaggatccttctgttcagcaatctttaaccatgatccgtagcccgggatttggtttccaagtccgtcttcaaagaatttcattggttttgcacaaacccgagtaccatgccccacaaaaccacaattaaaacacataaaggtaaacgatcgtccctgtatgggagccatattttttgaccttcaaacgggaaaaggaagccagggcatataggctttgatatgtcatacagaactttgaaattgaagaagcctttggaaacaatcttaggaatatcgatcttttggatctctagaacttcccctgcaaaccccgctagtctctccaaattccctttagtgatcgatcgagcaggtagattgagaatacgtccactgatagggaactttgtaagaaaaatttcccagttctgaggagttccattgaatctttccattatcaatataccattgttgagaaaccaacgattcttggccaagatcctattcaaatccttagtcgatttgaaagagaaaaccaagaaacttgctgcagccatggtgaatttgatttccacagtccactctttgtccgaaatgccccagacaagtccaagaatcgttctcaatagagaacgactcattgggcgattcgaacaccaacgtcccatagcacagagtgcgtttacttcagatcctccagcttcattgatttcccaaccgtcttcatcgagcacggtcaaattgttagttctgttcaacagatcttccatggtggtatcaggattcatcatcttcgtaggcttttccagcatctcaggaaggctcttctcca

SEQ ID NO: 42180 - DNA, 1856 bp, Cannabis sativa
tttaaaatactacaatatttttttttttaaataaaagtctaataattcttttctccttagtctaatactacaattattaatgttcattttcaaatttaaatcatatatgtatttatttcaaaaacaattaaatatatatatgatgtcatatacataattaataattttgttgcatattatatattataaaattagcaagatgattctaccaaagtcaaagtgaaacgaatgttaagatgtataattgtatatgataaaaataagagaaataataagaaaaattatgatataataatatgaaaataaatgtgtatgaaggaatttaatattaaagaatatgtaggttggtggggtctaaataaagtagctttcaaacaaaaatgaaagaatcaatgtcaactcatcacttaaaactaattaataataataatctatcttcttcttcttcttttttacttttttatttgttttttatttaataaacactctgaaacttatataattagttcaaagaattcatatatggctgatatgcattacagcccataatatatacatatttaaatttaagatatttaacaggtaagaaattcaattttattctgtcgctttgcatttattttatatgattttatgatttattgagaaagtgacaatttgatacgtgacattattatttggtggttatataatgccatcaatttatatatctttacagtttggcattaaaatccaatctcatctcatctttctctccaccatgattttttttttgaaagcataccatgttttcttcaagtataattaaaaacaagtttatagtgtaatataaatatgtatgactatatatattgtcatttttttttcatttttcttaaataaaaaattatacatctcaaaaaataaaataatcgataattatttagttaaataaattatttattcatccaaagaaagaatatggacaactaatctatgtgttataccacgttagccgaccaatatacatagatcagtaatattcttaaaaatttagataatgtacttgttacatcttctaacaataattttaattttagatcactaaaaaaaatctcttaaaaaaatagatcacaattactaaagattagaatcaattatatagtacaacaaaattcttatccaacgtgaaaagccaactagtgacatcgtgtaaagacaagtagtagagtatacgtaactccccttttaaataattatattatctatatgttatgagcttaattaataattaattgttaattaatagaatcatttcatggtgaatgatattctcgtgtttacaaaagtaataatataaattattagaccccacataattaattaactacttttctttaatgacatcaatactttcggtgagtaattagtttgcagctgttattaatatttatatataaatgaagagtttaataattaacaaatctacaacattgttaacttcttttaatttgtaaaatgattaatcattctagtacatatatactaggtataataataatatcaagtggaattaattaagtgacaaattttgatgaaacaaatgaagtatataaattgtgagaaggtaaagtttaattagaagaattatatagtaatgattattgttagggtcgaatttagattaaggcagattgtgttcttgcttatgggtctcaaaattatattttttttttttgaaaatataaataatttttaatattttaaaaaaattatatgagcctaataatattttttatcattaagcccacaaattttcggggatgtatttatatattataaggccaattctaatggaacattaaaatattaaattt

SEQ ID NO: 42181 - DNA, 1304 bp, Cannabis sativa
  modified_base (220)..(222): a, c, t, g, unknown or other
aaatccaacacatttgaaaaaaaaaactaaaattaaaaacataaaagttcaagtccaaaatcatatcataaaatccataaaaataataaaatataagaaataattacataaaacattaatttttatattttataaaaacacaaaaaaaataataataaaactacattaaagtaacaagaaaacgacatcaaaacagcataaaaaataatatacaaataannnaaaatcaacaacaaaataataagaatacaacatatactctataaagtcgcaaaatctaaaatatactactcatcatgaatattcaaatctaaagtatttacctcttcaaatttatccaaaaacctgcacaaaattaataatattattagtattatacaaatctatataaattcagcactaggatatttatttacattatagattactaaacatgaattttatgttgaaaatatttgttaaaaaagttattacataatcatactaaaattaaacttaactaattaagccgaaaagaataaagtattaacacttcctattaatgcttaataaaattacaaaaatctcaaatttcttggtttggaaagactaaacagaggagaaagatttgatgatttgatttaaacacaaccacagtagcacttggataataaagaaagaactcaagaaatttgataatatttcaaaaagcttcatttatattgcaaattatactaaaacaataatctaatcgcaatgtagaaacatatgaaattagctaaacacagctaggaatggcaaacccacccgacctgacaagctattgccctgccctgattaactcagaaatttaattgggtctgacccgacctgaccggctcaggtttgacctgactgtttttttttttacaaacactcaacaatagtttcattacccaaaacaaatgatataatagaaaattataaagtttagacattttgtttattttgttcttaatttttaaataattatcaaggacataggttatttgttaatgttttattattagttattgcaaggtaaaattattttgttaatgtttggtaaaattatttaatacaaaataagataccagacatgcttttggtatttaattacaagataagttaaaatgttaaaagagattgacaaaactccttttacatatcttggttttttctttttttgatgagaaacatctcttggtattttgcttgcaaaataattagaccaatttcaagttgctttaattttaccatcaatttcttgtcgatgttgcgatatttagcacacgcaagtgtacgta

SEQ ID NO: 42182 - DNA, 1946 bp, Cannabis sativa
ttattgatcttagtttatgcaatgtgagtaagacatagcaataatttgtgattcattctcaaattgcatccataatttgcagttttgatttccttataattactcctaaaagaaaatgttaacccatactaaacttgtgatgtttgatatttttttcgttttggtttcagaattaggatttgaatattgaaattgaaaataatttcactatcgtttcaaaaaaaaaactaatttcatcaaaaaaaaaaaaaaaggtttacaagccaaactggagaaagagaaagagagtaaatacaaaatgcaatttagggaagaagaaaagactcaaatgaacatacaaaagaagtcctggaaaagtaacaccaacaactatagtctcaaactatagaatgaaatgtaaatcatgaaataatacttttctcatttataaaatcaatgggtttcatcccattcaaagtgaagtaacaaccttcttataatggaaacagggaagaaaaactaaaaggcatgcattaggaatacaagtaatttccataatgtataccttaaataaatctatacttccttcaatcattccccaggagtccaaagccatcagggggccaaacctaattacaggaagaaaatatttgaaatgttgagctgcacttggcaaaattgatacagttgtttaagtaaagaaagtgaatgcagcctacttttcatacaaattcttcaaaagtaatagttgtttaatggcacagaagattaacatgcatgctaaagtagcaaactccatttacagttgagaataagtgggaatactacacattgcagttcaaaaaatggtgacttaaatagctgtaaaaacattaccctgagaaacacttttccttgaataaggccataaggtacagggccaaaatgtcgtgaatcattggagacgtatatgttatccccttgaatccaaacatgccccttggggacctaatttatacaaaatcaaagcaaataaggaaatactaagaacaaaaatgaaatgctttagtcaaacctaatatgaaacagattttacaatgacaatagaacaaaaaaaaaagaaaggaaagaaaggtatagtaacatgtaagaaacacccagaaagttgatcttcccaccagcataagtcaaagcttataattaatttcaataccaactaagtaaaaacattagtaagattcacttcgtattatgacaaaatactatcaattttatttgataacatgatttcccaattaacaagatccttactttacaaaagaaatattccgcttttttaaataatgctagtgaatattagataaagtcattatcagtttgctacaatacaatgttcaaacttcaaacttaaaccactgtcaaaagaaataagatttagtatttctttatttttcttattgtagaaataagatttagcattgaagatgtgtagaaataagatgatataagtataacataaaatgcgtaagtttacacctagattatatttattttataccatccccaatgtatctaaaatactatgaaggtttaaaagcttctttcacttttattctgaaactgcagatatatgacacaatttagagtcaaacttagtcactcactcaagtcgctaaggccaaacaaccataggaataaattagcttatgaaactctttttcatacctataaccaattccatttgtacaatgatactgactaaaatactccattacaacacgtctacaaagttatatttttttacttcttctgagctttttttccaaagccaaactcattcccaacacctacccaaagtcaatttacaagtgaaaaaacccatataatatcacaataatgggcaaccaaatttaattttgaacaaggggaagtgagagcaaagcaagagtctttgagaagaagctaaattactcacttaccacagcagt

SEQ ID NO: 42183 - DNA, 1838 bp, Cannabis sativa
acaccacactatttatttatttttataaaaataatttattttaacaaaacaatttaaaatactacatataaaaaattttaaacttcttaataaataatttcaaacaatatttaataaaattgtgtgcatttagttttaataaataaacttttattcataataatatgaaataagacaatatatttataattttattatgtattaaaattataattttaagtaactatttattataatattaaaagaaattaagttaattgcgcgaagagcgactatattacctagttataaaataaagattttaaatattattctacaatgtatacccttgaaagggatgtactgatgcaccctctacttgtttcagcattcagaaaaaaaaaattagtctaattttttttttcatattcatgcatgttataactatttaaaatatcttacaaaattttgagaaatttggaataatttacattatagaaaataatgttcaaacagtctattttacacgcatataaaataaaatagttacgcgtgtaacacagtgattgaacgtaattttcggcgtattaaactttttcgaatgtcttaaaatttcgcaaaatgtcttaaataactataattttttacatgaccatgagaaaaaatttgattaaaaaattattttaaatactaaaacaattagagatgtatcgatgtattatttttaagggggtgcattataaaatttttcaaaaatattttgaagaatgcaaaaatatcctattgggaagtgcacgatagctttgtgtaatcggttgcatttctcaataaaatcctacattaaatgagtgtcgtaattgctataaatcatagaaaacagttttttttatttgattttattcttcttttgtcggtgagcaatgtttctatggataatagaagtgtcaattttatttatttatttatttattttttaaaagaacgacatgtttcattaactaagagcattcaggtgaggttaattagagttttagctaagaaatttgttgttgtaaattgtgaagaatagcttgattttgtaaattgaaatgtgaaacattgagtagtcgcctgcatatataatgtacatgctttgcctctttagaacacttccaaggtgaaacattgtgatttgtgaacatattactcacgtgggtgactcggtaggtataggtaagtatttgaaaattagtaaattgaaacaaatgcaatatatattatttattattttgtttaagttgcgggcccggttgggttcaacgagttataatttggccaatccatttacgaacgaatacatacgtgttactaaaattttaatccaaactagtttcgctcccactttttattgggctgttcggcctataccgggttgagttggagagaaaattacattacatacttcttttaacttgatgattttaatttttatcctttcttttaaaatctcttatgtttacttttttttttcaatcattctactaattttactcctatcacttagttttcattattctctaatcaaaattttgtcccaacttccccacaaacctacacatccatatgcaaagaacacaaatctaattcgcttgaaattatgttttagttatatgagtgtatgaggataattaaagtataatattcataaaaagaggtatatttaaattaaattttatttaagggtaaatttagttaatgtataaaaaaaaagtattttttaatttctccttgggttggatgtgttggtcggcccaacccaataaatgtgcagccctacaaggtgccattaaatcaccaaaataatgttcaaaacttctcca

SEQ ID NO: 42184 - DNA, 2790 bp, Cannabis sativa
tcccaaataaaagttaaaggggatcagacaacgaaagttttaagtttggctctaataccatgttacaatttagaatgaaagagactaaaatgcatgagcttctatctcaaaatatgagaataataacccattcatcttatatatatgttattttatttctatacattagtaatatgagattagctttaataatattattttgatttaacattatatatatcttaagtgtgataatattatttttatttataagtatcaggtttaaattattattgattacttgataaaatgttaatacaataataaatcattatatgaatttctaatagtgactaaataatttttttgaataataattatataaattcaaaattaattagtgtacaataataaataaattatatgaaattttttaagtaaaaattaaattatatttattatatgattgagtctaattattaaaagtataaattaattaaattacacttttgaataaataatgataatattcaaaagaaggaactttaaatcttttttattattataaaaagttctcaccaaaagacaaaaaagacaaagtataaagtttttgagggattaaataatcaattttttttgtaaagggactaacttatccaaaaagacgtaaaagtataggggtattatagcaaaaaagaaccttttcagtaaagccattaaccgactctcattttccgttaattaataactgaaaaaaaaaatacactctgaaatttgagaatgacccaaattcttcttccttcttcttcttcttcttcactgattaaccaaaccctaaccctaaatctaatcccaggtctccccaacgacatcggagctttgatcctctccttcatctcatactctcaccatggccgtctcaaatccatctgcaaatcgtggaagctttttctctcttcgaaggccttaatttcacttcgccatagccacggaagccgttctctttctcaccttctctgtatattctcacaagatccttccgtggcttctccttacctcttcgatcttcaaaatctcgcttggtgtcctctccctcctatgccttgtaaccctcacgtttacgggctttgtaatttcacttccgttgcgatcggtcctttcctttatgttatcggtggttcggtttttgatactcgttcgttcccgttggatcgtccgtcgccgtcttcggctgcttttaggtttgatttttgtacttggaaatgggaacggatttcgccgatgatttctccgagagggagttttgcgtgtgtggcggttccgaattcgggtaggattttggttgccggtggtggttcgcggcataagttgttcgccgctgctgggagtaggattagctctgttgaaatgtatgatgtgaagagagatgagtgggtttcgcttgatggattaccgagttttcgagcgggttgtgttggattctttgttgaagatggggaagagaatagtgagttttgggtagttggtgggtatggtgaatcgagaacgatttcggggatgtttcctgttgatgagtattgtagagatgctgtggttatggaaatgaagaatggaaatgatggaaagtggcgggagattggggatgtttggaaaattggagagaggattaggcttgggaagattgttgttgttgaagataaggatcatagatgctctggtgtttacatgcttgatgggattgacattctcaggttctcaattcaatatctgattgcttttatgtttgagattttgcttttaatttcgtttactattgtctgccatagttattgcatgaatttagtaattttgagttatttagctttagcaaatttcttagttttaacttttgggaatttcaatatgaacatttatagccttattctaattagccatattgttaattttaagtgaaacgtagaagataaacatttacatacatgaaaccgaaaatgctactgctcaatttagcatgctttaatgaaatcttgctgtttgactgattgatgtcctggtgattatatgcttcatgggattgacattctcagattcttaatttaaatatttaattgcttgctttcatgccgttgctatttgtttatggtttattcaaatatccaatatagtttccagatatttagtgaaaggaaaatacataaagaacacattaaacatctaattgcttgatggggttgatattcgtttactattgtctgtcatggttgaaaatttactacattgaatttacaaccataatggtcgttttatggtcttatagtgtagtttttggtttcttgttctaccaaacatagttattttgctaaattataatgattattttcacgaatcactttaaggaaacttggtcccaactgcataaagttagtaattttgtgcgaccagtgtaaagttatatgtgtgatgtgattgacgttctcaggtttctaattcgatatctgattgctttcatgtttgagattttgcttttagtgtggtttaatattgtttgccatggtcattgctcctgataattggtcccaactgcataaagttagtaattttgagttatttagctttagcaaatttcttagttttaactattgggaactttgctatgcacatttccagcattattgttataatacatattgttaatttaagctaaaacctggtgaaacgtagaagataaacatgtacatacatgaaactgaaaatattactactcaatttagcacgctttaatgaaatcttgtgtagtgttatttcaatagt

SEQ ID NO: 42185 - DNA, 2723 bp, Cannabis sativa
atataaggtgtatttttaagaatggttagtgcttgagatgcacacggggtagagaattagcggggagtgctccccccttccccatccctgttaagaattttaattcctatgcctgcttattccctattggggatggacgaggaatcccttaatgggggcggggataggcggggaatccccttataaaaaataaagtttataatataaatttaaatatataaaaatattaaactatataaaaattaaaatattacacattaattattattcaataaattatttctatccaaaatataacttaaaagtcataaaaatgacactaatatattaaaaaaaaaatacaaatatgaattacaaatgataaaatattattaaaaatataaaataaaatgctaaatgggttcccgttgaggcggagagtgtgatctctgtccccgtcccgtctaatattcaaagacaaaaattaattctcctcgagtctcatttctatttagatggaaaatttctactccattaggatgggttttcgcatgggccatcctaatggaagaaatgtgcatgcctagttaatgctttacaaaataaaaataaaaaaaaataaaaacacaaaaaaaaaaagggtaggatttgaagtgattggtataaatttaaaggatatgtacttgtgcctattaatcaaattggggtaaaagaaatagaaaagaagaaaaagggttagattgtgatagcgcatctctcttgaattgaaggtcatataacttagtaccgtagttttctctttcacacctctgatcagagtaatcgttccgcaaatggaagccaaaatcggaaagttcttcgaatccgtcggttccttcttcagcggcggcgatcagattccttggtgcgatcgtgacgtcatacatgtatgtgtagtgtactctttgtctcttttgtctattcacgcttaatctacactgcgtttctgtttgtttgtcggtattaccctgagcagaatgaaagtcaagagaaaaaattcataaccaaatgagaagattactgatagaatttttttgattaaagaccctaattaactttctattctgttcccttcttttattgcattttttttcctgaagaaattcccttgtttaatctgtattcttctgtagctatatgtcttcatttatcatttaactattgagtttagttgacgattttgttaggctatatatctaatatttcaaattattagcagttgtttcgatttatttgtatcgcctataggaaggaattcttttgtctcgcaaattgagaaatgtttcgcgtgttttagagtgaggtttttgtgagagcaatccatggagaaacctctttttctcttttgactggtattaacttcgtgtaagtgcatagcataatttctttggtgtaaaagtgtttggttttcagtttcatatttaagacgataatgtagctttgttggataagtagtatgtgtggtttgggcatccttcactatttgttattttaaatgcagccataggcttattcgtttagatatttaactatctagttgttctgttcttccattttttcttttttacctaacagtgtactgaactaaatcagggctgtgagagagaagttgcagaggcttctgatggtgggtcagatgaacgtaggaatgaaagcattatgcgattgtcatgggcactcgttcactctaggcaaccagaagacgtgaagcgtggggtagccatgcttgaaggtaatttatttctctctaaacaacaaatttgatatagtcaaagaattcactatttttgcatggctgctctagttttgataagattttccttgttgtccatagcttcatgggtctttcctttacatgctaatgttccaaataacatgctctcactttgcatatgcttttgtggattttggtgtgtatttcttaaaatttacaccaacgtttttgattttccttgtattggttttcaatctccatctcactcatgttggtgtgcacttgtcacacttttctatttaagaagaaagacataagaaaatttggggaaaaaaaatcatgaatgcaagtttctgtggattgttttattcatttcttattctgtgccaaacaatttcgactacatatccttttctcttcttctcttttattaacctgtttctattgattctccaaaatttgaaaatgttctgcacaatgtagttgctattctgttgtggttaactatactatattattattttttttttggcttgcgcctggttcccacatttccattgttatattatcttgaggaatgtaggaggagttcatcctgcacttgtatatctgtttatgttgtggaaaaattctgacataaatttacttctgcagcttctttgacaaatactagttcacctttggaacagagagagaagctttaccttctggctgttggatattaccgaagcagtgaatattcaaaaagtcggcagcttctggagcaatgcttagaggtttgtttatttcccatgggttccatcataaccataaaacttaaaacctactatttatagcattggtatcatattttcttcttcatgcatgttttattcaatgatatatggctctattattcatatgattatggtgttagaatagtgaagttgaatgagttaattattatttactattacaacactagtgctgttaccaacttgccatagggaat

SEQ ID NO: 42186 - DNA, 862 bp, Cannabis sativa
  modified_base (145)..(165): a, c, t, g, unknown or other
atatgtatataacataataacttcaagttggttgataaagttattattgtatagttatgagattgaggattggttttaactcacatggcttgtcaagttaatgtctctttctatattcatcatcataaataataataataataannnnnnnnnnnnnnnnnnnnntaataataataataataaggattttaattgacaagtgagaaatttctttggcaatcaagtctacctagctatagtaccaatttaattgtgttttgttgctcattctctctagcacaactagccagcattatttaagcaaagcttaatgatgatatcacattttttttaaatattgtttattgcaaattaaattattttagttatatattattggacatagatagagttattggtgtttattaaaccacatcctatatttttagacctattcatgattttattatagtaacaacaacatatttttaaaatattttaaataatgtttttaacaatattttaaataatttaggtgtacttgtttacccttttttaattttttaattagaaaagtaaaaatatttttaaacaatatattttatcaagttttattttttcaattttgaaaatgaacactaaacttttgggaaaaaaatcaatttaattttagacctgaactctgaactttgatcgagacctatatcccaatcagtgaaggacaagatttttagtgtgtggggtttatgtatcataaaaaaatatttgtgcctacattataaatttattttattttttggggacttatttactattttaatttataactatcaaattaaaaaaatatgtatttaatttgtttttaagtgtaatattttgttta

SEQ ID NO: 42187 - DNA, 1758 bp, Cannabis sativa
ttttcctaaatctctgatatgtttaacagcaaccaacgccagttgcttgttcttcgtgcgagtcaagagggcataatgaatgcaaatggtgtgccggcacaggcttctttatccttggtgataacatgctctgccaagttccttcaagaaataccacttgtgtaatatgttctggaaaggtaaactcacagtagtactattctttcatcattagtggtcgtgtattgtactgttctatattaaacatttgtccatggatatgaattttttcagggagcaatgtgctgttctgattgcaagggaacaggttttcgagcaaagtggttaggagaacctcctattcccaagtaaacaccattctttctcaacctgctgaaaggtatggagttggatcatagctgcaaaaacatcatagtaacctgattctatatctgatatcttaaagtcttgtattgtatttttccgatcaaagtttgatcgtactttgatcgatacagttacttacttgaacctaaaacttcaattgtttaactttgtaattaaagaatcaattcacaacatataggctattcattcataatcttgaattggagtatagttgctttcccttgtttaagtttttcatgccaaattttgctttcggaatgtaactatgtattctcaataaacaaaactaactgtaatgaattgtcaactttgataatgaaaatcaagggaacctttatagtagaataccatggaataagacttacaattttatactcaatgataagagagttttattttgccttctcttgcgtgtcattgtagattaataggaattacatgacaaaagggctattatatttaaaattggaacaatgtttgaaaaaaatgtcaatataagtactcttgaaaattttatcaactttggattaaagtatagtgtcacatatgaacaatcatactacagaatggaaaaatagggattaatattattagaaacccacatccatttctgatcagaaactttgaaagaactactaggagatggagggagaaattagaaagtggggggcaaattgtatacaaattagtttagggggataataattatatataattttttttttttacctacaattatatacataaatgtatataatttttttttgggagggctacaaccctctaacttaacgagtggttccgtcaattgctattcatcccgagttaacttgattgaatcttctcccgattaagagaaatgctaaagggtactgtctagcaccctaatgatgtgtaatatcgttattggtgcaatttaatgttggattttaatttgatatttattatagaaaatcgctaacaaactatagaataatactttttttcatggtgatagttactatgagtgtctctaacaatgctttattattagatttgatcatgattacagatttgaaaaaagttgtgttagtatatttttttctttcttgctgtaaaaaattgcttctctttaaggcatattcacaacactttctctttctcaaaaacatttaaaggtcaagaagaagaaaaatgcaatttgttggagctattcgaagaacagagatatcaacaaaaagaaatacaaaacctaaatgagaaattttacttaattgtgctaatgtttattttatttttcaagatgaaacaaaataaatacttatggcacgtttactacacatgatttagaatcgaaataaagtaatgtaacgaaataaatgaagaataatc

SEQ ID NO: 42188 - DNA, 2612 bp, Cannabis sativa
aagaacgaaaaaatggaggagatttcccatatcaaaatcaatgaattgtttagtctttaattctttttttttttttttttgaaataaagtttgtaaacttttattcatgcaaatcagctatcaaaatagcttgcaaatcagtagggacaagccccccacgataactacgttctggagagaaacaagcagaacgagccaaaaaattggccgccttgtttgcagaacgcttaacaaaaacacaagaagttgaaactaactcttgacaaagaaccttacaatccgccacaatggaaccaaagggggaaggcatattcaagttgctatgaagacaattaataagaacttgacaatcagactccacaacaactttagaaaaactttgaattttaatccaactcaagacttctttcagtcccacggcctcggcacaaacaggttccactcgacccggttttcgaatggccgtagcaaaaattagagtgccactgtgatctcttgcagcccatccgataccaaaaaagtttgctgaagtgaaaacagatgcatcaacattgattttaatcgtgtcttcctcaggaacactccaacgctcttccactcctctgctaacagcagaggcaacaccttgagatcgagcgttagctaataaccattgattaaaataagtagaagtcgatgacaccacaccagcagcaaccagttctttgttattccaagccaaatcatttcttgccctccaaataccccagcatatcattgcaatcttgcccaacacagcaaaggaaaaactctgcaacatatcagtaaaccagtcggcaaaagctaaaccagcagcctccttaatttcctgacctgcagatgaccaacattgctgagcaaacacacaatccaccagcaaatgtaaggtggtttcaggagaaatttgacagaaagggcaatgtaacgggacctggactcgtttctcctggagcttggcacgagttggaaggcttcctcgacaggctctccatagcatattcgaaacttttgctggaatttttaaattccaaagctttctccaaagccctgagtttgcacctccagtagcagtattttgggtatgttgtaaagctttatacgcactcttaactgtgtaatggcctgaggcttcaaagtgccaataccacgaatcattgtctaagaagtcacttagcacaatagattgcaccagatccttgtcccgagagtttaataagtcatccaagatatctatatcccactcccgctttccattaaccatcaattgatgaacttgaactccttccaaagatggatggtccgaagtaatgaatggattttcagagtgaggaagccaagcttggttaaggacatcaactttcctaccgtcagcaatgcaccaacgaccctcagattggatcaaagattgagcttcgaacaggctgcgccacacaaaactcgggttctgaccaagcgaagcagtagcaattgaaccattgggatagtattttgctttaaaaattcgtcccaccaaggaattttcattgatcaagagtctccacgcctgttttcctagcatggccagattatgatttattagacttctaaaccccatgcccccatcatgcttgtgagccaccatacgatcccaactttcccaaattatacccccagcttgacccgaactagaactccaccagtacttagcaaggattctttctatttccttgcaaattttgataggtaaaagaaaaatactcatggcataactaggaagcgcctgggccacggttttgatgagaatttcttttccccctttagaaagcaacttaacatcccaactttccgctcttttcctcactttttctttgcgaaaacccaaaacagtcgtcttattgcgccccatagtacttggcaagcctaaatacttgctatgttcatctgcttgaaccattctcgtaacccccattatcctttgtctcacagaatcatcaatattattgctgaaaaagatcgatgatttagacaagttcactttttgtcccgaggccacttcaaatttatgaagaagagccatcacccttgaagcttcttcctccgaggcttggcaataaaggtagctatcgtcagcgaataacatgtgcgagacagaaggcgcacctcgagcaatcttacacccatgtaaccatcttttttgttcaaaactttgaataagagccgataaaccttctacacagagaatgaacagataaggagataatggatctccttgtcttataccacgggtcggcataattggtccaatcctctggccaccatgcacaatctcatacttgacagaagacacagtggtcatgatcaatgctacccaattaacattgaatcccatcttcaaaagcatagcttcaagaaaagcccactcgatgcaatcatacgctttgctcatgtctaattttagggccatagaaccttttttttcctttggtctttcgtttcaagtagtgtagcacctcaaaagagaccaacacattatccgagatcaaacgtccagggatgaatgcactttggaacggagagataacatgatcaagcaaaacttttactctattagccaa

SEQ ID NO: 42189 - DNA, 1286 bp, Cannabis sativa
tattcataattcttgattctggattattgctgcttggtacatgtacccatttttagctgattgatgaataagttgtttttcaatttgataggtggattggctcactgaaaagatgcgtagcaataactttactgtctcagcgatgcatggagacatgcctcaaaaggaaagagatgcaattatgggagagttccgtgatggtacaacccgtgtcttgattacaacagatgtttgggctcgtggccttgatgttcaacaggtatttgtttttctattctgttgagaaatgttctgctattactgtgaaagcctatctaattgtcaagcaactaaccttttactgcctcgctctcttaaagatgttattgattgaaattggttggagatttgatgtattatataatgggttttaagaacaattctagctttctcttttattttgttgctcactttggaatatgtcatgagaaatgcttgtttcctttagtgtaaaaggatatttcaggactaggattgtttttacttagatgatgatgcgtgtttgtgacttgtgagggttgaacaaatatattgccagcagcgaaatactgtatttatacacaagagtctgaacagagatttgaatagcgtaaaatagaagtaaatgaaatgaaaaaacgaatcatatttggcacttgacgagtgctctgcaaagttttttggctctcatgagcttccctctattagattgtgcctgcaggaaaattaggtttccatgcaattttgtagcttttatttttcctccatagaaagttgaaataacactcttgatagaaattttaattgggtatgatatgaatattcgttttagcttgtgcttagtactgtcaattttatttggttggcagttcagccgtcttttataattgcctcagctgataattttcatttgtcttttaaatcttctaaaattgttgctaaaatatttctcttgaaactaaggttttcctaatcatgttatttatttttctttcaggtttccttggtgatcaattatgaccttcccaacaatcgagagctctacattcatcgcattggtcgttctggtcggtttggacgcaaggtatttatctagttccttaatattgtcttttgatgttggatttcttagtgtggatttttgccaaattctaggcagaagacacatctttaagtttctagcttgcatctatgatcagaataaaacaccgttgaacttcaaattaggatttgtaattggaactgatgatatcttgataagggcacaa

SEQ ID NO: 42190 - DNA, 1205 bp, Cannabis sativa
  modified_base (649)..(656): a, c, t, g, unknown or other
caaatttttatatactattaattaattagtaagaagaaggtataaataaaattgttaaagaagtcgcaatcaggcattgactacttttcctggttctataatagtcttgttgtagacttggtaaaaatgatatgtataaatacacaatatgatgagtacattattattattattattattattatatattaagtttttttgtatttgttttgtccaccaaactgtttgttttggcgtcccattcatcctcagtattgtatgctttaatttccaaatagcttcggtccgaagcaccttcaccacatttgtctcttcttttacttttcctcttttttttatatttaataaatttgccatcacaataggtcaaagaccaatgtgaaaaatattattaaacaattatcttaaatggtttcgtaagtatttactccatggatttgttaaatttgtaatacactattatgtaattgaaaattatttttacacttgaaaatagttttttttttattttgtatttttacggttgtctacatagaaactcatattgcaactaacggaacaacctaaatcgcaaataaaaatcgtataacaacccacataaaaaccacaccgaagaaactactttaaaaacccaaaccgtaaatttgannnnnnnnaattaaaaaaataatatatggaataatttttttattattattattttatttttcgatattgtagcatttaagtctatttttcatttgggatgatagtcactcttaccaatatattggtgcattttagtctatcgtccaaaacaaaaggtgatcaaggaatgggaataaagaacaaatttgattaacttgtttactagtctattttttttaagaataagaataaactaaggttgtgttacttgtgtatgtgtttggcgagagggaataaaaatataaaaatagaaatggaatgagaataagaatgaaaataggaatagtggaatgaaatttaaaatacataaaaaattattataaaaataattaatttttctcttttcattttacattgaaatgactttttccttttatttcaaaataaaattatcattctattaaagaaaatagaagataacaatgaaagagataacataatgatgaacaaaaatgacaaagacaattacagttggaaaattgttgtgctatgacaagaataatacaagaacaatgata

SEQ ID NO: 42191 - DNA, 1958 bp, Cannabis sativa
tctaaattttgggcgggttacgattaaatttttgcaacccgatatttatatggggttaataaaaatatgttgtaacccgaccaaaccgaccaacttacacctctacaaacaacatcattacatttacctaatttgtctaattttttagatgtaaatatttttattataattagagtgtgtaatataaacataccatattattcaggtgagcaaaaggcttcgttaacccttacaaagtttgaaaactcgagagtctccatcgagtccaagcacctattgaagatctgaatcttcagaattagtccatatcgactgaaaattgacttcacgacttctagcttccacctccatgggaagcttatcaatatatagattttttcgcgtaagagaatcgagaacctcgtgtctctgtaaaaagtatggatgataatgagcttacttgttatctctggcaacaaaaccttctagtcgtcaagggtgctagtgtaaagagtgtgaagagggttaggggaggcgaaactaatgccttgtccaacctctcttcaatcaagttgtccaaactacaaccattttcccacgtaaaaggatacccatgcagctcaaacgtcaacaagaccatagttatttaacacttccttgaaactatcaattagcactgtctcccacctcgcttctcctcgtgactccctaagttattcatgtcacctacaaaacaccaagtcagctcaaattgggtctttaaagcatgcaacaaaccctacgtctcccttctcaactcatgttgaggctcaccgtaaatgacattaaggcgccatggatgcactcactcaccaaaacatcaatattattcctggagaatccttgaacaacaacctcattctcattcctccacaacatagccaactcgccactatgcccatgggcatccatgcaagaacacccttcaaaccccataagaacctttactctctggacaacttcttttccacttaaagtttcacacaaaaaaatattgggcttatttgtagacattaagtccatacggaattaattattttgcccgttggttccaaagcccacgacaattttaaaataaaagattcataatgtctagtgggtttcgacaccaatacctgccattaaatcattttttgaagcctctacatcgccatggtccatctcatccactaacaacccctcctcatgcaccaagcccacgtgagtaataccaacccaacccatccccacttcctcaatccaacctgcctcttcactagattgacccaacccaatcaactcttccctttgacgtttagactttagattccaaaatggaaacacaatccgaaattcattgcttacctaaatcattgactttcactccattcccaccattattctcttcctcaaacacactactattatatctccctgaatcatggccattatctaccataactgcctttccatgattgttgccttgttgtccctcaatcaaaggaactgaattggaaatcatagtagtttcattttcatctcgccgccttccaactttcgttgaccccccaaactgggacccctaaaccaaggagccccaatattgtggaatttcttaggctgatcggccttcaactccaagtcatatggcttaacgattaagtgtgttaaagtatcaaacaatctacggcaaaagcattctgaatgtcccataatgctacatatgaaatagaaaggaaaatttgaatttatatgcatacatttggtgtatattaaatttttgaacacaaccttactaaaattaaaaaaataggcatattttatatttatatacattatactcttctctcttatcttctcttctaactttcccatccatactccctattcccgtctatattgatggtggtccgatgggagtcagatggtggctcgatactacctttttttttttttttttt

SEQ ID NO: 42192 - DNA, 677 bp, Cannabis sativa
  modified_base (637)..(643): a, c, t, g, unknown or other
gtgttgagtaccaacccactctattcaatgtggtactcagatctctatgaaagactgtgtaaaaaaagtgattggaaattcataagggatccaggctcattacttggcaatactctactacagaacatgaataaaagggttggagtaattgaacaggagtcattaatttatgctgcaaccaatataaaatttcttaatcttatatctattaattgatcgtcttatgttttttcttttttcatattttaagatgttagattattatgtgataatcaaacatgttagtaaattaagatcctagtaaaataagttctaactattttctctcttataggtgagggtgtttctatcttattttaaaaaattataataaattatttttttatgtgaaaaaataatttataattcaaaatagataattttatgcacaaaaaaaatacaaggacatatatccaaattccattttgacatgacaaattatatgcatgtttgacatcaatatttatttttatttttagaaatagaaaattttattttaaaaatgattagccacgtttgaccatatttttagagaataattgtaacaccctaactagcataagcgtattacgtaatttttaaacatactgtgcagctnnnnnnnaatcaacgaggtttatagaaatcgtgattaatta

SEQ ID NO: 42193 - DNA, 1206 bp, Cannabis sativa
tattgctgggtataaaactattgctgtattgtatccaagagacagatattttgaaatcaagaacagagctttctttcgttctctctttctctgtaaaaaccagttaaggtttcctattcctcatacatatgtaagggtatttttaccaccattaatttttaatctaatgatattaatttttttagttatgatgtgatatatcatatgggattaatatcaacaatacttaattacttatgcttttaagaacgaaaaaaaaactacctcctcaatccatgaaattaagtcgtacagagttttttttttttttttttttgaaaagtacgatttagtgcttcaatttacctcctcaatcaatgaaagttttaatgcacagtttcttttctttttttttttttttgaaaagcacaattttgtgccttaatatgttgttaccgaaaggttgtttaactaaattaatgactatatttgaaagcaacgaagcaaataagtactgatgaaagtggcaaccaatatttttgtttactattttttagaaattgtacaagctaattaacaaagaaaaataaaagatatcaaattcgatacagccataattaaaaagtgagcctggagaatttctaaagaagtgatttgataataatattatctctattttttaccattaattgttatcaaatcttgaacctaaattagaaatttgaagagaagtttcaagttggtatccatataattagatttaacaataacaataagcagtcaaggtattagcaaaaatataatatgtgattattagcctgggtaaaaaatgaggaataactattgaatataaattaagtgatcaaataagctttttcaaagaaactaatattatgtttctgaaaaaaataactattttaaaaaaaatttattattatttttttaaaaaaaaaaaaagaagccaaaaataactgtaataataatatagaatgctataatgtttcacagcacatagtaatattatgcaccaaatttatttaactaattaaaagcttaaaaaaaatgctcttacgtgagagtaaaagtaatgctctcacctaaaaattttcccatatatatataaaaagaagtaacccacaaagacaaaacgttttcttttattttattataacatctatttatatatagatgttactagctagttatgagagaaaatgcagagaaaag

SEQ ID NO: 42194 - DNA, 1213 bp, Cannabis sativa
agcaagattttttggttataatttagtgatgaaaacttgtctttttttcaatagtgtaaagaagcgacaagctgagaaccatataattacgtttgtggaagatggtcaaatcattgatgattatgatcgtgtggtggcccatcactttcgaaactttatgggaagacaaagttcaacaacaaaaagactggattatgagtgtttgaatcagagctctaaactaatttatctcaacagcttagtcagtagaggagatgttaagaatgccttgtttagatttatttgatcaaaagcctaggtccatcagtccatgtggattaagtgttggtttttttagaagtctttggaatgaaattcagggtaaaatcacttcaactgttttttttttttttaaaaaaggagggttctattctcgaagatcttaacaaaacattcattttttaatccctaagactgataccctaactactattgttgattacaggtccatagcgtgttgcaatacgctatacaaatgtatacctaaatgacttgctcaagattgtttgaggttctcccctccttagttcataatgactagggtgccttcatctcgaagtgtcttcttgctcataatgtctttgtttttcaagatcttctcaagggttatacttgaaagaacatatctactagatgccttataaagaatgaccttagcaaggcgtatgatacggttgactggttgtttttctttgatcttctcaatggtttatgtttcacaacttaattcattaattggattttggtttgtttgaagggcacttcttttaccatgatgcttaatgggagattatatggggagttcaaaggtgtgaaaagtctctgtcaaggggatcatatctcgtatttactatttgtaatgattatggactatcttaccaagttgctttgtcaagcctctagctttccatctcatgtgcaagactttgaagctagtcaacctcttctttgcaaatgatctggtgattttttgcaagggtaatttgaagtctcttcaaattgatgttattgattgtttctgtgccaccattggtttagctacaaataaatccaagtctcatatatactttggtgaaaataatagcgatagtgagctctaggtcttgaatattgttcaaatggaggaaggtacgtttcctttgtggtaccctggcgttaattttagaccaaccaa

SEQ ID NO: 42195 - DNA, 2065 bp, Cannabis sativa
atatatatgacatatatacagtgatgggtgcaactatatataagtggttgattaagctggaatctaatctgagagaatgagtacaaatatatttgtatattaattttattggtcatcatctttagatgcttattctcattatacaatatatatttaagcatgggaatttgcaaaatccaataatattaattaatattgatcagtatttaaagtttcaccgtttcagttttactgatgatcaaataaaataaaataaaaaataatgacatctacaaagtaacactgaatacaattttaattgtgtttttttatatgtatattttgagtaatttagggtttgaaaataaatttcaaaatagtaatcaaatacgtacataataaaaatatagctacacgtataattgactgttcgagttctaatttttcattgtaaattatttaaaatttttaaaaaattaaataaaatatctactataattataatttttcatatacaaaaattaaatgaaaaaatgcatccatgaacggtgagaacaaaaatgatatcctaacctattttttttttctttttttgtaaaattaataaaatttaatataaggtataattaacagctgggaaaaagtgggatagcattataattgatgagaaattaattaatcttatataattaattaagaactaataatcaaattaacatagttcttttccgcgtaaaatgactttaatgttggcccattttataattaactttatatataatatattgcatattgcctagtgtactgttcattagtttggcttttgtataactctaaaattaactaatataatattactttgataatcaataaagtgaataagaaagaactaataaacctaaaaggaaattttctatcagtgtttattatctggaattattaatacatttatcaccttttttaattaattttcacatgaaaatatgtacatattatattagccaacacttgctcaatttttttatgctataatttatatatataaatattgggaccctttaaaaatcaaacaaataagaattagtcaaattgtcaaatagtttgcatgcatgtcacactccatcattattgaaattataattaataataaccctagctagctagctagctagctagagtaaaagcaaaaagataatttataagtctaataatgtaactcattttcatattatttataggacacaatatatcatcagtgtgccttatagattgagtggggtatatctataaatatatatataaataaataataacatatataattatgcacttttaaagaggtgtttcaagatcacatatctgtttgaacatattaatagttttttaatttaattttttatatataattgtgtatgttataattatttaagatcacttgtatatttttaaaaatttgaagtaatttataataccaaaaataaaatttatttatattttattatacatgcgattatttttcttatacgtgccacgtgaggtaagtaatcatttaagtcttatttttaaaatggtaaattatttaaatttttttaaaattttataaataatcttaaataactataacatatataattcttaaaaaaattaactaaaaaattcttgatcaatatattatagttgcatgtgaaaaatataaaattaagctatatataaaataattttagtattagtaaattaagtactcatattaattagtcttatatataaattaattggttgatcagtttcattaagttaattaattacattataatactgcctctgaaatttagaagacacaattaatttcagactagctataataagattcatcagatagagacaaatgtatatacgtagttaccattggaaatatatatttctgaaattaataaaatagcagtagtgaagtgattagttaaaattaattaattaatatataattacaattatgaaatattgaaaggaagattttggttttgcgcatgcctaaacgacattcttgggaaaagcctctgacaagtgtacttgttggccactaatgact

SEQ ID NO: 42196 - DNA, 2318 bp, Cannabis sativa
tgaacccgaagaaatccgcaatgttgataccacaactcatatcaaaattcttggacaaaagaactttagatttgctttcatttattttttgtcccgaccattggcagtatttatcaagaacctcccaaagtgcaaccgcttccctcatcgtggctttagtgaaaaaaagggcatcgtccgcatacctcaaaatagaaggtccattagctgagaccttgtagcccgagatctcccctttttgttccttgtccagaattaatctagacagaacttcagagcaaaggatgaatatgaagggggataacgagtcgccttgtctcagaccacggtgaggtcgaaacgatttggtaagacctttatttatcagaacttggaaactaactatggtgatgcattccatgattaaatcacagaatttggtacgaaagccagaggcccttaagacattgctcacaaaactccattcaagcctatcataagctttagacatgtcgcattttatccccacaaacgcatgtctcccacttttccttcccatatcatgaactatctcctgggcaataacagaattttcagcaatccatctacctttgacaacagccaattagaaaggggaaatgatcttctccagaactggtctgagtctagatgtcaagatagtggctacaatcttatagcacacattacataggctaattggccggtagtcatcaaacttcctcgcattactccggttggggatcagaacaatgaatgttcagttaacttccctcgtgaatttacccgagctaaagaactcctggacgaagtccacagtttgtttccccacaatatcccagtgatttttgtaaaatttagtcgggaatccatccggaccaggcaacttcagcagaggcatagcccaaacagttctcttgatctcctctcccaaagggatatcgaccaaagcagagttctcaagatcagtgatgcatggggtgatggggagttcatagtgaataattcatcactgaaaacgggatccgaagaggactatgattcaatgaactttgatctgaagtagtccaccacaagatccctgtcctccagccaatggtttccatcctcagaaacggcccaaataaaattattttttcttctaacaatgatggaggcatggaaaaaccgggaattgcgatccccttctttgagccacaattcgcgggacttttgcttccatatggcctcttaccgagcctcaatttcatcaatttccagaagaagagcgctttcaagctaggtattttccagggacgtggtccaattttggacctcggttaacagagactccaagagatccaattttttcctacatatcccaaagcattctttgttccatttactcagtgtcgcagccgcacaacggagtttagagcatagcacgaaactatgatagccatggaatatctgttgccaagcctcatggataaccttatggcaattttcgtccatattccaagcatcgaggtactgaaaaggtgccttgatttgagcactatccatcatagtattcaacacaatagctgagttgtcagagtgacgaatagggtagttcttggagccagttttagagaattgtgccacccatcccacagagcaaataacacggtcaagcttttcacgaaccaagtggttccagttctacccattcgtccaagtatagaaagcccctaatccttcaatatccaatgccccacagtcaaacataaagtttcgaaggccacgaccttcgctttcacaaaccgacctgctcccaatcttctcctgctgattaagaatagcattcgtgtcacccataagcatccacgactcgttaacaatcgttgtcattgtctcccaaaattcatttcttttgcttcgtttgggtgggacatagatgaagcaccccatccaaggtttgaagttacggtcctcaccaaaccttacaataattttatcaatactcacaatattaatttgaacatcccacctagccttccaaaacagagccacacctctagaagcaccaacggaagagcaggtcacaccatcaaagtaaccacatccgggttaacactatgaatcatgctcgcagttggaaaattacaatagttttaataaagtccaaattaatcaatctctacaattttggtttgaataagtatatttacttatgaggagtccacatctggcgtgtattataatatctaactaaactggcgtttggttgggaggaataaaaatatagaaataggattgagaatggaaattagaataggaatgaaatagaataaaattta

SEQ ID NO: 42197 - DNA, 766 bp, Cannabis sativa
cattgctgcttactttgggatgtgcccaacacagctcatgcttaagagaatcaagtatctctcagtgatgttcatcttgtatagggagctaggcaggcctccacctactccttatgagatcgagtaatactttgatctaaagtttgcattaaagcagggcatgactggatatttttattttagcaagattggttaccaatgactgggtgacactaactgcacagccatgtcaatggttggcgggtacaacaaaaagtactttattgcacatggtcttcgtaggatcaggcaccatgactttcggtatgtgccactctttagacgttccatccctactttgcaaataagggagagagaaaatcacattctttctttatcagctgagcagagaaatattatcttgttgacaagtgtggacaatttttgaaagtatggcttgtatcctcctgatggggcctgccctggagattggcaagctcctggcttggatgatgatgactttttctcgtattacatgaaatttggagaagagagagaaggctctccaccggcacttggccagtgggggtttggtaggtgatacttctcttcatattgggcctagaggccaggtttctgggagaactacacgccacgtgcttgggtctaggagtaagggcaagcctgtcattgaggactctaatagttcctcttctgatgatgattatatttgatggttgataacatcatgtttttgttttgtattgaatgtttgcgactactttct

SEQ ID NO: 42198 - DNA, 1763 bp, Cannabis sativa
taaagtggtcatatattttcaatagtgatatgtattaatttagaaataaaatattaagtatatataagtatagaaaatcaaatttctctatatatattctcaatgtctcataatgaatgaatgcatggctatagctacaaagttacacatatttttaattcccaaattcataatttttgtaacgtatacatttgcatttagcatatatagtacacgtggaattttagtacggaattgtgtgtatactgtatatacattactaggtaaaagtagagattgtattgattttatttagttattataatgagagagagagagagagagagagagagagagagaaacgtcaagcatgacgacatctcatgaggaatgaccctcaatttttccaacacactcaaaattttgatagacctctctctctaacacacagctaattaaattaacatatacttaattattatttggttaaaaaggaagagagacctagaggctcgtcaatattgattgtcccaatatgaatataagttactttactcaatcagtcattttttaatagaacaaataataatataattaaaaccaaatactaatatgaataactatatatatactttaataattaatccacaaatagttacacaccaactctcattagttatatgcatttttcaaacattgattaattggtttataatatatatacaatttcatttttataatgcgtgattattacatattcaccaaggcaagcaaatatagctcaaagattggagagatgggataggataactatgatcttacaatatttttcacccttctcgagccacgcatgacaagaaggtatatattattatatcaactaaagtctattaatattagtattattaaagcttataagctaagctaattagcttttgattaacttaactttattttttccttttaattcttttttgggtagagatgagtggtagtattaattagacacagaaagaggagaataccacccaattggacaacaaaagtgacctaaatgtccaaatccataggccaaccgtaccttattgtttaataacatcgaggtggtcaggtttgggatcccaaccctaatttaatttctacaaattattttgggctttgtttatgctttttatatagtggggttattacatttttatatatatgtaccataatgaccctatttttttcaattaattacttaattaggaaagcccattccaaccatacttcatgcatgttcctagggtgggttacaactaataaattatgtattaattttttttcttcttcttgtttcaattgtagtgttcatatatagattattttaaattaattaagatatatgtaacatgggctaagtgctatatcattgaaaatgctacatggccaatttattagtactcctcattatccataaaattagcagagcttatctattcgtaatcaaattaagtaattttattaaattttgtattgcaatgtatgtttgtttcatataggcaataaattaaataatttcttttcaataaaagcttcaaagagaatgtgcgcagtagttacgtgtgataccaaaatccattgctaatcatatctagtttgagtaaattatctatatgtgtatatataagagacgtgagtaattaagttcatgctctcatgcaagtttcttgagtatattattttgttatatagtatatatacatgtaacttcttatttttcttactttaagaatttatattcc

SEQ ID NO: 42199 - DNA, 1378 bp, Cannabis sativa
  modified_base (1344)..(1344): a, c, t, g, unknown or other
tatatatatatatttgccctcttgacaccaatatgtgaaattaaaagggttaagaatctttgctgttttctttgtacgagtttgatgacttgaataatattctgtagagacctagttctattgaagttttttcccacctaaccaacccaattttggtgaaaattttcagcaatgaatgaaggagacaagccttattaaactaagaattctagtttgtaaacacatttgtgaacgggtggtgggtgataaatagttggtatttctccttttgtcccacatcgaaagcaaacaaatagttaaaagtggggaaggtgtatataaatgggtttaggggtgtaaagtaacatacttacctggacggggtctatgggcgatcaagaaggtccatggcctaggctggtgacctccattgcacttaggaggggtgtcagcttatggtctccccaagtgggagagccaacgtcataatttgtggtagttggggcctgcgttcgcgcggcccctttccaattattagttttaaagatttctttggccttcattcttttagctttgatttttaaataaagcaagcaattttacaataatttaaccccaaagagtggttataagtagtattattttttgtcttataataaaaacatgattcaattaagtttttcaaatataagcgttagaaaaagaagaaaaatgcatataggagtgcttaagagcaaaagagagtgggattgagtgaaaataagaatcatgagcttgggaattctgaacctaacaacttaaaagagtattttattaatcttacattataaaattagatccttgtgtgatatgaaagagaattatttagatatgtgtttgatcacataatagtatgtacttattttcctttatattgttcaaaataataaaaaatagaggaagcatataattaatgatttaaaaaggatttattgtttcattattaattaatgatgaataatcagatttgaaatttaattaggagttagaaaatattaaagcacataaacctttaaacaataataaagtgtataaactaaatgacaataataaaaattaaggtcattttgtaacacttagtttttaaattttttaatcacaaaaataaaagtaaaattattatttttgaaaaataaaaatgtgttctataactatttttgtttttcaattttaaaaacaaacaaaaaaggtattctgtaaatttcattttcatttgtcgattgggttcaacgcaagggttcgggtcaaggtccagatccatgtccggacccaattgaaaagtaaaaataattttataaaacataatttgaattttttttttttttnttttaattttaaaaataaaaaacagattaaaaaa

SEQ ID NO: 42200 - DNA, 669 bp, Cannabis sativa
ctttcgattacttctttattatgctataactataactgttgttcttgcttttgttgtaggaaatcaacaactaaaccatctgatgctgttcctactggtaatttgattgtttcttatgctgtaactatcgtttttgctttggttgacaatacatgaattgtctatagatatcaatgtcctgaacaggagtagcgaaagggttatagaatttactggatgcaacacctatttttatgggaaatggatcataattttgtcttgaatcttgaatcctaacccatatattaaaagctaaattgttaagttgattaaaaaattaatgtaacaatttgattaatatagttaaaggaagagaacattcacaaactgttgacatcacatctggtacggtgcttttagttatgtattagagcatctccaatagaagtgtaaataagtggtgaaaagttaaaatatagctcatttaataaaaagtgtgctctattggtgtgccaaaaaatgatgtaaatttggtatatagtaaattttgtgttaaatttggcacaatatttgtactactttttcaattatattttatgtcatttctattattttgttagtatatttaacaatcacattaaattatgaaacatttatattatttttttattgtcttacatattaaaataa

SEQ ID NO: 42201 - DNA, 4375 bp, Cannabis sativa
catagaaattcaaatttgtgattttattgttctttattagatcaaaattcgaaagtttgatatttttaaaattaatatttatacttaaatttgtttagtaactattcatttgtgatatctattaagaagtgttatatatatatatatatatgactgatggcagtatttatcttattattaaggtagaatagatttcattttttttcttttttgacgtagaatagatttgcaatctgattcttagaaactaatatatgtttgatgttaaaactaatagtacgacaaataaataataacaattatatgacagcatatttggctaatacaaggatttatttatttatttatttttgacagaaagatgtagattttaatttcatcctagaaaaattttccaataagttgcaagggtgaaaagtaacaactctctttaaagctgggcgagccacccttatcaaatcggtgcggctggctataccggtgtactccatgcaaactatctgttaaatatagtatatattttgacacatcaatgtatattgttagccgttcctattctctagcctaaacttaatcaatgtatatcattaatttcctaatttgtagcctaggattatgatacaatcttatgtatatattcaatgattgttaatgggaatggtaaccaaaatattctttcatggtatcagtagtatagggttttcttcttaatcactttccgctacgccctgtctgtgactttctgcccctgttcttcctcttttctaccttccttgtcgtttgttttactctagaaacaatgactcaatctaaaacttttcatccagctcttgctctctccaacattaggaatcatattcatattattctcgagatggaaaacgtgcaatactcaacatgggcggagttgttcaaggttcatgcacgttcaaacaaggttctccatcacatagacaaagagaaggccacggttgaggaggacgatgttgacatgtgggctactcttgatgccacactcttgtcgtggatttacgccacgatatctattgatcttttacacaccatccttgaacccgatgctacggcaatggaggcttggaactgtttacgccatattttccaagacaataaacattcacgtgcggtcactctggagcatgacttttcaaccaccaagatggaaaatcaccccaatgtctcgacatactgtcaatgactaaagtccttggccgatcaattgaaaaatgtcagggctccagtatctgagagtcgtttggtccttcaacttgtctctggtctctctgctccgtaccgtggtgtgggtacaaagatccgacaaagtgatcccctcccttctttttatcaagcccggtccatgcttactcttgaggaatcgggcttagctaaggaggcaactatggagtctaattctgccatggtcattactccgaatgaggatgatggctcctcttttgttccttctcattcgggacaggggagagtgccacaaaattctggccgaaaatagcaacagaatagccgaaaaaattcaggcggccgcggcggtggcaagcaaaacaaaggcggcaatggtggtcgttccggcaaggctggccctcatggacaacaacaacaacacagtcctttttgggggtggagttcgtatccttattgggggtggtcacaatgggctcctcctccctgcccgatgcctacacaatgatgggctcgcccacttgctgccaccaatgggcctggagtgttgggtccacgcccccagcagcaagcatatcaagcgttcactgctcctgtggctccttttttccatggtgaaaatagttcgtatatgcctaccaacattgcgtcagctatacacaccatgactctcaatccacccgatcctacttggtatatggacaccggtgctacatcacatatgacctcgtccaatggtaatctcttgccttattttcatttgagcaattctaattctggaattcttgtaagaaatggtcattcaattcctattcatggctatgctcatacatatttgccctctcctcatcctcccttgtcattaaaaaatgttcttcatgctcccaaataatcaaaaatctaatttctgttcaaaaattcactactgacaattctgtttcggttgtatttgatccatttggattttctatgaaagatttgcagacaatgatgtctctactgaggtgtaatagtcagggtgacctatatcctctccaatctatccataatcaagctcgtctatcaacttttgcagccatctcttcctcactttggcatgatcgattgggtcatctgggtgcttctgtgctaaatgctcttagggtcaataaaagcattgattgtactcgatactctaattctagtatttttcgttcttgtgtgtttggaaaacatattaagttgccttttctttcttctacttcgagtattgttttaccttttgatgttattcatagtgatatttggacttcacctattttaagtactgctgggcatagatattacatgttattgttggatgatttttctaattttttgtggacatttcttttgggtcccaaatccgaagtgtatgagaagtttatgatttttcgggctcatattgtcactcaatttacacgtaatattaaaactatgcaatgtgatcatgggagggaatttgacaatggaccattttgggatttttgtaagaaaaatggtatgtcattccgtctcgtgtcctcacacctctcctcaaaatgggaaggccgaacggaaaatttggtctatcaataatatcactcgtactcttctctctcatgcatcccttccccttccttttggcatcatgctttacaaatggcaacatatcttcttaatattcttcccagcaaacttttggataagaagtctcctcttgaaattctatatcaaaaagttccttcttattctcatcttcgcgtttttgggtgtctatgttatcctcttattccttccactaaaattcataaattgcaagctcaatctactccttttgtttttttttgggttttccacctaatcatcgtggttataaatgctatgatttgtcctcccgtcaaattattattagtcgccgtgtcattttttatgagaatgtctttccctttgcatcattgcattccttttcatcacatacatatgattttttggttagtggtctctcttcttatatattagatcaccttcaccaatctactgctcctcttccaacattgccaaccgaagaccacaccccttcccaggtaactccacaatcggtcttccctggccctagccaagaacgccctaccttcccaaattctccttcctctcctactacgacccacccttcaccaagttcagccattgttcctccttctactgtttctattcctaagcacactatggtcactagaagtcaccatggtatttacaaacccaaccccaaatatcaagccttacacaccacggtttccaagtcccctttgtctcgaaacccaatagctgcacttcgtgacccaaattagaaaatggtcatggatgatgaatatcatgctcttataaaaaataagacatgggttttggtgccccgacctcctggtgttaatgttattcggtctctgtggatttgtactgataaatttaaatctaacggtgagttggataggcatcaagcccgtcttgtagctgatgggaaaactcaacacgttggcattgattgtggggaaacttatagtggttgtcaaaccggaaactattcacaatgttcttagtctttctctgtccaaggcatggccaattcatcaattagatgtcaacaattccttcctccatggtgagcttcgagaaacagtatatatgcatcaaccagtggggtatcgggatcgtacccatcccgattatgtttgcctcttgtgcaagtctttgtatggacttaagcaagctccccgagcttgatataggcgcttcgctgattttttttatgtctatcggtttcactaatagtcgctgtgacaactcattgtttatttacagaaaggggtccaacatggattatattttattatatgttgatgacattattcttactgcttcgtctcatgctctccgatgctctattatggatcttcttagttttgaattttctatgaaggatcttggtccattgaattattttttgggtattgcggtgactcgacataagggtggtatgttcctttctcaacgcaaatatgctgaagaaataattgaacgtgttggaatgacctcttgtaaatcatcagccactccaattgacaccaaatccaaggttagtgctacatctagtgctccctttgct

SEQ ID NO: 42202 - DNA, 960 bp, Cannabis sativa
  modified_base (904)..(904): a, c, t, g, unknown or other
gagaaataggtcattttcagagaaaaaagaaaaaaaaaagataaaaagaaatagaaataggttgaatttgctaaataagcatttattttttggccgaataaatataagcatttattattttattgctaaaaaatagggctattttgtatgattacgtgtgtggtgtgaactgtcactaaaaattgattggtgtgacatgcggacagagatgacttcaaacgtggcaacagatgaggtcaaaaattttagaatatttacatgattaatataaataaacagacagcagataacaaaggggtccatagctcagtggtagagcatttgactgcagatcaagaggtcaccggttcgaacccggttgggcccttattgttcttttgtgcaatcaatttcattttgcatttgttctcaataaacataagatctattactgtttttgccaaaaattctgactttccttttctgatcagattacctgttcagtatttatgagatttctctcttaaagttcataatgctctctccattttggtattttttttcttttaccctttagtctacataaattccttactttatattgtacgttccttagatgtatggttgcgctttttaatgctatgactgatacgtacatttatgagttgttaatttttaataattagttttatattgtaattatctctctttggattaattttattttatttgatctgactttgtcttctattggtttgagatgagatttattctcgactttatgctacttttatttatggcagtatttaaactctgatatgctcttgattgatctttttttctttgaataaaggatgcatactttataagatatctaaacgaattacatccatcaacgtagcaggggcattagattccctgtacntacaatcagcataagaaacggaagctctagcaaggtggtgagctacacgattcgca

SEQ ID NO: 42203 - DNA, 2874 bp, Cannabis sativa
atatctttataagaaaggaaagtaagtgcaattagctagtgaaggagaaaaatgtacgacattttagataatgaatacccaaatcctcacttgttattatacaatgttctggcattttataaattgcactcaatccttttatgttttttaatctataaagacatgatattctaaagaaatagtttgtgcaaaaaatatgataacgtgggtgatgatcagtactaaatattggaagaagttggtaaaagaaaaaagaacgataaggaaaggaaaggagtgaggtagggtccacaaactctggaggttgagaatatgatctctctctcattggataatattagtgattgagtaaagagaacaagagagagagggagaaaaatgacacgtttgtctatctttcccttgtttttatttttctttcttgagaagctgaaactggtcagtttcccaatggccatttctctccctcttttgtcatttcccattctgatacaaaacctatattcttttcggttttactgaaatacccacttaaattatgatgatacaaacctcaaaatatcccatttatatatgaatatattaattgcctgtttttgagtcttatctctccaaatccaaatcagtttattgtcgtttatgatatatgtgtcactttgcatggtgtggtatggtatgctgtagatttatagcccacttgtttagtttctctctctcttttctcttttttgtctattcgtccaagtgtacgtttcattttcattttcatgtgatttaaatttgaagatatatttaaaataattcaagtcattgaaagtatcttccctttccctactttttctgcatgtacggtttccctctctcactctatatttctttaccaattttttctctcaactatggaggttttaatcatatagcatttgcttctgccactttctctttataaaaaccttagactgtcatttgtctaagacagtttctgattatgaaaatgattttttttgttttcttaaattttgtttgtgcagcatgggaaggacaatatatatagaagtggaccactaaatgcaaaggtgaaataaatggttatgaagacgtacgatgacaattctgtaaaatttgttccttgttttgagtaatagttggagctagctagccttggaggaggctttagtagtagcctttagcccatactctttcttagtcaacaaaagaaagtgaactcttcatttacttcttgtgacaaaatagcttgagtattctttcttgtgattctaactattatttgtttagttagagaagagggaaaggtaagaaaagatcaaatcaagaaaaaaaaaaaaaaagatgatggaagcattaaaccagaagtctcttgagagagttgtgtcacagaaggcattgcagatgggaaattcatttccatgtcaaatttgtgtggtgggttttctaagtggaatatgtctcacaactgtgtttcttgctgctcttacatctcttggtacttttgagcttggtgggttttcattttctgccatttcaatggggacttcaacctcagatatgatcagtgagttaaattatagtttcctcttcttttatttttcttctgataatttcttcacttcttgatcattttcctatttcttagtgttctgatttatttatttttatttaaaattgggactttgcttaaattcaaaggaaaattaagaatggattgattatgcaatgataagaattttgggttttttaaattggccattatattttatcttgatttttccccacttttcatgaagtttctttaaaatgtgtcttaattctgaagtgaacaattgaaaagcaataacaagaatgattaaaaggtgtattcaaagtaaagtcaaagctagaatcacttagttttcaaaaggaaaaaaaaaaaagttgtttagcttctctaagactaaatttaattggcatttcagttcttaataatacttaattttctatttactttcaataaaagccaatatagaaacaattaatgtgttgtacactatttccttggaaaaattaatttgaatcatcaatcccagccatacaaaataactggtttgcattaaattgactgatcattcactctacttgagtagaatttattgacattattgaaataaatgaacgaactcatcaacagactgcgattttgtaccgaaagcaacagagaaaataactgattcaaggttaagtaaagaaaaaatcaatgatgagagggtggcacaactctattcagcttggagttccttacttactactggcatttcattagaaaagaatgagcatcacctcctcaaacttggactgaatgaatctgatgtcccaaatgctcctcacttgatgaattgcaaattgaaaacacaagagaatgagcggcttgataagcgcggcgggaatgagaatttccctccttggacaagttggaagggccagttggattcatttcctgctgctgcaaagagtgatcagtttaagaattttaagcatcaggctgcatatgaaggttctcatcctccttgggtatggttctattttcgaaaccaatgactctttatgtgaaaatcctaatatttgattgggaatttggcaatttctttttttggataagttagcggcataaacaaagcaagtatgtgtttttgtactaagttcaagcattttctgctgcagataaccgggtctgatgaagataattaccctttgactagaaaagtgcaaagagacatatggcttcatcagcatcctttaaactgcagagatcctagtgtgagatttcttgtagctgattgggaaagagaacccggcttcggtattggagctcagctagct

SEQ ID NO: 42204 - DNA, 787 bp, Cannabis sativa
aaaaaaataaaaaaaaaaattagttgatcatttaacaaaattagcaaaaatatttttcatataagtaagcaaatgtcaatattcttgaataataaaaccaaacatgcacaagctctccagttcgacaacgacatggcaatggcatagaatattatattaataagaaagaaagggtttaatcgtgattgagggagtaactgtcctttgattaattccatagcttctccacaaaattagtttttctcattcatacggcaacgtcttcttctgtgaggggttcaagagcagtcgtctgagagtagttcggttcggctcaatgacgttcttcatttcagatttttgttttcatttattaatttactattattagtttaattccaattaatgtttttatagggttagaattataaggagttcattccttaattaattttaatgttgtgattgtgtttatgtgttgaaactaatttagtttttcccattagtcttgtcttttgacgtgattctttagtctttttcttttagttttttcccattagtcttgtcttttgacataattttttagtcttttccttttagttttttctggttcgagtcttgtattttggcatgggttgtgtagctcagaatcatcatagtgctatggtagaagcattcaagaaagagaacattggatgtgttcaatcagaaattgctgagataataggcattaaagaagcattaagttggattgcaactcattcgtgggatagagtcatgttggaaacagatagcttggtgtgtgtcc

SEQ ID NO: 42205 - DNA, 994 bp, Cannabis sativa
  modified_base (723)..(725): a, c, t, g, unknown or other
tatatatatatgattgtaatcgtgagcaatgctataaataatgaataagtcttaacaaaatttgtaacttcttgtaaaatttctatgctgtcatacagtaaaatttctttaaatagcttttgtactgtcttccctttggtgcagctatatgggtaactttccttacaaacgaagtgatataatattttgggaaacaagtcaatgattttgttttggatcttaaattaatgtgaattgttatagaagtcacactttgtttctatcaaatgttatcatttcaacattacaggtcaacgtaataaagcaagtactaatcaagaaagtttaactagatgctgacctgaacttaattgattcgcccatacacactataatcaactaatgctgtttaacttttactactagaaaggcttgtagacattaataatgattgtcacgcacttaaattatatacaatgatattgagtaaattttaactacataattaaaaaaaaagtaatatgatccttatttataattatacatggtaaaactaatatacatagttatatgttaaaagtgtaatttctacgtcttcctatcattatttaggataaatattatttaagattctatattttgtaaaagttattaattgaactttttgttttgttaaatgacaaagtaaattctttattttttaaaattttactaatagaactctaaactgattttttatcaaannnaaatttaataataatctgatctatgacaaagcttattagattttctttatctgtttgtgttaaaaattatcttatagttagttataataaaaaataaaattattgaaaaaatgagtttaagatcttatttgtacaatttttaaaaaatacattaaaaaatacatgatctatttaattatttcacaaaaaagaaaattaaattagtaactttctcaaaacacatgatctatttatcccattatttctgcacaaaatcattcataactaat

SEQ ID NO: 42206 - DNA, 857 bp, Cannabis sativa
aaaaaaaaaaaagaagaagaaaatctaatatatatgcaaaataaagaaattccactagtgcgagtgggagaacttttatctttcaaatgttcatgtagagtagaataagaattagttctccaaccacatggcatccaattattggcctgtgaactttagaataaaacaataataacagtgacacatgttttttttttttttttttgaattaagcatttatatattacaatgcataacttgggactcgaacccaagacttccaacacacgcacacctttctatggccacttgagctagccctagctcaagtggttataacagtgacaaatgctagtaaaaggtgttactagtactaccttattcagtattatagtagtgtaattaagtctcaagtttcatataacttaagagaataatttttagaaaatatattgttaaccaatcgtaaggtaccacttatagaaggtattgtgaaccagtggtgtctaatagtaatacttattttaattcaataaaaattatagagaatcactaactaattatagaacgtcgtctcatagtagtactacgtactttgataccctataatttaaagtagtagcttttatgaaagagtattgatatgggacacaaatttgcctaacactactatgatccttataattaattaacagttctttataatatttatataacaaaaatatatgagactcaatactaaattgcatcaataataatattacacatcacaaagatgctaggcactatgaatacccttagagcattctattaggcaccagtggtgcctagcaccttctcgacatgtcgcgttgcgattggttagcgatattccctaa

SEQ ID NO: 42207 - DNA, 763 bp, Cannabis sativa
gattaactgtactaacggttacaactaacatgaacaaatcaataatggtaattcattcaaacttaccggaaacgagaggggtctcccggttgtgttggttatgtatttagctccgagattgcaggcttcttcgcagtagtcggaaaaaactgctgggacatttatctcctttattagctcctacaatatgtaatagagtgaggtgttgtatggtaagatgtacgagatttcatctcaaaattaattgacaataagaggagtagctcatgtatcttatatattatcagagtgaaactttctaacaaagcaaacaaaaaacaagcaaaatggttaagagacgagatggacgacatacaattgttggtaaccaacttgaatatgcagcaatcccagcatttggagcaatgatcaaatgaggaaatgaatcctgaacacagtaaaaaatgtcaaaaactaataaaagaatatccgaatttctacgagtctctaaacatggcggtgtacaacctttactatatctttgtagcaatcgtgataaaaccctcttcgaaggttaatagatactgtctgttcaccccagctaacatcctcagttgatttgcaaatgcagtctgcgctaatgcaacgtggatatttccgaagagtgaaactcttaccatccctgttgatcttgagacaaaaaatatagaggaactacattattaccaaaaaagatcataatgggaatggtgttgataaggaatgtaaggaattgtgctctctt

SEQ ID NO: 42208 - DNA, 2082 bp, Cannabis sativa
atgacttgtctgaaagaagccattcttttgctcccatcaaatcagggagcacaattgcgccagatttcctccattcttcggcatcagttgtcttaaatcgatccaacaataatgcatgcattcctacactctttgctggcacataatctttccgcatactgtcaccgatatgcagtacttgttctggaggaagatttccagccctctcaagggcaatttcgtaaatccttggatccggtttctcaacgccttcgagaccagaaaatacaccaaagtcccagtcagatccctgcacgagcattacacgttcagtatcatagaaaaacatagagagaagggtaatctaatcagatgcaacaaagcctgagaaatgaaaagttccgaaacagaagtttaaataaataaacgttgaaataagaataagccattgtgtttcatcaaactatatattccctacagcgttacttaaacaaacacacatgaacatgtatttgtagttacatgcctatcaagatgaagtgaaatcacacccacatctataaatatacaactatactcgctcttcttttttgagataaacaactatactaactcttgtaagtggaaaaaataataaaaaatttggagatcactgctcacctcattcaggcccaatgctggaagaatcacttctttataccggtattctgcattgctaataatgccaacctgaagaccctgctcacggacccatcttaaaaatggttgggagtctggaaagatggtgtaaggggcggaagaaccaaatgaagcatatatgcgtctaaacaccttttcaaatgtctcttcatcgtagtcataaccggcctaacagaaaaaataagaatgacagtactgtaaattggggacacagaggacacagaaaatacctgccttccacctttttgaagctattatagaggaatgtcactacattataaaatgacaaacagactggaaataagctatgcccaagaagttactcgcttaaccaagtcttaccctgataaatgagtctcttacacaagttttccaccacacaatgttgggcattttggcagcatatccaaaacatggatacttttgagccatgtctttatatgcatgtttgaagccctcatgtacccgtttatagtcagggcaaggcagaccaacagatttggctgccatgcaatagtagtctcctaactctcccttgtaagccatcaatgtaccagttacatccaccgtaatacatcgtaattttgacaaaattgacattatagaattactgtaataagttttctataagtatgataattgatgagactatctaactcttgttatgaagaaatggtcaaatcataaagtgacacactttaattctaacaacctccttcaacagctccaatgatatctgcatttgaacaatgaaattttagcaattgctcaactaagtgctcaaataaggtttactatagtaaaatgattttctatcccttgcttccctaagcttcccattgcattttaagtcagaatatgtacaaaatgggattctgtgatgaacattgaaatgccatatacatcactcccaacctgcttttatttacaaaaacaatctaccaacttggtataaccactgaaccacatacctctgatatttttgttcttaaaaatgaaatggaggatggacattttctcaaacaacttcatccgaaaaaaaaaaaacaaataataaaggcaaagataaggctagaagaaaaagacgggaaaaatgagaaattattttcttatgtttggtaactaggcaaatttggaaacgaaaattcctcactaaaggcaaaccatattgagaggtcccaacacaaaagtactaactaatcacaatttctttaatcatgcatgattgtgagcatagttttagcatcttctggactcttttgacttctccttttaattaggaaccaaactaaagaaacaggaaatgtaaatcttactgaagcaaacagaaaactccctgacaatcagtcaaaaagagttttacattaactgaagcactcaatcaaacacttgtaaggcaatttt

SEQ ID NO: 42209 - DNA, 1777 bp, Cannabis sativa
attttctagttgtttcttgcttattgaataaaacaagaatgttcaaagtttgaactgttcaaagtttgagtcttttttaactgtgtagatgaatagagaagagagcaatgtgaataagtagagacaaccttacttaccttcctttttttctctgtggtcctctgtgtatgaatagcttttgagtttttgttatgtcatatagtttggcaatatctcttttcttctttttatcatgatttgttttcatttcatttcaccccacgcgtgaatatataatttcaattcaaatataaaaacaccccaacactctaaaaatcaacccaattcaattcagcttcatatttcatattttttgaggagttttcttcttcctcatcctcacttctttttccaacttaataattacatatcttcttttgatatgagatgagaaaaaagccttgaaaaatagtgtcctaatatagccaaaggcatttcactatttaatggttccaaacctcatttcccaatgaaaaaacagtgctaaatctttagtgttagttactaacatttaattgttgtttcatcattgtaaatagttatataaatacaatgaacattgatatggttcaccaatagtccttaacatcttttatatagttgaagtcttacgattagttagcgatatttctttaaaattatttttttaagttatatgagatccgatacttaattatactggtaacaaatataacacagagaagagtgctaagtactagtggtgccttttaacaattctcaaatataatagcagtgctaattattactttttggttaatttttacgctcaaacattcttgtaaatttttgaaatatttcgaataaatttttttatattttagcgtgttcaaaaaactttaaatctattttgttaatgtaaactatttgaattttttaaaaaatttacacagataatattgtatctataaaagtgaccgtcatgccaaaaaaaattaaaaggaatattccaaaatatgtttttgaacacaaaaattaactcaaaaattataatagaagattcacactaatggaatacactacttagtcaataatacctgctgcccaaaagaaaagaaaatataaatttgagaaaaatgtttgtctttgtctctcttatatatttatagaattaattttgatggtaaaaaaaattaaattaaaattcccaattctcaattcccaatttcgagagtaagaaaaccaacaaaacaggaatgtacagcaggaagttagacaagaaatgaagcaaaaatagtacacatgtgagggaacagagttaggagagtggttgagaacagctaataatatcacatacatacatacatacatattggcaacaaattttcaaaatcttttttttttttattatttcttttcttaattgtatattaattttttgtttctttccccttacttgcctagaagcaagggcagcccagaaagtaggatcaataggaaacttcagaggagccctttcatgttttttattttctaaaaaaaattaaaaaaagaaaaatcttttcttttttcttttacttttaatgattcagaagcctgatatagaaaacagcaatctgaatggtctataataataataataataatatggtatcaaagtcttctcagctagaatccaaaatcaaaatcaaggtgtcaaaaaatgagcaactatttttattttattttgagtaattagttaagattaattctcggttatatataaatatttaagtttaat

SEQ ID NO: 42210 - DNA, 877 bp, Cannabis sativa
ctgtgtcacattaattgtcataattttttgataattaattcaaaaaatcaagaaatgaattattcggtgaattgaaatctgatcatatagaagatttatctttatcacacatgttagttttaactcatcctagtcacatgccacatgtccctagcttattggtttcaaggtacctcactattgcctacatggacaactttgattagttagttaagttaggttttttttttcccaaaagatatgtgctccagaggagttgggctgagaaaaaagcacatcaatgatgggatctgtggatgtactctggtagacaggcatgtgctctggaggagttggcctgagaaaagagcaataactctcgaagtaaagtggacggatggaagacttttttaagtgagttataaggtgtggtcctttgtttgagggggaggattgttggatgtgcaacaaaagtcccacaatagctagaaataggaaagatcatgaatatataaggatgtacaatatctttattagtataagatcttttacggtgccaaaaaataaattcacgagggcttaagcccaaatcaaaaatatcatatcaatatggagatagatggtatccgacattaaaaaaaagcgatattagagctcaagttagaacaatatcaatctcaagggtgtgataatggaaagcaggatcttggaaaattttccaagaagatgacttctgtcaaggtagacattgagaaatttgtttatggagagagaagatgagagctcatgttgaaaatttcagattggaaaaagctttatcaaaagatgcaaccaagctagcaagtatggaacaaaaagattggggcatctctctcaaaaaggccagtacatcattctt

SEQ ID NO: 42211 - DNA, 1063 bp, Cannabis sativa
  modified_base (875)..(880): a, c, t, g, unknown or other
aaaatagtgtgttatatatggagctacgttagagcagtaaggagtagcaaaatggagaaattcagtctccttagagcagagaataacaaaaagaagaaggtgatttgaaaggagagagtgtaagaaaaaaagtggaatttgacttatatgaaatcacatagtatttttgtaaattttaatagataaattggtataaatgtaaattataccacattacagtataaaagttagatttgaacaaaaattagtatattgtgtaaaatttcttttgatttttgtcattagctttttttttttttttttttttggctgtatagattgttgctatttctttaatttaatttagattatttaactaattgagtaacttatcttgtctttaatgaactgtcgttccttcaaaaaaaaaaaaaaaaacttatcttgtctagtgattatataataaattatttgttactatgtttttttttttccatatattaaaaatttcatttcataatatataatcttggttaaagctgttattaataatgtttgcaaatttaataccatataaaaaattatatatatactattttctttattgttaattaattttgatcaaaaccctatatttcttagttcttacttcttagcatatatctcactagtactacatcccatattaatttgttatatcatatataaaatttaatattaaattacactaataattactttttcttggaagtgacttatttagaaattctccatataaatttatagcaagtacatttaaaacaaacaaacattaatatttaaagaactgtgttaaagaatacttaaactatcaagtattacaaaaaaaatgacatactattattattattattatnnnnnntattattattattatattttaatgttaaatctcatatattttaatttaataaataatatactattataatatgacatagtaatactccgcatactaaattgttattaatacatttagggttcgtttggaacgttgtattaggtcgtattgtattatattgaattgtattgtattgtattatat

SEQ ID NO: 42212 - DNA, 1371 bp, Cannabis sativa
atgtataaatattttttaatgataaataagccctcacaaagtaaaaattctgggtccgtcactatttagaattacccttaatttttcaaaaaattctaaataatttatcgtattaaaaatgaggttccaatatttgttgcatgtatgactttttttctatatactcgtggtaagtaattttttagactttatttttgacatattaaactattgaaattttttgaaaatttacaggtaattttaaaaaactataatactatatacaatcatgaaaaaaaaaaataaactagttagaaagctcttctgaatgccgaaacaattaaatgatatattttgaaacaatatttgaagagggtgtactgtaaatttttccttaaaaataatagatttgaatatttttttaatagaaaatcaagcttcattaagcatcaaattcagttagcaaaattgataacaactcagttggaatattcgtaaattgaaactacaatcaagataagaataagaagctctaccaaaaatataagctagcacattcacatatcgtttaacaaataaaaataagacaaaaaataattcaacaagcaaagttttacattctttaatttaatcaccaaataaaaaaaaatcatgctaataaggctctgtaacgcttgcaccacaactaacaatcagtctcaaagaagaatctctgccacgaactcgaactccatttgatccagcttagagcttcacgaaagctcattgcttcaacgacttcaacacccactttcccataaaataatttggtgtaccattcaacaaacaaccctttatcatcatgggcaaccatacttagcttgaaaccattaagatctttaaaaagagcttcatttacattaatcttgacgttattaaataatagtaaacaatctccaaagcaccaatagttttgtggttctaaactttttcatttcgggcaccctagattacccaatagaggactgcaatgatatattgtcgttcattttggagctgcgaaaaacacacctcaaaccatctcaaaaaaccaacagcaaatggcacaccggtaccaataccaactcgattccaacatatttgagcagatggacaagaaacgagacaatgcaaaatatttcagcctcttcgtgacaaataagacacttaagattaatcaccacatgcttggtatgaagttgtaccattgtatgaagacaactcatacatgtctgcctaattaagtctttaatcttagggggagcttttatttattttatgtataaaagaataattttttttaaaaaaatttatataatagattaaaaatttataaaaaaaatacaaaattgtgtcaacatggaaaagattctt

SEQ ID NO: 42213 - DNA, 2182 bp, Cannabis sativa
  modified_base (1936)..(1941): a, c, t, g, unknown or other
tataccacatcagcttgttggagcacctcatccatggaagatgctcttttccaagtcacaggctgttcaccatttgcttttaagaattcaccataagctgcaatggattaaaatacaagtatgagaaacaattacaataagatctttatttcacttttttaaaagaacaaataaactgagacatgcctgtgacaaatttctctagccgcgtggattgatacagatcaaagtaaattaggttcatcttgaaaccttcaacctgttaagcctcacagttgagaatcatctagctcacaaattagaaataactaaaaaaaactttttaacggattggttatgaaaaaagtagtaccatcattcttgcatatgcagatccaatacgaccagctccaataacaccaacagtctgtcctttgagcaaattcccaacatacctatcacatttttatgctcatcgaatttagcatatcattttcttttttaagagaaaattaagaatatcatagttgtttcttttttccaaaataagtggaaagatttgagccttacagattaggaagccacccatcatataagcctgctctcatgaactcatctgcttccactattcttctagcagcagctaaagaaagcgatgctgctagctctgctgtagtttcagtaagcactccctagcatagatatacatctccataaaacacatgcataacatgggaaatagaagaggtgaaaaaggtactactagaacataacatgtttgattaaaggttaaaactcacaggagtgttcccaacggcaactccatacttgttagcagcattaacatcgacattgttgtaaccaacagccatgttactgaaagccttgcctcctgctttgctcagtgccgaaaacaaagtctcaccccaatcttcagtcaactataaaaggaagagaaaaacaaaaaatctagttacaaaagagggagagtaacactaatatatcattataatcaccaataagtaaactcacctgtccaataactccatcacacttatcaccaataagggcaatgatatcttcaacagacagaattgttttcttctgggtacaaatctgatttgaaaaacaaacaataatttcatcaaacacccaatactcaaaaaaaacatagctgagtatgaagtatgaagaatttgtaatattattacttcaactcgacagtcttgttcgactaaaagattgatccagcgagttccaggcatgggtttggtgctgacaactctgtatttcccatttgggttccacacctcaatcgaaactggttttgccattgaagcttctatgctagctagctagctcactcagttgatattgttgatatgtaagactgtcgggcaactcagaaataatgtcccatttagttatcgggtgaggtgcatgccactgtaacacgtagtcttcatttacctgattcgctaaccacgtggaatgttgacttttaaatgcattgaccagttcttgattggctgatggagtgtactatattattgtagagcttagttgattggattcggatggtgacatgatgttgtggtggaaaaaaagatagtgtgttgcttaggtgagaggccaagaaagcttcatggtttgaagttcttggaccttacataatgtttaaggataatgatgacatggcagcattttatagatgacacgtaatttgtgggccccatgaggtcttgtttagtttggagtgtttgggacaaaagacaaggctcctcatcttcaaattgagatgttatagacaaaaatttgtgtactgtaacattctgagtaaggtagatttctctataaggaacgatgtcctccgagtaagaaccaatttttcactcaagagaatagttaaaaatgcactatttcatttatggaggttattttattttattttattttnnnnnnttttaaaaaaaaaaagaaaaaatcgaaacggattttatggagttttcataaaaaattattactttatttattgttattattacatttttattatcctatctttgtttatttttttacattattacaaaattaaatttttaaaaataaaaaatgcttaggtagagtcacaaaacatacatatatatatataaatatatatatttttgaaaataagacgttgcatagataaagaagcattaga

SEQ ID NO: 42214 - DNA, 1506 bp, Cannabis sativa
aaaccaattggcaatgagtggagtaacccatgttcttatatatggctcaatattctattcttacatttgatccatgtgagacaatattctccaatactctactatcctctcacagtgatcgtcgaaggtcgtcaccagtgtcttgtatagcaacctctcctcctcctcagttcacgaagtccaacagctacaacctaagtatttaaatacctgttgatctggtcaacccgaacccatgaacctattgacacgaaaacccactagctcgatgaacctaatcattttacgggcaggcacaagtttttttttccaacttgaaacctgatcaaccctcttgatgttcaatcctaatgagagatatccaaacttgcaagcaaagctttaagccattttcaatgacagtcgccatgtaacaatataggaactcaacaaaagattaggaaactgtgtattgtttctttgtcttgcaggaaattgtgaaagaaggaataaatactatccaatcagtaagggaccctcgagtcaaggggcaagcagcccaatcatatattgatttatattggccttcatggaagtattgaagcaagtgtcaaattttgacatccatctaaaattaatacatctatatcttccaatcataaatctttttagattaggaagtgttgaacttgaaagttccaaatctttcgatatgcaattataaaataaatctaagtacataggaaatggctccaactaagaacattctctgaatactaaatgttgtaaaggagtgaatgcaatttacaatatgtgagttcaagtcaagtcaaaaccggagagtgaagatagaagtttaggaaatctagaataatttaataacttggaatccaacaagcttagtgctgtagttaagtgatagtgtattaataattggcaatggcatcattatgactgaagaagcaagctctcaacatagagacagagaaagctcttttatctcaagtttccttagctacaacattcagactataaatagaaagtaaacactcatttatggggtagagtgagaaaaagagaaaaagaaaaaaacccaccttggcaatggcaccttctctattccatcaaagcttacaatcaaaagagtttgaatggaggataattccccaaatggtataaatggaataggtataataaagcctttgcatttcttaacaatttctctgcctactttttccaagctccattaataacaaatggatatcaattaagattaatcttttaacaaatgagatttcaaatcaaaaacaacaactcaaaattggtatttgaatacttggaaaaacctcattcatattgaaattagaataattacagtcacaagacaatccaaacattgtcacattcgaatattcaaaacctaacactaaaaagatttattcatcagcccccaaaaccgtatagagtacggccttgtctcttcaaagcatagacgacgtccatggcggtaacagtcttccggcgagc

SEQ ID NO: 42215 - DNA, 1697 bp, Cannabis sativa
aggtataatacaaactatattttttatataaatttaccattatatatatatatattattgttagttatataagtataacagtagtattaaggataaccaatatatttatgtatctttttcttactaagttattgactactaaactaattgtacttatcattattctcttttctaggagttttaatggaaccatttttatttatatataatattttgtaaatatttttattaattattcatatatgttttttagggagctacatattatacaagtcttcattgtgtgccaccacatacaaagtccacagcaatgtttgtttcacaactaatcatacacacattgggagatgttatatctttcccccttgttggtcacattctggtttgttataataattttactaataattaaacacatatatattatataatttatagtcataataatgataataattttattttattttattatataggattggacacataattggagaacaacttgtatcatattaacttctgttctctttctagcagctatatgttggactattggtaagtctatacatattatattctttttattatacttattataataaattataattttactaattaattgtaatataataaattctcatatatatttttattttattaaattgtaggtatttttgtgagtaaagagaacataactgaggaaagcatggaaagtacaagtgaaggacaaataacatcatcttcatcctcagtttctttagttaatttatgagttattattattattattaagttttttttacaaatatttttagcgtactgtattattagtttcaatttttcgtttgactatttgttttttcataaaataactattttttttaaagaaaacttcaataaataattaatgattcatgtctcaaaatagtttcttacacaatatatgtttcttacatagtatacaaaaatacaaaaaaaaatatttaccaaacaagtttctcttttatcctaaatgtacacacaagtttttctttatagtaaaaataaagaccaagtgaaatgatacaattaatagagatattctttaagttagtgttaaactccaaattctgttcgagacagtgcgaatttttaactaaatcaaaattctattttctcaatcctttccaatttactaataagcccctaaaatagtgtaacatgaaactattgcaagtaattatcacatataaattatgtttaagtaactctaagagccgaaataacaatattaaagcaaataatgagtaaccatattatggctacaaactaattaaactaattagtttaaaaatttattaaaaatgagataaagaaaaaaaaagtacttatcaattggagtttcaactcttcattagagtttttcagaaagttaataatatgctctcatttccaaattttcattaactaacataaatataacttaacaaagcattacataataaaagtcgacaaatatatttttgaatgaatatgtataataaataaaaattaaaaaccataatattaaagaaagtaaaaattatatgacaccaacttatttattttataaaactaagaatgagagaattaaaattatatttattttatcttaagttttaaggatattaatacaattttggtttaatttaggctgaataaagattatagat

SEQ ID NO: 42216 - DNA, 1507 bp, Cannabis sativa
gagcaagaataagttgcaggtcattgttggcacggcatgtcttcattcagctctctcttttcatttaacttctaatttactccttcaattattaagctgaatttaatttgcaggtagcttttggcatgggaatcaataagccagatggttcgtattttaaaaacgaattagtttgcttaagtttacattatgtagatatcattgtgatacgcaatagtttttgtcacgcttccatcttgcatgatactttttatgattttaaatttgtttacttggtctaataatacaactagaacttaaatttattagtaattcttttttttatcctttcctgttctcacttacagtattttccttcagttttgaatttgtatttgactattcgtgtacatctatgcagttgaattcccttaatttttctggtgttttaatactcagtaattgcttgtagtcaggtttgtcatccatcacagcttgagtaaatcaatggaaacatactaccaggttttttcacttttccgataacagttaattcctaacaaacagcacgttttggtcctataaccaacttattgcaggaaagtggtcgagctggacgagatgggctcccttctcaatgcctactttacttcaggccgggggatgttcccaggcaggtaaatgtttctttgtattattattattattttgtgggaataatttatttgaatatcttgtcagctttgatcatggtccttacttttcttggcagagttcgatggttttttatgaaaattcaggattgcagaatctttatgacatagtacgatattgtcaggtaatgctaatgtcttttacatcaagaaatgaaaactttatcttgcatctaatggtaacgaatttagactgttaagacattttttatatttgagtggaagaataatcagacctttgataagtaaaacactacatgaaatcaatgtatgttttttttgctaggttctttgacatatttaagatctctatcaatgcaacaatcatccctacaaatcgacttgatgtcctaaatgcgatttttctttctatttattcttgtttcgagcatgtatttgattagtcatgtcatctgcaaacgaaagatatatattttaattcttatttttcggagaaaaaaagttagtcaatgctctgaaatcactctacttttgttatgtatcgcagacaagaagacaatgccgtcgaagttccttttttcgacattttgctgagccacttcaggactgtaatggtactaattgttgtaaataacaaaatagataagcacaaatgtcacaaatctgatcgtatcattaatacaaattgttttgtctttcaggtatgtgtgacaactgtgcattctcaagtgagattagaacagtggatgtctctcgtacggttttcttcaaatcttatttaattccagttcaatcagtcagttacaatgcatagccaaggtagctatagaatctgtatatccttaaactatgtg

SEQ ID NO: 42217 - DNA, 543 bp, Cannabis sativa
gggacaaagtattaaatcaattcaaaaacatgaaattgttttataaaattttgttttcttgggaagtaaacgttgcgcttatgaaggttggaaaataagtccaacgacttcaatttttcttactccttccttttcttaccaatcaagcaaaaccagctactcatctactagtttacatcatcaacacacaaaaattctcaattaatatttaataataacaacaattatagttcaaaatttaattgactctgtaatttcaaatagtaaattaatttcaaatagtaatttcaaattactattaaagtcaagctattactctaattataatcaatttttattttttaacgaaaaataaaatattattaaccaataaactctgtcaccaaaacaaaatagtaaattaattgagacatccttcaaactaaaaaaaatcaagaaataacatagatgctcttgcgaaattatgagttaccatattaactgactgtttaacaaaaaaaacataaatattttgtaattcaaattggatacttttacattctt

SEQ ID NO: 42218 - DNA, 991 bp, Cannabis sativa
tttttatatataaaaaattaattttatatcacaattttttggaaaaaaataaaattagcctaatttaagtataatcacatttttttttaataagaagaacacatatcaaaagcatacatatgtaagttatacggtggttttcttgtcttagtgtcgcttttatagcttttagccttttactgttttattcattttttttttcttgtataaactttttgtcctgcatttgttgaaatcggtctttggactttagaggatatatttgtaatttcatttgtaaaatccatcattttgttattgagctattttcatttcctttgctgtttgttgaaatgggtttggggttatatttgtaaaaccgaaccctctcatctttcctctcactcattctgctcattctgcatttcttcatagagactctcagtagggtttgttcctgatcaccgtcatcaggtatattctagttctccattagtatttcttattcccccaaacttcttttgcattttatattgtttatattacatattatttatgtttggatacaaagaaattaaaaacccatgcattttattgatgaaaacccatttcatttcattgagagagccgatgggttttgtttgcaatttggatgctcacactgttaactctgaaattatttctctattaaccttattgattttattttagaacaatgaaaggttatttgtgaaattaattttgtttccctctgtgtattttatatatatataaattacagaaatatggttattattgggagggaggataatatacaatttgattggaggaccaggaacattttacctacagtaaaacatcaaggagatgatctgagtaagtaatttttctttttttttttttttttattactaaattattattttaatttttttacattatatataggaacataaaattggaaaagtatttatgttgttattaggttggattaataatgaatcagaatatg

SEQ ID NO: 42219 - DNA, 2140 bp, Cannabis sativa
catccctaggcctcattctctctaactggctctatcaatggtcgggtcggtgacaaagctattggtatctgtaatgcaggtccatatattatatagattttagtaagttagtcttcaaaatttcttccttttttaaaatttggttcatatatataagttatgataaattaattattaaatttgagtttattttgtaaattggtggctaaaattttaatttattgtcaactaatttggtcttcgcccttattgcaaggaattgaaaggagaaaaatttagttattgcttgcttgagcttcccatgttctaatcctcattttcgcaagttacgtgatattgtgggcagtcccgtttgtatgtgatagagcttgaaagtttgttaccttccaaatagatgctacgaaatacttgttgaaccttttcacccgacgaagccctttttcatgtcaaattatgatgccttttggggatcgaactcctccttttttcaatagacgctttaggactggtcctgaattaaaatagaccttagaaagaaaaaattgaacccttattataagaataaatagtatttttaaaaattatatatatttttaaaatatattattttatttgagctccaaagatgagtggaccctaagtgcaggcttagctcgccttattttagggtcgactctggacgcttcacaagatcaacagaaaaggccaaatttgtgacttacaacattgctcgtcatactcttaaattggaaagagtggagtgttaaacctgttttatattccacccttctattagatgaatacaaggaaattttcggctaaatattttttgtcttcttgatatttttttttcttttttctttcttgttatgtgtttatggtcttttattgttttgttttgttattatatgtgctcttgttggaactcttgttctaatagtactatttctaggcttggcttggactcatgttgttcttgttgttatgtttaatgaagtttcttgttctcctcttggttcttgagtggataatccttaaaatgagaaatcctaaaggagagtgaatctattatagattcacaaagttatttttttccttgtcaataattacttttcaataaggtaacacatattaatggtgtctatattaccacattcaaaattattagtaattttttatgttcattattaaatttaaatatgcaaaacttaatatttagtcgcattcatatgacactttgtataataattatcgaacataatttaattgttattataaagtttgataggattcaatttatcaatgttaatagggtgatggccactttgcatacacatcaaaatagtatatattatgtatataagaaaaagacaacaattaataataataataaaaaaactctatagtaaataatactagtatgatgtaatttttttttaaaaaaatgtatatatattttatccaataattaatttgtagtgatggtggtacaccaatttgggcaaaaacataattaatttaaatggtattataaagttggataggatttaatttatttaaaatgaggtcatttgtgactaatggggcaatatagtttagaattatcttcacatattcacaaaatatcattatccatagtatgagctactttgcttacacaaacatatacacatgtcatccttttaaaaaaacatattacacatgtcacactttatttttattattatttatttattttattttgcttaataacatgtcccacattgtcacacatgacacatccatatatgcaaactatatactcaaaatattatgtcaaaatagtaacaagtttatttaagttttttggtctataatccatacattattttgtttttcagtccgttaaaaatagacaccgacttatttataatgatgtaaaataatgttatagtaaaacttttatatattttggtatttaaaaaatagtttattcttcttctttataattatattatgtattttatttaagatgatttacaaattttcaaaaaaataattcaaatgctaaaaatgagtaaatatcgttttggaccctctgttttacaaaagttatcaattggaccttgtgttttggtaaatgacaaaatagaccctgtat

SEQ ID NO: 42220 - DNA, 891 bp, Cannabis sativa
tgatattaaccgctgcttaaacctttgaatactcacctcacacttatcaaaccatacaaatcattggtgctttttatttaattttgttaatgacattgagatcttagagaaccttttgacaaaatatcgataataccctgttaccctacaaagaacttcgcacttcagttactattcttggccttggcaaattactcacttactcgatctttcttggatcgaccatgattccatcttttcggacaatgtgccttagaaaggacacttccaacaataagaattcacatttttaaatcttgcatatagcttacgacccctgagttgctgtaatacaaatcaaaaataaactcatgctcctcttctgcttgagagtacacaaggatgtcgtcgataaacactatgacacaattatctaagaaacccttgaatactctattcatgaaactcataaaggctactggagcatatgtcaaaccggatgacattattattgttatttatttaaaagggggggcagctatcttctaaagggaaggacacctaacctttgagatttaaaagaccaaaccgcctttgtgttattacttaaattattaaatagcttaggggtaaaatggtctaataccataactccgcctaaactgaaacccaaacttaacatactataactttctatataataagttcaatgtttatctatatattgaccatccgttatattttctattgtcgccgagcaaaatcataaaaattacatttatcatatttagattaaataattctcttaggaccctttggtacgcaggatttgactagattggattgaaaatgatttgactggattggacaagattggattatactgaaagtaatcctgtgtttggtttaaga

SEQ ID NO: 42221 - DNA, 2592 bp, Cannabis sativa
ttttttttttttttttctgaatcattcaatttttttcttattttttaaattctgaattcattttttttttctttaagaattatgaaagcagcatattgattttttgaaaggtgtacgatttggtaaaattcaaggagaaaaatgtttacttataatgccatgttaacattaatttaaacgagaaaatattatcgaatctaacaaaatgactaatttgtggtaaatgtaagaatttaggaattttttttaacatgttgtatattttaagagacacaatctaatagtgtcataaactcaaaaaaaaaaaaaaaaaaaatgctaatcattcttaattaaagtactgaaatagatttacagtaaattccattaataagtaaatactttttttgagggtgcatttgaaaattcatggtggaattttggtgtaattcaagataattacacaatttagtgttaacggcgtaattggagataattgatttcaattatactttctaattctcataattccccataaaaattaggcataattacgtaattaagaaaaacttttcaacaagttaaatattaaatattaactactataatatcatttttgtgtagtgactaactattttaccaaacaataattattatcttatatctaaacacactttgtgagtaattacacacagtgatcattcccatgcacatacctcaaagattttcatgcattttctctccttcatgatcaattaattctcctgctttgatcagagtacggttgatttttactagtctcttaattgttcattcaatattttctcactcttattaattaactcattcaatattcttttttcctttactattcttccactacaaactttcttctccaatcaattctctctcgaagagccaaaccacctacagtcttttttttttggttgtcatttctagagtttgaatgtcgtttccttatatattattgggaatgttggattgaaattcacagaatggaaatttcaacaacaatccatacttgggttatgtgtacacatcatttcaagagcgagcaacgtttgtgtcgcatggcaacacagctcacttagcgaaaaagagcggagatccactcttggcgcgcatttgcggaactattgcagccgatgagaagcgacatgagattgcttacgtaaaaatgaccgagaagctcttagaagttgacccaaataatgtcatgctcgcaatcgaggaaatgatgaggagaaagatcacaatgccggccgcccttatgtacgatggatgcgaccccatgttattccaccacttctcggctgtggctcagcgcctcggcatctacacagccgatgactacgctgacatcttggagttcttaatcaaaaggtggaggttagagaagatggaagggttgaatcccgaggctcaaagggcgcaagactttgtttgtggccttgcgccgagaattaggaagcttcaagagcgagctgatgagcgtgcacaaaagatggagcctcttagtgtcaagtttagttggatttttaacaaggaggttcttgtgtagaagtaaaaatatattattagggttttaataaatatgaattagcgtaagaaaaatgagtgagcatttagaattgatgattatatatgaagaatttacgtgttttagtatgtctaactatgtcgaagaaatatgtttttattgcttaatttattatgttgtacttttgtatttaatttgtctcagttctttgtatgcacacttttatcttttgattttgatgatgcaataaatatggttgtaagaagggtttatataatataacttattatattttgtattgtacacttgagtgttagttaggtttgttagtgagttaattaaatttttagttatatatgacagattcttataactaaacttgtattgctagctccatgtataaatagttgtattcctcaatgtaatagtaatcttctcaatcaatgaattatcattctttctctctactttctcttttgtaaaatggtatcaaagtcaagaaaatcttcagctctctcttccttcttctccaaatcctctgttcttctcttctccttcttcacatctctattttttttttctggtggtgttcgatcggaaatagcaagagaaggaggagtacagactcacaatactttaggtcttgaagacaattctgataatgccaatcaatttcatgctcatgattagaatcctcgattcgatgctctaagaagtccctactatctctcacatggagatcacccgagcgccatgcttattgctaaaattcgtacatgatctaaaaattacagtttatggaagagatccatgcttgttgcactggttgcaagaaataaagtcaaatttatggatggaaggttgccacaacctgatgaggatgacaaagaatacgattcttggtgtcatgtaacaacctaatcatctcatggattttgcgatctgtttcaagtgaaatctgagataccacaatgtacctggagaatgttgaaaatttattttaccaggatcttagatctactcacaaatatgttgtttaaacaccctaaata

SEQ ID NO: 42222 - DNA, 2663 bp, Cannabis sativa
ttgtactcttgaacaatataatccaagcacgtgcaagaaaaagcattttatttaaccccttaaactatatctaagagtatatataagataacacttcttattttaagttagcggtttttcaacattaattacttatactattaaaatatttgcaatttgatattgaattatacaaagtataatatctcattatctcatgtaatacactagcaatacacttttcagaaacataaacatttaaaattattaattaatttattaatagtataatttataaagtgtgttaagagtaaaaatatatatatatatatatataattatagaattaattttgatatatatcatatcacataaaataaatatattttaataaaatcaaccaaatttaataagtcacaacttacaccaaaaaattatctatatttgtaaaatgtcaaatgactatttgtgggattttaaaaaagaaaaatgaatctgcaaaatgattttataattgaaatttttatttattatataatcaagaaggttctggcaaggttgtgggaaggagaatatatatcactcagtcacacgtggcagccacttttttgtatgaaaattatttgtgaatgtagctgcctcgctctgagtggaagtttcagtcttccagatattctgaatcttgatgttgaaaatattaataataattaataaataaacagatcatatatgagactactcaaatttgaacggtaccttcacaaatattttaacttgaatgacatgtaataataaatatttcaagtgagataaaaaaatattattagtaagtattaatagtatttaaaaattataatattaaattatatagaatttcatatgttatgaaggtgttaagtagtactagtatattttagtatttttaataaaaataaatatgttatgagacaccaaaagaatttaaaaataaataaataagagtgttgctaaagtatcgaagtgtttagtatcataatgaaatggttttttataattagttagaaattttttataatttttattataataaaaaatacgagactcgatattaaattatactaatagtaatattaaaaatcacaaaagcattaacttaggtgtcttttaacctttctcaacaaataaagcaccgatggctttttgagccagttagctaaatatccatcgtctatgcctcatacttgtttattttgaatatatatacaattaaattaacccaactttacttgttatttattcgttaattttagttgtgcccgaaaaagatcgaagtgccaactgcacggatagagatattatataatgatcacttaatgaattgtagtgtcattacccctatgtatgtgcgtagatgggctatactattactcgcaataatatctctctatatacttaatttaattttagctgatcaaagaaaatgagaaatgatcatgacaatctatatagatattttattcataaccgcaactaattaatatccacatcatcatgcaactgcaggtataatatgtttttataaatttagttataattccttgccaagaaaagaacatcaaatcatatatattaatgtcggagataagattgtctgtgatataccagatttgtcatttagtttagtgcactaattaaaaatgtctccatctaagcgtactgatattcgcttctaatatacatttttatatgccaaaaaaaaagtaaaaaggacagtacatatgccgctccttataataatagattattttgagcttgttggtattgaatggtatggtcagccggagacatattaattttccaggtagatttgtctgttatattgtctttgtttatgttttaagtaaaatatatttcttttcttacgtacaaaaagatcatatacctaattataaacttatattacaatttataatgtggcaactagagataagatggacattgacccctcaatatataattaaagttaaaaagttgggatggttgttagtactgtgtagtggaccagtatgctgtggatctaattaaacccaacatgcatatcaatgtctttcttctactactgatataattaactactaacttggctagtctacctgacattaatgaatctatcaaaactacctaccacatatatattggaaccaaatatattatttgtatcaaatttggcccatatgaaccaatgctatatttgttattatgttctaatgtacaataatatatgtaaattaggataaaaagtaaaataacattaatgatcattcatgaattaaaaattttaaaaataattaatgataatttttattctatataaaatgtggtatgtaacagaatttttgatttaacgatatttttgaatttgtacgttaattttaacagaatatcctattaattaacaaaatattctttaatattttaaatagtgtataccaaatatcaacttaataaggaagagcaccagagggagagcaccgaagtgagagcaccaactattacttaatcaacttaatatttacatgtcattttttttagtatatttaaatgaatttaaataaaaaataaaaatttaataacttagactaattaagaattatcatgcacgtggtcattcacttaatacttaacaataagtatattttctaatt

SEQ ID NO: 42223 - DNA, 1726 bp, Cannabis sativa
  modified_base (1680)..(1686): a, c, t, g, unknown or other
ttatagtgacatgtttttacaactcacaagaaacattcttaaaataaattattcttggacttaaatgttgatttatctgcagtagcagatttacagtttgatatggtaagacattcatgatcttgctttattttcattaattaagtttgtctccacaaaattactcataaaacctgccatataaaaccacgagatttgttgtgtatacaactgaaataaaatcaagtaacaaagagaagttaatgtcaattgaaccataatttatactattttattccttttatgagtataatacattataaattagtatcatccatataaaattaaatcaaagcatttaaacatatacaataaatatttaaattaaattaaaatatattttaatagctaaattatcaaataggtctaaaaaataataaataaaaattatatattaattattattttagtgattttttttggttgaatttgcaacacttattttatttatttttttctaatgatgttttgttttattatattactaacaatgttgttttaattattttaaatttttagctgtattacacttgtaatgatgatatttttatagtttgttaggtaatttcaattatgtgtataattgttttaaattggaatttgaggtttgattggattaaatcaaataataattttttaaaatttaattactaattagacttgatcaatgaaaaaaaaaaaaaatagataggatggggagccctaaatccaaggatcaaagaaactgtgttaaaactaaccaccttaatgtcaaagaataatactaataatattgaattaattttacatcaaccaaccacatatgtatcattggtcaactaaccttgaccaataaaccaactaattgaactgaaagattgattacgagagatttgtatttatagaaatatataattattggttttgttatataaaatacatgtatataattaccaccaccaatttaatattgttttattgttatttattattgtttggtgaaaagtctcctcacatgaatgttcagtgataaaagtacaaaaatgggtttattgtaaaacttgtttaacgtacatcgtattaaggtagattgaaatttcaagttaaattaaggctgaaagagtcactgaaacaattaaagaacatagaattactatttagcactagtaacactattaccatgtctaccaaccaatacatattacaagataattattaattggaatattagtttgggttttgtggtgaatgaaacacccaataatatgttatatgatttgacaaattatatatccaactcaacaaaaaaaaatatcaatataactataattaatatgtagaaatcatcataatacagtactgctgtgattggactcatcctaaggaaatgttgggtttaaaggcaaataaatatgagatccaacgatatctttgatgagaactcaactaggtcatgactctgcctaataataaagaaagctaggtgaaaaaaataaaatatcgtttcgtcattttattacaatattgatgttatttaattattggagacctattgcctattgggtatttggtatgatggaaagcttaaacatggatatgagaagatgatgataagaaagaacatatatctatctatctataaatatatatatctattctatnnnnnnngtgcctatataactgaaatttttaatttatgagaaattca

SEQ ID NO: 42224 - DNA, 853 bp, Cannabis sativa
tatatccttatcctcatcaatgtccaaatcattggtgaaaagaagaggatgaccttcaacatgagtaaccaaaggagcagccaaaccaccatttgggccgaccactcgaagcccaaaataagcatctgcaatatatagatctcctgtcttcttgtggaaccttagtcctaaaggcctcccacatatgtgttccatttctggtgcaaatggccgtacacacttctcccttcatcatcattttcacaaaatattgttcacttattccatcatataagtaaattcaacacaaaaaaaaaaaaaaaaaaaaaaaactaaaaatataattaatatattttttttacttttctaatatttataattatataaataatttttaatatatgtaaatataatttatatttgatcatttttttttttaataaattttgatattgacatctgatatctagttcaattagaatccaatttttaacatttaatccaatccaattataatatatgattggatcggttgaattagtttggatgttgtattgatatagaaaaacttatacacataataataagaaagacaaacaaaagttaaatgaaacaaaataaaaattataacaaaatatgttgtttaattaattattaaataagaaaaaaacttaaagatagttaaatttctccaatgctagcaccatgcttaaggacctcaagctcacaattttaaacttgaaaaattaatgaggaagtttgaataagagagaaagaaaatagcctttcctatttatttttgttaggattaacccctccccctcctagaatcatttcaggctccatttatttattttttcgttgatcaccattt

SEQ ID NO: 42225 - DNA, 1451 bp, Cannabis sativa
taaaaaagtaaaagtaattaaatttgtaaatttggtaatttggtactttggtaccttggtacctagtgtaagtgtaaaaatctcaaaaaaaaaaaaaaatatgtaccaaatgaactcaataaatgaatgaaacatatccaagaacttagagggagacttgccttccataatgagctttgggatataatatttaattgattgcttgaccaagagccagctatatattttagtggggcaatatataaatatagatttaaaaaatataaaatttatagggataagaatattaattttaatagactaaaaagtaaaatacttaaaaaaatttgttaatgaaaaattgagggaaccatatgacccacatgccctttttccttgtggtttcttaaaacaatttctttttactgtataatctttaattaatgaattaataaatccatttaaatgtcttttttgtccattaggataagaagtgtcatcagacaaccttttttttctttttcttttttttttttactattacatctaatccgcaatccccataatactcctttactttggacctaatccacataattaacgacttggttaacttttttttttcttttagtttataagtaatttagtttaaaatgctattagattttttttttttcataattattgtaaagatcatagttagcctattattgtaatttcaacttgagctatatgtaataaattatgtccaatttatctactaatacaaatttccatttacctttaagaaaaagatctcctaaagtcaccaaagaacttataataacaagttttaaaatatcaatactcatttttaaaatttgtgttcctattctatgtgattgtttattatgttataacaaaaatgaaacaaataaataaatagaactactttctattttaaccttaattcaagaacttcatctttaaggttctctcacacggtacattgactttacattatgtaagaaataaagaggttgtttggctatgttttcagttttcaattttcggaattgtatttttaaaactaagaatagaaaacagctttttgttaatggtgttggctcacattctttcaaactatttttagaattcttttttactaaaaaaaaaaaaaatcaatattctacatcagaccatgacatgaacctatcctactccggactcagaccaggacctgaacctcggacccttgcctgaacccacacccagaccccagaccctaacccgaacccagacccaagcacgaacccaaactcaaaccctgaccccggactcggacccagaccctaaaccaaactcaaacctggacccaaacatcggacttggacccagaccccggactcggacccggacctggacccaaaccccagacccgaatccaaactcggaccccagatcccgaacccagacccatacctcggaccctg

SEQ ID NO: 42226 - DNA, 641 bp, Cannabis sativa
aaaaaaaaaaaaaaacaggggaagtgattagtgaactaaattgcaaagtttacataaatatatgtatagagtatctataaatagtaattaataattaaataagtaccatggccatgtaagttgatggttgcattgacaaatcttctgcaatcatcttctttgacaacatctgcagctataatcatcacatgctttgccccaataagccgtgcattctcacttatacctctcagtctattctctcttcttgcaactaatacaagatttgcccctctttttgcatactcgtatgcaatttgctgcacattaaaaaataacccctattaaagaatctcagcttttgttaatagaaaccagttggtagtaacttaagactatgctaaacaaaccctatagataagatatatgctatctttgttaaaaaaaaatgactcaaaatcttggtacccatatctttgattcctactttcctacgagaaacttcactattttacaaaaaaataaataaagtaatgaaagaaggatacctccccaattccagaagaagctccagtgataatgacaactttatcatccatattctcttcgttgaaagaactgtaaacccattcacaagcactgataaagcatagagctggcca

SEQ ID NO: 42227 - DNA, 1556 bp, Cannabis sativa
tttaacaagatcattcttaatatgtacaatattggagtagaacatgaagaataagatattatcttgttaagttcactgctaaagacttaggagcattttgttgatacaatgttcaaatgggcaagaaaccttaatcatgtctaaggtgaaggctgcattaagttctaaagagattcaaaagaggattgatgatacgcctgatgacaatggtgatggactgtttgtaagaggaagagtaccaagggatacaaaggtcacaagaataatatcaatagaaatcacagatcaagatcaaaatttataggctttattatgaataaatgttactgttgcaaaaaagagagataattcaaagatgagtgcttgaatttgaaggccaaactcagtagagaaaacaacaacaaaggaagagatagaggtgaagctggtaatcttgtagatggttatgaaactgatgatgttttaggggtttcaaatatggattcactgtaaaaatggttgtttaattttggatgcttgttccatatgtgtcctaataaggacctattatgtgatcttgagggaaaactaagtggtatagttattattagtaataacaaggcatatatgattcaggaagttggttcagtgatcttcaagttgcgtgatggagtcaaagaaaaagtacttaatgttaagtatgtacctaattttatgagaaatatattttaaatttgagttctagctgagaagggttatgcaaaattgatgaaaattctcttaaagttgtgaaaggttctttagttgttatgaaaggataattaacaaattgtttgttcttcttaaaaggtgaaattgtaataagtgatgtgaatgcagttacgtgtaagcaagactcacatgaaacaaagctatgcctcttgaggctaagagagggcttaaagaactcgagaaataaggaattttaagaagaaacttaaatagaggattgggattgtatgaagagtgcatctatggtaagagctataaattgaaatttagtaatggtatgcacacaacaaaggagcaattgcggtatatctatttaaatctatggggaccttcaaaggtctcaactctaggaggtatagattactttttgagtatcattgataactactcaagaaaagtttgggtgcccttacttaaatcaaaagatgaagcattcaaaatatttattaaagggaagaatcttgttggcaactggaaggaagattaagaaacttataacacataatgaataagatcattttggagagagttacacgaattggcttaaataaaaagttttggggataaactgtgaagacaacttcctacttgatcaacagattcccttcaatagaaattgattcaaagatacaccaagtgttaaatatttaagagtttttggttgcatagcttatgtccatgttagacaggattagcttcaaccaaaagctataaagtgcatgttccttaccaaacctcaacctgtgcaagttgtcacatttcccattcatgaatgagtaacaaatttttggatatattttaccagg

SEQ ID NO: 42228 - DNA, 1094 bp, Cannabis sativa
tttaacatagtattatataaaaatataatatataatccaattcattataatataatacaatataatacgacctaatattacgtttcaaacaagcttgtaagacattaataatgaatctagatgagtattataatactttcgtgtttgttatgaggtttataatttttgtacgattctcatgagaaactacctagaaatttgctgagtatgattcatcagaaagtttgttcaacctcttattctaatattctgattatttttaattcttgaatttctttgatcattcagtcagatagatggtttttatattcatactgtgcacgtgaaaaatgcaaataatggaaaaattatgtgggcaatcaactgaatttaaaaaagcaattaatctcatcaaaatccaaaagtaaaaaagaagctcacccaattaatccatctacttttgtaatattgtttattttatttttatcatggaagctactcacccaattgaaagaagatcaccaacagtaatagatattctttcaaaagaaaacacaatatattcaacaaaaaatacatttatatcatatatatatatataatttcaaaattaaataaaaaaaaattataatttttttgtctgatacaaaactgtgtacttttaggtaataaaaggttagaggaagtattgcaacctgtgtagataatatattgattcttgtcgagagaggttaaaaatttcaaattcaaataaggttctacataaaaatttattttaaatatataatattaaagaaaaaaatattttttttttgaataaaagaaaaaaaaaatattaatttatatagataataacaaataaaattataaattttaaaaaaaaactttaaaatttataaacaatttagaatgtcgtgattttatttatttatttatttattggacaatgcttttaatttaattatgcaaatattttaaagaaagtttactttgaaataattaaaagtactaatgagagaataagggtgatgtttacttaggatgaatgaaaatataggaatagaaatgagaataggaataagaataaacacagaataaaatttaaaatgcttaaa

SEQ ID NO: 42229 - DNA, 795 bp, Cannabis sativa
gacccgcctgcgtcctccttggccctagagttacctccgccacgctctctctcctcacagcccccgccctcctcgccatgtcgtgtctcgtctcttcccctaaaaaattcatcgtagttcgcttcctcgtcgggttttcattgggaaatttcgtggccaatcaattctggatgagctccatgttctccggtcccgtggttggcctcgccaacggcgtcgctgccggttgggctaacacgggagcaggtctgacccagttactcatgccaattatttactctgttttaaacaattcccttaatttgccgtctaacatcgcttggcgagtggcgtttgttttcccgacagcgtttcaagttgcaacggcgatactagtgttgaccttcggtcaagaccgaccgatcagccccgttgactactcttcgaaacatgaaaagaacaacacaacaaaagatgatttacgcgccgttctttttcagggcctaaagaactacagaggttggatcttggcagtgttgtatggggtctgtttcggtgcggagctgaccactaataatatcatagccgtctacttttacgaccgatttggggtgaatattaatgtcgccggagtgattgctgcaagctttgggatggctaacttattttccaggccggccggagggttactctccgacgagttggcgaagaggtttgggatgagagggagactttggggtttgtgggcagtgcagacagtggccgggttgctctgcgtgttactcggccgatgtaactcgctatggggctccattg

SEQ ID NO: 42230 - DNA, 2174 bp, Cannabis sativa
cataattatgttcttcttcccattgtccattgctctttatcagaactggtatagattctataacctgtcatttttcacaatattttatttacatggccttttttcgaattaaaacaacattaatataacactacaaagcaatgcataaaaaatattttttggtgttcttttttattatttggatgatccccttaattagcaatgaatttatgtttataagccaaaaacaactttagaacaaccttgatttttgtaatgtatattattaatcgtttctcagggatgatctatgtgaatatttttttttctttttaaaatggcatgtatgattaaataattttagattatgctatttttttttttaattttaaatctaaatctgggtgtttttttttattattttaaaattaaaatactatgggtttaggtgtgtttacctcttttgttttctttgaatctgctttaaatgttgttgttgggtcttgattagtcgtggatttactaattttttctcttcgccagattttatgggtatttttctagtgtttctatatttcggtgttgctctgtccgtccccaacgaggaaggaggcgtcgtttgtcccttgttactgttcacaatataaaagaaaaaaaaatggacctggacagtatgaaagaaaaaaaaaagggcgtagacagtaaaaagaaatttctgccgtgcggcagtattttgtaaagataagagaaaaaatttgtatttttgtaaatttcattttttataattcatgaaagttgtccatttagtaatattaaactatcaaattaggtgttttcattttactaggattttaatgatatagcttcgcactaggaaaatataattaatatatatacctattttagctatattatcataaattattattcttttccctccactttgcctctttttgtcaaaagtaacctatcccttgcatttgaaattcaaatatttttcagcaatgcaagatatgtcccaccactcaaagttgaaagagtgatgcgaatttaccaactttaatatattaattacataatttaaatttaattaattaattaacctttaaaaaacatattaattaattattcttactttagttagattaatataattgtatgattagagaaacttatttagggatcaaatagaagagattattatttgtcccatggtcaagaagatgtttatatatcttaacctaaaagcaataaaagagacaagacattccatccaaataattgctaggccccatctttgattactccttcttaacctttttgataaagccttaacaccctctaaattaagttataatccccctttctttttaccaaattccaaacttacccctcatcgctctttattctccacttgctatgtaaccatgtcacactcaaccaaagcttaatcatttttattttcattttatatggtgtggaacacacatgacacttatcttactatggaaataaacaaggatgtttcttgttcaaatgtgagattttaaccttcattcgctatcaaactatccatttaaatttataaaactatattaattaagttaatatttggtataaatttgcacctctcttctatagtttaatcaaaatattttatattttaatatatatctaacatatttttatctttttgtgacttgtttttgtccttggtttgatttttttttttctttcctctttctttatctctcctttgtatatatctctctatatattattaggtagacaaataagtttagaagagatacccctaagaataaagtaagagaaaaaaaaactgaaaaatgaaagagacattatactggttttaatatattctgtacagattcatatgtccaagtgattgactaagttagtaaccagaattgtgtacatttgattcattaattggaaattatatacataaaaataatattacataatataattatataaaatgaaattataattgaaaaatatttaacttaattttgttttcatcaatttcatcattttgagtaaacaaatatataactttttagagaatatcatttttaatttgatgattgtcacaattttttcgtcatttgtgcacttggtgtgtgtggacacctgtacgtcagcgcaccacaccatgcagaagattttttttt

SEQ ID NO: 42231 - DNA, 1355 bp, Cannabis sativa
tttttttttttttttgtcatataatatacaatttcaaatttagcaagttgcaactacaccttctccttttctttccttttttcttttgttttactcttcccactgtccaacttccaactgatcctaatttttccttttttctttcccttcttcacaggatgctaaaagtacaaaaataacccataaaccaaaaaaaaaaaaagagaaaaaacattttttttcctcttttttttttttctttaataattactattacaaggctcctattattcttggcttcttagtacactctaattccaacaattccaagtctcttattcttttcccattgcaaccaccaccaatcccagcttcaacgacgaccccactcccaggtgtcttaaaaatgttgaccccaaacagccgtaacatctggaccggcggcgactgatgttgctgcagcttgggttgttggactgggcctgggccaacgatgggcccattatctctagccttccaatcaatgtaaagctgcttatcaggcccattactagtggagcgttggaaagtaacaatgtcaccggctttgagacccttttccttgacgaaccggctccaacctttggtcaacacataactttgactgctgttccagtaagagtatcggaacctccaaaccttaccacctccgtcctcgaaattcaacaggacccctttggaggtgttggagctctggagagggaaatgcttctccgcgtgctgtttgggtatcactaacctgttcaactttcccacgtcactgggcgtaacggccttctcgaacaactgctcacgcacatgttgcttcatgagaagcgggtcgtccaacccggatccgaacccggatgacttcattagcagatgtttcatcatcatcatgcggttgttgtggggggatccactggccccgaagttgcgtttgctctgttccagttcgtcattgtaggtgtgcttgcggagcatgtcaacgatctccgccttggaatgcgagctcagaaaagaagcttcgatctcgtccgtgtcggacgataagggcttgaagttggtcactgcgtcgcggccgcggaacctctgggcggccacgtcgtaggccctggcggcttcgtcctcttcgttgaacgtgccgagccacacgcgctggtgcttctcgtaaatctgggccccccaacgaccgttaggctgtgggaccactcctttgtacttcgacgacggaagcttcctcgactcggcttccacgccgctctccgatgacccagtgtctaaaaccacgctggcaccactccccaatcgacacaacttctccagcggcttaggcgccgagggtggaattgcggcgg

SEQ ID NO: 42232 - DNA, 1096 bp, Cannabis sativa
cttatgccactatttaccctaaaaaaaattaatacgtgtcctcatttgatgagagggacagagaggagacagagaattttgagacagaagatttttattcctctgaggtttggttaaaccttcctttctggaggtttggattaccacatgcaggcctttgggagatttttcttctcgagcctgccagctacaacttttcttttgtttcttagttgtgagggtttgactccagggtgattaaacttttttgcattagcttgaacgtcatcgttaatttggacccctactcagggccggccctgaaatttagtgagtcatagggaaaaaaaatattttttggcgctcatttagaaaaaaaatatggtatttttaaaaataaacaaaaaaatctgtaattttaaaaagagataaattttttttgggtccttgagctaggtgggccctaggcacaggcctagctcacctatgctcagagacggccctgcccgtactctagagttttgatttgggggaagaacctctgagttaaggcctttagctgttatcaagttttgcaattacatgagggtctcttgtatttggcaggtgactccttattttaccatctttacttccttgtcttgtaccagttgccttaaccgtgtgactttggggtcttcctcataattttttcttttttttttgcttttagcttcggttttctaaatacaactgaagctatatatgttagtaactaatacttgtgggtactagaaagttatggtattgctattttttagtgattgaattttttttaagttaaagcataatattgtagtagtgtactattattaataaattaattaatttgatgcttaattattgcgtggacaaaaggaaaagattcatggcatatgtatgtgaatgtctgaattgttttattccaacattgatcccaaatattaattattctctctctctagatctagtatcagaaactttgaaagcatcactagtactagtgatatcctcaactattaatttattacattttgcatagtgtactttttaaggcttgacagcatgtaatgattaagaacttgaactagatttcgtt

SEQ ID NO: 42233 - DNA, 2846 bp, Cannabis sativa
gaaagcttagtgaagtgaaatgattatgagattgcatgataatcagcacatgtgatttctgcaaaataatggaagatttgatgatgccaatcttacctgaccatggacaagtttggccatttccttcagtccagtgacaaaagtttggaggcttgtgacatcctcatctccattgcttataccctgtgcatccacagagacacttccaaatgatgattgagaatcatttcttgacaaccttgtatttttagaatcaaaacttaaatgtgaaatcttctgtccaaaattctctggtctgccaggaaagcctttttcaaatccactaggtggggttctattcgttttatcaggagaggataagccagtcatcagattagctctacaactccggcttttagttaaactaaagcttctatagtttggcacatcagatgtaaagccattctgcatcagatccagttctctatctctgttaattgaatttgacatcacttcttgaccatttacatcgatattcccagccgatcttccttcatttccatcacttgctgaggcaagggattcggaactcttgtgcctacttgattcttccatctcgatacactgaacttccttgcagtagtcatcttgactatgactagaattagattgaacaaacttctttctaattgaaagttgtgaagaggcatcatcagataggtaatgatcattagtgtcatcctctggatcctcaagattgctctcgctgtctccatcatcataacgaggattgttgtacctcctaacacgatttgaactgggatcaaccacatttgacgattctgatagtgaaccttcttcatcttcccattcatttgttgcttgtagtttaggatgaacatctttcttctaaaagagaagaagaaaacaagaattagagatgaagagtatttacaatatgttagttaaaataagcaaaatggtaagaacttgttgtacttggttagaattccgttcatctccaaccatctgtagtaaatcctttacacgtgattgtgccaaatcacgttgcttcgttagctctctgatttccttatccatctgcatttacaaatgtatacacaaatctattttcagaaataagataatactagatacttccatcagcacgagaccagagacgaaatgatcaccttctcaatctgaagatccttctttctgagtaacgctacataatcacaagccgaagaaggaggaggtccaggagttcttaactcactctccaatctagctagctctttctgtaaatgcttaaccaaggccttgtcagacatgactacattgacttgtgcttttgtagtcacttcttttgcacaacaagcaaacaaaagagtatttctagtttgctcgacatggcttctggcaggactcaatgtacaaatgatggcagttctagcattgccacccaaagacggctgcaatatgcgagtcagcttagaatctctgtaattgatatgtccttgtcttcccttactgcacaaattaacatcataacatttatgaggctagaaacttattatgttacttagtttgtaaaaggagaccacaatagtttatgggaaaaggtttcaaccttagtttgcgaataacagttgaaagagttagtaaactacgattgatatggcaaccctcttttaatcttgtccccgcagacaatgcctgagatgctcgttcacttcccgccaaatcaacaaaactctgaaaaacaaaaaaccaatctaacttaagtttttgtagaagcaatctaatttatcaactgcaaaacaaaagatccagaaaaaaaaaataataccacactagcagccagggtagttgacttgtctttgcctaagaattcacgagcagaactttcaattccctgaaagaacaatcgtcgaaacaagaaccataaataaactataaataaccacatttgtagatggatgattttacagaagagaagatagttgcaggtataccaatctaataatttggtgtgatctagagcttttctcattcaataaggtctctcctatctgcctttgagctgcaacaataaaataggttacttaaaatagctaaaggacaacataatattatgaaaggaaagatttgtgaaatctttaccttcacaaatcgaaagaagctcctttaaatggctccaatccctcagaatttcctctgtaagtttctccacaatagtccccctctgatgacaagcaaaaaaattgttagagctatgtatatacagatatcaagtgaaactccaaatgagaatataatcatactcacttctggatcatcgagcagtctgagcggagtattatccgtgcttagaagatctctaacagcttcattgtaaatttcgattgctgagaacttcaccacaaaagctctttcttcatgctgtaataatatacataacaaaatcactcattagatattgacaccattagaaaaagaagtatgaactaagagttatggaaatccattaattagtgagttcttaattcttattaccctatgtatgtagtcaaatatttctgctactgtatactcagtcacaccattcatagtatacgttttcccgctacttgtttgtccataagcaaaaatacttgctgaaaaaagaagtaaaataaatgcatcttcataagtcattgtacagttggattaaagaatcataaagaaccagtgcagataccaatattagcacttacaattgataccattgacaactgaaagagcaatttcttttgctccttcttcatacacctcccttgtagagcagtcacctcgaaatactctgtctataaacgaaaaaaaaa

SEQ ID NO: 42234 - DNA, 1225 bp, Cannabis sativa
ttgataaaaaaatattaaattaattaaaacaaattaattttacttaaaaaaataattttcaaactttattttatttataaacacgtatcttaacaaataaattataataattaaaaattcaataaaaatagaaaatatttcaaaaaaaaaaaggttagaaatcaaactaaaataatgttatgtttatttaaacaaaatctacattttttgagaaaaattaaaatagactcaagtttgttctcgtaaaatatagtttttacaaaagttaaatttttaatatatttttttaatatgtaaatgatttttttaataaaaaataaatgatatcttaattaaatagattaattagttttaacattttaatttctttttttattttcttaatcatttaaaatgattttttttaagatctaaactaattttttaaagatttactaaaaaaaaaaagaattgaatctttctcatttttattttgatggagtacaatttgataattgtcaaagtttaagaagcaaaattgctaatttacaaagatacgccaacatttaaacagaataataggacggaacttaacagaaggactaaatttctataaaaggaaaagtttaaggggattcttaagctgtataatttaagaggtaaaattaatattgtcaaaaattctgggacaaataattattatttattcaactattaaatacaaatacacactaccaaaatccaatactgataccaaaatcctattatagagttaacacacaatttttaattttttataaatcacactaaaacataatatctatctaactatcaaaaactaaaatatataatgggttgaaaataaaatgttaaataaagctccttattttattgaagatattatcattatttatttgtgatatcgtgtcaaagaatatttaaaagctgatcttcttttatttaagggatttttacactaacactatgtttggtagaggggagagaaaggagagggatagaggtaggggcggagccaggattttataatagggggggccaatatcaaacaacatacaacaagtacaaatttttgtaaccaaacatttttaggaggtgtgtcaattgagaaaaatatattataattcttttttttattattataatactttaaaaaagaataattttttaaactaaaattaaaatgtaaccggtgcttaaagtgtttggagttcaatttaattttatc

SEQ ID NO: 42235 - DNA, 1379 bp, Cannabis sativa
ttcacgaaagatattcggccataagtaacatcacattctctttgcatgaaacattcaattctctcctatctcatgaatttttgaagccttgggaaaagaacaagaagtacctgttgaaccaaaactcgaattcgtgcaagcaaagccaaaattgtcaaacaaaatcccatgaagaacgattgagcgagcaagacagatatctcactgtaaaatagtcaaggaaaattcacatatctatcaattgattctcatgtggtgaaagaatgaaacttgaaaccaacaaacaaaggatacatacacagctgccttcagcattggctcaaccatctgcaagacagacaaacaaacaatatcaatactatgaatttttttgctctgattagtgagccattttcttgccaaataaagcatacaatgtcttttgattgagcaagagaacagatatcatttatcattattcacgatagtaaaagataacgttgcagcaatgtgatgtctaaaagtagatgaatgacaaactaaaagtataattagacctgagacagaaggcgggcagctcctaacagacgctccataaaatgatagttttcaacttcaaattttcctctcttcaaactgcagaaattgatgatataagtatatatatatgttcacattgagaacattcattgtattgaattgaacaactaaattaacctaattttctagttacctttctaatagatgaatctttcgtttaggcctcttccctgtgataacttggaagcaagaactcagaatttctcccaacttaactgactgtagaactctcaaatctctccttacctagcatcccaaaacattgatgtcaactacacaagagtttagggtatataaaaaagaaagttttaaactggtttggaagagtaaaacagtgcaaaccttgagtaagtattggaaataagagcaacgcctatgctggttcttgtttttgtagaccattctttcaagaatgccacactctgtttgaagctgaccaagcaaagatgtcagcttctcttcaagaatttcagcttccgaacccattagattcctgtaaacaccctgaaacataaacttcaatcaaactagatagagtgtgagggaaaccctagacgataaacaccattaaagaccatgagcgagcgtagtactattcaattcagttcaataaaacaaaaatatacttcagagacggtcacaaactattataacagtattaaatttattttttattttttttattatttattaatatataataatgtaacataaatatttaatacaacaaaaattttaaaaataaataaattataatgttttacaaaattatgatatactagtaaatttcttcaaaacaa

SEQ ID NO: 42236 - DNA, 901 bp, Cannabis sativa
aaattaagcaattttggtttttactgaactcgattccgataaaaattggaaaagttataaatttttgaagtttcgggttgaatgggtgtcaagttggtgcatcgagtgaaccaggcacttggataaagaggcttccgcgcacacatcaaggggacaaaatccctatctgaagtcatgtctctcccaacccttcagacaagcacaaggctgcaggcgccgaggaagatgttgtagctgatcgagaaaacttggtcaaggaggctgcaagcctctcgtgcgcgcgcgcatatgggctgctagcagcctgtctgggcttcacgtgcagcctctcttgtgggcagccacaaaaatccgatttctgtcgaatttttccacaaatttcaaatttttccaattttaaaccttaaaattcaaaataaaatattatttttaaaatatttaaactcaaatatcaattttttaaattaataatatttaattttaatagattattattaatttctagtattttgaggtttaaatttaaaaattgattattttattttttaattatggtaagtttaaaatttgttaatttttttaatatttatatattatttaattataatattagatattttaatattgggtgtatttaaaattaaaagatagcattatccttttaatttgaaatattatattgaaatgatcttataggataaattacataatattaaaatttgacattagcctagatacttttatagatattctaaccataatatttttaaatttaaaaataagttattttgtaaaatatttaattgttgataaatcataagttaaaaaatgatattttatatcattttacttatcaaaaatttataaatagtattttaaatatttaaataacatagatatt

SEQ ID NO: 42237 - DNA, 595 bp, Cannabis sativa
aaattaataaatcaaagtacaatatggaacttgatagtaaggtggtgttggtagaagattggcttatgaaaacgtacctgtcgcttacaattttccatttttctatgtccaaggcatctataccaacatacacaaagataaatatctctgcagcaaatgatagaatggcaaaaatatgtctgcatcaatttgttcaaagaattgagatgttagaagaaagaacaaaaacaggctaaacatgaagatatggtagttcttttatgaggtgtttgtgaatattaacgtacttggttgtcactcttgagctttcagtcacgttatgccatgcgtaatgagacataacaattccacagaagaatacagtgaggatggcacttagatcaaatagcttcaaagtatacatcacattttaaaattctttgttagatttcttttcatgtataataagccagaaaaagagaaaaataattgccctactattagtgaagactcttacttgagctgtcatgtatgatagataaggcatgagtatcataagagcaatctcacgatcagtagagtgcctggtttaccaaaaaaatgacaccaaaatagt

SEQ ID NO: 42238 - DNA, 3100 bp, Cannabis sativa
  modified_base (1653)..(1658): a, c, t, g, unknown or other
aaatccccatcatctagttgtgttaaaacaaaatgagtggtgattattatataaagaggaaaaggtaaaaagaggaacagaaagctttagaaaacgtttctttggtcatatttctgttcttttctgagctgagctgggtcactactattctaatatctcaacatttccacctaccaaagcttgatagtgggatgaggtgggtggggttggtgaatttggaggtttacaaaaaaaattaaaataaaataaaaaaaaaaataaaaaccattatttaaaacgcatggaaagggacaccacaacctctttcccaaagccaaaattcttcttcatttcatgaaaaaagtagtcaagtcttcacctcaattttatattcttaattctccaaactccttgccttgttaatggtttatttatacctcttatttgggacccctttacccactcgagtatattcccttttcaattattctcaattatctgtaacatgtaatgtgcctgttctctggcattggaagaaattaaatttgatttgattaaacaaattgggaagattgggttaaaatggagatttccactaatgaaagattctttctttttctaaataaaactaattataactaataataagattcttttccttgttttgttattggtcaaaacaaaaggggtgaagtgattctaatttctttacatttctatgttatctcattttgtgtgtttaaacttgaacaagcaatcttgggacattggttaaaatatcttaactgatttcaaaagtggactatttcatgaacgcgtttaagacctgaacaaatcaataattcttttttcttgtgttaatatcgttaccatttctgtgtaagatttaagtttagggcttttttatttttacattttaaaatatattttttttttgtatttttatgaaattttatatagaattcttatagcagctaacgaagcaacctaaatcgcaatcaaaatctgcatataagtacctacatagaaattaccggagcaacccaaacagtaattgttttttaaaaaaaagtataaaaatagtatataagataatttcttttaagtttgtaaccaataataaaaaaagtttttttttttttttcgaattaaagccatgtatatagtgaaacaaattacaatatatttttaaccatagtcggtagtgtattaaagtaaatgaatatttaacatagaactattaagtacggcttactatacactatactctagtgcgtgtgattttgattcagattacatatgtggacgaacatgtagtaaatgtgttgtgtataatttgattatacatgactggaccgatatattataacatctttcactaacatgtcgtttaccatgaaagagttatacatatcacaatgatgatcattagtagatcagtctaaatcgtgagtatacatgaactcctatttgtattcattgagttctttaattcactcgttaaagtttctcagagaagatgattcttataacatctgttttgagagcttaataacatgagtggttggaaatatgttatacaataatataacccaagttttcctaacagatcgagcattagttcctttatagtgttaattttgggagtactaacagttggatccaaatctatannnnnntatagattaactgttcacattgaattaatggtacttaagaaatcaagagataattaaaaaagtaaaacaataattctaactaactctaattatgaactaataattagagggtgaactacttatattgattatatcaatagactacaagtaagaatttgtaaatataattctatattgtcaaatagtactattccatatttatactggagtaatgatagaattaataaactagatcattctattaataagaaatgtcttctcgcagcagtttgttagtcaatttggggggcccgaataatcttgtttggaacagtaaacctatgaggcttgagaacattattgcttctgtaaaagagtaccttgatcaatggaaaaatgctaaaaaatttaagatagattcttcatggcctggttttcaggcaggtgatggttgtgagcattggactcctccacaatttaatagtatcaaggtaaatgtagatgcatctctgtttgatggtggtcagagttttggtttggggttggtagctagaaattccaatagtttccttatcgaagggcgcacaatattttcttctagggtggttgacttgaatcttgctgaagcaatggctatctctgaggcccatagttggatcaagaatcggaagtggttgaatgtcacagtggagactgattgtttaggggttgtgcaagcattactgatctatatcagtatgatttctcatttggttatgtaattcaagattgtaaaaatatgcttgcaaattcgtgtaatgtttttgtttattttgtcaaatgatcagttaatatggtagctcatagctttgctagagctgctatcttatattctggctgtagttttagtttggagtctgttccaactaatttgttaccttgtttagtaacagaggttattggttaataaagatgatttttccattaaaaaaaaattataaaattataatattcagtattacatttaatattttaatttatttataattgataaatttatatcttattattattaaattataagattttttaatatgtcatgtcgtacttttcggacttgtcgcgtgttgtgtttttcggattagtctattcgtgcttatgtatcatactttttgtgcttctcgtgtcatgtcgtgtttaaggacatattttttttgcaatgtcgtgctaatttgtagtatcatgtcgtattgtgttcaagcccgtattttttcatgcttaattgtgctcatacctttcgaacttatataaattttgtatcgtgtcaaataacttacaacactacttgagagttgagataattctatctagtttagtgttaataattagaaaaaaattatttttaaagaaaatggaaaaaaaaaaaaaaaatctttaaatataaaaatataaattttttcctttatataattatatatatatta

SEQ ID NO: 42239 - DNA, 1669 bp, Cannabis sativa
accatgaaacgcagcggcggcgggggcggaggaggaggaaggttcttcatctttggagaaggttggtgcggaggcgcgtggcgcgtgggtgtttttgttttggttttggtttgggaaagtgtttgttttgagtggttttttatggggaaacggtgtcgttttttgagaaaggtttggattgagttgagtgagtgagtgagttgaatgtgtactaagttatatataagggagatgaaagaagaatcggtttgagaaattgctgagaatttgtttttattattattataattagtttcttggaatttgtgtgtatttattatttattgaattatatttttttgaagggtgtaattttaattagagggtaatttgtggcgtaaatgtattcttgagctgagatgaaaaaggcggccgccttaaattttctaccgctcaggttcctattttgaaaaaaaattaaaatatagttaataataaaataaaaaataatactcataataataaatatatgttgcaactcaacagtaatttgattagagtaatatttaatatgttcgtgatcaaatcttaacaacctcattttttcattaggctttaatttttatttttacgtaaagtttaaattagtatagagtcggccctaaatatatttaagtttcggttgtaaataaatatttaaatttcacgataataataagttatatttgtaaaacttttattataatgtattattttttatttaaatgtttaaattaatttttaaataaaattaaaaatttataacaagtatagattgtcacgtcatgtagtagtattattattacaaacaattaaatttaaatatttattaaaaatatgtatacttcaaattatactcttttattatttgagctataataatatatattttacgtttatgatagttgagaaacggctgagaattgttattattattattgatatttttcgttttttattttttggattttgtctatttcttattcttattcatatttaatattttattttatttataatttcttggatttttccatttttatttatttacaactggtgggaatttgttaatattttatttttcttcgagtcttactaaacttgcattgggcatgcatgcatgcaatgacagttggtatttatagtatactaatttatataaatatatatattgtaaaaagtttaattactaattaaatacaaataataatattttagtatttatttaatggtttgatctcaactatgtaaggcataattgacatttgtcttttgtttatccgttttgattatacaatgtaagaaaatggcatgactctatgagttgttttcattaaaatcaaaccctatttatttatttgtttattttagggttaatgctattttgacttagtgtattatacaaaaattatgagtgggccctttattttataaaatattaaattagatctatagtataaaatagtattttaaatttaatttttaatatgtttttaactggatctgatgtagaaaatttacctaattttatcataacaactatagattgggttattattgacatttattttgataaaaaagttagtttacggtactattttgtacaattttaaaaaaatacaaagtccaattttttatttaacaaaaaaaa

SEQ ID NO: 42240 - DNA, 861 bp, Cannabis sativa
actaccatctccaacagttagatgctccttaccaccatattccactttttgattgacattgttggatgaagaaatgacatggttgcctgctccactgtcagcataccattggtcactgtccacaatttctggggaggctatgaaagcactatgactgcctccattttgctggttctgttgagctttagggtcataacccatgtatgattcatcatacctgttgtagcatatagcagcagaatgaccatacctgccacaaacttggcaggttggtttcgaattgctagaccttcttcttcctcggccttgatagcctcctctattgttggatgaacctccacggtttccagagtaaccaccatgatttcctctccctcgatttgaattggttgttgattttccaggtatattggctgctgctaagttggcagaaggtccaataccagttcctgatgactgcctttgttatttcctcctacaacatgaagtctctcaagtttgctgtcaaaactcagcagcatgtcttgagtttcctgccatgaaatgttagatctagcctcaatttgaacaacaatagcatggtattgagcatccaaaccagaagtcacgttcaaaatgagatgcgcttctgggtagggatctccagcaagagcaagactgtcagaccacatcttcttctgtctgaggtattcgaccataggagttgtccctttccttgttgtttgaatcaactttctggtatcgtccatctttgctcgagagtgtgctccaaaaagattttccagtgcactccataaggtggcagatgaggcacatcccatgacctcggtagccatggattcagtcattgagctataaatc

SEQ ID NO: 42241 - DNA, 1372 bp, Cannabis sativa
aaaaaaaaaaaaaaagccaaaatcagatttagaaagcctttatgcacctaattcattgaaagccagttcaaaagaatatatataagaaacacaagtctttatttatgcttttttttcttttattaaaatctttagcatgttataaactatatttctgaacacaatacttgatacgtagttttacatgtatatatatattgacttgatacaaattaaagtaagaatttaagaatctgccgtggatatacaagaaaaagctaccaaaacaaatttttggtatcattggttgtattactgcaaaatatattttattataagttttcattacatttttataatcaatagcaacccttccaacaaaactgccaagagatttaaatgtcaatgatgatatgtaacataacatctcaaataaattgttaaaaaataagtcgcttgattaatgagacttcaagtaattaatctgcacaaaatttgttgcaagaaatttttcatcctttgttgtgtacctatgagagaaatcaaaagagattcaaaaaaaaaaattacattcttaaatgatacattctgaaaagcacaaggagacatcattattatgataaaacacaagcacatagttgcattctctcattaaaggggactacaactgttagagccaaaaatagttaaactacagctgttgagactaaaagcctataacaactaactaacatgtaaaattctttgatgtaatttcataacattagtagaataattcttagttgacttaacagtcattatgtatacatataaatcatatacacgaccatattgagcatataaccgttgaattcataactttaaaacttgtatctattatccaataataaaaatctcttccaataacaatgttgactatatttgtgtcctgactaataacttccaataataaaaatctaacatcttgttcttatcaatggagcttgttgggctccaaagccaatgtgaccaaacaaaaactcttctctaataagttacaggagtagctaaagataacattttatgattgagaaaacaacataaatatacaaatttggtttgtgctgccaattcttaatactataataaaagtatattgacatattcatagtttattggaaaaaatacttatggagcacaacaacaaaataaacaaaacccaatcagtaaacaaaaattattaagagaaaaaaaaaacaaaaaaaaaaaaacccagaaagttttaaattgtacaaattagaaattcataaatatttgagagtatcatttgttagacatttatatgtataaattgaaatatatgtatgtatatataaaatgcggaataaacaaatatatacactatataacttaa

SEQ ID NO: 42242 - DNA, 723 bp, Cannabis sativa
  modified_base (693)..(696): a, c, t, g, unknown or other
atatatatataaataacactaaaaaaaacagtaaaagtaattactttagataatgattaaaggttttgcaaactgaaaaaggtaaaatagaaggtcttgacatttgacttcactacaatggaaatacttttggcttttggcttttttggctgtgacatggtttcatgccttgcctttttccagaggaataattgtgataaatctattcaacccatcaaatccaacaatctctaataatcattaaatggttctttacttcttttatttttattttcacatttatataatttggctggttcattaaatgggtcatttaataaggcaaagcaaagacagcaagctaagctaatgcagtcattttgagatgtagaaataataaaatattgttaaattgtccaaattaaataaaataaaaggtgtggcagtgcatgaattaatgtgcatttatgttacttctcaagagatgcttattgctcacttgctcatctatttgtctcccactcaggtcgctcaaggctgattctaatgacaaaatttaaatttactcttaaatcaaatattaaaagagtactatttagcactaatatttacttaataaataatttatttaatttttaaaagtaggaaataaattaaaacttttatttgcaccccatgaaataataaatacactttattattaaaaaaaatatnnnnttaaataatttttaaaaattactcata

SEQ ID NO: 42243 - DNA, 820 bp, Cannabis sativa
  modified_base (55)..(75): a, c, t, g, unknown or other
gtttcttaactttttatgtgttttgtttattgtttttagaagttcatatttaggnnnnnnnnnnnnnnnnnnnnngagtagatctaagttcctggtaaactaaattccaacaatcctctctatactgcatgtttgcaaaattcggatttggcaaattcaaataattctgaggagccgccaatactccgtggtccccctcaatttccacgtgggaggatacgccatgaccatttgtactcgattcaattcccacattcccactactcctatcagcctcgtacgattgcttgtctttctcgccaccacccttttcttgaatttgatacttggaggccaccgcacccctcgtcacccgtttctccgtcgagccactcttcttcgacagccgcctcgattaaacctgtttccagaaccctctccgactcctcccgttcaactcccattccggtatatcccttgaatcgaaagtcattttgagaactcccttcccctttaaattgaagcaattactcttcgtcgtatcacttttaattgacaaaccatacattggcaccgcctcccccgtccgcggcgtaaccattattatcggggcatgacaaaccttatcccagtgagccaacttaccacagttaaaacagagcatggggagcttttcatacttaaactgcacccatgactctggtttcccatctactgtcaaaaagaaccccgtcgggatcggatgagaaacccaaatatcaatccatagtctcaaatatcctctccgaaccagtttagacttgctttttccatcggtttcaacaagctctccaattttctt

SEQ ID NO: 42244 - DNA, 876 bp, Cannabis sativa
atcatttttgtagtagtgaatgccccctctagatgtatccatcaagcgcatccacaagggtttcaatttcttcctcccacgaaggtaggaggccttcctgtatccagaccagccccgtcctggaggtgcatccactgggcttcagatgggcttggttccatccttccatatgggttgtatctgttcttttggtcggcagtgcttttgggctaagctatagatctcaaattggaagtcccacacgccacccttccgaaaacactgataacacctattatagtaaatttcattttacataagatgcaggccgaccttgagttgaaatgggccccaggcaaaaaaaaaaattgggccctttctataaagataaatagttttttaaaaaattattattaaaatatgtatattttctaaataatatttttttttatttgggctcctaaaatgagtgagccttatctattcctagagttgaacctgacaagatgtgaatgttctgcggtacgtgattagtaagttttatcttggttatgatctgttatttatttatttgttattattattattattatttttttttttgaaaggatgatgtgttattttagcatgcatacctacactagatttttcattgaattactttcatttttatttaacgttaaccatataaaaaactttagaaaatctggttatgagattcttactcaataataattttattattaaagatgatctgttattttaacatgcgtacttacactagattttttattgaattactttcatttttatttaagctcataaaaaattctttaaaaaaaaaaaaaaatctgataatcagatcattgttactcaatatcaataataataataata

SEQ ID NO: 42245 - DNA, 763 bp, Cannabis sativa
gcaaccaaagcaaaaatttccttgcagatggctagagggtcatggtcatcgtttcgattgttgtaggtttcaatactttggctcctaacaatgagcctaacattacaaaggttcttcgtcgtaaccaaattttctacctttcagacgtcttcagggatcttcctatataatatttcctttaatgcgaagattggggataatttttgttcgatcttgactacaaaaccaaggtcatcttcgttagaaaaacagagtcgacaaaggagaaattgaatgaaaacgacttaaagtctggaaatcttaccaggagtggagaagtctagagacaacgttggaaccctcttcagcgggaatccagaggtaaaaaaccagtagtcccgaaagttagggacatacttagtgaaactagttgaacaggatgactgggcaaaacatttttccaatttgtaaaacccaattttggttttgtttttcctcatgtgttgcaatctgactgcgtagaaataaagaatttcttctcagctttgaatatctagcttctggaacttgcacaggatgtaccattcggtcagacgtttgtatgattgagggatgagttggaaaggcacgatccctatatgtgcgcaaaaattggcaaagtaacttcgcaagggtaggtgggctctacaaataatatgcatctagctccacgctctgaagccatccacaacttggttgtagactcgcatggagagcctgctccaacatagccttgggacgtttg

SEQ ID NO: 42246 - DNA, 11767 bp, Cannabis sativa
  modified_base (27)..(28): a, c, t, g, unknown or other
aaacgtgattaactgctaatttccaanntaaactaagcggtctttacagcttcatttgtatctctgaatcaaagtcagacaacttgattaatatattcacagctgtgttggagtctataggcacaattaattggatcgatgatacttatagacgtgagacttgtggtaatgtcaatgttagaaataaagaacaacacactgttacaaatgaagagaaatcctctggtcaagctacagaagttggtaacacaattcatgttcaacctatgagtgaagccacatgagctgatattctagtggtcacccgaggttattctcccatccatatgtccaccccatccacaatgtatggaccagaagcgagataaggtgaaaaagtggtctggtgcattgtcaaggcttacatagatcaacaatttttattgatgggatcaaaaattttaatgttgccttcaaagataattttatcgctgcaacaatagaatattcatgttgagggcaacaatctccccattctgaaaggcaacatactcatgttgaagaggaacattctccccattctaaaaggtaacatactcatgttaaagaggaacattcttcccattttgaaaggccacaaactcatgttgaaaagcaatctactccttattatgaagagcaacctctacaagatgatgttgaaggtgaacctcatcaagtggtgcaaacaaatccaaagagggtaccaaagcgttcacactacttggagccaccatatactgacccttttcattatactaaatctttcaccttttcattgtatatacttgtatagtcatgttgaagggcaacaatctctccattttgaaaggcaacatactcatgttgaaaaggaacattctccctattctaaaaggcaatatactcatgttgaagagcaacattctccccattttgaaaggcaatatactcatgttgaagaggaatattctccccattttgaaaggcaacacactcatgttgaagagcagtctactctttattataaagagcaacctctacaggatgatgttaaagttgaacctcatcaagttgtgcgagaaaatccaaagagggtaccaaagcgttcacattacttagagccaccatataatgaccctcatcaagttgttttgcatattgacatacaaacactagagttgattgtatatgagtgcagtattggagcgaccacatcaaaagaaatggatgatttaaagttgccacttcagatgataattccgaatatgctttatgaatctttacaatttcaagagatagcacaataccttcacaaaccgtgaacacataaacgattacttgattacttcatgttctacaaaattcaacgtaagtatatttataagtctgttcatacatgccttattagttgatatttatagcaaacagatatgtatcattgattttaaaaatttcttacaacaggagagattatacagtgtatgcaattaagttcattgagttagacatgactgatcttagctttgaaagcctatcaaataatagagtagcattcaacagaaggaagatgttatatattttttgtcaataaggggaccttagtaatttgtgtttagttatttgcttatattatgttcaatgattacaaatctcaacatatacaattgagctctactttactgacaagtgattgttgattttatggtactaaatcaggtacgcagcagaagattttatatatttaattatcattgtactatagtcccaatagatctccagatgtgtatacattaaatcaaaacataaaataataagaaaatagtatatacctcttgatgactatcaagatatcctcaaaacttctcgtaagttatattcttttggttgatcagaaactcacactatagtttttcaaatcaatccaccacacacaaggaataatgtgggctattaggataaagtttataatttgttcttgatcaattctcaacacatgaacaataactatttgagagagaaaaataattttccttttctcctctatattttgaaaatagtactgaacaatcatctcctgatttcttaaatcatgcttctatttatagtagttaaatctccattatttaaatcatatttaattattcaaataaatatctataaccgaattcagttactgatatttcaaataagtaaatctctcaactattttgagggaatacctcaaccaacttgaaatatctttaaccacttttcaaattcaaatagttatcttgaactaattaaataattaatcagcccaaaaacacaaaaccaataaggacacgccactatagggtaggctcctaccttgtctcgattaagacaaggatggtgtcttttatcctgacaacttttatttaaaaaatcattgtcttgacaaattttttcataataatttttattttttccctatttaattaatttaaaaaattatttatttattaaaaaaataaataattactattttgccaattcaaaatagattttttcgaataatattatagaactctttattcctacccttgacagtgtttcaaggtggcaatacgaggaccatggacctattatttattgactctcatcaaccaaataaacatgcttattaattccatacttactccactataaatatggaattaaactcttagtcattataacattatatttactgagttttactgtagtgtctattgatataattaattccattgattagccctccttgtattggttcgtaattaattttagttaaattacaattttactcttctaattacttcttcatcctttagtaccattaatgcactattagaagtataatttagatcccatctaaatttgtgtgcaacttttcagtactaaaattaacactaaagggaaccaacattcgatctgttaggaaagtcaggattctattattgtagatcatgtttctagtcattcacattattagatttccaaaacataagttgtaagtgcgaacctcagatttgttcagctgacagcatagccttatttatgattgacaatcaccacatgtaaatcgtaaaagtaaataaagaaattgatacaacaatttatataggtacgacccccttatttagtaggaatgacctactccccttttagttttattgattcaagagataacaccacaaagattacaggcttttaccttgtaatttctagtatggctcgctttgaatgttacaataatgagaatgatgtatggcatattctaaacaagtgagatgagaaacagactaagtgtctgatgttcatgtgagagagagaatgagagtgctctaggatttttgagacttagaactcaagtcctttttcacttagcttaatgctctttatatagtttagagcttacaaaagatctatattcaattaggctaatatccctcaaaaataggagacattactcttttatcatatatttaagttacaaaaataactaactaatatccctaaaagataggtagatattttgggatttagtccttacttttgtgggttgttggagccatctcgtagctgaaaccgtggtatgacccatctaggaggatggctacggaccccaccattcgattgggcttcttttgatactctttataggtgttggtcgacctatcttctgtttggggttggctggcacacactcatccttggccggccagggtatggtccggccagaccctctaggtggtcattttcttgtaacttgaccttgcctaagtgttggatccttttccaattgatgtgatatgcatggtgactatgcatacctattgacacgttgtattccacgtgactctagtctggcctacgtggataggaatgatattttaatacttttagtaatgggaatcaatagtaatgtaatcattcccttatatttattttaaaactttattaaaattagaaaaggaagaacttgattaaataagggataaaagaaatggaatacttctccaccaatcttttaaaagaatggcactaaaggaaatgacttttatctatttttattttattttttaatattaaatatataatgataattgtgtcctttaaaatatgtctaataaaaaaattaccatatacaatagaataactaaaaagggtaatttaatcaatttaagcatttcgattgcgttttgataaagtaaacaagataaaataattattattccatttttaaacaattttagtaaataacatattacaaatattgaggctgtttaacttgctttcagttttcaaaattgtattttcaaaagtgaaaaacagttttttgtcattttaaaattttaatagtgtttgacacaaattctttaaaactatttttagatttcttcttactaaaaaaatattcaatattctacaccataccatgacatgaacccaatctaccccaaacccgactcgaacttggacctcggcccgaacacagacccgaccctaaacctggacccatacctagacccgaactcagacccagatcccaaacccagacctggaccccaaaccccagacctagacctgaacctagacccagacccagacttggacaccggacccagaacttggaccccgacctcggaccccgaacttggaccctgaaccccaaccttagaccctggacgtcggaccctaaccccgaacctaaactcagggctaggtccaaaaatccttggccatgtttgggatccgagtccaagtgttaggggttcaggtttgggtcccaagttcggtgtccgggtctgggtgtgggttaaggtctggatctgagatttgggtccgggtccaggttgggggtctcaggtttgggtccggatccaagttgaggttcgattccaggttctgggtttgggtctgagtccgggttcgggtctgtggtccttgttcaggtctggtgtccaagtttgggtctgagttgggattcgaggtatgggtcgaggtttggggtccaggtctgaggttcagggtccgggtctaagtttggggtccaggttctaggtcagggtctgggtctggggtttggggcttgggtccggtgtcgaagtccaagtccgggttcaggtcagggtcgggtcctgtgtttaggtctatgttcaggtccgagttcgagtccggtgtctaggtccaagtttgggttcgggtcaaggtctgggatccgaattcgggtcgaggtccgagttcgagttggggtccgcgttcgggtaggggttcgggctgggatctgggttcggtttcgggtctgggtctgggtcggggtcggtgtctggatccgggttcgggtctggttcttggtctagggtccgagtatgtaagcaagaatataaaatataatatgttagattaacaaaaatatttttgaaaattaaaaacaacattttgatattttctgttatctagtttttaaaactcattttttaaaaaatttagccaaacgattcctattagtttttaaaaattgtttttttgttttttaaaattaaaaaagtttttaagttatgaagccaaacaaacttattgattctcattatttttcatttatttcgttaaatttctctattaatccattcaaattctgagtaataaaatgtgtcataaaatgaaaccacatgaaaaaatagaataaaatattttcttaccactaaccaaacaccacctcccatttctcaacgtgaatttgaactttcctaatctaagtattaattaattaaaacaacggaaggagtcgggttagacccgaatccacaatatacaacccatacccgccatacggtcaaaacaacagaacattccagaaccaacccgtttctactcacaccagaactctctggtcctctaaaccctttcctttcttttttatactattagagaaggaaagagagaaacaaagaattattcacacactcaaaaattccttctttccattcccttccaatcctttttcaatggctgaagaagccaaagctaaaggcaacgccgcattctcctccggcgacttcacctccgccatcacacacttctccgacgcaatatctctctccccaaccaaccacgtcctctactccaaccgatccgccgcctatgcttctctccacaaatactctgaagccttaaccgatgccaagaagactgtagaactcaagcctgactggtccaaaggctacagccgtcttggagctgctcacatcggcttaggtcagtttgacgatgccgtttcagcttacaagaaaggtctcgagatcgacccgaacaatgaagccctcaagtctggcttagccgacgctcaatcttcggcttccagggcccgttcagctcccccgccgactaatcttttcggggatgctttctctggtcccgagatgtgggctaagctcaccgctgatccgactactcggccttatcttcaacagcctgattttgttaagatgatgcaggaacttcagaaaaaccctagtaatcttaacctttatcttaaggatcagagagtgatgcaagctcttggggttttacttaacgtgaagttccgtaattccactggggatgatatggatatgcctgaggcttcgtcttcgcctccatctgagaggaagcgatctgctgaggctgatccgcccaaggaggagaaagagcctgagcctgaacctgagcagatggaattggatgaggaggagagggagaagagggagagaaaggccgaggctcagaaggagaaagaggctggtaatgtcgcttacaagaagaaggacttcgatacagcgattcagcactacaccaaggccattgagttggatgatgaagaaatttcatacatcttgaaccgtgctgcaacttatttggaaatgggcaaggtatgttctttgctaaaacccttataatctataacccctgcatctcaattcgatttaatgaatgtatgaatgtattagctatcattttattagcttttggggtaccaaatttgtgtgtttgagccatttgggttatggttaatgacaaatgtttatgttattgtggtatcttatagtatgatgaatgtattaaagactgtgagaaggctgttgagaggggtagagagcttagatcggatttcaagatgatagctaaggctttgactaggaaaggtactgcgtttgcaaaaatggctaaaacctcgaaggactatgaacctgccattgagagtttccagaaagctcttactgagcatcggaacccagatactttaaagaaactaaatgatgctgagaaagctaagaaggagttggagcagcaagaatgttttgaccccaagttggctgatgaggagcgtgagaaaggtatgttgattgttgaccagtaagatacattcagtccttgttgactatttttatgttctctggttgctctgttttttctttcctcaattttctatgtctacaattggttggactaattttcttattgaaaggcatggacaatgctttttttgtgtgtaaattatgttgcttgactgattttatggcaaaaatccatttgtaggaaatgagtttttcaaacaacaaaaatacccggaggctataaagcattacactgagtctttgagaagaaatcccaaagaccctaaggtaggatcaactccaatgtctttatgaattgggctacaaagaatacaattattagcttctgttacgagcaagttttgctgaactgatgctgtgtttcttacaggcatatagtaacagagctgcttgctacactaaacttggtgcccttcccgagggtttgaaggatgcagagaagtgtattgagcttgatcctacattttcaaagggctataccagaaagggtgctgtgcaattcttcatgaaggaatatgacaaggctttggagacataccaactaggtttgaaacatgaccctcaaaaccaggagttacttgatggtgttagaaggtatgacatgcaaaaggataagcactaacttaaacacaaacttgcatatgataagtagagtttgcttaccaaatgccgttggaaattcttttgttacagatgtgttgatcaaattaataaggctggtcgtggagatttgactcctgatgaattgaaagagagacaggtttagtttcttctgaacaattgttctcttagggttgattcttattgaaaagacattatctttatgatttatagttgtgttaactttgtttgataatgttgcaggccaaaggaatgcaggacccagaaatccagaacatcctctcagatcccgttatgagacaggtacttatacttcgaaagtttctttatcggttactcgtaaattccatgctaaatttgataggggactaagaggtaattttgggatatgggcaggtattgattgacttccaggaaaatccaaagtctgcacaagaacacaccaagaacccaatggtgatggccaagattcagaagctggtcaatgcgggaattgtccagattagatgaagtaaattatccaattcttatgaaccacaaagagaaaaaagctttttcattattttatgtttgtactcttttctagtgtgaattcgagtgattaattgtccaaagctactcggttgaaaaattttgagatccttaatttgtttcacatatatcgcttagaaatgttggttttaaactcttttaatcactctagtctcttcgatatattttagttattgatgcaggttatttttctttgcattacaaaataaatatcggttcacatacgtatcattagtgttctcaatgagtttagagggcattagttattataatatcaacgaaaattaatggtaataattaaaatattaaccggaaatcaatgtttatgcaattattctgccaccaatattcagtgatgatttttaattaatatttaaattcgaacagatatgaatacaaaaaaagaaaaattataaattgaatgcattgatgaaattaacaaggcaaaagtagtagtatcccaatgaattttccttcgaaagatgagatctatgtttatctttgtctacgttgtcctaatcgttattatttttgaaagttgaaatgcaagacaaagtactcaaaagaagagaattacgttcattattcttagatgtgcattcaagcaacccttgcctttacttagattaacctcatttttataaccttaatttatattgattctcttcaaacataatctcataaagccatatttcttttgctaaaatgaggaatgacatgaatttcaagcatttactagacacacttaaaaaagaatatcctataatacatcttttgttctcttgtttgaatctgacatgagagttcctgatacaaaatatgaaggtgaaaaaaacaaactatgatttgccaaacaaaattgtaaactattattatttgccaagcatgagaaaaagaaagatcaagcggtgacttcttgctccttggcagcagcaagctcattttggatgtgttgaggcacaacgtcgaacttggctaactgcatggtgtaggaagcacgccctttagtcattcccctgagtgtactaacatactgaaacatttctgctagaggaaccagtgcatcaaccacctgcaagttcaacccccgaaagctatgaactttcatgaactatttcaactaaaataaaatgagttttgttcaagtgaactttatgttaccttgagaccgccaggtttgtcgccgaaactgtttatctgtcctctcctggagttgagatcaccaataacatctcccaaatgttcttcaggtgtgacaacctcaactttcatgattggctcgagcatcttagggccagctttcctcatcccttcccggaaagctcctctggctgcaagctgaaacgccaatacactagaatctacatcgtggtaagaaccatctactagtgctgcacgaacatcaacaacgggaaagcctgctagcacaccgttgttcatacactcctctaaacctttcatgactccaggaatgtattcttttggaactgcacctcccttgatttcactcttgaactcatatccactgcctgcttccattggctcaaaccgaacagtgatatcagcaaactgaccttgcccaccagactgttttttgtgtatgtacttcacctctgctaccttggaaatgctttctctgtagttcacttggggtgctccaacattagcttctacctgcaaaagtgataagagcaagtgaggcgtaaaaataaaaggtagtattgaaagacaagattaagagatgaggaagaatatacaaaccttgaattctctctttaacctatcaacaataatctcaagatgcaattctcccatcccttcaatgactgtctggttaatctcttcgtcccgtgaaaaatgaaatgaaggatcttcttgcgcgagcttaatcaaaccagtagccattttatcaatatcagctttagtcttaggttcaattgccaccttaatgacaggatcagggaagtccatccgttcgagaacaataggattgtcgggatcacataatgtttcaccagtaatggtatcttttagacctgcaagagcaacaatatcacctgccaaagctactttaacatcctctcggctgttagcatgcatctctagaagtcgaccaatcctttccttctttcccttgtttgcgttcatcacatatgacccagcagacagcttcccagcatagattctcacaaatgtaagggtacccacaaatggatcagtcatgatcttgaaagctagtccagaaaagggttcatcatcattagcagacctctctattattatttcagggttgtctgggtcggtacccttcataggaggcacgtcgagtggtgaaggcaaataatctacaacagcatcaagcaatggttgaacacccttgttcttaaaggctgagccacataatactggcacaaaactaccgccgatggtacccttcctaattaacttctttatggtttcttcatcaggctcttctccttctaggtagctttccatagcactatcatctagctcaactatgttctctatcatttgagatctgtattcttgagccagctcctgaagatcctctggaatatctgtatactcaaactttgcacccaactcttccccggaccaaattatagctttcatcctcacaagatcaacaacacctttaaacttatcttcagcaccaactggaagctgaatcaccagtggtttggcacccaaatttgtaacaatcatatctctggttctgaaaaaatttgcccccatacgatccatcttattaacaaagcaaatcctgggtacaccatatttgtcagcttgcctccacacagtttcagattgtggttcaacaccagcgacactgtcaaacaagcatattgcaccatccaataccctgagggctcgctccacttcaagagtgaagtccacgtggccaggagtatcaattatgttaatccggtgcttgttccaaaatgtggttgttgcagctgaagttatggtaatccctctttcttgttcctgctccatccaatccatagtagctgttccctcatgtacctctcctattttatagtttcttcctgtataaaacagaaccctttctgtggttgtggtctttcctgcatctatatgagccatgattccaatatttcgataatctttcaatggcacagctcgcttttccgctgaagctaaaatgacaaaac

SEQ ID NO: 42247 - DNA, 1477 bp, Cannabis sativa
aaacatagaaatgagaataggaataaaatgaattgaaatttaactgcattgacatttctatttgtttttagattgttatactatatccatactattattactgtaattaattatcagcttccacacattttaatttaacaattgttattaaaaattattaatcagttgtaacacgtcactgcaaatactagtcttcttcttcacatcgacggtgcaacaaatgtatatgcttatacagatatttgttcctgaaaatgataccggtgttggtccctcgaagtgaagatactgatgatgttgctgccccctccccgaaatcatggaaatgtttggcactccttcttccatgggtattcttggtaggttttgttgggttagaaaattgtagagatataatagggaatcatttaccttgtacacatatttgtaaatgatattaaaaatacatatatacaatgttaaaagtatttttgggtttatttctaatttttatatttatgtcatcttcagtgacatgtctaagtctctattctactgaagagtgaagacaaagtagctttacatgaaaaaagtaccattgtggtccctagtgtgaggtcttcttcaagctcaaccattcaagggagcccaatcaatgtaatatttacttgaatcttgaaggtgactctattaatgtaccaaatgaagttagttgtcacttgaaagagtgtatactatacactactaaattttatagatttaatacgaaataagtatatgtaataggtattgatattaagttgtccaacattatactgatgtagcgtgttgtgagtaattagcgtttaaatgagacttgatattaaattatatcaatagtaatatgttattttttgtggtactactcttaacttttttaaatggataaagagttgctgagtttgtcaccaataatgatgctgtattgaacatgttggggagaagttgttcaattgtcttatcatgttgattgtttgaatccttttggaactttttatttatttcaaaactggatttctctaaatattattcttcttgtcatttgtgaaaatgttaaaaaaagcaatcatataataaaactaataatctttctttttccctttaaagtttttcaatcttcttctcaccactagatgtttctttttttgaatctcactaccagtttttttgcttttctttctttcttctaacctcactcactcatagttaaaaaattaaagatatttcgatgatgactaattattattattatacataagttatgactatcatataatgatttaaattaaaattttgatatgttttgaacttaaaattattaaaaactgtcattgttgtaaacctcaacaatatactttttattggtcgatctttctaaagttctcatttcttattttatttacattttctttaattgtcaacaagaaatatcccttttcaattctgtacaatatttatt

SEQ ID NO: 42248 - DNA, 5213 bp, Cannabis sativa
ctgaggacctgaccaaaggtacaccatgacgactcacctaaggcttgcatgtgaagactcccaaacctgcaactggggaccacacacctacaactcaaaaccacgcgtctgcaactcaggagcacacacatgcagctcgggaccacctaggagcgcaggcttgcaatcggggaccacatgacactagacaagagtacgaggtgccaaagcactccaggcacatgcaacccacagtttgaaagcgatgtgttgataccttttgaccatgttgtacccttggccactagtgcctataaatacccccatttgagatgtgagtggggttagaagttcattttttggtaactcataaagaaaacgcaatagagagcattattcattcatttcacttcttctctttatctcatattttaatagttacatattttttgaaaactaacttggttgacgagttctgtccatcaacaccaagctcaaaagaaactctcatttcacttctaaataatcatagaagctataggtgtacgtatttatgattaacactcctactcaattgaaatactaagttcccaagatgtaagtatgagctacatcgatgggtaaggtggttacgaacaagttaaaaagctcaagtaatataattagcttaaagcttaatcatctcaggattgagatcaaattgactaagatcaactcggtgatgttgacttaaaaaagatataatggtaagtttataatatcactcactataagtttactttgctaataccttagaaaagacataagtgtaagtaaaccacatcgttgattatcacatcagtataaattcagtgcactcaaaaatctcaggacttaaataatttgaaggatataatcacaattatttctcactatagtgacaacactataattgtgaataactatatgtttagtatttagcaaaatttatatattaaacaattaatcatgaaataaacatgtgaacaaaacaataaataataattcaaaaatgatctctgatattatatttatattgaaattaattttattttgggtacaaaatctaaacacaaacaaagtggaggtcttatcctcgatgccaattgtgtatcctaacaaacctaagtgatctttgtctatactttttagtagtgttaatttttagagacgtcttacggttggttagcaatattgtctaacagctattttcttaaattatatgagatttaatacttaattacaccaacaacattattataatagcctttaacaagatgctaagcaagagtactctcttttagccattctctaattttttatttcaacagcttataataatataataatgaagaaaactgagaagcggtattgccttgactttatgggtcaattactctatttaaggttgtcagaaaagcaatgaacatgattggtaggctggtatgctgaagcaaatcctacaggcgtccgtacaaactacatttaaaattttacatcctttgtttgtttgtatactcttttcatagaaaaggaaagtaaaattattcatttgagtgatcgacgattaacaaggcaaccacactgtggtcttcagtgacaggtgagtgcgatcattgtggtcctcctcttcttcattctctcttcttctgttattcttttttccaagccttacttcttttttcaatcagattcataaaagaggttaacatcatttctgtgctttatgtatgcatgttgacttctccatgatcattcttttcttttcaatatctgtttttgaaagagtaaaaagaaaaaaaaaactctgcttggttggtgataaactgataggaaaaggaaagtaaaaaaaagaaaacaaaagtatttacttaaatttgtttttaaaaattatcttggggtcttaattaaattcactcttactatacaatcaatttccaatctgcgaaaacctatccagagggctgaaaaaattgttcatctatatttaggaactgattagagtaggttctctgggattaatctttttaccgtggtccgttttcatttttcactttgtgaaatgatttcgaggagagataataaattttcgttttcattttcttcgctaagaaacagacctgaaatgtgtctaatatgtattgattttttttttcttcttcttcttcctgatttgcagcaagaaactatatatggagttttggggtaatgccttgagttgttttctgtgttgccaagatgagattgatgatactttctacatagatatcaatattataagtagcattaaaaataccttcaaaaggggctctccatctgatcatgatggttctgttaggactagcagttcttctagtaacaattaccaagtaatacataattgggattatcctaatgtagttcaacaagaatctaatcataatagatcttcttatgctcaaaatcaagctcatgtggacttagaaaggagtcagttgcaagcgctattgaatagacatctattatcatcatcaacaacatatactttttctgctaatcgatcttccagttcttcatctaaactccctcattcttctagttataatccaccttcaaggcctgcagcttcgtcgtctaaggtaccatcttcctctgaatcgaattcttcatctacatttcctcaatcttccactaaaaattcatcttcaaagcctacaacttcttcctctaaggttccatcttcctctgaatctaattcatccccccataagatccctccaaccttcaagccttttctgtcccctacttctccaagtgtttcaacaaaacaactaggaaaaacaaattacgtgttggaagagaacgattcattaccgttgtacataattcctgaggatattaaggatttgataaagaagggcattgtgccagaaatccttaagaagatcctgtcgcccacaagatacaaggattacttttctgctcttttatatgctgaagactattactatgaggtaagagcagataattttatcattagttattcaagaatcaagacatacaatgtaatgagttatgctcatagaaatttgaaggtgaattactatatgatattactttcgatctggcttcagaatagcctatcactttagtttgttttattgttaatttcaatgaatttttttctatgaagtaacataaaaatagtatgttagcctctagtgttaatctgaagaatattcaatttcatgaaagagataattgagaaagaattttttagaatttatgtgctctaggaaccatatcaatatgacaccaaaatgaaacttcgagcatcacttaggcttaggcatagactgtccctatttgtcattaatatcaagtttttcagcgttagaatttttaacttttgctttcctatgaccaggtgatccaataagtttatcaataatggtgtgatgtgttcttgttttgtttgattcagaaatggaacgattataaactgttggatgtcacattagagttgcgtaaagaaacaatttcgaagaacaagaatatcaatgaaaaagaggataaacagtttgtggcattcaagatggatgctatccctgagagacggccatttcttttgtcaagggatttggtttttgcacgaccttcaggaaccaaagtcgagccctttcaagtatgtttctagaccttattatgccatttgaacagaaaattaacacactgctatatatataaactaagcttagctttgcctacgcagtactttgattgatttgaattgttaatacaatttaactattttgcacagaaaatgttaatctttatacaaaatgttttagcaagattttgatgatgttgaagaataaataagcatgtgagcaactgaagaataaatgtgtttgtgtttgtaactatttcatattactttttatagaagtgtggctctatacaaacactagtatatgtatatgctttctccatcaatgacatgaactttacaacgtttgtccagggaacaatttatcgagtgaagcatagcaatacagtgctagtcgaattcaaaacaacttcaacaggcagtatcacccaaacaaaaggtacgacatcagtttctcattcaacagagtcaatctcaaaagagctcaccaagctctcaattccatctctgattccctcctcgaaaactttctcttccccacttctccaactcgcaagaccatcaccactccaccaaaaccacctcccaacctcgatcaacaaaccgccactgcagttaccaaaatcttagccgtgcattgctcaccgccttatctgatctccggtcctagatgcgcctctgaaacgaaagccgcctctcacctgcgagaaccatcacgtacgggagccatcatccgagaatccgtggtccaaatatacaaaacctcaccgaattgccggatattgatctgtgcgcctacaaatagcgcctgcgatgttctaatgagaagtctgaagaagtcaatccctgtttcagccatgtctagagtgaacgcagcttttcgagagagagaggacgtgcctgaagatatcctgtcctcgtgtttgatcgaagaagagtgcttcggttgtcctccgatagcaaagcttcgagaattcaaagtgatattttcgacattcatgagtagctttcgtctccataaggaaggactgcctgtggagcacttcagtcacatttttatggtggacgcttcttacggcatcgagccggaggcgatggtggtattggccaacttcgctggagaaaacacggccgtaattgtggcaggcgaagtgggtggttcaccgagttgggtgagatcggagattggaagaaggcatggattgaaggtttcttatttcgagagactcagaaagttcaagccatattttggactaaatcccgagttcactatggacttggatatgaatcaagatgccgtttatatgtgatttttttctttaaaaaaaatatttaactgaatccaactttcgtgtccgtttaactgtgttacatgtaatgaaggaaagaaaaaaatacactaccgtctccatttggtttttaaaaagcaataagggggtatgggctttagatctttagtacactttaaccaaacactcttggctatagccaaggagaatttttgatagaggaaattatgaagaatttggcattttttccttaaatttcataaatatggaaaaattag

SEQ ID NO: 42249 - DNA, 2241 bp, Cannabis sativa
atttgaatttgaaattctacataacactcttgcatagtaatattactgaattaaaattactataaagtattatatatatcactattaataattattataaaaaactactaattattattctcaaaatatctttattgttgtattaagtgcactactaatacctaataataatattcagtatcattttgttattgattgattgtgttgtgtggggcaaagtagtgtatctttttctctttataaaggcatgcatatgcatgtattaatgccgtatagcattggataagtagaatcttctaaccctacccttttgcataatacctttactttatctttatacttcctctataatgtctacacttatttaagcattattaggtacttgttattttcaagatcatcacccctctcacaatattgtcgacatgtatatacatataataaattaataatataaatatatagtataggattttatcttaatgacgtggccaatgctatacctagtaagccttataacattaccactatatatacttacaagtactcttctatgttcctcctcaaataacaacaataatggcctctaataatattaataataatactatggagtataattataataagaatgatgatgagttatcaaaagaggttgatgaagtcaccgaaatcgatgtggctttacttcgagatttgcttgatgatttggagaaagatgatgagattagtatgaacaaaaatactaatagtactatagatgattgctcaatcgaatcgattgttattgatatacagcaaagtactagtactcatgacgatgaagttgttgctaatgataaccatgtgtttgatcttcaacaacttcatcatgatgagtacttgttcgacttcaaatggatggagaataagatagagcaaagtgtaagtgacgtggctgtttttgattggtttgcagccgataattcggttgttagtatcatggagggtacttttgatgagtactcttattctaataatagtaattataatagtataggagattatattaatccaagcttgtaccatgaaactccttattcatgttgtttatgggaaggagatagtacatagttaaaactagctagaaagtgttaagagagagaggatcatgtgatatgaggagtttttatagttagttagtacttagtataaatatatatttctaaggtttatatgtgcttatggttttaaaccttttgtggttgttgtagaattttattattagaatttttttcctttattcctctctttataatattctaaattcatattcttgtaacttataaatttatatattaataataacaaaagagtaaaattatttgatcaagtagttaatgattataagcttttgtttcttgatttgagaaatatttttattatttttattaaacgatcaactaatataataacttatatcatcattaaaacttttatattttattttgattgtcacttagatgatattttaattgattttgctatctaatttggtggtagagactacgttataataaaatttgaaattttcattcaaaataaataataaataaaaggagggaggttaactactaataactctcaaacagtgtacaaatattatcaaagcactcaatggcatagactcaatgtattttttagtggcaaaaatacccaaacttattaaaagtgtaattcattagtttcgcacttaccttcttgaagaatgaattatagaagaaaaaaaaaattaagaaagtcactttgtatttaaacaaaaaattgagatctctttttagaagaaaaaaatagaacttataatgtgatcttataatattttgaaacaataataaacatattaagaaaaaaaaaatctcttacaaaaatttagaaaattattttcctctactttcactttcacctccttgaagaatatgtgaacaatgctaatgcaaaaatacatcacttaatatatatcaagcaatgtctaaatacatcctaatacacactagggagcaaatgtgaataaatattctaattcatggctgtgaaatcttcaacacttttaaatttggttaggttgcacatttttgcaacatcaggtttctttagaaccaacagtgaacttagctataaaaaagccaatagtatcgagccgagatgatggatcgaacctttgaacgagttcttcctccccgggtcttaaccacttcctgaaaa

SEQ ID NO: 42250 - DNA, 595 bp, Cannabis sativa
attacataaaaagtataaatgttgactttaccttatggatgtatttttgcaaataaaatatcaatttatattttctatgtaataattcctatattaatataattaaatttacatatatataaaatatacaaaaaaaaatatgaatattaaattaattgtgtttaaaatataatattttaaaacttagaaattaataataaagaagatttaaaatcaaagtgatcatgtgtataggttataattaaatttgttaggagtgtaattgttatttgaaaccttgcatcaaacaaatagtgttaattaacttcattgttgatgatcatgttgaatagtgtacgaatccccattaaaatgaagttaggttgaagaatagttttcggaaaatttgaagttaggttgaagattttggtgaatgaggtacattttttttagaaaaagaaataatttcattaaaagataaagagccaaaaaaattcaacgatcattacaaattattatttatttagtttagtcgggactcttattttattcaacttttgtcgaaaattatttctaagtgataaaagaggagaattcatactctcttttttattag

SEQ ID NO: 42251 - DNA, 3713 bp, Cannabis sativa
atctaccacaacaaagccccatgcttcaccagaagagttcgaaaacctataccaacccaatcggcaaagcaatggataagcacacccgatggctattgcatgagacccattgatgggtgaccttattactcgatgttagaataaaataagaaatagcaagaattttaatccttttttagggtctgtgccacaggttgggaaattttcttttctttttttttttttttgattttatgatttaaatatattaatttattttgtgtatcattttaataaattaggtgaaatggataaaaaaaaattaaggaataatcaaaagacgtgtttccactacactaacttttgttagcgagtatcaacgataaatggtaaaaatagagtttttaatatttgtgctataaatctcttaaattaagtatttattagcaataaaatgaataaaattaatatttatgatacaaatttttctattcattatatagaagtaattatatttatatacttcttttcttatatgtagtacactcttaaaaagtgatttagaagactccgtttatgtttcgtcattcaggagaattttactccatttctttgatcatcgttgtgtttgttataattatttaaaattgtatgtaaattttttaaaaagttaaaaggtttatagtgccaaaaatagaatttaaaaatagaatttaaataattacttaccacacatataagaaaaataatcacgcgtgcaataaaatatttgaacattcttttttagcactatacattattcaaaataaaatttacagatattcttaaataattaaaacatacacaaataactacaatatacacattcataaaaaaaaaatataaaaaaaattcttaaatatcgaaatagatatagaatttactcaaaccttaaagagtatactataaatttacccaaatatatatatacttttattcctatacataatatcacaagcaaagcaaggattaattaattgaacttacaaattataattaaatagtgtatcttatatattatttatcaaccactcgattccaatttattacataaaacaatttcagatttaaataatttagttaaggtttagggcccagtaatcaacgagtacaaatttttgtatcagtgggctcggacgtttcaaatttttttctttttttttttttaaaaaaaaaaatcctctaaattaaaaaaaaaatcctctaaatttgaacaagaaaattatacagtatactcatttttcattccttattttaatttttacttttattttattaatttttacaatatatctagttttataggtcatattctgtgcattaaaaattttaattttaataatttatgtgactttatattttaataagatgatatttatcaattaaaattattttaaaattatatttaattaatgtgataaaaaaaatagtagtttttaacttatcataattccaattcgatcctctataccactgactatttaaagaagaccaataaattagtaataagtacctttattattttattttatttttttaaaaaaataataagtaaatgaaataaaatatctaggaaaatttgtggcacaaatagatattttgtttggcttgttgctaaaataaatatcaaatttttaaaaattgcgatattaatattcaaaactctttttttttattaatttcccttgataacctgaacaacataagatcaacttcctaagatacttctgtgagccaaattttttaatagtaacaaattatttttattaaaaaaagataggaacgaaaaagggtaataaatacccaaaaaggaaaccaaaaataaataaataaataaattcacaaaaaggaaacctaattgtggtgcatgtgccttacttttgaatgtaacggtaaaatgctcaccaattcttttctctaccctaattaaaatgatttatttctaattctaatcaaaatagattttgttcaaaaaaaaaaaaaaaaacgtctataaaaggtggatcctacttgaacttactttcttaacaatctataattttgatctttctccttaaaaagtgttcttaatccttattaaataagaataaatatatatatatatatacatatatattagtgttctattctctttttctttcctctaacttggtcatgtcgataatttctagtaaaagatcacatctttacaagttttacaaaactacatttagtgatttgaatatggatatattaccgttaatattccataaactttccttcatggatttatttcaatgcaagcaagtttgttcttcatggtattcttgtctcaaatttgtaaaggctcatccatgtctaatgcttcctaatcaagatgataatcattatgatgatgttgacgatgatactaatcatcatcatcagagattctttagcctcagttacaaaaagggtgctgaagaattttataaatttgaagatgaaatatttgatcaacatgagaatttgttcttgggatcttctaatggttggcttgtggttttgaacaaacccaaaaaagggtcttttattctcaatccatttactaagaagaaacttcacattcccaatgttggtactagccttacttgtacaattatctctaaagctattgtcgtttcatctaagaagaaacaaggaaacgacaacgacactaattgggttgtcgttatatatggatatgtgcaacaaaagcttgcatgttgtaaggttggaggtgatgatgattgttcatggaatgatttaaaagactctgcttatccaaatatgtctttttgtgatattttgagtcacaaaaatcatttatttggtttgtcaaattccaaccatgttcatatttgggatttttctcacaatgggtctaatgtccctactaaactcattccattagttccaaaatctcagccttgttttgatttgttgaaaagtgagaagtttaaaaaagaaagttacttttgtcaaagctacttggttgaatcaatgagtggtgagctattactagtgacaagggttgttgggtgtatagtgaactcagatggtgagttgcttgaagaggctgatctttacgatggtttgatttgtccttactcgacggtggcgatttgtgttcataagatgaagatgaagatgaagagagagacagaaaagttggagtttgaatgggagaatgtggagagtttggggtgtgatgaagctgtttttgttggaaggagtgaatcaatgtgttgttcaactgagtttgtaccaggatacaaaggaaactcaatctattttagtgatgataattgggatatgatggatattgattactcatttggtggtcatgacaatggtgtttacagtatggagactaaaactgttgttaaagttgaaccttggtttgatcagattcaagctgaaaagatttatccaccaccattgtggatacttcctaaactagtttagaaactattattgttagataatatacaattgaactgattcaattcaatataattgtcactatgttgttcttatttctctatagttataattttagtaaacatcctaaaatctcaatcacccaaatcaatgaaactaagctaatcacacaaacacatagctttcttaaattcaaaatagaaattttcaaacccattttttaccatttgaaattgataccaaatagtaataca

SEQ ID NO: 42252 - DNA, 1137 bp, Cannabis sativa
gaccgaaaactgaattctggatttttatatagaaaaaaccgaccaaaccgaccgatgcctaatcctaaatcgacttgcttgtttttggtcatcacattgtgagaattgggcaactttagttttgcctgatcttttggacttaataccctacctatacaccgtcggatgttattcctcttaaataaataaataaaaaaaaatcaaatcaaataaaaaagtcatttatcatttttattttatttattatattattaggatggatgcgttattaatgcatgggactactattactattggtagttggaggagaaccctgccgcgtccctagcagttgactgatctgagtctctctgaccagtacatgcatgcataatttcatggacattatcattcttccattcaccaattggatgctaaccaaattaatgcttccaactccattttcaataatcaaatgctaacgtagcattgtcatgattattaatagtgattataggtgtgcaaaaagtcatccaatctaattataattgaccaatctaattaaattagatatatccaatctaattataattgaccaatctaataaaattaatattcaattataattggattggatcggatcagatgtaaattttgaaaatataatcagatcgaattgattgttggatggaacatccgatctaatggataatcgatcaaatgatcatctaattatatttatatatttttaaaatatatttataattttatatatttaatatacatttgacacacgagattaaagaaaaaaaataaccttaaatttaaaatattaattctcatctacctaaatactaataaaattgtcaatgagtattaaataaattttattttttaacaaattttaatatgagatcatgagaattaggttggactaaactatatttattatgtaggttggattataaagttttaaattatgttatatatatattaatggaattcacttaaatggtagctaaaatggattggatggatccaacccaattcaataagaaaccagacaatgcatctaatggttggaaccgatccaatctaatatatccattggatcagatcggattggatgactcaatttgattggattggatcggatga

SEQ ID NO: 42253 - DNA, 2389 bp, Cannabis sativa
tactttcataattatttttagaaaaattcaaaaaaagaaatagaaaataaaaaatatccccttcctttttattataacaatcactacttaaactaataatctacaatcatgaatggatcacacttgaattagcagaaataatgaaagttcgtgaagttcttaacaggataaagaacataaatagcaacgtgtcactctcaaatcagatttgcttgaaggtaatacaaactttacgaaattctatttggaagatctccatctttgattaagtgattaataattgtaatcttttgattagtaatattcttgttatttttgttaaacgatcagctaatatagtaaatcgtattattgctacaacctttatattttatcttaattatcattttaatttaaatgatatttcaactaacttgctatcttgtttggtggcggatactaagatttaataaaatctgaatttttcattcaaaaaaaataataatttacaatctaatcgataaatatttttttcattcaagatttaatcataattaaaattaaaaaaaaaataagttaaataatcaactggttaaataattaataaaaagattacaacattcaaaagggaaataggaagagatcggagggtaatatggcctccaattttttttattttttaaaaaattacaattaaaaaataattaaaaataaaaatgaacaaatttcttaatttttattagcatataaaaaagagtaagatgaaacaccaaataccaagagtcaccataagctcaaatatcaaaagtaaaaagtacattcaaaaataacacttgctattaataaacattttttttttaatatgtgatcttcatataaacattttaattaaacgtttataaaatgctcaaaaacaaaaggaggacggtggcgcgtgtttatcttttcaaaagcgcgtgaaaacaatacaaacagtacattttcctttcttattatttggtttgccagaaaaacaatttttccattttaaactgtactgaaagtaagttattgaaacaaacagaaccctaataaggaccagaattatcagctacagtttttattaattaaaataaataaataaaaaataataatagatagagataacgatgaaagcggttgagtaaagtttcttttaataaaaaaaaataatttgaagtttgttttataatattttagtctgagtttgactgggtaagccaggctgtataccatttcgtgtgagatatttttttattttaaaattttcataaataaataaaaaatttggttttcaaaaaaacggccgcacggaaattgtgagctggcagaaaacgacaagagcggtcgccgaatcggagagcgaatcattactgcttttctgtcagtccagcctgtaaacctgccacaatctccacccttcacccacacaattaccaccgacacgtgtcgctatctccttcacttcaaaaatctttcccactttttttctttttttaacctgtacggaaccggctctccacgtttccccacaaacacaggaactttcctcttaccttcttctttcctactacttattaactattattatgctgagtttactaatttagaattaaaataaattaataaagaaatctaaaggaataaataaaaaataattgaataataatttattttgtttatgtaatatgtagtgtaattgttttgcaagacacatttaaaataaattgtcattacatatttaattataaaataaaataaaaattaatataattattatccttatgacattctttaaaaaatggtgttaaagtatttttttagagtaaatactattttgaatcctttccaaaagttaccaattggattctctaatagattttatattttctaaaattgtacaaataagaccttgaactgattttttgtcaaaataaaatttaataataatctgatctagatatgttatgacaaaactgtttatattttctttatctgtttgtgttagaaattattttaaaattagttatatgaaaaaataaaattgttgaaaattgagtttaagttcctatttttaccattttagaaaatataatatttattttgtcatttaataaaacatatggtctaactaataacttttgaaaaacacaaagtacaaattagtatttacctttttctttatcacataattaacaaagtttcccattacttatatttatttctaaatgggtactaattagagcctcttatgacaattttttaaaattaatgttagaatttttgaaaaattttaaatagcttacactaccgaaaacagaatttataatattttagtctaccacgtatattcaaaaaaatttcaaacatatttttcagtgctataaaattt

SEQ ID NO: 42254 - DNA, 1169 bp, Cannabis sativa
attgaattgcaagttattattttaactaattattattaataaaggcatatcttctttaaagaaagaatatttatttgtatataaatacaatgaattgggtgtattgcaaaaccaggcatcaccatcttcacatttagtccaaaatcagaaaagtttcactttgctttttttcaagtgaacaaatccatagagaatcttgtgatttattgagttgagcaatattgatacaaaaaataattattgtcaattgataacatttagaacccataaatcacaagatactaatttgctttttgcttgaatcaattacatcacaacaaaacattgaggaaatactccaaaaaaaaatatatgtatccctaccttggtattatttgaatgattgaatcatataggcaagaattttctgtgacttaaatctttgttatgtcaaaaaaaaaagaaaaagaaaattgtaaataaaaatcaagcaatgaaatccattttgccccaagaaaaaaatttgaagtaattctttctattttctagacaaaccatactcaacatcttttaataaactctcttctgttccttcattcacaagcaacttcaaatcttcctcttctttcatgatggaaaggcttttggctgaagcagcagcttgtttatcagcctccatggcccaactgtagatgatcattccaacaatggcgagcaccattccgagtatgttcttcattgtcatctccaaatcaaagagaagccaacctagtgttaagacacagactgttttcatgtggcctaaaacttggaaagaagtggccgagaagcgaccgatgcagaggtactggcttatgttgcagaacacagctagggagcaagatactagtatgaaaatctgcatagtaaatgaaagaagacaagagaaaatatgagatttttattcttgatagagacttagatatgtttaatcttcaaaagggtctacttacaaatgcaccaagagaaaatttatagcttgttatggattttccagttaagcaataatcaatgaatggaccgagaattagaagggaaatagcttgaattggagctgttttgcttagcaattcaaaagagccaattgagtacttcttctgtaaggtacctatggtctgtaacaccacaaaaataagaggtgaaaactatga

SEQ ID NO: 42255 - DNA, 1227 bp, Cannabis sativa
gtgcgggtgcagtttgggaaatcgaaaaaattgcatgtgcgggttggtttgaaaaaatagtcaaaaaccgcatcacccgcacagcgaacacccctagcagtaacttaaaatctaataaacaacatgtaagggaatcgaaagcagcgcacaaacaagagatttgggggttctcgcaatttgagagatttctagattttgaggaattgaagtggcaaagaggcagttagtggcatttgtttggttgactggggtcgagaatgggccattcatggccgccgtacacgaaatggtgggttgaattgatgaaaatcatatgcatcaatgtagctaaagtttgtcttctttgcgagcatttcaactattgtactacataaggaattctgcatctagaattaggatttccaagtaagttttcagtgaccaattttctcaattaagtaatagatatgattattttttgaattcctttcattatttttctcaagggtcaggaatttcgttttggtctcttctctaacttcttttttatatataaaatttatttaaatgtgtattgatgttgttttctaattctaattttcaaagttttgttgattgatattgttattgtgtttttattattgaacaaagttattggttattaaatatttttgatattggatagttatgattttttgcgggaggtttaagatttatattgggattgatgattcttttcccctcctttttgctaccacattttattagtatggtttcgagtaggaatcattatccatatttgattaaatagaatataagctctccacgatcttaataggggttatttggaggtttttgtacactaaaacttgtagtggtcaccttctaattaatagttattcatgtactccagtctgcccttttctctttctttcttatataaataggagatggagtttgttgttcaaagcctttttcctgttatttcccactcaatattacattttaccctttatcctttccttttcctgcttatggatctttcatctttttcttcttcttctattggtcgaacagagaaagaatcacgagtccgtcatgccatccttcaagatgatgacaatgcaagctcaagaatcaatctgtcttttgtagggaaatgttgggctttgtgccctaaataaaattctatttcaatgtaatctttaccattcaattatgaataaagaaacaaaattattttcatta

SEQ ID NO: 42256 - DNA, 1445 bp, Cannabis sativa
ctgaggtcggcgcaagagtcgacgcgcaccaagccgctttacgccatcatcatcatcataatcatattcaccatcttcaccacaatcacaaccatagccagtcggattcaggggaaggcgccgtcgaggaggagataaaacctggaaccgggttattgaaccgacccgacttgaataaaacgcccgaaccggagaactcggacggtgagttggagtgggataggaactcggattagggaaaaagaaaaaagaatttaaaaaaaaaaaaagagcagcctttttttttggttttgctaacgtgcgccgaatgaggttatgtttttttgacggctgaagaaatgatgacgccttctccactttcattaattgaagttgtagtttttcccacttccactcccactctcctatctttttctttactttcctctttagtttttcttttttggttgaattttttagtctagtaatttgtatgtcgaccaagaaattttggcctttgtaaaaagtgattaagcaaaaaaaaaaaatgtaaattagctttagcagaatcaagtatattttccacctttcttattttagttgttgttaatttttggtttaatcaggtttagtctttataactatctgtgtttttgagtcttttgttctttaagaaacccaataaaacagggttaatttttaggagccaataaacacctttaaatttgaataaaggacagtgataacagaagaagaagaagaaggagaaaattaataagggcctacaatatggcattttggtacaaagaaccagactaaccactaaagctatgctataatataagtattataaatataaagaggataagatttttgagagttaggtattttctggttcttatactgtaggtgattgtgaatttggggcttgttgttgtggtgggggcaaatgagctaagaaaaaagaaagattgcaggtggtgcacccatcatcatgatgattgttaccacttgattggtttttgtctcccatggggattggggttcaaaataatttttttttttagcaaaggtggtcaaaataacaaagcccttcaaagtctttagttactccccactacaaagacaatgataatatcaggaggagctagctatactatactaactagtttctttgtttaaaatggcctagaaaaaacagagtttttgatttgagctgtaatccatgttttggctaacaactcccaatcccatgctaactttccagtataggacaagtatttggtcctcaattaccggaacatttcatgttattttctatgttacaagatatatttatatataaaaaaacttatttacattgacaaacagcttcccaaatctcaatgatgtagatgttctaggaaaaggaatatgtttcttatctcaaccgttttactttacccttgtttttttttttttttttt

SEQ ID NO: 42257 - DNA, 984 bp, Cannabis sativa
gtaaaaattgggataaaatagtcctgtttattatagtgtttttaaatttatttacttatttaaattctatatatttaaaaaatataattaaattgtaatagatttaattgttattattattggaattaataattaattaagaataactttaatacagttttaaataaatatttatgttactaatatctagtatatataggagagtactactaggtgaaaacaacatttcaattattttttttttgaactttatatataactagccattatattgttaccatttaatttagaaatttttactagtaaacgaatatgcgttttgcgcgaatctatatatataaatatatatataggagaagtatgaaacggtgacgtagcgatctcaaaacactttaaagtcatgttttttttttctctttaattctctcttttctttaattttttattaatttcattcatatatatatattaatctatatatatatatatatatattaaacttaccatattaaacatggtgtctttttttttaaaaaaaaaagtgatatttaaaaatatcatgcacatataaaatattcatttttttactatttttactattgttcttttttttttttactattttattattttttttattattttattatttttttttaaaagtattcactcttaattatataaaatgttgttaactattaacaatatttaaaaaagatcatacacgatgatgttggtgtgttggttctttttttttttttttaattttttttaaaaaaagtgatatttaaaaatatcatggacatattgttttattttcttattgttttattattattttttaaatcacaacttcaaattaacataatatcagaataaaaattaaactatgaatgaagatttatgctactattttttgaattctggtatttattagtaacaaatttaatattttaaatgtttacgtcacaaattttttaatag

SEQ ID NO: 42258 - DNA, 1300 bp, Cannabis sativa
agtcacatgacaataaattattatcaataataaaataaaatagtccttaaatatattaactctctttctttattttagaaagaaaaatgtataaatatacatttaattgaggtggagtattttaattggattcgaataggaagacagagaaaattaggacagaagatttggctccgttttctttaggctgtaaattaaagtggcttattgaatttcttttttaagaaatcgcgaatcatcatcatctattgccctatctttattccatgcttgaaatgatgattggttaatttgctctctcactttaatggtaatttgcatgagtttagattttttttttcttaatacgtgtataggacatttcttccagctagtaattacgtactttccccattgttcaatagctcccataaatatatatgttatttatttttatggtatcatgatatcaacgacctaacctaacagtatttgcttctgttaatagttaattagagagttgttgtaactgttttagtttaagtttttacctaattactttttctaattagttttcttgtaacaacatcttgtatttgactttgcctatatatataaaactctttaattagagcatcttaatggagtgtcaagtaaatggtgtaatgtgttatattttgctatttttataaaaatttattttctaatagtgtgctaaaacttatgctaaatttagcgttatgccaaatttaacacaaagatataatattatgttaaatttgacgcacagttaatataatttttttattattattatttacattattgcatttagcattaataagttactttaatacatttttctaattacaatattatcattattttttaaaaaacatatatttaatttattaattattattaatgataattactttctaggtcaatttacatattaatttgtaattatacatttgtaacataattgtaaaaaatgtgttaaatacaacatttattaattttttatgttaaatttagcacattttttagctcatacattggagatggctttagtgtgttgttaacttttgataatatttttgagtttttttctctaaataaactttgtcagcgtgtatatatattatgaacaaccctctttattaaaacaaattaagcgaaagtagtaagcacaaaggaagtcacttcccttaaacagccagcaaaacaaaccccgttcaacctcgcccacttagccaaacaatcagccacagtatattgggaaacaagggataaagttgaaaacaatagaatcaaaaag

SEQ ID NO: 42259 - DNA, 854 bp, Cannabis sativa
  modified_base (44)..(45): a, c, t, g, unknown or other
cttatgtgtttatttaggttgttaattcaacatacttgttagtnnatttagatcctggtaaaatattcccaacaaaacttcatcgctcactatgtgccaaatggacaagactaagagacacctctggaaaaatcgatctctccggtttacccaataacgtgttagacgacttcatcgaatggccccctaaagagggctagtttctaggtttatttttatgcagtttttatagactaatttagtgcgtgttttagtatttttattattttattgtgtagatttatgtttggtttttttatttgtttttcaagaaaaatatttagagatcttcaattttggttattttggtctttttaaagcctttttgagacgaaaataggaaattgtaaggaataaaaggaaatccaataatggatacttggatttcctgttgtctcaattaaatattttttaattcataattttgtggtctagagtcaagagtgatcacttttcaaaaataaattaaaaaattctatgttttggatgttgaacatgctttatttgtgactgaaaatatagtctgaagcttcaagtcaatttttgactatgatctattcatttctaagaagaattttctacattaaagttttagatctctctttcatatttccaaaatatcttgaatcatctaattctgagctatatcaagagagttatgaccaaaatactatcagtcatcgtagtaggaaactgaaatgagaaactgcaaaaatcagcaaagaaaatgggaaattgcttgtaaggtcgcggccttgaaatgctagcttgattttattttcactataaaaatggggttgtgttggaaattattt

SEQ ID NO: 42260 - DNA, 843 bp, Cannabis sativa
ttgtgttctgttgtattattagttgttgtaactttaaaatgctttgtagaattcaattgtgctccacaggaccatattcctctcatcatcattggggtttcagttgtctcgaagctggtaagtgtatgtttttttatgtagttatgtataaaatagtgcctgttgtgtacatgagaggggtagagttagggtcctaacatgcccaatgctaattgttgttacttcaatgacctgtagcttggtcttattttcaatttcagtttgtaaattgtcaataagaatgtagatgcatttttacctcatatgatcatattaatgtatgatgagtttcatatatcacatgtatgcaccattatatgtgttgacaagactctaatcatgtcacgatgagataattgtatctcttcaaaactatgagatgttggatggagaaagagaagagcattgaaacttttgaatatggaattggatggagaaagtgaagagcaatgtaacttttgattatgaaattggatggagaaagagaagagcagtaaaactctttttactcttgattgcactttttatttaattttgcccaaacataggaagaaaaatgaagatttacaaattcaataatttgggaagaaaacttggtagaggaaaggaagatttgcttggggtgacattcaattcaatctgcactattttattcatagtgcatctaattcaaactaagtgcagatttaatattttgaatccaattcagaatagttcaaatccaatttaattcgcaaaagtgcggattggattggttattttggatataaagaaatatttaattttgtttaaattgtatgtaaa

SEQ ID NO: 42261 - DNA, 1411 bp, Cannabis sativa
caagtggttgggggtaattgagtttaagggtattactttaatctttatcgataacatcttctctgttttttgggtatgtagaaaaattgtactcaaatctttttatatgaatgtagatttaatgatgaagatgtaaattgtagttttagtaaacatgtcccctatgttttttttacaaattcttaacaatttacttcaaaacatctgtgttttatatacatatacaacaaagtatacaaattttgattttgtaaattatcatataaaactttataatttgggttatattttatccaaaaatctatttttgcccaaccaatatgcatatgctgagtataatattatagcagcatgcgtatattactatatagtaatagttaatattaataatcgtgcagtactcatcaaaaaagacaatgcatgcgtttgattgatatataaggcaaaagtgatagttatggccaataaatacaccactttaaattatataaattatgaaatgcacacatggggattaggattatactcatcaagacctataaagagtaaaaaccaagataagaaaacgacagtgccatgccattcataccaaaatgaaaaggaaatgagaaaaaagagtacaaatctaaatggtaattggtaaaatagagaacatgacatggtaaagttttgccacaatgttgaacgacagaacatacatattaaaatcttcacttttttgcatcattagtaaaaaaatggtaaaattggtgccatattttaagggaatctaaaggaacgtactcaaatatattataaaaaaaaattatcgaaaagaaaaagtgagtgagagtgattaaactccatagaaaatttctaatcatttggacacatgcaaaataataattcaagatggaatcccataagattgatgccttaaaacgaagtgttttcttttacaaatttttcactctttctacactcccatattttgttgttttatttttacactctttttaataataataataataatcatttataatagactaatgctaacattatacccatacaaatatttacataagaacaaatatatattttactgtagagctctttgactagctttaattttctattaagggggtgtttgtttgtagcttttcaatcattgtcatttatcaaaaatcaatagcctcatccccacttcttaaaagccttctttgacttccttcattctcataacattttttttcaaaccctgaaattatagatatatatgattattttagtgtgtgttaatgttcataacatatgaattcaatatataaatgatatttacaaatacaaaaacatccagaattgtaatgtttgtataacttgtttatatgtatgttttggctagtgtaaaaactaaagcctattaagcatg

SEQ ID NO: 42262 - DNA, 1275 bp, Cannabis sativa
aagtatatatataataattatacggattggtttagtttgaaccgttactgagatttttaaaaccgtgatcgaaacgagaatttaaaacagtctagattgattaaatcattcacgttgaattcatttagtcggccgatctcaaatagttggtccaaattaattgatatttggaacaacaaattgcgaattatgacattcctacgtttggtctagaagtaataacggagggcagttagtttaagcaaaaaaaaaaaaaaattgttgtttctttttttttttttttgccaaatgaattcgaatataatacacatgtatatttattattgataattaataaaacattacaaaatgtaattacttttgttattttatagaattaaaaaaaaaaacaaaaattaaatgcgtcgtctatttataattttttattactagaaaaagctaatcaaccatatatccatttttaggatagataatattattgggtattaatttgtgatcaataacttaacatattttataatatttattaaattaaatgatgtaaatagagttttttaattatcatacttaactataacaataataatataatatattgagtggtactactaggtagctaggcaccattaattaattggtgccttaattttctcacctctcttttattaagagcattgctattggacaccagcggtgtctaacacttttaagacatgtcgccttacaattggttagcgatactccctaaaagctattatattaaactatatatgaaacccgatactaaattacgccaatagcgatattgacacgagggtgcttggcactaatagtgccttttaacatttctctttataaattttcacatgttctttcgccaccaaaacaatattgttgcatgttctttgatgacttacactatgtttgatgagatagatggagaggataaaggatggagagttgagagaagatagaaaatataagggagggagagtatagtagttatcctttcaagttgtttggaaagaaggatggagagatgaagggatacattactatatatttataaaattattttattatccatttatttatttttttataattttttttatgatagtgtatttgtaattttaaaataaataaaaaagaagagtataaatcctcccatttgaggaaggatttaaaatggtgggcccaaataaattgtaaatcattccacctctcctctccctcccacaatcctctatgccaaacaaatggattttccatctc

SEQ ID NO: 42263 - DNA, 656 bp, Cannabis sativa
  modified_base (322)..(330): a, c, t, g, unknown or other
  modified_base (627)..(628): a, c, t, g, unknown or other
ttggtttggttcgtatggaattaactttttcagaggtaagaaatatcgagtggagtttgttgttaatttggcgtgtatcgctcttaaaagataaaaaaaaaaaagtttgttttcttcgtttgatatttaatatttttcgaatgaggctgagccgtggtttaaacaagattatgaaaaactcaaggtggatattgatgttacattgtttgacgaggaggaaaggtacggttttggtggattgttcaggatcaccacggtcgagcggggcctgggatttcacgactggggttgggtatcctacgattagttagtgatatttttnnnnnnnnnttatattaaattatatagaacccggtacttaaatgcacactagcaataagagggtgtctaataaataatttccttcttctttttaataaaatcattgctattgagtattagtagtgcctaatatcttctagacgtgtcgctttatgattaactagtcatcctctttaaaaattattacattaattacataaaatttaatacttaattgaaccaataacagtgttaactttcaacatttctcttttaaaaatgaactaggggtgttcatcaaaccgcccaaaccgctcaaaccgcccnnaccgcaaaaaaaaatgcggtttgaaatt

SEQ ID NO: 42264 - DNA, 907 bp, Cannabis sativa
acacaagcatttttgtcctagctgatgaatcctaattcttagctcttagtagcaaaaaaaaaaaatttccactgatccctttgcgtgaagatataatgttttatttataggctagatttgggtataagcgaacccggacccggtagggtttagaggtgtcaactaggcccatcgatggggaaaatacaatatataatgactttgagccagttagatgaggtccaattcatgagaacactgataatggtcatccgtacaagcgtggaccgattatgatgccacgtgtcgtgagttactatgttggtactgagaatgttagagaatatagcgttggataaaaaaagcgatttccttttgatagtacgtgcactccttgggcctgacgtaagggacaaacccctaacatggtggggccccctgtttggaggttgccacataggatgatattcgaaggcttctgatgtttcttcaatttcatgtatccagattaccccatgagggcgtgaggccaaacaatattttagtcgatggacccttcgccttctaggccaaacaatattttccaaaccgaagtggctcaaccttgtcgcgtctgtaagatagacgtacattcggtattcggatttagaatcgtaatttgactttataattaagttgacttattaacttgactggacctaagaatgagtctattttgattgatcaaaattttgtaaaaaatacatacgtcgctagtctagaaacgtagataacaacaactataagtcaatgttaaaacaacaaaaaagaatctcataacaactatgaaataataattaaattataaaataatcaaaaaaatcaatttattatttttattaaagtacctatttttacaaataaaaaagattcaaaatgtaaaaataag

SEQ ID NO: 42265 - DNA, 1419 bp, Cannabis sativa
atatatatatagtaatacacatgtaaaatataattaataaaattatatcctcattctaaataatttgttgatgatcaggtttgcaaaggtgtgggaagagttgcagattaagatggataaattacttgagacctgatttaaaaagaggaatgttttcacaacaagaagaagatctcatcattagtcttcatcaagttcttggaaataggtaacgtagattaatgcttaatattattattatatatatatatcccaaaatgggaaatgggtaatgattaaagtatattttttttctttttctgtgttcaggtgggctcaaattgcagcacaattaccaggaagaacagataatgagataaagaacttttggaattcatgtttgaagaagaagctagtgaagcaaggaattgacccaactacacacaaaccattaagtaatgaaaacaacaacaacaacaacactatggaattagccaaagataagaaaaatggtactactactattacaagagaccaaaaagagtccttaatgatcataccccaatttcatgatcatcatcatcaatcaaacacattggcttctaatcatcatggccctacatttctcatgtcagatgaaactacaactacttactatgatcattcctctaccactaataatggagttgtactaatcacagacacttcttcaaaagaccaaaccaatttgatcaacatcaataataagtcgaatttcgattcccccttgttgtatttcgaccaattcactacgagtagcagtactacaatggagccagtttctggcggtggcggtggctacagctccgatcaactaattccttctcagtttcacaatggtattaatagaccattatctgcgatgaatcaccaaaactatgggagctgtttcgcttcaatgccgagcttggcgagttcaggagcagagttttcagacaataattctggttcgagggtcagttcctttttcatgaacgaggttaaggaaacttcaagtaacagctccaacgtaagtaactatgctggttatcatcatcatcatcatcacatgaacaatcataatcataataataataataatggagctttttcaacaacttgggatgttgaaaacaaattagagtcgttgatttaccaacagtttcaagggattaatgggatagtaaagtcagaagaacagcaactcgtcatgactcggccgagttcgtggaatgaatcggctgagcaacaacaacaacaacaacaacaacaacaatttcatcatcatcacagctctgtagatttcggtacctatccattaacgtcactgtcagaagatttaacaggtgctaattttgatgtcttccaccaaatttaaaattcccaagtattgttataaatgtaaattcattcttttttttt

SEQ ID NO: 42266 - DNA, 5202 bp, Cannabis sativa
aaaaacacgaaatttcagttttaggtctaaaaagttctttcaacagaagtcagttttagaagttttcttaagctacgcttttaaaagctgtttttaggtttctgaagctccaaaaacacgaaatttcagttttagctctaaaaagttcctttaacaaaagtcagttttagtagttttcttaaactacgcttttaaaatctgtttttaggcttttgaagctccaaaaacacgaaattttagttttagctctaaaaagttctttagttttctaaggtttagcttaatagcgaaaacaaaagcttaaccaaactaaaactttgctagttctgtactctactcaccatgctggagatctcttcttctctccttctttcgggttttcgcctacatatctatcagtgttgatctcatacttgtatgttggtggaaattcaatggctccctctttccatccctcgaaaacatgtcctcttcgaagctccttggttagctgcaacatcaaagttccaaattccatgataacataaccgaaaactgaattcattagagaacaaagttcatcattgaaatgaagatctcacctgatcagtctttagtagttcatcccatcttttcaaagagacgagtttccttacctcgtgatccaacatattgagtcgataattcaaatcaccaaaccagaatatttgactgttgacataaacacaccatgttagatttagaagtagttcaactgaagaagaaaacaatttgaatgtttcatgtgaagcttactcatgtgatggaattgtcaaaggttgttcaccatcaaaaacacttgatgtgaaacgtgttcgccttatgatttcattcacatctgagttgcgtttttgttcagctccttctttctgaccagaggttagatgagaacaaacaaagcacaaccgcgaatgaaagagcgacatgcttaccgaaacagatccctgcaatgacaacaaaaccataaaatcctaagagtcaacatacatagaaacaaacattacatgattgttactactatgcaaatcattaccttgtttcccatgtatcccattaggccagttccaacaggaaaaactttcagattgtttatgtgtcttctcaacctctttctcacccaaactgagatatatatccctaccatttgcttgctcacaagcttaacatatctcggcctcgatttcacagtattaacaagctcatcatcaccaacaacttgatcatttgaaagatcaggaaacatgtcatcatcatcatcttcatcttcatcttcagaagatagttcagccacatcaaggacttgtggctccagttctttctccatccacattaacccgaggtttcccgagctatggctagaccttttaagtctactaccattgagtggtacatgttgattgaccagaagagaattctcaaacccaattcttgcagaactgctgagaactcttcttaattttgagttagtagagataacttgttgagttggctctagtgagcgttcgggccaatccaacttactatcatcaatcccatataatcttttcacctgtaaattctttcctaaaccaatagctttgttgaactcttccctttccatgtcaaaaccatcatcaaaatcattggtttgtagttctaatggatgagcatcaatctcatctgcaagaacatcagcaacagaagatgtcctcattactggagaaggtggagcactgtaacttttgtgtttgccttcaggttcagaggacttgtttagagttcttcgaatgattgcttcccatttcggaattggtttgttatcttcagctccaagcacattcccagcattcaaaggtactatttcttggaacctataaagagcaaaaacacttaatgatcttttatgttcaaagttacatatcttaatgagaaactaaaactcacccaatgatgtaaatgtcagatggttcttctgtggagagccaatcatcgatatcaagatcgccacttggagcaatccctgcaacattccaagtgccaattgtcaccctacaacaaaaccaaaaaacaccctcaatttgtttcatcaaatcaaaccatactttgttccaattcaagcaacaaagacacaaacaaacctcacatcctttgtgtttatgtactgaactcgcaaggtttctgattttcctctcctatgtcttgaccggtaacagttataagatttatctgaaacaccaacatacatacttgtaaaagttatgaatgatcaaaaccacaaactaaactaaaaaattacaacaaattcagttcttgtacctgaagtttgaatcgaaacaggttgattccatggcgtcctattggcacggctctcacaactatgcattctagaatctttaactgagcaagctgaaagaagcataatgtagaaatgtgatgaacatgagaaattacagaatgaacattcattattcaaaggtatatagtatatacaataataccatcatcttcactctcagtttctgtgtcaacctcatcttcactatattcatacaccttaggctgaatatttagccattttttcatcacaagagaaggccaaaaaggctgccaaccataccaagaaaagacattgacaataattagtattgatatgattcaagttcacaaaaaaaggaaaaaaaaacacacacacacattaaagtaagtgtacctgggagtgctttcctctctttgttgtcatgttgtcaaaggtcaaaaatctattcttgaattaagcaagatgatgggacttaaatgcaaaataccatgaaacaagagaagaacttaaatatttgaagcaacccacaagactccaattatataatatttagtatttcaaaattttcagaaggaaaaaaacaattaggtcctatataagtgagaataaagtatggatgtaatccacaaaaataaaaatcccaacttgcaatgaaaaaagaataatcaataaatggtcctccctccccacctttgcaactttctgatacaacaaaggcaaaacagcctaaaaaataagatgaaatgatattatagaaaattcactatgggaaaaaacaagacaaaacaaaacaaaacagcctccctaaaaataataagcaaaaactgtcattttcatcataacaaatcattttttcatatttgcttattaatacaaccattgatctttaagtttagtgggcaagataagcccttgacatgttactgatcataactgggcattactattattattacaaaacatcataataatagtaaattacaataattatttatcatgtacagttgtaccaatatatatatatatatatatatagagcttcatctttcttcatcttcttcatggattgccttagtgacccaacaactatggactgttgcccaccacaaatctctaaacttttttatgttttatttattaaataagccaaaaataaatacatgattaggactacaaaccagaaagcaatagttattaatattagagttgtgtgatttaattaaaaccataatggatatttaatttaagttcatgcaatcagagccaagattttaagtgaccctaccaattaaaaggaaaaagaaaaattaaacttttagagaaatattaattaaatgaaggggttgacgataaaatttacagaattttggtcaaatgtgttacaataaaaaaaaactaagtagggaccacaaaaatggacttgggcgcactatgtgtgaaagccattaattctgttgtgttttcaacttttaaaagtaaaatacaaggaaaacccatctcatttttggctggcaaaaattaacaaatagaaaaaataaaaattgaaatgaaatagattggtaatttggtttttggtatggtatggtatggtaggactattctcatatttctttgtatttgttttagctattttttttttcttttaatagataaataataatataggataatgatgatgacaaaaaaaatggggaaaaagttgaagaagattgggaaggttccagcttttcttggtttgaaagaaaaagaaagaaagaagaagaaggatttatgataataataaataataataatgttgtgttgtgtttgcacatgtgattttgtgggagatgagtacggagtgtgtactattagtggtgagtggagtgtggttttggtttagtttggtttttggttcctatttatgagtttatgagtttatgagttgtgataggcacttattccaatgtgcatacatcaacattaatcttcaaccacaaactccctcaaatctactcccaactcctacacttcttctcctattttttaattacacaattacccaaaatcttagtttctttttttatatatatatattaacacacttgaagaaaaaaaactattgatttaatggtgtcttaataagtagggatacggttttgtcatgtgatgtacttttacagaatgtattccgtggtacattagatagatttcagggtacattagatgagtgtcattactattttttaaccctaattacttctaaatcaatctcagctctcagatcaaataactccctcatctaacgactgccgtacatcacggaatacattccttgaaagtacaatcacgagacaaaatcatgtcccctaaaaagtattatgttaaaaattgtgttaaatttaacacaagatataatattttgggaatctcacttgatacaattgatacaatacattagtaacataattatccttgtcaatgcttatttctcgaagattctcaaatttttattagtcttataatttatagtgtgattatttgttatgattattattgctattgttggtaatttgattatttctttttattctagattgaataataaaattgttattactcaatttttaatggtaaatttttgttgatatcattaataagtgtgatttgtagtatatatttaaattggatatataagtgtgactaataatttgacaaaatattaatttctactatacaagtaataattagtttcaaattgtttaaatcatcattttaggtgagaatacaaaacaagtgtagagagaattctttttatacatatatatatattcatattcatattcatcttcatatatatatacatgtatatatttatattcatatacatcttcatatatataatatat

SEQ ID NO: 42267 - DNA, 2420 bp, Cannabis sativa
taataaagttagagatataattgtcattctatatcttgctagtgtattaacatcaaaataaagtttggataagatctaaagaaatttatttatttatttatttgggcagtttttcatgggtgagggaacattcaattccttgcttcctggaaacactagacatatgcaatagtcttgtcttaacaaataacgatatattagtttgtttctagctaataaaatcacttatttggttaagtaacaagtaacaaccttactttcagatttggttcataaaagtagtcgaataattccccttctggaacaacccactatccaaaacccagtcttcaatcatagcctgagagttcaaagcttgatcagtgggtaccaaatgaccagcccccaaaacgacgacgttcgttaaactaccccatttctgcacatacccacttagttcatctccattcactttccaaacctttctctctgcgttcaaaaaattctcaatcccttcccaattcaaagtcttcacccaagcctccgtcgaaacgacgccgtctctcagatcaaaatgcccttggtaaagcaaaaccttgctttccttcaccagccattccaccatgtacttcgcgctcttcatcacatcctcgtggagtatttcccccaccaaatcgctacatatctcataaactacggaccctttcactcccaacactttcttaacgtcgtcgttttgtaaaagctcctctaccatctcgtccttgtaagcttccttcttagaaaaatcgtacaaagtggctaaacccgtcatgttctcaagcttttgcagtactctgtttctcgcgtccgtcgcggcgctccagttcccggccttggtcagagccacggcctccgattgaagcatttcgagcacccccttttgcctctcattgaccaaaccggagaagtaaacgtttgccgcgtgagtcgatacttgaatttccggatcgatcaacccgtttcctatcgcgactcctgctaaattaatccgatcccagctcggtaactctgtgttcttcttcaaaatgtagtacccaattgccggaacgtactttcccgcatagctctcgcctgttatataaattggccgagatttgaatgatgagtctgatttgataaacgcctttaaggctgtgaataggtgttcggcgactctggtctgatttctgggtatctcttcgggtttggatgcgacactgaacccggttccgatcgggttgtcgatgaaaagtagaccgaatatccggttccatgaacccgggttgggttcgagtgccagtggttcatcgggttttttgttgaaattgacacgccatggacctagctcgtagaaatttccgatcatggaggagcatcccgggccaccctggagccatatgagaattggggttttggagagagttgatattggtttctgagcttcatagaagagatagaaaatggtggagtcggaactgggattgactggaagatagcctgattttgtgggtagagcttctttggggaagagagaggctgctgaaagggctaattttgtgtcgagacagaagaagaagaagataagtaaaaaccgatttggggccgttgactccattggagtgtgactgagcttgatcaataacatagcacatgtaaactgtatttgaaaaaaaaaaaaaagaagttataaacggtggcgttttggacacttggcaatgtgtcatgagattgaatagtcaaacgaggtgaattaataataggaaaccacagttacatgtccaatttgttacgtgtcttaataatgcaatcctcgaccataccatctcctacactttcacattttcttcagcgtctcttttttgtggacagctctatataaaataaaataaaaatgacatagtaacccgttttctgtgactttaaaatatattttttctgacacttgtattagttaacaagaaaaaaaataagaaaaaacttaaaacatggagagtgagaaaaaaagaaaaaaccaatgtaatacctggtacttccattttatcaatggacaaggttacaagtgtcaagtggttagagttggaccattgaatctaaggtttggaaactttaataaagagtttaaattgagtgaaatgtgtaattaaaaatatataaaaaaaaattgaagtgagaagcgctgaaaaattgaaagaggagaaggctagtagtatgggtgtgagtcaattctaaagtagttgaaaaaattgagattaagaaattttgtttaagttgacaaaaagggttttaaaatgtttcaatgttgagagcgtatagggaaaaaaagcaaggcattagaattatgagtccattatatacatgggagttttatttgataaatacacttcattattaaaaaaataaacataaataatttttaaaaa

SEQ ID NO: 42268 - DNA, 1006 bp, Cannabis sativa
  modified_base (766)..(770): a, c, t, g, unknown or other
tgaaagtttttcttacctacttcaagaggccgaaagggctaactgcctccatggaatttgtattagttggaatgggctgaagttatctcatttatactttgcaaacgatagctttatttttctaaatgctacgaaagaggaaagtccgtacctctaacaaatattagaggaatactcttttcttttggggcaacaaattaatctcgaaaaatatgagttgtgtgtggggtgtaatgtttctcaaatcaaagggcagtgacttgcttcaactcttggtgttgctctagtggattgtcacactcgttaccttggcttaccctcttatgtgggaatgtgcaaaaaagaggtctttgaatctattcaagccaaggtcagatacaagcttcatgggtggaaagctcagttattttctcaagtaggttgcaaaattcttcttaaggcagacattcaagctatcccgtgttatgtaatgagttgtttttggctgtccaaagaactaattcaagatattgagtccatgatggagagattttggtgggaattgtcgaaaaaaaagtaaaaaattcattggagaaagtggaatcgtctttgtaaatccaacgctgtggggggtatgtgctttaaggatctctataagtttagccaagccttactagtgaagtaagggtggaaaatcatcaacaaccctcaatcaatgatggatgggttcttagaatgccatttcactaattgttcctgttatacccaaaattcggttgtacttcannnnntgacacgtgtcaatctcgtggaatatgaactaaaaaatataatgacaattatgtcattaaatgcaaaatagaataactcatcaaatatagaatttaatagagtatattcgtaactcgctgactgtataatattaagtgagacaggaatatacaaactatcaattcatgtattgacgagaaaccatcttgtctcggaaggcataatcccgagggagacatctatctcgctatacata

SEQ ID NO: 42269 - DNA, 2171 bp, Cannabis sativa
aatccaatcaacccaacggctgctgcggctccattactagagaagagcaatcctaccatcatcatatcaaaaatggcgataacaaaacctaagttaccgctcttatcttttgcgtgattcgcgaatgaaaatattagagaaattaacgcgtaggaacttgctatggcatttgctaccacaaaatacctgagaaaaaaaatatttgagctttattaatgataaaaataaatgttgcttcaaaagtataatagaaagaaaaatatgacattcttgttaatttattgtttctgtgcatactctgttacttgtgtagtatcagatttcgttataaaatatagctagactagagtacacacgaacatacattagttaaactttattttcattttcttacgtactatatatttatatatagattacatataacttttaaaaataaaagtgtataacatggttggtaggctaattcaaatggttactaattctccatagtaataataatgttgggaccctaattgttcttcatgatggccacaactccaatgtactatcgaattttagttgttaattttaaagtattggtatgcttcatttcaaatttgatctcttattctatttctgttcttatatttttatccatcctagctaacaaaacaccactttaaactattagaatgttgggagaaaggccctggttttcaggtgcttcgctttgtaaattgaacttttagtaatacaacttgctgacttttcaataagaaaatgatttttttttaagcacaattataacttagtaaaggtaaatatacaagaaaagacttcaaatgtagctaattattaatcatgtatatgtattatatatatatatatatactgaaaaatataaaaaattattttaaaattttaatttgaaaattaataatttataaataaatatatgtcaaatttaatacataaacattgaacatgtatgatagtttcaaaaaactagactagaagaagaaaaagataaaaaaaaaaaaactacagagaagaaaataaagcatcagttaaataggcttgagaagttagaaatattcactataagcaagaagatgatcgattgtttatgttaacgaattaattattgtgaagaaacaaaaatattactggctctaacaactctaaataattattattatgtagagactgacatatttcttaagacgtattatataattaattataatatgtaatagagattaaaatttttatgcatgatcacatgtgatagttattctagtatagaataacatttacgaaagtttaatttagtttataatataagagatatttgttgcataagtgttttcaaagttttacattatttaagtagctactcaattaattttataacgagaaaactactcacagagttaatataacagtaggcaggcaccatttattaacttcatcagcttattggatcacacgtgttagttcgtgaatgatccatctcacaataataaatattttaaaaattatttgtgagcaattacgaagtgacatttattatcttcaatgaatattgtagcctaaaatagttatgttaagatggactaagtattaatgaacagcttctttacttaggttagattttaaaagtgagttcttctggtatcaaatcaagtattaagatcgacttgtggaattatgattccaaactaagtacagaattggttggtgttaagtaagttttacctaatgaatatctttaaatatatataagaacgtagcatatacgtaatattatttaatatttatgcctctcatctcgatcacaattatttatttcctctatcacacgaaagtgtataaatgatatatgattggtgtctataatttttccatggaaggaaagttattgatttgtataattaatggacccggttgcacactaaagactacatacaataacatgcaccattattgttagtgtgcaatatatatattatgcaaatattgctataatgcatacgtgcctctatatatatttttatatatataagtaaatataaaggaaaatttaatttttacatgttatatatatggttaactgcatggaattttaacacatacatatattaaccacagccggtccaaaaggtttacaagcagatcccatgtacagg

SEQ ID NO: 42270 - DNA, 679 bp, Cannabis sativa
  modified_base (403)..(417): a, c, t, g, unknown or other
tcctcaaaatctccctgctcataggctttagaattttgtttgtactggtttagtagctagttcttgttttatttgtttttcatttctgttagctcttgtttctttgtttcaatttctgctaggttgttctgctgtttggttttttgttgttccttttgttcccctgtttccagggtctttcaatcaaaaaaaaattatttctacttaaacaagtacactagctagtagaaaaatgaacattagaattcttatttcacctggaaaaagaaaataaagaaaaataaatgagacaagatacacaatacactaaataatatatataaatatataagctttcaattttgtccctttgtgaaaaataaaatacatatatgtatgatctttatgtagtaatgcctctatnnnnnnnnnnnnnnnttttttttttttttttggtaaattcattacaatgcatttattaagttgtttgaaagaatcaaagcatgtgttttttttactgaaaaaaatatttgtatttcttagtatataatggtaaaaatttaaaatataatatttttgagaaataaattgaatatgatattttccaaaacaggttaaaatatgatatttttctctcctgaatttgttttttgggcttaaccattagaggaattttggacttgcaaataaatagtagagc

SEQ ID NO: 42271 - DNA, 1773 bp, Cannabis sativa
tttttttttttttgtgaaaagaaaatataaatattattcttatatttctgtattgttgcatttatgtttggtatttttgtgtccacaattaattttaatatgtgatactcaatttaaaatgtatattatatattactatttattttgatcaattaaaaaattatacatacaatatactttttaaaagaaatacaatagcaatgtattttatatattttactcatatacttatttatatatctgtatttatttttaataaaaggatgatcattcagtaaataaacattcacttagtctttaaagtagaaagagcattcaattcactaaaagcacaatttgacataaaaccaaaactatttaatattaagccttctctaccttgcaagtaggagtcggcatcctatctaatttaatattttatttctaatctgatccaatccaattagtaattagatttaaaaaatcatcatctaatccaatctaattagatttcaaaatctaatccaattcaattactaattagatttgatcagttttttaattggatatccaattatatacctaaattttaatattaacttaaaaatatgaagaaaaatacataaaactaagtatcagtctttatataagtttaatacttcataaacatacaatcgttacaagtataatgcaacttaacgtttttaaataataaaatagaacaaaacattataaaaataaatacacaaaacaaccaagtgttacaaattgaacacaacaaaaaaatctaataaaaatattattaatacatattatatttttcgatcttttattatataaataattttttaacatatataaatgtaattggattggatcggtttttaattgaattttgagattgacatccaataactgatccaatttaattagaatccaacttttaacatccaatccaattgtaattggatatttaattttttgtaattggattgcattggatcaattcagttcaattgaattgaattggatgttgtccacccctacttgcaagtctcctcccactttcttcatcttcatcatcaaaagtcacacacttttctcgttaagtcttagacttttctcaacccttatcaaaacctattatagagtttgctactcataatttgggcaccaccgatgcttcttcttgcattagagcccttatcatgagattacgaggttgggctagatagaggggttggtgcttctttttcgtcattgttagtgctaacggtgattgaggctttatgcttctagtcttttacaacgcgatggatggtgcttcgtggtattttttcttcatttttcttgtggtcttgagttcaattttgggttgcaaggtagagttgttttagttgatgcactttcgtatctaaattttcttattagtatatgatcgaggatttaattgatcaattttttagactctatgtttttgtaaaaaaaaaaaaactttgagtaaatttaacaacacatagacaaatttaatagttaaacaaacgactacaccaaactccccttaaaacttatttgaaaagtattttcgttactaaaaaataatttaaacatcactagtgtttaacacaatcacaagataactgtgttatagtggtcagtgatatttcataataaatactagattaaaatatataaaatctatattaaattatatggtaaatggcggcaaaaccccaatactggtattttgttagcaatttaccctttccgttttaggtgttaagtgtcatgttg

SEQ ID NO: 42272 - DNA, 1647 bp, Cannabis sativa
aaatatttagtgacccacattgtaggagattaacaaagattgattagagtctaatggtgtatatcattaaaaattattcccaactctagagtgacatgcacaaacttacatgtcactaaatagtgccactaaaaagtaaaattgtagtagtgaagacttcttaaaaaaaaaagataatgacctaaagatgcatggagaaagttattgttcttgaaatattttgcttttagaagaaaagcaagaaggaaatcaggattagtaaaaattcgacaagcttacttagccaacatagcttgattatgatgtacaataactcgaaaacctaaaccctaaagaatttagatttacaaaaaagagaccatttcttccaatgattatgtgctggttattactcatagactcccaccaaaagtcatatagttggggaaataagaaattaaggacttattatcttctttagtgattgtatgttaagtaccaggggctcaaaacactagcttaaaatctttgccaaaatggtatttaggagtatagtgtaattgtctggaatggtaatcatgtttccaatctatttgaaatttacagatttaaaaaagtaaaaaaaaaaaaaaagagtaaattttaatatttactattatttgtaataaaaattattgttgtaaagacatcaataaagttaaaactgaaagatattatagctgttcttattagtcagtcattgttttgtactgtatcacataacacagtatctgtattatatacacataaaattacgattaaaaataccgaaaaagcaacctggataagaggcgaaaatagccgttaaggaaatttaaaaaggttattagtataattaataataaaagatgcctgcattcgatgatgtcactgggtacagacagaatattacaaaattacatataaaatgtggtaattttggtttattaatataaaaataaataaattaataagagttaagaaattgaggtgggtgacttatagtgggtcggactgagaacaatggtcagatcttaaacacttagacaaatctaacggctctattttctcacaaatttgaaaattgaaaacagaaataaaaatgggaccctaaacggctctcccactcaaacaaacacactttctctcttcaccattttgaaatgtttcactgcctcgggcacagcacagttccttatcccttctgaaaattcaaattcgcgaatctcattctaactattttacatctctaaagcactctactccattgtctttggtcgtttcccaaatgggtacttgtcttagcaagaagaaaccttcttcatcttcttcaactgctgtcgttaatagtggttctactattaatggcgtttcttcttatccctcagttccactgtcagtcaagaaagctgtagagctaccgaaaaaggataaagaacaagaagaggtcaaagaagaagaagagcaaccaataacccaagtgaagaaagagatattcataatcaaacaccgccggagtcacgacgacagagcaacagagccaaatcccaagaaccataatcaaccattgccagcagtagcagcaccatccgatgaatatgataatgagactgcggcttctccccctccggttcatcagttttcggcggg

SEQ ID NO: 42273 - DNA, 594 bp, Cannabis sativa
ttaataactctttagtatgaggtagcatgtgtaaatcatgatataaattatttgttaagatctgaaaatctgtcataatttattaaattttgtaagaatggagcaaaaattttctttaaatatctaggtatctctatttgttgattattgaatttcaaaatgcatacctaagattaataatttttccctacaatattgaacatgtgattgtggttagagcttgaaaaagattaataaacagagaaaaaatgataagagaatagcataggaggagagctggagcgttgtttgaatagacaagaagaaattacaaaaaaaaaaatgaaaaaagaaaataagtagaataaaagagaagatgaaacgttgctaaataaaaattatatctataatatatattttttttaaggcactaataaaaattatattaaatattaaataatatttaaaataattagtatttttgacccctgatctttcgatattatttaatcttactctctaaaatatatctcttgttaaaaattcctcctaaaatataatagttacataattatgtctcttctattaagtttttttttcttttaccgttaaaaa

SEQ ID NO: 42274 - DNA, 1252 bp, Cannabis sativa
atctaagatcctggtaaaatatttccaacaaaaactgccctagtgatttagtaaactaggatggtgggacagggggacagtactccgacgacagttggtccacagtggatcttagaaggcatttggacaccaaatacgagaaagctaaaagtgagaagacgaagacatgtggtaatgaccttaaaaatcacatgaataacaaagtttgtggaagagatatcccggatagtgacacaaagagcttggaagaacaaattgatgcggtgacaaaattagtccagaaacaaagtgggcccttaccaactctaaggatgaggacccagagccccgtgtaaggaggatcgcaaaagctccactcccgaagaacttcaaaatgccccaaattgagatgtaggatgggcgtactgatcctaaaactcatttagcaaagtataacaaaatgatgcaggtggcaagagccagcgagcacgccaactgtttgtgcttctccctaacccttaccaaatctattgaagattggtggaaaagactgactcccaaatcaatcctctagtggaaagagttacattctccttgtgactatgacttagaaatgggctccatcaccaacataaagaaacatgcaggagaaagcctaaagagtttcatttactgaggcggtaatcaagactatgtgaccgacaacatgaaatggtggctctacaatctggacttgcagtcggctctctagagaaatgcaaagaagaagggttgaaacgttgtccgaattcatggctaaggcacaaggctttatcagtttggaagatgcttatcaacaagagttcaaagttcctccaacaccagctcttgttgcttcctctcccggatttacctcaccagcttctattcttgaaacacagtacacccttatagtctatggaccatctgcatttgtataagcacccactcaaacctatctgggtatggagcggcatagaccagatgcagtattgctcccaaacaattaaaagcagaagttccattgcataacataagtcattcccagaataaaaagggaggaaaaggtcctggacctcagtagatatcttcactagaccccaaattttatattagaatattgaatgaaaatacataactatttgtaggaacaccgtcgctttatcgacactaccaaattcaatttatcaacgaaaaaatagacaatctaattatatgcggatccggctataatgaaaagtgtaaaatacaaaaa

SEQ ID NO: 42275 - DNA, 2065 bp, Cannabis sativa
taacacgacatgcgtttcatgcttctgacatgtttgttaagttagttattaccgttactgttagttgttagttagtttggtatctggtggctttttagtcttttatcattcctgtcttgtaagctcagtcgagctatatatatgtttcctctgtttgtacccaattcaattaatacaattcatctttctttttctctttaattctgttttcgtaatatggtatcagagcggggaaaagaagtttcccctcgatcttgatctgttcttcatcctctttgctgtgttttctctccagcaaagactctctcctcttctctgaagttctattctgaacttcttctctcttcttcttcgatcagcgcttatatacctgatcgttcttcttttcgtccatggaaaccgataaccaagctgaaagtcaagaacggaggacaatggaggatatgccactgtcgaagaaggaattactcccatggtgcagaacagtcgcactttgcagagaaatcctcttgaagatccttcaaatccctactacctgcatcatggagacaatccaggtaatattcttgtttcacaacccctaattggacaagaaaattacatgtcatggagccgtgccatgcaattggccatatctgtcaaaaacaaaatcggattccttgatggaaccattcctaaaccccttccatctaatcttgtcatgtataatgcatggtatagaaacaacaacattgtcatttcttggatcttaaattctgtttctaaagatatctcttctagtcttttgtatgatgagtcggctgctgccatttgggaagatctaaaggttaggtttcatcagaaaaatggtcctcacatatacaatttgaggaaaaatctaatgaaccttaagcaagaaagtcaatcaatcagcatgtattttactaggctgaaaactgtttgggaacaactctcaaattacaggcctaattgtgtttgtaatggatgtacatgtggtggtgtgaaaaagattcaagaacactaccacatggagtacataatgtcctttctaatgggactttcggattcttactcccaagttcgaagcaatattttaatcatggatccattacctgaaatcaacagagttttccatcttgtaactcaagaggaaaaccagaaaggaaattccaatcctgctgcagaaccaaattcaggaatggcttttgccttccaaggagacaaaaactcgaacaataagtcgaatcctcaaggaaataggtcaaattctttcaaaagaaatcgacctttttgcactcactgtaacattcttggacacaccgttgaaaagtgttacaaaattcatggatatccaccaggatatcacaagaatgataaaggaaaagaaagctcggcatctgctaatcaggttcaaaccagcagcgattccagcaccaaacaagaaggacaagccctgctacctcaactcactgctacacagtatcaacaactattaaatttactggctgttcaaactggtttggtgaattctgatgcaggaaccagcacaggtaaatcaggtatggtcctttcgagcatgtcagattttccttccattaattcttggatattagattcgggtgctactagacacatatgctatgacaaaaatcaatttcaatgcatatgtagtactcatcctaccagattattactgcctaacaatgaaagtgttgttgttaatcaaagtggcactattgctatttctaatgaattgcatctaaataatgtactttatgttcctacatttagatataatatcatttccgtaagttgccttactgatgacaataatctttctgtcaaattctacactaataattttgtcattcaggaccgaatcaacaagaagaggattggcaggggtgaatccaagaatggcttgtacatcttggatcaaatacctcataacagcccgattcttgctatttctgccaatacttggcattcaaggcttggacatccttcgaacaagcatttgaaactcttagataacaagctgaattgtaatacttccaatttacat

SEQ ID NO: 42276 - DNA, 1302 bp, Cannabis sativa
atcccacgatcctcccaaatcatgaaatatcccatacttctatagccacttgacctagcttcaagtggttagattctacacatcacttataattactaattaattgctaagctctttcactattttcatagtttaacaaagaaactgagctgtgcatgtttaactctgcccacattgcacagcattcatccttgtcttgatgggtgtgccttgttttctcattggtttgatccttgtctttgtcttgatgcttttttcatttcttttatttgaaagcaaggaaagaaacaattaattgtgcttgttcaaaccttcaatgtttaatagaggtttgttggtgttttaattttagttagcaactgctttatattgtttagttctcattgtattgactggtattcaggttgttgttctcgagttaatactgtgcaagttatggataataatttcataaaccatttataggtctgtctagagtaaaaggtttcccatcttggttttaacagatttgaacttcagtttatatgtattcacatttggacatattctatatctctttttgtttctctggagacatttgtatcacttatgtttatctttttggcccaatgtagattgttttccctctgaatatgtcacattcctttgaatttgacttatgaacttgggctagcgaggcacaggtaagaatgttctattgtttcaaacctcaaaccaagatagatttatatatatttatttgataacatcaatcatttttgcttgcatttcggcaggtatttattcaaaatttggctatgtttttatcttcattttatcaggcaaggttctttccccattacttgaatagtttttgtggtggtcttcattttttttttctctacttgttgctttgttataaattgattagtacaaccataacagtcttgcatcattagataataagacacatttggaacaattgaattacatcttacagaattacacaattccttgttataattttggactcgttggcttagcacatctaaatatttcttatcatccctctcttgtgttcagtgtcacattgatgtactggaaagtattagtgaggttaaaactgcattatcacaggtcttgaatatctcatcgcaaataacctaattatgtacattgtttttcactattctaaaaccaccacaaagaagatttaacatactagaatcagatagtagataacgatgttaatcatatttcagaataagaaaccaattaatttcaaaattttgcatactacaacagtttttgctcagtaaaaga

SEQ ID NO: 42277 - DNA, 979 bp, Cannabis sativa
ggtgcttccgattttttttttcaaaaggcgctctcctcacttctatatgggtcagcctgtacttttgaatgattaactattttccataacaaatataaaattaaaataattctaagaatatcaatgtatatattcataatttgtcattatattactattattgcaagtattttttttacctagactatcatattaggccatgtcagtatcatattagtgttacataaattgtaagaagatgaacagaatacaaatgtaggatactatgattaggatagaattttctcacataaaatatattatattatataagtttgataatttaatcacaccaaacacaacatttagctattaaattactacatatatattatattcatagttcttgttggattttaaatttattgtcaggccaatattaggataggaatttcattatattcacctttagaaggtggatatttttattttcatgtgaaactctgtcaaaatcttttttcattcatttacaactaaaatacatatcaatttagacattgcagaggagaacataaatttataaatctcatcaatggatcacactaactcatatttatttcaaaatattgaaaatgtctgattatgtgcaacattatggagtgtgcaggttccctgaagtggcactactcaatgttgtatggtggcttcatgtgtcagcaaagttggaaacaaaaattctatccccaaaaacaacatacacagcttaccttgtgttcaagcttgaagaaaaccagtacaatttcgatagaagaccagttgagcttcgaattcaattagaaggaagagaagaaatggagggttttaatgtgttcttaaaacctcctagaaacaacatcaacaacaacatgaccctaattcctcaagatagaggagatgggtggaaggagattgaaatgggtcatttcttcaatgaagatggtgatcatgatttagtgttgtg

SEQ ID NO: 42278 - DNA, 1137 bp, Cannabis sativa
ttggaaatatattttgacatataatattttggtcaacagcacccttcacttttgtttcacgtaacatttttttaataagtaaatagtttttttaattagtaaaatgaaaatattttttaaaaatatattattaaaaatcattttcacttttttatttttttttaattaagaattaaaattttaaaattttaaaaaaaaaagtcactttcatttttttttaataatattttaaattttgatcgaactcagactcaaatttgtatctttgctctgacctcgaatctggatccagacttagaccccggacccagattttgaatcctgaacctataccctagacccaaactcgaatcctagaaccgaacctggatcccgaactaagatcccggcctcgaacccagacctggccctggccctaaccccaaacctagacccagattacgaaccccagccccatgccttggccccgaacgttgacccccgccctagacccgacccgaaccctgtacctggactcggattcgaccctggccccaaccccaaatcccacacccaaacctacacctcaaactcgaacctacacataagaaaaaattattgcgcccttatttagaaataaatatggtattcaaatgcatagatttgatatttcctaatggagcacatgtagtccattagaaacacctccaaacatggtgggaagatcccaagagcataggaaagtattgaatggtgtgctcattacatcatggaatatagaagaggggataaagagaagacaaaggttgcaaatagacgaaatgggaagcgaatactgcttgctgctattgtgatgaaaattaatacagatgcaggtgttcttcagggtggcaactgctctagtttgggatgtatcattcgtatgaactgtgctacagtgagagttttcgccactacaaacaaagctcttgctattcttaaagatttacaagttggcattcagcgaaaactaaaatggtatagtattgaatttgattatcttaaagctattcagttgatccaaaggagaaggtctatcaagacgttgacagagtactagaccatattcgtcatttgttattatttgagaatgtatttcatttgtatatcatgaagcaa

SEQ ID NO: 42279 - DNA, 1199 bp, Cannabis sativa
tatatatatataaaagaaaagtaaaaaatgaaaatattacacaatactatataactcatataatataatctacaaagaagaagataaacaatcactcataaaatattgagtgtagattaattaggattaccatgatttgaagaaggcatactatctttatccaaaagtttatttcttctaattaccctttagggtttcagacaaagtgctttgttgatgaaaacttaattatcacaaatgaccaccttagacctctttctatattgttttggatatcactatttgaaatttaattctaatacataatatgtaatgtaagggtttatgccctgaaaaacttgtaaagaaatttatgattattaataaagagttcaacattttgatatatgcattaatattaggtcattttttagagttgtcaaatattttttaattaatgtgtatttttattgagcaattaaattaattttactatgttaatttcatgcctctaattgcttctttttttatggaaagtttttttctcagctagtatatataaatataggacacgattttgtcccgtgatgtaattttacggaatgtattttatggtatattaaatgggtcttagggtacattccgtgaaagtacatcacaggacaaaatcatgtccctataaatatatatataataagtgtacatttttatatctcatttttttaacactctttttctctcctacaaaaaaattaagagcacttctcctatatttttctatcttttacatgattaataaaagtaatatattttttttagaagttttgtagtttttatagagttaatatatgaatgatttgtatattttaataagattgatgtctcgatatttttcttttaatttatgacaagattttctataatataagattgaatattataattacaatacttagtttaatttttgtatttttttcgaacatcactagtttactgtactcgggttgtttcattttttttttgttgtgttttgtctctttttttttattttaagtttgtcatattatttttttatagattcaaaactaaatttatagattttttgttagaaattttattataatggaagacaatcaagactttacatgcaacactattgcaatataatacaaggatcaagaaagagattaaataaatgttacaatacataatatacaata

SEQ ID NO: 42280 - DNA, 767 bp, Cannabis sativa
  modified_base (669)..(693): a, c, t, g, unknown or other
aaaaaaaaaaaaaaccaaacgcgattcaaaaactgacagagcaaactaaataaatattacaaaataaattgttccccaacaatatatgaaagcagaatcactatcagatcagactaacattaactctctcagaaagaccgtaacttatctagagagtgtgagagatagagagcatactcggattgttccttgaaataggcgattcgagctcgcatagcagcgttaacctgcgagccgatatcactaaactctagcctctcagctttaacaagggtctcggtatctttggcctcctgttccgtcattgccgtgagcttgagcttgagctttctggtttttccagtggtagtgaccaaaaattgggaacactcaacagcggatttctttttacgttttttttttttttttttggtagatttttatactacatcttttttcttttctttttatgtatatactgatatgaaatatatgacgtataaaccaccatcctgaaattacattaatgcccttacaatcttcatttaagcggcacatcccaaattttcgacttttacaaatgtgtaatggtgcgcgccttttcacatttgcataatttttagtggttttttttaggaagttatatttagtgttaaattaaaattacaattaagccactaaggctagctnnnnnnnnnnnnnnnnnnnnnnnnnagggagaggtcatgggttcgaacttaggaccttgaagctattaagctattaaatgattgtaaaataccattacg

SEQ ID NO: 42281 - DNA, 739 bp, Cannabis sativa
tacctgtagaattaaccaaatggaccagcaacaacagcttccaaagagtaatatacaacccaatatccaatgatcatcaccactacttccagatccaaatacagaattattaatgggtaactcagaattaaagagcttagggcctttgaccaatgccattgacatggcaccacccacacataacatagttcctacaatctttgctatgcttctcaaacttcgaatcttcaccttctctaatctaataattaattcacacaaatcaaaatgtaaaatattatatacatatgaatcatttttttaatattaacaaaatataaggaaattaattagtttaattaatttgtacccaagaatgaaagcaattagaaatgtgacagctgggacaagatttgacatagcacttgccattgatgaagaggctaagtataaaccttgaaaataaatattttgattgattgctacactgtgttcatcaaaacaaaaataataaaaaaaaaattaataatgtaacaaattaaattaaattcagcatagcaatataatataagaattcaaagtaccctattaatgaagccaaaaatattaagccaaaacttcttaatcccattgaagaccctcctgatttttttctgtgaaagggaagaaaaaaaataaggtaaaaaaatagaatgagaatttggatagggagaaattgatgatagtttatagaaatatagaatagtaccttgtgaaataa

SEQ ID NO: 42282 - DNA, 802 bp, Cannabis sativa
tggtagtaaatctaaatcctagtaaaacatattccaacacatacttcatttcaaagttcataaattcttattaaaatctcctgttacatttatttaataaatttttgagattattaaataatttacagtatctaaaaaagagttcttgataatcaaattcactttatgtgtttaaaaaatgttaaacttatttttgacacggtaaatatacaaaaaatttcaaaaattttgttctaattataatgtataccgccataaaagtattattttaaaaaatatgtcaacatataatttttgagacaaaaattaaataagaaattataataagaggttgacggtgaacttctgtttatagtttatggtgttaattttgttcgacggttaatattgatagacaataaactaaaccgaacatgccttaagtttatggatcgggtttatttatactgtacacatggaaactcaactacgacgcctccatcatctaaatccatggacagaaccacagtggaaatatgaaaacacccaaaaaataaccattaattctatcgagatagaacaaaaataatgaaatcgatgacaagtaaacaaacaacaacatcatcaaaaccaaaaattaacaaataaaatatgttagacacttaaacccaccaaaattcttttaaatcaaaaattaaaaatgatgctcaatcatagatctcagattaaataaaaaaaacgatttgaagcttcttaaattgaatttatatacatgcatgataaaagtaaaagcagattaatatacattattcaaaaaaaaaaa

SEQ ID NO: 42283 - DNA, 2473 bp, Cannabis sativa
tttatagagtaatagcgtgatatgtggaaatatttatatatatttagtaattatatttatatggtaagtaagtagttttgatattaatttttgttaattttgaaacaacacaagattggagattaaaacaatgtgtagtctcgattgttttcaggttttgtaatttttgtaaaattatttaatttctttataacacagctggctctttttgaaatatattgttttgtttttctagttattcccgttaaatactaaataaatataggtataaatgatcagaataatataaacaacaataatttatatgataagatattattatatggatttaaatatataaaaaatttaggagaaatataatttttatatataaaagatggttatttaaggggaatatatacaaacaactattatattttatatttaaaactatagatagtataaaactaaacataatctagtacaataatatatatttgagcttctttggtggagacattaattttacttaaggcattttctatttttcattctttaagaaattgtatttcatttttttatctaatgttgtatattatagttgtaatacacagtttatttttaataaaatattttaaatattttacggtattgaaaataaagttcaaaatagtttgttgtacgagcacaaaataaaataaatacgtacaactaaatttttaaatcttattttcggtatctttaataattattcataatttttcaaaaagggacaaattcccaatatatataactataatatatatcatcatataaacaaatataatttataatttctctatatatcaaatacaaaaaatacccatataataaaagcaaaattgatgtactgacggtttcacctaagaatttttttatatattgttattttttttatataaaatttaaattgtgttagatccacattaccatttatccatcgttataaatagctcgatttagtagtaaggaagataggaactaacttttttcattttggtatgtattggattttttattttgtctgatgcttgcatttattgataatataataacccataaatatatatgtggctattattcaattcattactaacaataacattaattcatatgattgttgtaataactttataaaaaagtaatattttacttgtggaaccattaacaatcttgtgttacttttagtaatgttaaggaaaaacatgtgatgtgatcacacttaaaaccatatatataatgtatattatttcccattactacttgacaatatatcaactttatgtacatatatagcattaattagtggttggaatctctaataccaactctaattaattaatatttcttcatcatgacatgtctctttttccttttcatttttagtttcacttgttttttttttcttgttttgcattaattagtaattaaatgctagcaagttattacatagaaaaaaaattagtctataattttatagttgcaaatttaattatagatacttcaaatttcttggccttactaatgacaatatatttcgagattaattgaatagatttttttttttttttttgcataaccctatatgatgttaacaaacactattaaatgtacacattacacatgtatttaaagtttaactataaagctatatataattttaaattgagatcatattaatttaagtatcaattaaatattgagtctcatataatttaaagtaataatttttaagaattattgctaataatcgcaagacaacacgtctagaaaatattaagcacatatccaataacaatactcttaatttaaacgtgttataatgatttattaaatttcataatttatttaaaaatggtaaatctaatcacaataaattaatttgaagttaaaaacacatgacaaaatttcttaaacaaattaaatatgataattttacattacttttgttaaaatctagtggaaaagcaaagattacttgagtgcaaatattataatatcactaaaagatcccaagtttaaatcacaagaaattgttagagtggtaataaattgataaattagtgtaaaagtactataaagcttaaactaatttgattgcattaatggatgaaaatctcaattaaattgaataatataaagagaaacattgaaccttgatattgtttttcatagtgggccacaaaatgatttaatttgtgatcttctcttaatctttttttttttttttttttgggtaaatctattttctttttctacttttctgagctttggggattgaggtgaataattatgcaagattgtaggtggaggaaagtttatgagagagactcttaatttcttttatatctttatatattaaaagtgcctatctaacgattcttggtttaacgaaatttcttggtttaacagaaagaatattctgttaaatttaacgatgttaataggtttgatc

SEQ ID NO: 42284 - DNA, 1392 bp, Cannabis sativa
gaggcctttggtggaagagtacacatttcctgaaaattctgttcccttcaacaattgccatgcttccaccattgttgaggttacctctatttcagtatgatatttctttatagtctgctagtagtagtggttggttgtttctattatagagattgagtatgcttttttgctgtttgtgtaggttgataaagatcattttttggttgcctattttgggggtactaaagagggggaacctgatgtgaaaatctgggtacaaacatacaaggtgaacagataaatatcaagaaaagggtataatatttttgtgttgtgtgtttctaattattagattttgactcagttatcatttcactaatgaataagttataacacttcagtatgtcacatttcaagccttgctttcttaggtaatagtttggttcactaagcaaaatatgtgttatagatattaaggcaagacaccattggaggatgtttcttaaacatttagcccaattgttgatttcatgctacctttcggtttctatacttaaattctactcatttggtatcctgtattgtctcgaaaaataagtcaaatattttcaataatgcgtatttagtaccttatattttgaaactgaacatatttaataccctaaattaaatttgattaataaaattttattagtttaatcaaactattagcagttatatgtaattaaaactaaaatttgactatagaattcatataattgaacacagtttgatcgtattgatcaagttttgttaatcaaatttgagttcaggatattaaatatgtacgattttaagatacaggttactaccgaatgagtacacgccctttattctaattactattttagttcagctggacaatacttgattttcttttttggctggcattctactctagtttttaagttagttcataactcttgagaaaataattgttgctagaatggctgttgggaaccacctgttatagctgatgaagaacatgatgttccaatgtggaatcctgttctattcaaacttccatcagatgagctgctattgttctataaagtaggacaagaggttcaaaagtacacattttgactttttgttttatgtttcagctttgattatttttcttacagctttacctattttatgctctactttccttatgacgcagttcgaaaatcttacttttcttagaccatgaactgttttttctataagggtaaacttctttcactcctagaggcctaacaattatccaaatttagatttttgtttagactttaggagagtagaaactctagttgggagattgataactctcgaaagtttggaactttatttgtaatttcagatttgcataagcaataagagaagtacttt

SEQ ID NO: 42285 - DNA, 2258 bp, Cannabis sativa
gagcttttaaggatgatgttcagattatcttgcctaggactaggactagtgagagtgggaaggttgagactcttgagccaactcttacttcatcttctggtggatctggaagcagtttttgaagaacttggaagcaatctactgctacaaccagtgccaataacaataacaataacaaaagagagaatagagatgcagaggaattagagtgccaaagggatgtaatagaaaatttatcttcttctttaatttatgtattattgtttgcttttatgttatgatcatagataataaatgtgttggtgacatgggttttcttaggctgctgaacatgaatttgttgctgcaaataagtcttcccaaagatctggttcatcctgaaaaagcaaagctttctgagttcctcttcaatttcctatctccggatagccccatgagagtatttggattggtcctgatggactcttcgtcttctaggtcgaacgacatctcccggactgaagcgatctgaccttgtaaggttggtgagctgggctcacgtctggaactgtagtgtgactttgcaagtgggttgaattgctgtcaaaattgggcctaggcttgggcatgccttaacttatattaaattttggaattgtacacgtcatcactccaaaaacacggataacagaatccatgcttttgtaacaattttgcagaggatgttacataaagaaattggcctaagattcgtcatacactcacgaattttttttctttgggattaagaccgaatttgcttcagtacacccatcctcaaactcacccctagcaaagaaatgataaactaccttaacaacatccccaccaagaatcgaccaacacttctggtagaaagctagggtcttaatatcatgtcccaaactcttatctgggggcatttggaatattctatgtttgacttcctcatcagtaactggctattttaattcaacattcacctggatagagataaacctctgaacacagccaatcacctccctaaagttagcccctgaagaaaagaataaagagttaaagtaacccactatcacgatggagagaccatgatctcaatcaatccaatctccaccatcatttttttaattactaaaattgattagtcgtccatctattattagcagcaacatggaaatattttctatctttatctccttctttgagcaaaaattgtttgcctttttgtctccaaaaaaattccctttggtcaagtacctcaaacaatcatttttaacctcaccatacctctagacagagatataatctctcttgtttttcagaaaattcacctccattttgcactgctaaatcctttatttaaaattactcgtttactccttccccaaacagccaatcttttacacatttctctcatttttcctaaaaaaactttcaccttcctacccactccaacaatctctaacaatttggaaacacataggctctttaagccaaagattttttaaattaaaatgataggagggaacgaaatcctacaacacaacaagctctagaaacaaagggcaatggtttgaagaagaggtttccaaattaaagagattagcttcaggaaacaaaacggactaatatctacttaacaaagctcaatctgaatgaatttccacctaggcatcaatatcgcaccttttgtcccacgtaaatgaatatcccaccaactccaagtcaaccaaatcacaataaaaaacgcttgttgaaagccttcaaccacccaccatgggtatggattaccacattacttattttcttggcaaatttttttattgaaatcgcctatgacgcaccattgaatggatgaaacaacaacaagtgactagagcaagtcttatgaattttgccttaagctttctcgtggctcaccatacagagccacagtgtccaccaagcattcctttcaatctcaattgctaaatcaatatgatattgggagaaagtgaacaaacgaccttcctccccatgttttcaaagagcaaccagcctaccaatcttaccttgggctttaaccacaacaatcccttcaaagcccaactgcctaccaacccaatccactataccttttaaaatttatttcacataaaaaaattaggcttcttttgagtaacaagctcttttaggaattgaaaagtccagaggttcctaagcccatgaaaattccaactcaaaacatttatattgtgtggcaccattaagtacagaggatg

SEQ ID NO: 42286 - DNA, 3611 bp, Cannabis sativa
agttaaaaagggaaaaagaattaatgagaaagttgtaaaacttcatataaatttgtggtttgcagatggtgttggggttgggtgggttttcaaaaatttgaaagaagcttagtgagagtggtggcgccatggaaggaggtgtcagagaaaagggttcttcgccttcattcatgccccgacccaacttctctgtctaccaaaaccaagccttttctcaagcactcactgccaacagtctccagccttccaaatctactttcttccgcttcttctctctctcctccgcctccgctttagctctcctcgccattttctccaggtgctcatcaaaactccttaagtccttttcttttcagctaaattcaccgaaacttgtgtttactgcagtaatgactgtctttgtgatcatattccccactgaactttctagtttttctaactctgaagaggaatttgcattagggtttttcgagggtttaagaattttattttattcgggtagaataagattgaatctttgattggggttagcttttagatcgagaaagaaagaatctttgaggctattgttttcagtttatttattttttgtaaattagagtttcaaactaattatatgatttcttgtttttggtatcaaatttgttggggctaacgtgagaagttgtcttaacttgttagggaaactggacttgttagcaatttgaagatcaagaatgtttccccacacatatcttgtaagttaatcaaatgaaatttactttctgtaatttgagtttgacttgaccaatttggtttctgtagtttaaatcctattatgatgcgttttctgttttgtgctgtagatttatttgtcaaattgatagaggcatttgttggttgcatatttattggtaccacatttgctctattcaaaaccatatcatggcgccgagcaactattggtataccggcggcttcttcttccttgaaggaaaccaaggatcaattacagcttacaaatcgtcaattggggcttttgggaataaagccaaaggttgaacaaactgtatctggctctgctaaaaaaccacccaagtctaaatcctcctcagatgtccttgttccacttcatcagcctatggccactcccaagcgttcttctcgaagcagtggagataagttaaactccagtggaggtaataagatgcgctcgatgagtagcccttccaagtcaccaagttcatcatctgcattgtatcttgttccaggatcgatctcgcctatgtcttctgtccacaattcaccaggttttgatacaatggtatctacgccttggtcaaataacagacgctctacgaaagagataacttcagaagaaaaacttgaacaattcttggcagatgtagatgagaaaatcactgaatcagctgcaaaattagctactccaccgccaaccatcagaagctttggtgttgccagtccgaacaccattagcacatcaactaatacttctgggacaacaagaagcacaccattgaggtctgtgaggatgtccccaggttcccagaagttcaaaactccacctaagaagggagaaggtgagcttcctccgcctatgtccatggaggaatcccttgcagcatttgagcatttaggcatctatcctcaaattgagcaatggcgtgaccgccttaggcagtggttttcttctgcattgcttaatcctcttctaagcaagattgaaaccagtcatattcaggtatgccatcatcactattcctgtctcatctcatttgtcaatgatcaattattcttctccttttataatttcgggcaatggataatttgtgcttgttaaaatggtacatcattgattacttctatttcttttagtttggtaaaaaatatattgattataagtcatgatgcatatctaacattgccttatttagtagcaatatgggaatcttcgaaaaaattgtatgcatacccccatgcattgtgaggttttctctataatagtcatgtaggatataaaccatcaagtgattattgcaaaagctgaaattcattaaagaaaaagatctcacctgttttgaacttttaactttcgttttgaatctgattactacaaaatgcttgttctaataggtagtgcaagcagctgctaaacttggtgtatcaatcacaattagtgaagtgggtagtgacttaccttctagtggatctgctactgtgtcatcggttgatagaaataaagaatggcaaccagctgtgacgcttgacgaggatggacttctgcatcagctacgcgctactctcgtccaggctattgatgcttcctcacgtacatattgtttaatgtcattttaaatgcttccggactgctttacatttatagaatttcgctcattgtgtcttttctcataacatgcagctagattggctcaagccaatctgcaacagtctccacaacagaatcccttagtccccgtaatgcaggagtgtgtggatgccatttctgaacaccagaagcttcaagcattgatgaaaggggaatgggttaaaggtttgctcccccaaagtagtgttcgggctgattatacagtacaaagaattcgaggtaatttcttgcctttactttgtttaagagaaaaccattattgggttttctaacgtaaaccattaacctgcgtttggggttttcatagagctcgctgaaggaacctgcttgaagaattacgagtatcttggaaatggagaggtgtatgataagaagaacaagaaatggaccctagagcttccaactgattctcacttgctcttgtatttattctgtgcttttcttgagcacccgaagtggatgttacatgtagatccctcatcctatgctggagtccaatctagcaaaaaccccttattattgggaattctacctccaaaggaaagttttcccgagaagttcattgccgtcgtatcaggagtcccttctgttcttcaccccggtgcttgtatactagttgtcggaaggcaaagccctccaacattcgctttgtactgggataagaagttgcagttttctctccaggttggcaaattaattgcataattatatccttttgtatatcaatgattacgcatacatgtttgtgtacaagtgtgtgatcactccattatcaccaattgcataaatgatctttatttcagggaagaacggcattgtgggattcgattttgctcgtgtgccacaggattaaagttggctatggaggggttatccgaggcttgcaccttggttcatcagccctcaacatcctcggtgttcttgattcagagacagaagactgacataatgctcctccaacatcagcaacaaagaactcatgttcagctaatcagtgtcgccttattttgtgctgaactcgctaaacttaacaaactgaaggatctcgtgaaatatgatagggcgggggttggctttgcttctccgggttcttgattctaaagctggtttgcgacggtgacgatttttatgtaaaagtagaagcatttgactaatttgtaaaatcctgttacttatttcaccctttaaaagaacactaacacaagggtgcacatgcatttttgta

SEQ ID NO: 42287 - DNA, 1485 bp, Cannabis sativa
gtggcaaacctaaaaatgccatatttttctaactttgttatgaaatcccatatttcatgtaattttcacttatttaaaccaaatttctattttttttaactttttttttttttactgggatagaatttttttaaaaaatactgtgtaaattttatattgtgtactgttatgtttttactattattttagggttattttgtagttgttcaattattgtttttagttaaactgttttatattttactgttgttttataaaaatataatatttttgaaaaaatatctatatgacaacaattttttaaaagttaacccaaattctaatatttttgagtttccctattattataatttattcctgtcttcttttaatcagcaatttgtgtacatcaattacatgattcagtaacagatttatacattgtagacatatttacttagaaaattgctaagagttacctatgcaattctatgattactacattaaatatgctataagagaaaataggaaaaacagtttggaattagtccttttgctaactcatataagtcatatgtaaaaatgtaaatgataaatttagacaattgatgtaatgaaagacaggtcctatttgtactacataaaatatatttagtttatgttaatgttagtgaaatgaagattaattatcttaattaatattatgtgataaggtgtttctgagtgctcattataccggagatgatttagtgccaaaatatgatgaaggcgagcagtggaagaaggttttcggccctgtttttatctatgtcaactctttatttgatggaaacgaccgacttcaattatgggaggacgctaaaatacaggttcaatcattctcactactttacccctttcttaatagttacattaatatattcaactacttaaacttgttattaaaacacacgcagttaatgatcgaagagcagagttggccttatagttttccagcttcagaagattaccccaagtcagaacaacgtggttatgttagtggaagactacttgtcaaagacaggtataacaataattattaaataaaattatgtttttgaaatatatttatgtctatttttttgtttatatttttatatacgtaaaatgtgtgtaggtatattaacagtgattacatttctgccaatggtgcatatgtgggattggctccaccaggagaggttggatcgtggcaacgcgaatgcaaggtgactaactgtcgatactagtgattttattaaataatcaagtaatgattttatatcatatttataaactaatcaagttaaatttatgattaatcaggattaccaattttggagcagagcagatgaaaatggctacttctccatcgattatgttcgtgaaggcgactataatctatacgcatgggtccctggtttcattggagattatcgttatgatatcgtccttaccataacttctggtaaataaatatagatataa

SEQ ID NO: 42288 - DNA, 1540 bp, Cannabis sativa
catcaatattgatataatgagaaaagtgctaggcatccataaattaatgctttttaacaattctcttgaattaattaaacataacacttagccgttttttatgttattacacaaagttgagatatttgagttcgattttacttttattttttagaaaggtaaaagaaaattaatacaattattaattatacgtgttaatcttaattgtgatggggcgggggtttaattagcagtctttaaaaatgtatgccactctgaaagtacaaataaataaaagccttatttaagggggacagacagatgtttaattaattattaagaggagaagcaaaaaataatcaaatattaatcaaatagtacacttttttttagtgacccaaaagtatgtattgggcttgggagcatgcaataaatcggtagtacataaagagattaatttatgttggctagagattttattacgggtaaatattattttggatctgtaaaagttactagttgaactatcttaaataacaaaatagactctatattttccaaaatattaaaaataggatcttgagctcaacttttcaacaattttattttttaatataaccaattttaagacaatttctaatacgaactcatacagaaaatataaccagttttatcctaaaatctctagatcagattattacaaaattttattttgataaaaaattattagttcaggttcacttttagaaaatacagaatctattttgtcatttaacaaaacagaggcttcaatttgtaacttttataaaacacaaagtccaaaatgatatttacccttttattattaggaaattacatttaatataatatttaaaagtctttttcacttaattatgttagatttataactttattcatctttcatatttattttttttgcccgtaggttagttcatattgttatgagataagttaagaaatatttctcttttatatctgtgaatcaaaaatactgtcattttatatctcattaaaatatacccatttttgtgagtaagttacccaatgtaacattacctttcacttaaatctagcatataattttcattaacttaaaggatataatgagacatcatctataaaaatggatatatcttaaaaaaaatataaaaataaaggtaaaaattaaaacatgtaaaataaagtgggtatacaataaaaaattttctattataataaagagattatatcacaaacaacacaaaaattacaaaatacggttgtaaggaattttaaataattttttataattttatttacaaaaaatacgatcttttttatgttgcacggttgttaatttgttgttgattttttgttatctgtatgttattttttgtggttatttttatgttgttcagatgttattttcctattatttttatgtagtttttcttattgttttcatattgtttctatacaaaattgtaaaaatataaaaaaaaaaaaaatcttcaaacgtaaaagtataaatattttacaaaaaatagtactttatgtaatt

SEQ ID NO: 42289 - DNA, 5055 bp, Cannabis sativa
tatatttattgctacaatgagccctattaacaataaacaaacatgagttaacaactattatattagtaaaataaagtcaagtccaaaccctccgtagaagtggccagcttaggagtgttcatttaataatattttgaataaacaataaaacaaaaccaaagtataatctctattgaacaattgtttgtatataactaataattcattatgttatcgaaatatatatattttaaaaaataaataaataattgatgtgatttatacttaccggcttagacggaatcttcctaataatattccgtcctttagattattccggcagttttgtcattttcatatgtttagatatagcaacctgtgataattggaattttgtctcatttcctcgttgttataatcttataattacaaaataaacaaatggattaaataaagaagtgcccattaaaatacttagtcttactatgccttttttctttattattaataatttattgttctagttgagtggctaatcaatgctcattataataaatatctaagtaaaactaacccattaagaatgaatatacccgataattcgggcaaaacgaagctacaaaaacaatgccctcacactttggcaaatctagctaataaccaaacctgttatcctatttttaatcaaggctataactttgttaacatttgggaacaccatacagggtcaaacgttaagacaacatagcatacatttttgatcaagactaatatggagagtaatgaagtaaagacaaatataatcaaataaataaataaataaataaaaaggcttgaatgaacagttcttgaggctagtttagtggtccttcacaacttacaaggagggtgttgccttttagctcaattctctatcagctttaattggcttattgcatttggagtcattatcgttatgctgcaaccccatgatatttgggcacttgcaatgccttcttttgttgcccattgactgcttctaaaatatccaacgtgtgtgtatatgtccctttccactgtttttttaccttaaaaactttgactgataactccaacaaccttgcttaaaatcattgatgcaatcatttagtgacagaaaatagtttgagcagaccaaggcactcatggatctcatttcgttggtacaaaagctgcccattggggtcaaatgcctatttgggcacttgctggtcatcattgattaagcaaaaaaatgtttaggaaattgctttcaagtcaaatggggtttcacttgagcattgttgacatggtttcatcacattgagacacaaattgtcttcacctctaagtcactagtcatttggatttacaattttggaaaatgttctttctgactctacttcccattcttgccaacttcacaggcaagaaaaaatttcttttttttttctttttttttagacatacagcaacactctatacatggagtagagtgcatagaaatatcttactctaattaaaagatgacaaatcatggaagcagacttaaaatctatattccataattagtgatcccaagaggatcaacttgagtcacattaacctcttgggttctcactttggtttcgctccagatcaacgaggcagttgagtccaagctcagcatacttttcttccctccacctggagatccttctagggtcaatcctccaggactctcatgtgatgttaggcagctctctgtggaacaatcagctcttaatggacaaagactgttcggcatttcttctcggccttgaactccggctacccccgcagattgtgaagaatagaagccaagtggatccatggtgtgactcataggtgttttattccctaatccttggtatttttggtgttccatgtcaataacagaacctccaataaattgatcggcaagcatcttacaagctctctcaagcatcgccatatatctacgctcagcgttctggcgaatctgcaagtgcttctcagcctaaatagcaatgaaaaagagtgttgtttagaattggatgtgcttttaacttaatcatcactcactaacaaatttaccatataataaacataataataataaaaaaaaagtcccattgcaggcaaaaagattacaaaataatctcacataatatcatcaatatctttttcttttttcgataactatggatacccactgcctcaatgtcatgtcttgggtgacaacagagatttctgcagctactaggactcaaacttgagacgtctgtcataagcagactttctcaagtccatccttgccgccaaagaaaattctgaggtactcaatccaagttactactcactactaccacctattactgaggttttgtacactttaaaaaggcaagtttaggaaacgaaaattacctcaacttgtaaatgtaatttactttgtacttccatttgtgctcttagtgcctccttcacttcatagcccctatcaataacagttcttacataatttagtcctatttaccaattccatgagcaatgacatgaaaacaaaccataaaatgattttacaaaaagacaagaagtgttttcttactcattcatatcagaagtaggcaaatttggagaagaatttccagttcttgggctgtctataaggaatgaagctgaaatccctcgcataaattggctaaagaaatcagtctacttaacaaaattctgataaatgatttatacttactgtggttcatcattcattcacatctaatttacatacacttcataattccttatatatattagtccctctctggggaataaaacaaaagagaaaagcaggaagagaaaaataggttattatgacacaacgaccctctttagatgccttacccatatcttttcctgactgtatgccgagtctgtacttctgaaatataagaataaacattacatatcaataataagtctataagaattttgcttttggccaacaaacagtccactttatttgtcatagtaatagctaaaaatgaaaacaaacctggaggtgactcttcaaatggaaaagagtcagtcccttcacattcattgtccgcattatggcctttggtgtggcttctgcagttatcagtcatgaccattttagggcactataataataaaatatgataatccagcagttatcagctactaagatataagttaagatgtgctaatgaacaaacaactgagtggccaaagcttgatatatgaggtccatcaaacttgtataagttacaaaatatgttaacatacttaataaagtgcaaaaattagcaagcctttatacaaaatggctgagaatatagtttgttaagattctttcttaatgatcttgaaacatagattgaggaaattaaaaggttgggatccaggggatacatatactcaaacaatcagcttatttatccagtacagaagatcatcaaatgaagccaagaaagacataaacatcttctatctaaagactgaataaattctatgattggtctggcaagtggaattgaaagtatgtctgaaagataaaagattgaagaaacctaagaacacaagcttcaattggaaaatacaggcccaatgaccttaaaatcctgagaggcttcaggacgacaaagcctgtcctgtcctcacaactcataaccgttacagatactaaatcactaagccaagaatggccccatcagaaaaggcatcattgactaaagtgatcaacacaattatccttcaagattagcaactagtaatcaatttgcccttctagaaatctctttcttcattatgacaagagtttactaaagctatatttactagttcattttacttatttaaggcaacaactggcgaatcttccacataattatataaaaattaagaatttctttacattgccttttagaacattctccgtatacgattctgatcctaataacatgacctaagagtcctaagttcaaaagaatatcaaatctagctacccaaaacctaaaaacacacatttggggactctgaactatgaacaaattgaataaagcaaaatagatatagaaagagagaggactaactactagcgccgccgagctgagtaacggcgtcgacaaatcgttcatgaaggtcagcagtccaacgaagacgtggcttgggatcggaagtcaagacgagacatgggtctcccctcagattctgattaagtccatggtttgaaccaatcccttggatttgaatatcatcctggcccattatcccttcatgggtctgaatcaatctggggaacatttgacttttttccttcggaatctaaagccccaacgacaccaatcaatggaagacacccactttcgcctgaaccgaaaatatggatatgaatgaattattgatgaagatacaacagttttggtccctcgctataatataatatatccaaggaaaaataaacagagaagtcgaaattcattaatggtaagaaaagagagaaaagggaaaaagtaatagagtaatgtggtagagaggagtagggtaaggggggtctgacaggagtagacgtgtttctccaaattttgtcagttaatgtggtctgtcgtcttcttcgctgtactgtttttcacttgtcctctctctctctctctcgctttttcttctttcttcttctctcttatgaaataacaacgtaggagttctacattcaaacaagtaattatgagtttggttagcttagatattatcatattaatgtcagttccacattaatgtcagcttagatattaaaaccactatttttttttgagtaataatatttgaattaataaattaaacataaagttgacacacatacatttatgtgtgaacggtttagtatttttaaattcaataattaaataatacaattgaaatttcaacaaacaagagtaccaacataacaaaaacatttaaaaactacatatataagtctaatatctatgtgtaagttattttgaataggtattatttcacaaaatcataaaaattataaaaataccattgtacgggatattttta

SEQ ID NO: 42290 - DNA, 2946 bp, Cannabis sativa
attgaagatttttttaaaatttttaggtgtttttgagcacttaagcatccaaaaattatatttttttatagaaaaaaatacccaacttattaattaagtttgtaggacgtacttaacgtttttacagtgaaaataatcatattataaataaattatacaccaaataaaccaactttatttatttgtagaaatagataaaatataaataaattataaaataaaggttccacatttaaatagatgacaaattataatcgattattatttcgatatatatgactatttaattagaaatttgaggaatcaagtgcagattatctcttcttttaattgttacaccaaataactctgtcatatctaaattttgatggtttattccattaggaagtttccaatcaaaatagtatagcaaatatgctagaggaagctcaatattgatgagaccaaatgacataccaggacaaattctccttccagaaccaaatgggatgtactcaaaattattgcctttgaaatcaatagagctatccacaaacctctctggcataaaattctcaggttcaatccaatactttggatctcttccaattgcccataaatttactaccactctagtgttcataggtatttgataaccattaatctcacaattttctctgcaaatcctaggaagtagaggagcaggaggatgcaaccttaaagtttctttaataactgattttaagtatttcatcttattgattaattcttcatccaccaatccttttgtgccaacaacttttctcacctcatcttgagcctttttcattactcttggattcttcatcaattccgccatagcccaatccagagttatagatgatgtttcactcccaactataaagatatcctgaaattaattagaaaagtgtcaaacattttaaattcttacatataaccctacaaagaaacaacatttatcaatgaataatgacatgtatactaaaaatttccacacacaagatgcatattttgaatagagtattttaaattcttagcgatattttttaaaagctatattttctttaagttatatgagactcagtatttaattacactactaatgataaggcactgaggaaagtgtcagagactaatagtctctttaaatatatatatttatcagcaattctcttttgaataaatatatatcattactcttttttattatataaatgtgtacgtacttaccaagataactgctttaatattttcttttgttacgttgaatccaagatctacattgttatgaaattttagaagaacatcaaccaagtcctcttcttttccacttttctcagttgatgatgatgatgatgacttttcattgatgatattttctagtatctttgaagcctttaatttgaggctttcatatttagctcccttaccccatttatcaagaaagctaagaaaaggaaaaagctctccaatttcaaagtcttcacagtagttgatagcatctttcacaatcaatatgaactcttcatggtcactacttttcttgccaaaggcagccctggatatgatgttataagtcaaagctatgaccttttcagtaaaattaatagccatagaatcagatctagcaactgcagctatctcttgtacaagatttaacaactcttgttctctaatgggttgaaatgtttgaacagttttgggattcaaaagcacttgcatacaaatctttcttatttgtttccaatactcaccatatggagcaaacacaatgcctgtacaatcatatgacatgatttttgaagcaagaatttgaggccttgatgcaaaagcaatatcatgggatctcatgatctcttcagcatattttggtgatgtaactattaaagttggaacttgtccaattttgaggtacatgaatggtccatgttttttggctaagtctctgagtgtataatgaggtaatgaagaatttgaggctaatgagataattattagttggtgcatgtttcccactaaaggtaatttccatggtcctgggggtagttttgaagatgagatttttgtatgatgaccatgatcatcatcagcttttttcaaaagtagtaatattattttcacaatcttaaatacaaaagcaaaagagatgatgatgatgatgatgaagagggttattgggaaataataagagggtagttggagctccatgttggaagtgataagtatatctggagttttattatttggagtattttggggagttttattgacaaatatttaagggattaggtatgtatgattgtattaaattatacatttttatggcatgttatactatgatgtcatatatttaatatttatatataatcatgcgtaactaaaatgtgatgaggactataatttaaaaaattagaatgactgtaattttgaaacttcaaatctgcatacaagtaactacaaatttaaatactaattatcactaatttaattttatttacaacaaattataaaatttctaactaatactatttcacaaaaaataataatataattttaatcataatttttttttgttattttttaagttacaaattttaggatgactagaagtcaaattattttgtggtcatacaaaaaaaaataattatacataatttattcacgtgccaaaaaaattacaaaatatctcttaaattaggtgcaaaaatgcgtttacctaatgcttttcttatatattaagagaataagcaaactccacttagacaccactattcataaatgctaaaaaacaccataccgcccaacaatcattatgatgaggtgtaatatattgccctattaatataagccacgtattataattgaatataattatcataaaatattattagccatttataaaagactacctcgggatgataatcgacactactaatgtttatttag

SEQ ID NO: 42291 - DNA, 601 bp, Cannabis sativa
attacacctttagaccattttgccccccacaaacccctttatatatttatgttttcttttttgcttgaaaaaaaaaaaaatgtggtgtagattccttcctcgttttttcttcaatagtttttgaccatttcaaaaattagttatagaaatcttatatctcattttacctttattaagttatcgttatgtattttatgatacatcacgatagtttttatctcattaagaattaccacgtgtggatcacgtgtcagctatagggctaagcataatcctttttaataaaaagctgtgatgagattcgaacccttgacttaggtaaggaagaaatatgccaataaagaattctctatcactacatcacataacacgtatggttagtaaagaacattgatattaggtactatatagtgctcaacactataccgatgggacgcattgtgattagttagtagtttcttatattatttattaaattaatttttttaccgatattaatttgcattaataacgatatatcacatcttgtggtgtttgacattgtaaggtgtcccttagcattcttttatagcaagtcttctaaaatagttcatttttatct

SEQ ID NO: 42292 - DNA, 4544 bp, Cannabis sativa
atataaataataaatagtttaaaaaggtgatttctctacaagttttaaaataaaaatatttactaatatagttctattaagactatttactataatgttttgaaataaagatatatattaacatagccttataatttgagctatatactataatttacaaaacacaagagtcaaaactagtagttagcatagagaaaaagttgggttacatttgggtgggtgggttgcaatcgtaccgaatagtcgcgggattttgggtgttaagcgttgaaattaatgatagtttcagggcttactctaagcctccatccccgtttgtggctttatgctctttcactcacttctatttctttcatctttaattgtgactctcaaaccaaactcaaaatggtataagacaagttgaaaattttcgtgtgaagagttgtgaaaacatgatggttgggtatttcatgcggagaatgacagtgtcaatgtcatggcagagcaaggcacttagacggagaagctcatttacaaccatgactcacaatagtatcctcaaggacagcagccatgactgccaaattcttatgtccccaactcttgtctccttagactcccctgacatttgggctcccaacaatcatcatacccattaccaattttcatcgaatcgaaatttctgtaagtaatacctctcgtgcctaatgggttttcttcatttaagtaattcgatggctgtaaacggttgaacttgggtacgaaaatgttcgaatgtgaatatgatggggttatcattgtacagttttagataagggcttaatcattcttgtaattttttgttgtactaatacttcagcaactagagttgtatttggggatgatatcaatgagtttgttgggaggtgtgttgtgtttgaaattgatacaaggatatgttccctggatattgttattcattcaaatacttggcagtgtaacatttaagagagattacatggaagaattagataagtcatcaaaattaccaaaatcttttcattgatttaaggtgtaatgtgttttccttaaaacctggtttgattgattctatatctgatcttcatcacagccaatgagcagactgctgcagtaattaatggccagttgatggcggatgaaatcaggtcaaaaatagcttgtgaggtgaggaggatggaggattccattggaaatgttcctggcttagctgtaattatggttggagaaagaagggactcgcaaacatatgttcgcaacaagattcttgcttgtgaagaagtaggaatggtatcaaccgtaactgcactcccaaatgattgcacagaacatgaattacttagtgctgtggcgagttttaacgttgatccatctgttcatggggtccttgtgcagcttcctctgcctcaggtaacataagaatctatgtgaattaacccttgctttgctctatatgaaatgaaaagcttttattgtatgttgttcatttgactttgaggcatctgtatattattaatatttgatggctttgttgtactggaataggtgaatataagtgcattagatatataaaattatgatgaaatacaatttgattaattccctttggtaaagtttcactactaagttaacatgtaaggcaattaatagctgagattttgatacatgaaatatcagaacttgctcctgttgtgtgatgacttacaacagaatgtctgggacagcatttggatgtcagaaaaatttcagatgtgctgagcctagaaaaagatgtagatggtttccatccaatcaacataggaaatattgccatgagagggagggagccattattcatttcctgtactccaaaaggttgcatcgagctgttaatcaggtctggcattgaaataatggggaagaaagctgttgtgataggaagaagtaacattgttggattgcctgcatcattgctgttgcaggtaagtctatttttaaaactaaacaaataaaaaactatacaccgatacatttactcaagttgctcatattctaatatttaagtacattaattatttttttcttttttctacagaggcaccacgccacagttagtattgtccatgcattcacagaaaacccggaacacattacgcgtgaagctgacattttaatcactgctgtgggaatgcctaacctggtgcgcgggaattggctaaagcctggtgctgttgttatagatgtgggaactagtccaatagaggtatggtgaacttgtcacaagtttcctatagtttgaacttgcattgtaattgtagtttttgcatgtgttgcatacttagcttagcctagaattagcaacaaacttgtgatttcatgttacacatcccattttaatttgcaggatgccagctgcgagttaggttaccgtctaatgggagatgtttgttatgaagaagcagtgagggtggcatccgctgtcaccccggttcctggaggaatcggacctatgaccattgccatgctcctatgtaacacccttgatgctgcaaagcgtgcacataatttcatttgagttgggaaatttgccgagcagcacatgatcttacttctcacaacatctgcctcagttttgttgccaaagcaacaaaataagagcatttctaatagagtgtccaatttctttaaagaaaaaagaattgtgcaaatttaacatatgctaaaaattgtgttaaatttagcactaagtctatgacactgcataaatgttgttttttttcttaattacaattttgtcactaattatttgatgatagtttttttttttaaaaaaataaataaataaattaatgataggttttaattcatatgtttgagtacaatgttgccactaattagttttctaatttgtattattaatttctgctgtatattggagagtaattataattatattgctaaaaaaaaaataaagtaatttacggtgtaaatttttaaatttttatggtaatattacttaagttatattttgaaaatttttgtaaataagtggttgttaattactaaatcaatatcaatttgctattttcttattaatatatttaaataaatttttaactaacatggattcatcaaagactaccatgtagtcattgacttaacacttaaacgttaaatacataagttttagaaatataatttagatattaggggaatttttaattgtatacgtattattaaaattaattataaaaataaccttaacaatttaattaatgccaaatacttgagtgattatacctaaagtgaaataattctctcattttcttcacaagctgcgttagtattttttttgttctgtgtgaattgagtattaggagttttacctcttattttaaattatttttttctttttctttctcctctctcactttaaaattttttttcaattgcattattgatcatttgagtttaaaaatagtatcattgtaacttattttttaaggtgatcattttgatatgtggaaagtaaatattatttttatctttaccaaaaaaatataaccaaaatcaaaagcaactattgaacttcttttataatttattaataaaatagtcaccaaattttaaattcaaataaaattaatatatcaactaatttatgttattataaagttgttttttaaatgatatcttaaagattataaattttttactttaagtaacattatacacttttcttgtgtaagatgtttttatgattttttaataatatttaaatgacctttaaaatctatttgagagtcaagcttaacaacattattaccaaaaaaaatattactggcaatcaaaagtaatattttagttttttttatatatatattttattaagagataatcaaccaaactttaaatcaaacaaaattttatacattgacccacttttggttacttatttagagtagttgcttttaaaattatagtttcagtttaatattgtactatatattgtttaagatacatttacattttatttatttagtattaaatttgtattacctttaaactttaatcaaaaaatataatgagttaaataaaatttaagaaattacaaaataattttttaataaaattaatttaggcattttttataatataaatcattttatgatattatttaagataccattttgtttcttagttttgttagaaacctatcaaaatggttctataaaatttgtttatttaaaattttataaaatttgtcttttaagaaattacaaaataattttttaataaaattaatttcggcatttttttaatataaatcattttatgatattatttaagataccattttgtttcttagttttgttagaaacatatcaaaatgactccattctgctaaggcatcagctggtttgttaaaaaacattctagcttttttttaaaaaaatataactaaacatacacaaacaaaataaaacctaagtaaaattgtcatattaagatgagtaataatattaatatgtgcatacataatgtgtaattccttcttttttttt

SEQ ID NO: 42293 - DNA, 1220 bp, Cannabis sativa
gaaattgaaccaaacaaacaaatgagtctaaatctctccttgtaaagttcaaaactttactatacagaaatcaaattggtttagggcaaactcttgactgttttgattacatatacaaagaaaaaaaagtaaagtttcaatctttatagcttggaatgtataatataaacaattattaactgaaaattgaaaactaacaagctgagaaacaatcctaaaaccctcaaaaacatttgttatcatcatatttgaaaacaaaaaacaaaaacagaaaatcccaattcattacaaggaatgtatttaccttggtacaaatcgaaaaagccaatctagtgggagcttcttaattctcgtactaaactctctctaatgtaaaatcttggagatgaggggaaatgtttgttgggcttatttaaatgggcttttgaagtctggcccaacgttaaaaggcccattaatacatcagtacgtaaaaccccttaagccctcatcttccatctccaaaaatctaacctttttcaataaaaaaccaaacttttgtatcatgaaataacgttagatccatatgacgacgaccaccaccattgttaaatccataaccaagcttcgtcggagtcattgggaagtcttttacagctcttcacctgcaatttcctccacagttcaatctcaatctcaatcacagttgacatcttctcttcaatctcctggtgagttttttgtgattttttcttcttataattaataaagaatggttttttactaatcattgttgtatttgggttaatgggtattttaaattagagcaagaaaatcgaaagagatggtcaaaatggttgctttttcttcctggagctattacttttggtcttggtacttggcaaatattcagaagacaagataaggtgttgttcttttgttattacatatataatatatatgattgttttttgttaggttctttgttatatcaaactatgttgcaattcataagcttttgtttttgtgtattgaaagttattataattctctatggtttcagctttatggtattgagcaaaatatatattgcataatcgtacggttttgtaatatgaatgccagcaacttatcatgctttgtcattaatttatatgttttaattgcataatttagactgtaaatgcaaaaatgtgtttttccaatggagactattggagtatagtgtctcaccatatgga

SEQ ID NO: 42294 - DNA, 613 bp, Cannabis sativa
ttaaaatattttatatatccgcggaaaagcacgggatgtttaataattttttaaataaataggccaatcataaaaataatagtaataaaaaaaacatgttaagaactattgccatagtagtcaactttctagtctctttagtttcaaataacatatttttacttcaattacctgctccacttaattatctaaaaggtaacagtaaaatatgtcattgtcgatgcgtgtaatacaattgttggtttaaatgtacgtaattattataaatatacaaatgattcatataatgattgcccaatgatgagtagtccaagtatgtcgacatttcaagtacttcaccttggctagctagtactatatgtttttcaagtatacaagttagtactaaaagttggtcttaatcagaatcagtcatgcactaattaaaataaaaatacactaagttttattaacatcatgagcacatgaatattatatatatagatgtatatatattattagcactaacatcatgaacacgagaatctgtatatgtatatataaatgtaataatagtagttgcattacaataatatgtatacgtattttgtttttaataatgaaaggtatgtat

SEQ ID NO: 42295 - DNA, 737 bp, Cannabis sativa
atccaacctccaccagtttccatgacctcacaaaatctgtccacctctgaagccactctttccggctaaccacctctgtttcccgaagtccctgcacatactcgtcggagccttcgtgaactgagtaaccgttgatcgatgccgacttagtaagcagcaagggaacgcgtcttcgatgagatgaatggatagagagaatcagtcggagcttggtagtagcagaggtgaaatggagatctttcttctgatgatttcgaaagaacggtctcgtgcaatggaaagaggagagtaggcgaggttgtggattgtatagaactaacgccattgttgaaactattaagctttgtaatgagagaatagggtaaaagaaagctaggaggtggaactggctttgggttcgtccattggcgaaccggagagattcttgggcggagcgtgaacctagttttgcttatcgctttgcgaaacaaagctccaaaagacaagggaaggaagaggacgtgtctttgaattgggcgcgtggcaaaactgggacgacacgagtacacgacgccgcttcttgtatatcaggaaaacgacatgtcgttttccacctagttttgtttgtttgaccttatcatgttacagagacgaatactcgtggccgcaatagataaccaaacggatacattaatgacgccacgctgtcactcttaaggaactattttctatttattttatgaccatcaacacttttt

SEQ ID NO: 42296 - DNA, 968 bp, Cannabis sativa
aaagttcagttacctggattgccaagagaattattaaccaaattgaaagagaagaatgttgactttgctgctcatcctttggaggtcagcatgtggcctgctgtacttgatttgttgggaaacttggcatttccattgatattaattggagcattactcttaaggagttcaggatcaaacacacctgctggtggcccaaacttaccatttggtctaggaaggtatgtatttactttgacaataatacttacataaaatttgtagtacaccttcacatactgtactcggaatgttttgatagcctttctatctgtttcgatatttaaaatagatttttttgttcaatataagttcaaacaacttaaaaaatagttacataatcattaaacaaaattgagctaaaaaattcttcagaaacataagaagggctaccaaaacattccttgaactttttcataaggtacttaaacaatgtttatttataccaggagcaaagccaaatttcagatggaaccaaatacaggggtgacatttgatgatgttgctggagttgatgaagcaaagcaagattttcaagagattgtagagttcttaaagaccccagaaaagtttgctgccgtgggggctaagattccgaaaggagttctgctagtagggccaccaggaacagggaagacactgctagccaaggccattgcaggggaggctggggtgcctttcttctcgctttcgggatcagaattcattgagatgtttgtaggagttggggcttcgagagtgagagacttgttcaacaaggcgaaagccaattcgccatgcttggtgttcattgatgagattgatgctgttggaagacagagaggaaccggcattggtggtggaaatgatgagagagagcagactttgaatcagttgttgactgaaatggatggctttagtggaaatagtggagtgatcgtcattgctgc

SEQ ID NO: 42297 - DNA, 732 bp, Cannabis sativa
ttgtggcatcattccatgtcgtatttaagtctatatttttttgtgcccagtcgtactcgtaacttctgggctcgtgccggtttgtcaaaaaaccaaacccgaatttgcagcactaggtgagaatggttgaccgagccttcctttgttttaaataggacacacgaacaacagaccgaaacttgagcccaaattctcaataaagaaaaagaaaaaaaccttgagcccaaataggctctcccgataaacagaaactgaaaccataatctccatagtcatttcactttaataaataaataaataaataaaagagaacccacacaagttgactatattttgcttcttttttaaactttctattttgtattttttattctgcattattctgtttgaaacaaaaacaaacagctaactgcataaaaagaagcggttgttgaggaaattcaaacaatgttttacaaaaaactagacaaagttggaaacatggtgcatgactcgtctcccattagcaacgatgaggtaagaactagtttagcttttttaaaccaatcttgtttaaagcacaggcaaacattagaggtgactgagtcaaagctaagaaaccatgttgagctaattgaactaactgaaatagcagatactaactcctataaaatttgagttgttgtttagtctttttcatggctactctggtatttgattaataatcaaataacttataatgtgctcggtatg

SEQ ID NO: 42298 - DNA, 1288 bp, Cannabis sativa
  modified_base (30)..(31): a, c, t, g, unknown or other
tactccactcattgccaattggttttgagnnggaaccccatgattctcaacagtgtttaattacttgtagctttattaaatcttgaacacttaaaatcacaagaatgtggctcaagtgagtttcttaagcgccaagtaataaactgtttacataattatagcttaagagcaatgttaaagttaaagaactataaatttcttaagcataaatgagcataaataaagtgtatgggaaataaaccacttgaggctagctcaagtggccataggtaagtgtgtgagtgttggaggttctgggttcgggtcccaagtaaaacatggttgtaatatataaacgcttaaataaaaaaaaaatgtatgggaaataatgaactgttaagccttctagttatatataggaaaactagtatgtattatatttaaaataataataatgataagtaaatgtataaatgagcatatttcaagaatattccttgatgatgtaactgtagattttaaggtttaacgatgttcattgatcttgaactttgatgaatagatgagatatgtagaatttggaagtgaatgatggccattgatgttggggtctgatgaggaccattgatttttgataaagtattagagctctttgatcaagaagaaacttcttgaagctttgcataccaaattgaaagtaatgatctgcccttcggaagaacgtgtcctcgaggaagcctatcttctacatgaaattgtcttttgaagatcagaataaaataaattgattaagaggtgaaaaaccctaactacccgggtatatgaactcaacacctggcgctatattccctagtcgttgtgacactgccttcgttgggtgcatgcgtaccctgggtgtttggtaggcctgaatgccccctaatgggtttgtaacttgcatcttgagttattcacctgatcttctagctagaaatcttgcatttagagtgaattatagtctgattgttgaaacaccatgctcgatatcgagtaggtctgggcattttactcaataaatagagtctacgtgctaggtgatgtctccaagtcttgttcttgcactgtttcatctttcaggagatgaatgcgcacacagcttgccaaagtataccaaaattaagttgccaaagtatacaaaaattaagttgcccatcacaaaaataggacttgggcgcccaaaagcacacgggcaatgtccaggcccctatttgtaacgtccccgcttcaagcctccattgggtccttccacccacggaataatggctcttat

SEQ ID NO: 42299 - DNA, 1668 bp, Cannabis sativa
  modified_base (53)..(60): a, c, t, g, unknown or other
acaaggccaaacaagccaaattgttttccaaaaacaattttctgtttttaaannnnnnnnacagttttttagttatgatgccaagcatgcactaaaatttcttggtctctctatttgtacctttcgttctctatcttctctacattggacatttttgcttctacccaactattccacctccaccctctttcttcaactctaggtgacaacatatttttgatactaattttttatttaattttttgttttaaatatttttttgtgttacataattgttgccacattattattcaacaacaaaaattaatggtttgtacttaattgcaataaaatactaagataacatattattaaagataaaaagaaaaattcttttttttttttttttttatattaaatatatacattttttttaaaaaaatgtttggttacatacaaagcataaattctttttccttttggaacaataggtaagcatcaattcttccttctttttttaaacaaatataagcatcaattctttctctttttctcttttaaatttttaccgctaaaatcaaaaatcaaattctaaatttttagggaaaaaaattgaccaaaccgatcgatattcactcctaatacataggtgttgaatttgatcgtcctatctattaaatgtatttcatgtatatctactagattagttcgaatttatccaatattttagatttatatttttttgaatcaaattagatccatccaatatctaaatccagtatttattaaatttgatctatccgaatctcccaaaaaaagtgaaattttaattttaattttcttatatacttgtataacaacataaaatttaattgctcattgaaactaaataaaatactaattaatttgattgaatattaaatttattgcattttagacaccccatccaacatttgaaccaatctaattagatattagaaatatcattcaatctgatttgatggcaattcgacatctaatgtttgataatcgattgtaattgaatcagttagttgtaattggattggataaagtatatgactataaaaaaatgactaaaaaattatcctagatgacaaaacagatagaggtgtatcactacacattttttaagagtgtgcattatagaagcatccaaacaaataaatatgcttgaaaaattaatggaccccttttaaaaagggtccacatatgcattccttatatctgtttcgatatcttgaaaaatactttagtccattttttttttcataatcctatacgttttaattatttagcatatcctgtaaaattttgagaaattcagaaaaattattttacatgcatataaaataaaataaaagaatctcacgtgcaatagactgtttgaactctattttcggcgtattatattttttcaaatacatgatgtcttaaataagtataacatagaccacaacgaaaaaaaattaaactaaaaattcttcgagatactaaaacaattagaaagcgcatcaataaatctattttaaagggtgcatggtagaagtatccggtatattttttttattattttcttttccttttttcttaataatttagggtgattatacaatgcaccccttaaaaaagatgtactgatataccctgacttgtttcggcatccagaaa

SEQ ID NO: 42300 - DNA, 3611 bp, Cannabis sativa
ttaatattaaaattttacttttttagattggactaatccaatccaatctaataaatactggatctaaaatattagatggatccgatccgatctaaaaaataccaggtaataaactcgaaatatactatacatgaaatacatccaatgaatagaactgatctaatgaatattaaatcgattgaatgattgaaattaattgggtcgcatcaaaggataaaatttaacatttaatatttaattaaattagatctagataagcctaaaaaattattgtatgtagtccaataaatacactataaaatattagactaaatggtttttttaaactattagagtaaatgttttaacggtatattatataacggtagttagaaaaaaaaaaaaaaaatatgagatttttttgtatgtataaatattgggtttctttcattgttgtcatacggttggcatttttattaagggaaaagtttaaaaagaaaacacatttgttttcctttttgaaaaacaatgaaagtggtttggaattacaggaagtttccgtgggaatgagaaaaaaaagaaaatcttacagaagagaaaaagggaaaaaccgtacagaagtagaaggaaaaaaaagcagagtcgaactcagattgagacgcatacattaccccacctccaattcgccccggtccactctctctctaacttcgtcattactctctctctctctaacccatttccctctctcgcctgtgccttttcaaacgcttgaaaaatcagcaattacagcacaaaaaaccacgctcagaaccttctcttccatattttattttttacccacgcgtccacgccattgtcaatggctagcatatatacctctatcaaattccctcaaattgcttgattccgataccctttctcaacttctttccattctatctttcactacttaatggaggttctcgaatacgatactacgaccattctaatgcctaatatcactactgctattactactccaatgaagcaccatcaccgtgagaatgttcaatggctccggtgttccgtacagaactacgattggggtcaaaagggtcgcgactctcatgtcgccaagctctttggtctcaattctgactccccagtcgacccagataagccttacgctgagttatggatgggcacccacgagtctgggtcgtcctttctggtttgcaatggggaagacaggaatggccatctctcgtttgagtcggagtgtgaaagcctcaagtcatggatttcgaagaaccctaatgtgcttggagagaaagttatccagaaatggggtgctgacctccccttcctgtttaaggtaatcgaatttcgatgggatttctatatcgaagctttcccgtttcttggggtctgatttgtttgttaatgatcttcaggtactttcagttggcaaagcattgtcaatacaggctcatcctgataaggaacttgccaaggctctgcataagttacttccaagtctttataaggatgataatcacaaacctgagatggctcttgctataactcaatttgaggctctttgtgggtttatcagtatccaggtatgtatataatacacacatacactactgatccgtatgtgaatttataatttaaattgccaaaattggattttgactttatttgcttggttttgaagtggttgccaatattaagaatggaccaataaacagatctctgtagtgattgatacaaaatctggccatttcattaaaattgtacaataatgattttgtgctttggatggtttcgttctctaacttccacctagggatgtggctggctgtcggtcacttatgttttaaccttctctgtttacatgcgtatccattatgagtttttctgctgaaaccttgtatcttaatggggccaggggtctatgtttaagccccttttatttttaggagcatgattcttccatgaaaaactggacaactgacttttggaaaaatcggtcatacacttagtagacctttatttatgtatatttttttgtgttgaacggaaaaaataaaaaaaaaaaaagaagaagaagaagaagatgctggagctctgttggattagatttaggccctctgccttgctggaagattttcattgtggagtaaaggactccagcaagccatgaaaagctaaccataacagtctttatcgatcctctttgtaaaaaccgatgttaaattgaatgattaacatcaacttgggttcattggttgcacctgatacgaatatacagaatttgtaaaatgattattaaattttaaagtaacatttcagttggtctccatcgttatgtgttagcactgattatttgtctttgaactcactcttatgtatgtattggcatgccatgtttttgcaggagctcaagtctgtccttcagaatgttcctgagattgtagaagtagttggcctctcagatgtaaaaagaattctggagatcactgagcaagatggacaggagaaagtaaagtctgctctgcgttcaatttttacaaaactcatgtcagctagcaaagacatgattacagaagtcacatccaaaatgataaatcgcctacactcggaaagtcaggtatgttggtgattttcaacttatttcttaactgaatttcttaaatcccattgtagaagattcagttttgctcatttttcttgcctcttaaaggctgcaaggatgtttgttagttttcacagagcgttcttttgaaaaaagttttgttttttatttttatttttgaagttatgagttcccagttgacttttttctttgtagtcttgggatgttaaaactctgtatggaggcataataggttcaaatagtctgagcactgtatgtaagataggttgatttctctagtgttttcatctgtaattttattttgtttttcatttgctggttggtgatttttttttcttttcattttcctattactgccatcctctgtttaattctttgatcaaattgttttttccctcctatatcaggttcggcagttgacagaaaaggaacggctggttttggagctagaaaagcaatatccatctgatgtcggtgtgataacagcctacttttttaattatgtgaaacttaatccgggtgaagctttatatcttggagccaacgagccccatgcatatttattcggagagtgcatagaatgcatggcaacttcagacaatgttgtgagggctggtctaactcctaagcacatggatgtgaacactctttgttccatgctcacgtataagcaggtacttacttagtcatttacgttttgtgattgcattttcaattattcactgctgaatttatgctacacgtaagtggtaagtgtaaagttcacaaacactcttttgcctttcctttttataaaaaggaattggatatgttacgtaacaaaagaaaacataaaaaggacagaatattattagagttctggttctctgtttgatgccccttatgggcaacttttcagatgaggtagcacttgctttattgttgataagcactatccatgaatgcaaggataggagaaagccctctaatgcaagtcatttttcttttt

SEQ ID NO: 42301 - DNA, 5051 bp, Cannabis sativa
  modified_base (4991)..(4994): a, c, t, g, unknown or other
ctctctctctctctctcaatctttgaacctataagaaccaaggaaaaatcaaggataggataggaatattgaggagaaaccttaagccaagatcaaagataagctctagatactttatttcttgttgtttttgacgttttaagcttggttcttttttgtgatttttgagaatttaggagtttagttttatttgaggttgaattatgttagagactattttaaagcttgattttagttatttatggcttgtttttggaagtagtagcagctgtagcagatttgaggaagttcggattttgtgaactcaagctttgctcatccatgatgaatttcattggatgttgttttagatgcttttgaattgtgggttatgtttagagtaccccaaattgctattctgaaaagtttggtagcttttggtttggttgggagataattttggggcctaaaaattgggaatttttgagcccttactgcccaagagaagcttccatgatcggagagcttccacgatcggaggagctttcacggtcggaggagcttccacgatcagaggagcttccacgatcagagtagcttccatgattggggagcttttagaatgggactttatcaaggaaattagtctttgtatttttgccataacttttcacttggatgtctattttgaacgttctatacataatccaggtaatcttccttaccttagtgataccactactagacacactacttagaaacggtagttcctaggaattattcgttctagactctaaacccaaaataatgtaagaagggagacgaccccaatgggttattgacccaaaaccataaggaccttaagcgaaaaattggctagcatatttgatgaaattcttaaatgcaaaatttgaagaagtaaagcattctatgactcttaaatctgcctacggtggtgttcgcacagatgaaaaaaccctaatttcatcctcaaacagtgcatgcatatataaattaaagtgataaattcgtaaaagttaaaacacgagcaaaaatgatgtacttgatgaggaaaaagggagatttaaggtgattgttgctgggtttagtttaggaagatgatcgcacctctcctgaagacaagaaatggaggccatcaacgactcaatttccttcccaaagtctaggcttgtgatttcttctgcagtagttgtcctgatcactggcgatggaagatggggatattctcgagccctaattctcagcaacaggcgaaggcagtagtttactgtgtttttttcttttttggatgattctccttgaatgcaattcgaagctctaaggatggtggggaatcttgtgcaattagagagtgtgaaaatttaaaagagaaagcaaaagtggtgactgaaggattaccaagggtatttatatcccaaggcaacgatccacgtgaggaacgagtagattatcacgatcttttcagaataaggcatgatctccatccaacggctaaggagaccgaagatctatgagtatctccacatttaatgcctttttaactcaaggtgtgaagtaatgataaaaatgctcttttttatttttgtgcagttagtgagcaaccgccaaaatatagttgttcctagaagacgactccttgatagttacgttttgactcatgcttgactaccacgtggacgcaccaatatcaatatcatagccagaattaattagcttccatggtcgagtaacttgggaagaatcattattttcttcctctaatatatgcgcttccaaatcaagggatcagagcaaacttccatcatgagcagcatcctaaaagcttaggggtaaatattggtattggtctaactaagtatcgggtcctagtggtggctagcaccctcctatgtgtcaatattggtatgagtccaactaagtatcaggtccaatatagtttaatataatagcttttaaggaatatcactagccaatcgcaacgtgacatgtcgagaatgtgctaggcaccaatagtacctaatagcaatgctcactttagtgccacatactcacatagtaatgcaagtaaattaatgaaggctttaacatgagtgggtatggttggttgccatgccaccattatcaattaaaaaaataaataaattagaaatgcaatttgtaattaataatattccgttcccactcggccaggccaatattgatcataatgtggggttttggtacttgcattagtataatcaacagaatacttcactacaaagttcttaatcacgtgtaatcacaagcaattaagtaataagtatgtatgtaatttactcttaattattaattaagtaataagtatgtatgtaatttactcttaattattaattaagtactatacagtatagcatatacatatacttgccatctcaaacaagtatattttggtttactcataattaatccctgctttatatactttatcgacgatcttttcacctacaattttgcatcgttctctaccaatctgattttttccaaatattataacaaaaatgatcctcaactagctagctagctaacttcatttgtccccacacgacacttctataatattattagtgtttattaatttaaaaatcaatattaaggttgttgagaataatggtattggtgttaggagaatcattcttttcacaaatattgtcatgtatgtataattacacatatcaatgtttcacttttttattactatatattattttcttctttctttttttctcctatgtagactgaaaatgtggtttagtttaggagatttatttagtacaatctcttaaagggatcatctggtagaccctgttttcgtatttaaaaaagttttttagtttaattttttttgattgttgtgtatattgtggttaagtactattttacagtttagcatatttaagttataaccaacatgcaatatctcagtcgaagggcaaagtgctacttttaattttattcctctgtaatgattgcatgtgagaaaggttggggtgggttgaccacttacgtaacgattccccttattcatattatatatatatatttaattgtttaattagcttttcgtggttgttgatgagtataagagactcttttatgaatatcaaatgtaacaattaaaaaaaataatgaagatccaatattcttcagtctctctctctttttattttaattaaaaaaaatattcttcactttcattagttagtgttaatgcaatctttatttacatgttttatttataaaacaaaaaattcatcattattatttctttatgtgtagtgccaaccacacaatcatgtatcatgacaaagccagaaaacacaaacttcactagaagtttcctttcatttccgaaaattaataaacctataattaatgatcgcttcatattcttttccttctttttgatgtactcaaaacacataaacgccacaactttttctggagagagagagacaaacatattatttgatacatcaaccacaccactccttttaaaagaggaaaaaaaaaaaaaaacattgtaaatgctaattatatgagagggataatacaaatttggtatcatataatttaagtaaatagtaatttgaaccctcagttatcattgatacctaaaattaagactattataattattaaaatagtgaaaaaaagacccctaagtatagatttagcaaaatataaatttgaaaaagttgaaatactttgattttattcatttaacaaaaaaatatttattaggtttttttttttttttaaaaaaaaatattggataattaattaaatatataataattaaaatattatttcaaaagaatttgaaaagtctcgatatcatctcaccaacagaagaaaagacacaacataaataaacttagatagatcagcagacttaatgaatccttgttttagatttataaaaataacaaactataatctctcataagtaaatgatacttgtaattaatcatctaatagtttttttttttgaaaaaaaaaaaagaaatctaaataaataaattaaaaattgaaaaaaaataaataaataaaattaggttttcaatctttctaaaattatatttaaataaaatcataataaggttttttttttgtttactattttaataatttgaggatgcttttaagcatctatgagagctaggtcctgtttacacaaaaatttgacgagatggcatgaacaccacttttaatatgtggtaagaaggaaacaaccttgggcccaaccactagaactaaaggtggctgaccattggaaatggtgtcgatgccctagttgacaatagtgggcgcccaaatatgcactgagatccagcgaagacattcttacgtgccatcttttgataaagttcaagtaaacagaccttagtgactctaatttaagcgatgaaccataaagctgaggatgtcgtatgtggacatcccagggctcaacctaggtccaacatcaagaaatgggcaccctgttgacatcctgttgtttcgcatcaattttggttcctattaactacttagccattgtcctaagatacatgagagtcatgtcccaaccaagatttagactttggagataagtctacaaaaaatggcgctcgggcactaagaagccctaatggacagccaagttaacatatagtcgatttgagcgcactatgaatacggtttaggtttctggggacatacttggattccatttcctcaaatccttcaaggggcaatgctaggacatgatatttcatcaacaacatccataaaaggttcatccacaaccagcaaagttatgagaagaaagtacatatgaatctggtcattctttgttttggtgaagatccttataaatttttgtaaaaggaacttaaaatcgattcaggcagttcaatgatcatatatatttacagagaaatgctaaagggcaccactggtgcctagcaccnnnntacgtgtcaatatcgctattggtgcaattaagtatcgggtctcatatagtttaatat

SEQ ID NO: 42302 - DNA, 1515 bp, Cannabis sativa
ttacttgattaagattttgaaatgaaatgaaaataaaaaattgatgcttgaaattttacttacagatgatgagttgagtccctgtccagcttctccaaaaaggaggaaagttgaggtaatgaatttcttctctgtttgtgaatacatggaagtaggattgattgggagaggagtggtttgaaatggacttctctctctctgtccttttttggttttttttttttttgacagtttgaagcatatggtattaggttgagaaggtggtgagaaatgggaaagtagttgatatacttgatagtgaagaaaaggaaaatgaggactggcttccgcctccacccaaaatttctcgcaatgctaggattcttgctgagaattccaccattaaagagttgaggtataaaaaataatttagctttcttcttattatccctaaaataatgtgttagctcgggctaaaccttccaagtatacagatctcttatcaaaacagattgacaactttcctttttattatatctgaattaaatagtttttgaactgttacttgttatgttgcttcatttaattttctcacagtttagacagtttgaatttaagtaccattctgttaggctttaggattagtatggtgtgctagcatataataaattgaagtaccattctgtttcggctactgttaaattgttttcctgagcttcaccacattttttttctgatcaaatgaccttgtgcatgcagattaaagaataaagagctagtatcatttgctcaatcaacccaagatgtattgaaagctatagaagagtctgctaagcaagagctcagtaaatcattgcagctttctttggatgctgctgctgaagataacccaaagccaccttcaaaaccatgtgctgaaagagctaaaatagttatttctatccaggacaaagatggactaaagcaatttcgtatatacatggtatattctcttagaaaattgtgaccctgatttgtttgtactcttatacatgataacttatttttctaattattggtcaaagtttgtgctttgggttttggcaattttatggttttcttaacatagaggttttagggaagaaatatatcattctaatgttagtaattacaagtagaagcattaagtttttatcggactttgagagaattcagggagctgatagaaatggcatccttgaggcctggaacttgtgtaggcttttcaatgaacgcaaactatgattaaagctgatacattcaggattcagctggcaaaacttatcgccttcaaacttgtgttggctactgcaattttcttcagtataaatagaactttatatggtactcacgtagtggctttaagcttggatctacatttggggttcttcacttctcagtcatcatcaaaccattctctatgcgtgcaagaacttgatccatgattttgcattttagaatgctttgtttaatttatctctggttaagctgagattgttttattttatttccttacag

SEQ ID NO: 42303 - DNA, 1636 bp, Cannabis sativa
atataatttttttacaaaaaatagtgccttatgtaattattcctttattcaattagtgtacttgaatatttcggttgggatcctttaatttgagaaattttcaaaaacaccattcttttatgttttacttataattttacggtttaaaatttttaattacaaaaatattcttataaaattgtaaaattaaaaaaatatactttatttagcaaaaagttttttttttaaaaaaaaaactaaaaaataacgtgaaatcaacgccacgataactataaattaattataaaataacaaaaagaatatcatgagtcatgacaactataatactactataaataaattataaaataattataaaatcaattcattattttcattgaaaatatatttttgtatataaaaaattcaaaaagtaaaaataaatttttttctacaatgtatttttgtaaatttttacaaattttttatctattatgtaaaattttctaattttcttcttaagtaattttttccatcgacatttggtcggttaattaaaaaatatatattgctctaaatttatttcatgtatttataaattgtaattttttcttctttttggtattattttttgatatatactttcgtatgtgatggtctttgaagattattattttttttttttaaagaaaattcaaattttattaactttcaaactcagctaccaaagtaagaagcaaatgttaggacttaattaggattttaaagtatttttaattagttttaattgtgttttgtgtatttttacatttttgtatattaatattttcaggtttagcattggagaaaaataaatcgaattcaagaaaaaatatacaaaaaagattaattagataaagttctgttgatagagcataggaagataattcaagaaagaaatccaaaaaattcagtgtgattgaagcttctaatgttgaagaattggaaagtgaggagtagtgcctcaacattgaagttcagtgctaggacactaaaacgcaaaaatttgacagcaaggtcatgtaaatcttggttcttctttgccaaaaattgagcttcaagtgttgcaacactaccctgtatggttgtgacgcgctatgcgaaaatcatcaggagctttgcgtgcttggaagacacgggtcgcgacactattttaaactgcgaaaaaattagggtttttttttaatctttttttgctacataaaagcccttttttaacactttaaggagacgattaagggaataagaggcaaaaggcggctctggagtcaacactactttttttttttcttttcaaagagttctttcttttcctctatttttcttttgttcttaatcaattgttataacaatgactatgagtaggtagacttttaattagggttatttatggagattgcttgacactttattttagtttaatattattctctaacaaactcgcaagcgtcttcattagctgaccctttaataaaacaaaaaaaagatattactcaactcgataagcattgttttatactcttgtataacaattccaaagaaagacaccatactcacaacacttcctaatacttggacaaccgaaaggcaatcagtttctatctgcaaaaggtgcctt

SEQ ID NO: 42304 - DNA, 690 bp, Cannabis sativa
aaataggaagatgtattagaatggctctttcacaaggtttagtataattaatatacaaaaaatttagcaataacaaattttgtattaagcctcacccatttaggactagctagtgtgaagaaatataatttaatacttaatatctaattataataaatatgtaatatatattttaaagaaccaataattataaagaatagggatatcaatttcaattataaaatctcattaatattggagaggaaaaaatacattacgcatatattagttgtgatcataattatctagcacatgcaactttggacatatattttacattaaattaagattaatagtattagtagattccatcattgtgttttgaataacaataatcttcttaagaagagaagtgattgtagtaaaggatggtcttttagaaggatctccattccatgattggcaaatcaagtcaataacttctctaataataatattattattcttgtcttcaactaatcttggccttagatttccttctactacttccatggcaatctaacacaatatattcaatatcaataattagttatatgatcatattttgatattatttttttataataataattcaaacatacaataatatttcattaatcttaactacacaattaaattaaaagtttatgctctctacttaaaattatgaat

SEQ ID NO: 42305 - DNA, 1054 bp, Cannabis sativa
  modified_base (38)..(43): a, c, t, g, unknown or other
aggttgttaatccaacatacatgatagtaaatagatcnnnnnnaaataatttccaacagattgtacctgagcctactcctcaaacagaccctacctctacaactacacatactccatccaatgttgagcctgtatcttcacaaccaaatattccacctgaaaaacacacctgctcctccctctcatctaccccaaaccattgtcttagttcacacaggtcccaccattattgagagttcacatcctatgatcacaagatccaaaaatggcataatcaagccgaaagcttatctagccacaaagcatcctctgcccgagtctttgctttcctttgaaccaaagtctttgcaatcggctctcaaagatcctcagtggttcaattcaatgcaaacagaagttcttgcattaaaaaaggctagcacatggacattggtacccaaacaacctggcatgcacattattgacaataaatgggttcataagatcaaactgaatgctgatggatccctagacaggttcaaatcgagattggtggcaagaggttatctacagactcctgaaattgattatgagaagaccttttctcctatggttaaacctgttatagtgcgtactgtcttgtctttggctgttaattcaaattggaaagtaactcagcttgatgttagcaatgcttttctcaatggcttgctaactgaaactatgttcatgcaccagccactaggatttatagatccatccaaaccttaccatgtttgtctccttcacaaggttctttatggcctcaaacaggctcctagagcctggaatgacaagctcagaactagccttattcaatggggtttcactagttcaaaatctgatacttccttgtttgttcatggttcgggtaacagtcttattatactccttgtttacgttgatgacattcttgtcacaggtctaaaccagcacctcattacacgattgattactgatctaaacaatgaattctccctcaaggatctaggtgatgtacactactttcttggagtcaaaatattcagagatagca

SEQ ID NO: 42306 - DNA, 1272 bp, Cannabis sativa
gtgttgaagatcgcctaaataaatctggagccatgtgtcaagcgaatcattgaagctccctaccaaaaaacttcaaaaagccatagatggagttgtacgatggaaggacaaaaatatcagaacaaaacttacttctcttttaaattttcaaactttctttgaagctccaatgaactacaaggctaattctagattttgacttgcatttctactcaaatttatttaggcgatcttcaacactgagtacgtctttgaactttatgcaattcctttgaattcttgcacttttactttagaactgcttttgtgaatatttttgggttttgaatcaggttgttcttgatttttgaaaattaaaatttatattttcatgtagaatatatgtgcaaatactataatcgtctgattctcataaattcccatgttttttctccaaaaaatcttgaaatatagtctgggcagttttgttttgatgaattctgggttcatattgttcttgaaaaacttcaaatggggattcttatcattggaatgaagtcttcttcttttgatcatcattttattctgacgagagtgttgaaactttttctttctcaaatttcaagccactgctcggtctttaccccttacccttttttgtagatgaagccaggaaatttttggggtggtaggtaccgagtaaatgaagacttattactgtttctccacgaggactagccaaggctccgtgcaacctcgtcttcatctagcgaaagtttaacttctagctttgacgagtagaaagtgacaagagatgagtcagaaccttcacaacccaccatgcaacaccattattaccccgaccgaattggcggtgacaactacagacgattcattttggaattgaatcgaggattaaggcaatatacttcctagacatacaaggttcgagcaggggttctacacactttaccagttgatgaaatgaaaccttcgaagagaactactgtgcaagcagaaattgcagttaattaacgttgcacaatttccttcatccaaacatccacctaaggctaggaaagtggcgcagatcaagaagacttacaggaagatttcatttgacgacgctcacttagcttggcttatggcattggttcatgctccataccagggttcttttgaagaagatgaagtgcacactggtgatgccgaggtgccaagggaggaagaagtttttgctgcccctcacccagggccggccctgaaaatttatgggcccaagacgaattaaat

SEQ ID NO: 42307 - DNA, 3128 bp, Cannabis sativa
gctcgaatcccagcagccacatttcttttattattatatcttactcttttcttttttgataaattatattttaacttcttagaaagaaaagaaaagaatttaatcaatgaagagatcctggccgttcatcttaataattgcatcgcagtggatcagaaccctctctttcccgccaaaacaccactctcttatactcatttgccgccaagtcccattctcatctcttccatttccattctcctttctttcttctcaggctccatacttttctctctttcactctttctcttctccgtgtagccatgatgaaggacctcgatttcgatgcagataaaagtaagcaatcctttcattactttctccgttttcaggtttctctttcgaacaactattctgattacgttttgtgtgtgtgttttcgcctctcagcactcgcgaaagagttcctttcaaattttgcagatgacaatggcgaggccaaatacatgaacatccttgtgagtttctatgtttttatcaaactccgaatatttgaaatgaagctacttagcactttcggtagcagactttgagctttgtttgtttgtttgttttaatagcaagaggtcgcgaatcgcaaagttcgagctgttgagattgatctggaggacttgtttaatgtaagtttagcatgtgctgtggttttggtttgaaaaccctagttttctgttatgaatatattttgatttttcttcttctttagtataaggacttggatgaggagttcctcagaagggttaccgaaaatactaggcggtacgttggaatttttgcggaagcaattgatgagcttatgcccgagccgacggagggttttccagatgatgatcacgacatattgatgacacaaaggtctgatgatggaccggagaatgttgacggttcagatccccatcagaagatgcctcccgaaatcaagcgctattagtgagttcagagcaagactttgttttgcgttttggtgcttacttccttgactaattggtttttaattcttttttttacagtgaagtttacataaaagcatcttccaaagtgaagcccttcaccattagggaggtcaaggcatcgtacattggtcagctagtgaagatatctggcattgtgatccgttgttcagatgttaagccgttggtgcaggttgctgtatatacatgtgaagaatgcggttttgaaatttaccaggtaaacttgcttaatccttttatgcaacactgaataccatctttgtctagtttcataatgtactagaataatggcccgttggctctatccttccatttgcataattttgtggtatttttggcatttggttgaagttgaaacttcgagtaacttttgagattttaattttgtttttattcttgtctttcaagtttcaaccacttcagtaaagttacttgagcgaaacatgaaggattcttctttttgtttaacttttttctagcacttctctcattttctttttttttttttcctttttgtgggtctaacaggaggtcactgcccgaatttttatgcccatatttcaatgcccgtccaagcgttgtgaaattaatcgaacaaaagggaatcttatccttcaactcagagcatctaagtttttgaaatttcaagaggtgtgtaatgaccaaactacaaattttgccactgacaaatctacgccatgatttggttaaaattttgttattaatttttcaaagctccttttctttttccacgagttaccattttgagatgattaaatttcaggccaaaattcaagaactagctgaacacgttccaaaaggtcatattcctagaactatgactgtccaccttagaggagaacttacaagaaaggtttgttattctttctttaacttattattttttggtatctttgatagactgaacattatggcactaataattgtgctgatattattttaatttttgtgtttttggaagaactaaaattgcttagctgcagatagtgttggttgtgcttaacttgtatctgctgctactttattgatcaccttaatattcacatatatatttccgttatcaggtgactccaggtgatgttgttgaattatctggaatatttctccccattccttacactggttttagagcaatgcgagctggtttagttgcagatacctacctggaagccatgtcgattacacatttcaagaaaaaatatgaagagtaagcactttgaagtgtcttcccttacactcatttattctaactttctgtttgagactaaagtgctttatccttcagaattttatgaagttagcaattaccttaaaaggtcacctatatatgttgctttcctctctttcttactctagaaacctgtgcttcttctgagaaagattttggtaaaatcaatcaacttctggaatgattctgtgtacttgttaggtgtaaagatctgctgtttactaaggtatgttcaattacaggtatgaccttagaggtgatgaagaagagcaaattgcacgtttagctgaggacggtgatatatataacaagctggcccgatccttggcacctgaaatttttggacatgaagatattaagaaggctttgcttcttctccttgtgggtgctcctcacaggaagctgaaagatgggatgaaggtaaacacattggattatcatggtattgaatattacttggttctatgctgagttctgcctctcatcttatctgcatgaatctagtaacatcaacttaattggttgttattgcttctgtttgatgggtgacttttaaacatgttaataggtacttctcttatgtgggatctataaaacacatattttgttgaggttaaaattgtatatatgtgtcaaaaataaaaagctcctttttttcccttgcagattagaggagacttacatatatgtttgatgggtgatcccggagttgcaaagagtcagcttcttaagcatataattaatgtagctccgaggggagtgtatacaactggaaaaggaagcagtggagttggtttaacggctgctgttatgaaagattcagttacgaatgaaatggttcttgaaggaggagcattggtgagtcatgcaca

SEQ ID NO: 42308 - DNA, 811 bp, Cannabis sativa
tgcagcagcagtttgctgttgtgtagcagcaacaggttgctgttcagcagcaacaggtgtattagacaattcctcaacatgtacagatctatcattcatggaaacaccaccatgagcaatgctcagtctagaattttgttcttgcaaaggtaccaaactagcagggacagtagacacacttgggacagctggtggtgagggaatgttctgcattattaactcagtcacaggtgcagaagcattgtctgtcgaattggaaccctgcaaaggcacaaagcagcttgccatatttggcacaatatgattagtggatacaggtcagtcattggtatcagtctgtgagtttaaagtgactgtagggatcacagctgaagtgtaaaattcagagtaagaataggaattagatggttgttttggtagtgtggagaaggggaaggatgtttcatcaaagatgacatccctagatatgtagacacgaccagtggcgtcaagacacttatagcctttgtgattaaggctatatcctaagaatgtacatgaggaagacctgaattgaaatttgtgtttgttatatggtcttatgttgggaaaacatttgcaaccaaatgttttaagaatagtgtaatcaggtataatggagaacaacttttctattggtgaaacattctgtcggacaggggtagggagcctatttgaaagatacacagaggttctaaaggcttcatcccaatattttaatggcatagaagcttgagcaagtaaggttaggccattttgaacaacatgcctatgttttcgttcaactaagcca

SEQ ID NO: 42309 - DNA, 1270 bp, Cannabis sativa
ttttttttttttttggcaagaatggtgtacacaacttaaaaaaaatattaaaacatctttaaaaataataattagaataacttgatagatactgtttttattaaaatttaataactgaattattattatatggatttcgaggaagaaaaaaaccaaaaaaccaatcatgctaaaagacgttctttcaaacaaaaagcacgtcaagacttcaaattttaaagagtaattatttgaaggatcaataggaaaaacaatatactgattataatataatcttaattaatttggtgtttcaggatatataaatatattcaaaagattgtaataactgttgcaagacataaatatatttgatttaaaagaaaatcattgagagaagaatagaattatatatgagtgatcacgcccatacttctctaagagaaatctgaaattaataatgtgatacaatttcatatttcattcatctacatataatattctttatttctatatagatttggtttccaaacatattaattaattgtctacaaaccagacaaatttaattatatatatatatacctactgagctcatatctcaaagaatattgattattcaaagcaataaaacttgattgacaataaaaataagaacacatttgaacaaatcaaaattactatatgttgacttacaggtttagaattaggtgttgtccctcaagaaatatgattattctcccttcaaagttctggccttatttcttcctcgtattttttgcttatgttcttttctatatatattttctttctatatttcacaatttggagtctataccgttatgattgccaaaaacataagaaaacaattctattctagaatctgccacttaatacttttacctaaattatttgcttatttttttgcagcgtttagaatggggtgtgctatttttaaggatatttttcttttatttttaattttaattttaattttattgaaggatattaatgaaataacataatagtcaagactttgaccaaattaaataaaggaatgaataaagctataatgtaataatgagagattttctgtttatgatcctatggttgttatcctcatcgtttcttgatttgggaagtgtttttttttggacaactgattttgtttttttgaatagtacttaatttaacaaatgtaaaatactcaagtgtctttcctttaaaaagttgatcagtgcaacaggctgttctaattaacaactttgttattaattcatttttctgcgca

SEQ ID NO: 42310 - DNA, 2127 bp, Cannabis sativa
tattattattattattataaagatatattgatctcatcataattattaaagcaaaaatttctttttgggttcttacaagtcagtattattggcttgttgggatgtctttgcttagctatatatttaattaatgtgtgatgatcgactcttaatatatatactaattaattcttaatatatgtcgtataactcttgaaagtaccctaattaattgttttctaaatatatacataaaaaaaaactgataagtcataatacgcaaactactacgtactattaatgcatataccaccaataattaattaatgtattattatttgttaatttgatttgtgtaatgtttctgcgacttctccataactgcctagctatacataattggctaataattaattaaacaccgtagacacatatatgaacacatgaatatattatattatataatatgtattaatcaatcattgaaggctatgcatatatatatatatatatatatatatagcttgcaaaaccccatgtgattgtaagcttgcattttgcatggtataactaaaaggtatagtatttgcatatataactacaaataattaatcaacttgcggaataatcattagtttaggtactgacacatacaacatcaaattaattaacaaaatatttacgtttctattctatgtatacatactagacttattaatattaatttatttgcatggcaattaatggcatatatataaatatcaaatgaatgtttaagctagaaacgcttttcattggagtagaactactgtattcatacatgtacatacatacatatatacactttatacaattgtaacctttctttgtggacaagtatatatgacattcaatattaccattaaaaaataattaccgcaaattatggataaaaaagaagctctaggcaattaagtagcatataattaaattaaaagtattggaataggagtgtctataaatacagatcaaaccgtttcaatttcctcattactaactactcaattctatcaaagcctgttaatatatacaacaaaaatagaaaagatatatatatattccaaatactccattattattattatttatatataatatataatcgattcatcatagtagtaagtagatgaaaatgggaaggtggtcatcaaaattggtggttaatattggtgttgtggtattgtgttgggtggtagggacatcagcaaaagcagtggtgtcgacatacaatgtggtgagtttgggaggaaaaggggatgggaaaacagagtcgagcaaaggtttccttgcagcatgggccaaggcctgcagttccaccaatcccgctgtggtatacgttcccccaggcagattcttgctcaaaaatgtggtcttcactggccaatgcaaaaacagagctatcacgttccgcattgcaggaacactgctcgccccatcagattacacaatccttgccaactcccctaactggatttcctttcagtatgtcaatggggtcaccatttctggtggaatccttgacggtcaaggcacttctctgtggaaatgcaaaaactcaccctctactaattgccccaccggagccaccgtacgtatttctcttcacttaatttaattaataccatatatagatagataacataacataacatattaataatgatgcatgtttgattgattgcagacactgggaatttcaaactcaaagaatgtaaaagtgttgggagtaacatctttgaacagccaaatgttccacatcgtgatcaacggttgcaacaacgtcaaactacaaggcgttaaagtgatggcaccagggaacagccccaacacggacggcatccacgttcagctctccacaggcgtaaccatcctcaacaccaagataggaaccggagacgactgcgtctccataggacccggcacagccaacctctggatggagaacttggcctgcggacctggccacggcatcagcataggcagcctgggcaaggacgccaaggaggcaggggtccagaacgtgacgctcagaacggccacgttcaggggcacccaaaatggggtgaggataaaatcttgggggaggcagagcagtgggttcgccaggac

SEQ ID NO: 42311 - DNA, 5400 bp, Cannabis sativa
  modified_base (4883)..(4888): a, c, t, g, unknown or other
  modified_base (5306)..(5307): a, c, t, g, unknown or other
ttactccaaccatgttgatgagtgaaaagattatgcccagtgatatgatcaaacagagctctaataccactgatggtcgtttgagaataaatttgtattagttttgtttagaataagtggatatgtggttaattgtttgttgttgtaatgtagtgaagcagtgatgttggtgagtagttgttgaattagtatatgaattagtttggcttagaagagagaattgtatgtaaagtagtaagctcttattgatagtttgaaactttagcttttgggtgttggttacaatttggaacccttaatggttatttatagttgcgagcattcaagtatttgggcctagaattattttctctgttcatgtattttagcgatacatttctacatatttcttaagcatgcataactagaaagactaaagttttctagaaatgcttatgttctattgcattttttaaatgtctagaaaattctaaaatattctacaattataaaaaaatttagagtaagtttttctataaatgtgtaaaaaattctaaacttaattgagtattgtagaaatgtgtagcaatttctaatacaaaaattttagaaaaataaaaaggtgtaaatggaggattaatttttttctctattttttatttattttttttgaaaacagattacgaagagcttataataatcaaaataactagtcactttcatatatatagcaagagcttgagaagctagggtcactctcctttggcaatgtcatataaagtaaactaccaaagctgaaaaagtggttgcgtagctcccttttagcaagaatatactctatttttgacaagaatgaaggatatgtatatttaggtcgaatacttgccaaaaaagagaagccatgtagcttgtttgcttatggatgacgtacctctcaattttgagcttacatctctttgggttttggtttcagcctccacttactaagccttaaattaaaaaaaaaaaaaaaaaaattggcctagatgagtacatggaataaaccttcgaagcaatggcatatgcttcagaattacgccatatagacttctctttctactttttgtgcggattgggttctgtatccaacatttggagaggtccttctcaagtgtaaggagatttgttcatgtttttgatggtgatgagaagtcattattatatgtttttgttttcttggccattcagtgtttctaaagtcctttgactctttgttgtttctctggtttgagacaatcgacttcattcttcaatacataccacaaaatctcgattttacttttttcctttccatttcattagttgttttttttacttatatattcttgggtaatgtttctttaatatgtaatatacatttgcaggctaatcatgatcattatgtacttattttaatttatgacggttttgcccgttcaaaccatcatgtgcttgataaagtcaatcaactgttcttggtgatcattgcacgtttattaaactttaattagatttagaataatatgaatcggtttaaaatagaaagtaatcagacacaatattttattatgttgtttattaaatttaacaaaattatcattattagaatatataattattttttgtttatagattaaaaaaaaagcatatttgtgtgttctcatttttaattaataaaattaaaataaaaataaattaaaaaggaaaaggaaaaggtattccctgtaaaaatgagggagaatcttttcttttgttttcttcttaatttatgtgagtcttactattttctcttattccaaaatttagtaaataattgtatatgattcaataccatacaatttattcatattcccattaagtaaacatgttagtctgtatggtttactctgattgaatacacatagaaataagttgcatttaggcatgtttactattatgtaatgggaattaatggtaaggtaattatttatttacatttgtttacttacgttattaaaattaagaaaggtagaatttgattaaataaaggagaaaagaaacggagaacttcctctaccaattttataagaaatgtcattaagggtaatgaattttaattatttttattttatttttaatatcaaatatataatgataattttgtactttaaaatatatctcacaaaataagtacattatataggttaactcaaaaggacaatttagtcaatttaagcatttcttacgtttcctaataaagtaaacacgataaatcataattattcaatttttaaaaaaatttaataaacaacatattacaaatattaattccgattatttttcatttattcagttacatttctccattaatttattctgattttgaatattgtatcgtaacagttacagaaataaatgcctaggctagttgttaaatttgaccaccgttttctatatatctaccatggtttactgtgcttgaataaacgtacgttacaaagttttgtttaatgtttttatccattagtctttagaaagtttgttttgccaagcaattgaagattcacataaaaaggttacaatatttgtaagcaaaaataatatttttccgatccaaatttttacttgatctgatttggttcaaagttattgaaacataaattatgaacacttacggaaagtttgattgtttggaaggtgtcctaaaataatattatacaccattatgcaaaaataattgaattttaattcatgtctatacggaaaatactatcatacttacacagtgattaaataatcacatcctaaaatttttgcatatataatgattgagaaaggaacaatgtcatcttgagactggtaagagcagaatagaagtgtctcacaaacatcataaaatatgctgtcatatagttttaacagaattagtaggtactgttatataatgatactaaacttattttttgacttgtactggttacttttcttcagccgcacatcatatatgtttcaaatggacgtactcaaagtctcttttcaccattatttcttcaatataaaattgaaacacaataaaaataaaaggaagaaaaataaactatatctctcaacataccgagcacgaagaaaaatatatatttacatactcatatatattaaatactaatggaatattgctctaacctacgtagggttaattaataatcctacgcaaaaaataaaataagatactataaatgtgcgtgcatgcatatacataatatatattacctttcaataatatatttttcataccatgacttgcagaaacttgtaaagacgtttcatattagatgggtataatatgtaagccaaaacagctacagggcaactcctcttggcaagacatatattatcattgattattaacgactctaatatatatgtttgggaaacttcccatttgatagaatcaaaataatgcttgccacagaggggatgccctatggctggatttgcttagtgaactaacatgtgcttggttttttccatgacttatcaccaactctttttataggcctccatacatattgtacgtacaagctcgaagaaaaaaaaagaatggatgagagagtagggtagcatatgctgaacactcttacgaatatccatattcaattaattgatattgctgattttgtttttctgtagatttattcaacatgttcatatacctgggcttgaaaatgatttctcacaaatacgattccccacaatttaaactttttcatagataaaatgaagcgaaagggacacgagtagatgccgaataataaacctaaaggacatgggtaaactatgacgaggcatatcccaagtttatatcttaccctcttatttttatactttattgttacttttagcttttcgttgtctgataagggcaatataacacaacttttcattacagcaatataacgtcatagtgttttcattttctttttctgtttcactttatagtggttttggtgcttcttgtagtctctaaaaatctgatttttcttggtcataacataaagcatatagtggccccaaatagcgcgaagcccaacagcttataatgttgtgttataatacgtgtcgggcgtttttaaggtccttcatttacctttgtatgtagtgggaactaggaggaaacttaattgagattcaaaagaatgacattatcaatagcaatatataccatgtgactgtgagttttcttgagtattgaccatgggacactaattattattaattgagtacacataccattgcgttcgatgagttttgatcatattctggtggtgtaacttgtggaaaagtatgttcagcgtgaaactcaagttgggagttgtattacaaccaaaaaatctaattgaggggtcatcgaaactgaaacggttggtctaaaaatgagagacgtatatatatatgaagttgttgagaacataattgcatgacataaaagtagcatgtctaccagttcatatgtattttagagaaatgctaagggagaggttaaaataggaagcaccaaaagtgacatatatgttggtgttcaacatgggtctcacactatttgattaactaaatattatgcgaaacttctagctatttattgttgaaatattaaacttgatttaacatagtacttaatttttaaaattttcttgttgctactaagttttctagactattcttatatttactaaagtgtctagagtattcttgtttgtataagtactcttgaactttcgagaattatttttcacttctgtgattagtagatagaattatgtagaacaatgtaaaaagctagccatttaataatgtttctagattaatccatagagtcctataaatagagatgtaatcccatcattttnnnnnnagtcacaaatcacacaagttgagatataaaatatagcttcttccgttcaagtatgctctccaaaattcttcttattatccaacaaactgataccagagctaagtttgtgaagaaaaatggcaagtggaggaatgatcccattctaaattctaatgctcaccaagagcaactatgacaattggaatatttagatgaaggcgctactaggagctcaagatgtatggaatattgttgagaaaggtcataaggagcaagacgatgttgctctttcctaagttcaacgggatgcgttaagggattgaagaaagagggacagaaaacctctctacctcatctatcaaaaggtggatgaagatgccttcgagaagatctcaaatgcaacatcgaccaaataagcgtgggagaagcttcaagcttnnaacaaaggagcggagcaagtgaaaaagatccgtcttcaagctcttagaggtgattttgaaactttatttaaggaagatactgaatcaatttct

SEQ ID NO: 42312 - DNA, 693 bp, Cannabis sativa
gatagttgagagggttttgccgcaaattactctttaatatacattgtttgtacctttttacagtgattttacatacagtcaaaaaaatcttctgactcaagtcagagttcaggacaaacaaaacagagatattttacaaaaggaattattagaaaaaaaataaaatgttctttcacatcatatatattaatgggctttattttctttgttggtattgggcttcagataccaaatgggctagggacatttttcggagtggcccaactgattctatacgcaacatactacaaatcaacacagagaattttggcagagagaaagaccaaacaggttaatttgtcagaagtggttgtggctgatgaagaggagttaaagaaaccatgtggaagagggcaaaatggtcattctactctgaataatcattgatgacgtggcagaagaagaaccattggatggaatatgagagtagttttactaataattgttattataaaatatataatacttacaaaggcacccacttatctaagatatatagaagtggtgtagtaactctactcttcataaataactttgatgttttttcttttttttttttttgtatgggttgtgatttggtataagaacaatatatgccttgatttgaatttgaggctttttttcagttagataatgacaaagtggtgtgtgttt

SEQ ID NO: 42313 - DNA, 684 bp, Cannabis sativa
ttacccggtatttccccttacggagcacgggactactgactgtcacagcttggttgagtataggggtcgaaaaaattattgctcttacgaagaactctcaaatatctcaaaatcagcaaaattttgactgcaaaggggctgggttccatattcgaattgattttcctgttgcgaaccaaactggtgttgctactacagagaaggctggtgttgctacggagaaggttggtattgatgttgtggaggagtagcataattctaagaagacgaaccaccaggagattgcgattgaccgtatatttgaataaagattttaaaccgtgtataaattggcatgttattcagaggtcagactacttcctaatgtctcacgtatagttgtaaatatatctgccacagtattatacatttcattaattagcgggcggagaagacaccattacataacttatatatataatgtaaatgtaaatgtaaatgtaacttaacggaagcaaatgggcgaatggatgggacggacaaagaccggtggagactggaggaggactgagagagaaagaggttggggaagaaggaaagagaggttaaagaagtagagagaaggagaaaatagggaaaatggttcgggtgcattatttatagacccgtcgctaataagtctttaatatatattttttttatttt

SEQ ID NO: 42314 - DNA, 1435 bp, Cannabis sativa
gccaccaccaggatagccaccgccgccaccgggatatccacggacaccaccactgccaccgccaggatagccggcaccagtaccaccaggaataaatcctctatatttaccatccaccactcccttttcattagtactaccatctacaactgcaacaatatatataatcatgcatgttataatacaaattaaatgaccaatatatatatatatatatatttggttatatatgtttaattaaacgattgattaatggatactagaaaccaaaaaatacacataacaaatcggacctttattattatttttctgagtggaagtttcagcaaggtctttattagctgcaactacatctgaagagatagtgagaaaaacaagcgcaagcaaaagagtagcaatccaaaagaaatgtttcgtcgaacccattattttgtttcgataggcttcgccaaaagaaatatatatgtatgtatatatatattatatagtgtatgttaattggagtgaatgtggagaaaaaagtggatacacgcgcacatatatataccttattttaaaataatatataaatatgtagaaaaccttgtttcgaattgcgcgaattaaccacaatttctagagtatcctaatagcaatgttctaattacatataattattctaagctctatccctaaatcccaactaccctaaagcttaattccaaaccctaaaccctatatatagcctgctgttatatatatacctaattaattaaacacatctactgtatataataaaatttgtaatgactaaatatattttttgagatgaaaaatgttaaaaggtaccagattgaatattttgtctggattttacccatatctgaccaatccgttcagacttgacctttttgtgtgggaaaatccgttctctatgggtgggttattaggtccgacccggtcaacttttcaggtgggttcgggttgaactcataccccgcttgagaagccggccattttttttttttatatagttttaaagtaaatatataaaataaattaaacaatttattttttatataagattttaataaaaattatatgtatgtgtaacaataaaaattgaaatataaatataattatttatattatttttctattatatatattttatctattagattgaaaatgaaaaatttaaagttatgaatgtaatatgtatgtgtatataatactaatgtataattattattttttaaaggttatgctttatatcatttgaacatttaaatttatatcatatggtagacaacataactagtatagaatgtgtaaagttatttttttggcaagttaaatgccaaaatattttttatatatggtgtgatttgttgacttttataaaaacgattttatcaccttattattgtttttattgctcttttttttttttttt

SEQ ID NO: 42315 - DNA, 1448 bp, Cannabis sativa
ttatattaatttaaaaggtataatgagaacaccgtctataaaaatgaatatatcttataaaaatgaaaataaaaattaaaacaaataaagtaaaatgcatatcgaatataattttctcatctaacatagtgccataatgggcccaatttgccgatcgatccacccgagagccaacaaaaaaatgacaagtgtatgctagtgtctcccacgtcaaattcacaatttcacactttctcctattattgtcaacattaccatacacgtaaaaaagataggttagaagtaaagttgttatggatatgacaaatctcgtttactttatataaacatttcgagtagtcaaaagtttaatcccaacttagtatattaggtaatataagagcatcttcaatagtgtcactttttaaatgtgttaaaaatctccacattatcgaaaaatatattctttattttatctcttttttatattatttttagtactcttacttttagaagtactccaatgatgaacactactcaaatttgctactgttactatatcccactaattattatttattttaactttatttaaaaaaaaagagaaaaatgtgtatgacatcaatgccgagttttggcatcaatattagtttttagtttggtatccaaacatcttcaatagttagctcatttcaaacatcattctacatcaccgagcattctctccaagcattattagtgaagatgctttaagaaaccgctctcatattctacttgaacacaaagaccaaaataatatttttattcccacatatcaaaagtttaaaatgtatattttataagacatcagcggtgcttaacacaatattttgcttagtgcatttgagtaatagttcctaactattttacttaaaattaatatgtgaaacaagataaatatgaacggtaaaatagcattaatcactattgatactctttagtaattctatttttggcagaaaagtttgaggaaagaaagaaaacaaaaatcatagttatgagattttgaaaaagattagtaataattctagctatgcaaagcaatacattttaggacctcatgttcttgttcaacgcacttaacaactgattaagatatcgaaaacagaattcaaaaattcgattgcacaaattcagctgaatttttaaattttattttcgataccaaaaattattctaaatttttcaaaagcaggtagaagatatactgtaactacaataatgtacacaatcataagaaaattttaattataatttctctaagcgctaaaaataaaaatgcccctaccggtagggggaataaaaatgatgttgctattttctacatagatttgagccaaacacaattttctacaaagataattcataaacaagataaatcgatgtaaggactcgagttaaatttacctattttcacgtccaacaaaaca

SEQ ID NO: 42316 - DNA, 988 bp, Cannabis sativa
  modified_base (234)..(255): a, c, t, g, unknown or other
ataaacaatgaattatatatataaacaactaaaatagtcaacaataatatttaatcgtaaataatattgaattagtggaatgatcgaatatcatgcatgtaactacttttccactcatgtcacataccatatataatctcgtttttttcaattaatataaatatatttagacacaaatgagatttgaatttgatctcatgtcgttttctcatgtatatataataataataatannnnnnnnnnnnnnnnnnnnnntaataataataataataacaagaaattaaaaaaaaaaattattcctcatgaagaatcaaatgttttcttttttttttttgccttactttttacaacaaattgtagtaataatgttgctttcggaataaaacaatatgatccatcgtcccaccctatttgccaatacgtataatacataacaaaaaaattattctacaaaagtacttatgatttttgattaggtatacgatttcgactattcatcaatagtatatatatatatatataatcaagtgatacgtatcatttttacaaataatatgcgctattacaatatataatagatacgcgtattatcttcaatattgacgtttgacctttttgaaaaacgacataaaaaactaactaataataacaaagctatatatatatatatatagcacaaaaccctaatttgtagttaaacgctaaaagctattacatattatttttatctcatatatgttctcttttttattgtgctattgtttttcttttatcatttctcactattaagcatggaaattttctcaatgggaccacttgtgatagatagggctggcctagtttggaggtcttaaacgaaaaattaaaattgagtattttattaaaaaaattaataattaatcaatatattataaagtaagtttccatatatcataaattaagtttttttttttttcttaaagaaataatacttcataaattttaaaat

SEQ ID NO: 42317 - DNA, 832 bp, Cannabis sativa
  modified_base (364)..(366): a, c, t, g, unknown or other
tgtgatgatatgcatagtctagtggtttcacacttcttctgagaagattccaaattcgaatcctcctctcccaatatcaaaagaaactaatttgtagttaggtattgatgtggcaaatcgatacaaaatacatttgtgataaagatacttaaattgtgctaaaaattgcatttaaatacgttttttagtatctaaaggtactcttaggtactttatacttatgatatgatgatacaacccctttcataccatttgagctcgtctcgattaataaccatatcaagactgatcctgagattaaatgtgccttagaaaaaaagaaatagtccttattataataataaatgatatttttaaaaattannnaaaaaatatgtatattttttagaagatatatttttttttggtttattttttagaagataggtgagctctaagtacgggtctagcccgccttagtctaagacaagccctgaaccatacttaggtacttaagtataacttttagcacaatttaaatatttttgctacaacatttatttgttgttatattacatcagcgcctaacaaaaaattaaaggcaaataacaatgttattaaaatataatcttagatatttttgttatcaaaaataaacttaaatacttaaatacttaagtgcaaacacaatttaaacattttattgtaaataacttgaacataaatcttatatatctactttttatgtatttaatgttggaaaaattctcattacaagagagaatatgaggattacaatcaaaatactcaaaatacaaataaaagtatttcatcaagattacaagaaatctag

SEQ ID NO: 42318 - DNA, 3516 bp, Cannabis sativa
ttggtggaagttcttttggaatctgattttgccccccaaaaatcagaatttttgtttggaaggtgcttcataacatctttccaacagctgctgcactatttaaaaaaaaggtattaacttctgctgaatgctctctttgtgcctcaagttgggaatctattggacatgctctttttggatgtaagcatgctaaagccatatggtgatcttctaagtttcagcttgactattcaagggctcaaaacatgttcaattgtgattacttatacaatttatcaacacttttgagtcagcaagattttgagttgattatgcagtccggttccatgaagacttcactagggctagaagagtttctccacctgctgctgcaatcagcattgatccatctgcaaattcttcttctgccacggttcagcaggttgcaaaatggcagccaccccaactaaatggttttaaaatgaatgtagatgctgctactaatgaagaacaaaaaaagttgggtattggagctctaattagagatcacaatggtgttgttattgcagctttttcaaaggttgttcaaggaaatttcagatcggacgaaatggaagcaaaagctcttttcatgctctaaattgggcattgcaaaaacaacttcctattactcgtattgaaacagatgccttgcaagtctcctctgttttaaattatgcttctacgaacttatcttgtttttctgatcttatcatgcatgttcgttgtcttttgtcctttttccctcaggttttaattacccatgtcaaacgatctgctaatcaagcagcacatgatttagctaaattcgctttagggatgatgacattagttggataggagaaactccctataatatattctccgttgttgtaaatgattcttaatttataataagagtgaattttctcaaaaaaaaaaataaataaataaataaaacttgatggtgccaaaaaaataaaaataaataaataaagagcaaatgaattgctgaataaaaattaatcatattatattataattttcaacacattaatacaatattaatttcgaaacaagtaaaactctgtattatgtagcccaaagaaaccgtccttccacaataatatttatttatttatttataaacaaatgaagtttgatcccaagtagtctttccaatattgccgcattctccattaagtctctaccatctcagttttgctgggaaatactgtcacaaaaaagcctcattcaattaaattaaagaaacaaaaaaaaatgaaaattggtgataattctcaaacaacaaatgaaaaataataattaacaaaataaataaataccttttcaatgagtgataaataatatggtttcactttctctacatccactctaactttgcttttgctgtagagatcgtacttgctacaaacaaaaagtaatataattactacttaaataaattaattaatattatataatgaaaacaagtgattaatatattttctttacttgaaaatatgaagccacttcaagttttctttatcctccttattcatgaattgtttataggctccacacctatgtaaaggatagaatgagtggtatctgacaatgaataatccagcttgaggcaaagtagtcccattttctttggccacctgaaataaaatattgaaattaaataaacatttgtttattaaagaatatggattatccttagtagccacaaaaattgacaaagatcagataataaaaaaagaaaagaaaagaaaaatgtaccaaatacatgtagtcatcgtgtccccatgatatcattacattatctaatccacacccttcggaataaattccattctttgaattgaattcatgattataggtatctgggttctccttgaaatactgaaataacataaaaatgttaattatacttcataaataccaataatcaaattttatgtcagaagctgaaatggaagaaaaaaaaaaccttgtggtggacaatagattcatcaaaagcacaccccagaggatgagtgtcacctgtaacaaaacatatttttaagatatttcaagttaagaaaaagctttttataaagatataaaataagataaacataattctaataaaccaaatactcaccaacaacagcccattgaggaagttccccaaaaacagggagaagcagaacctttccaaggtctgaaaataatgcaaaaaaatataaaaaagtcaaattaaattaatatatattatctttccaaagctagctagagtttgattaattttataatattccttattttggtgatatccaaaagggtataaaaacctgactaaagataccactgtcacatattttggggagagaataagtcaaatgcagccgaatataaaataataataataaattcattacataaaaataatacattgtctattttggtatattttgtaccatgaataagggctgtcaagtggagccaatcttcatcagggtagtcttttctgatggcttcagcagtttgcaacaagtgttcaatttggggttcatccaaatcaggatcactatcatcaacaacctcattaagaagttcacaacattcccatatactcatttcaaccctgttcaactttccatactcctctctcattttcttcacctatacaattttccacatatattccaaaatttcaacatcatgatcaatatccaaataaaaaaaaaagttaattttgatcttaattggatacaagagagttttcttacgaagtcataagtttgattaatgtggttcaagcggtagaactcctccacagttttttgcctctcattttcagcatcatagtctctgtttatattattgatttcacattagtcattttgagaaattgattatatcaaaagtaacaaataataaaagtagataataaagacctgaaagagtgaccaaatgagttgatttcaggggcaacaaattcattgtttgagacaagttctgatacagcattttcaccattaggaacaacaaacccaccatccaacaccaactcatttatttcatcaactttcttgttctcaagatgtgaacctgagataaatttgaaattattactaccaacacatttgaaatatcaacaaaatcatcaaaagaaacacaagaatgtaaaaaaaaaatgtaccaatcacaggctggtcaatgaggatagtcatttttttcgcttctaaagtcgaaaaaaatcaaataaacaaggactctatacagaaatttatgaaaaataaaagggacgaaacaaagatgtttttgcaatggatattgaagaaggttgttaacgtcgtagctatttatattatatgaaaaagagtccttgcctgagattttggaagtttggagtcctcaactgaaaacaaaaaaatcttccaccaaccttctaaagtttttagattatcccaatactccgaaagaagcgttccaaaatgtgcgtgttttaatccggtacatcatcagttt

SEQ ID NO: 42319 - DNA, 1448 bp, Cannabis sativa
  modified_base (947)..(954): a, c, t, g, unknown or other
tttttacatttaattcatgtggaaaaatattgtacagcccgaactcgaaactttatatatagttagaaaaattatttaataccatagtctccattgacaagtctttgggtcttacccctgatgttaatttgaaaaaaatgttaattatttagtgcagatattttgttttttttaagaaaatgtttcttaattattcaatggagattgaagtatctaatggttgttagcaagcactaattaatgaaaaagtaaaatattctatatgttatctaccaaactggaatgttattgttgaaattaaaatatgtttttaacgtttgcgcaccagattaaattttgttcttgcaaaataatgatcgatagtatgtagtagttgaaatagtagcaataatattctatttcaaaaaaaaaaaaaaaacaaaaaagaaatagtaacaataatattattaatattggcatctaataaaacaaaaatcataattgatattgataacgcgctagaatcttgataaggtcggtcgtaaaacttgtaaaatatataacagtcgactactctatataacccatgttattttcattaattagttattatattctttttttcagaaaatagtttattatatctattttattaattagtatacactgattctatatctcaccttctgagagagatatattgatacactatctatttatttattttagcatttaaaaaaatttttagtttaattttttttccatattcatataccttataccaatttaagatatcctataaaattttaaaaaattcaaaataatttacaatatataaaataatgttcaaacaatctattttacacgcgtataaaataaaataatcacgcgtgcaatacactgcttgaacggattatcggcgtgttaaacttttctgaatttttttaaattttgcaggatgtcttaannnnnnnnatttacatgaccatgagaaaaaaagttgactaaaaaattatttcgaatattaaaacagatagaaatgtatcgatgtatcctttttaaaggggtgcattatagaatttctctacaatatattaggggcggcaaaatatgttattttattcgtgttcgtattatattttatgtgagtgagttgtgtcgagtcgttttttgagttgtatttaattttctcaaccctaacctgacccgtaaaaaataatatggtattcgtgttgacttactttgacccattttactattattgaagctagagtttaaagagaaatgataaatttaaattctattaaaaaacttttatatgtttatatataggtggcgtgtggtgacacattttaattagttttttatttttgaaattggaaaagtgaaaatatttttcaaaaatatgttttatagaaaagttttattttttcaattttttaattgagaatcaaaattttaaaataaaa

SEQ ID NO: 42320 - DNA, 3931 bp, Cannabis sativa
atccacataattattaatatttataacaaaatgaaattttagtaatgtatttttgagtgaggtagtaaaaagagtagtgtattgctcttctactttattcatgtctactagtaccagtcatataatgagagaaagaaaagtgtatttattagagtttttgtaaatgagtatcttataatttatattaaataataaaaattgcatagatataattggacggtgaggatggaatggatatgttcccgaaagtggatcctaatcatcgttcttatcttcagcttctttctggtgtcgctttataaaaagatctttgggggagagcgagcggggcccacattactcgtgtaatcactacttttgacctttgactgagaggcacgtgcgcggcatcttctcgctcaaaaatattggctcgatgatttcggtgacgcacgtgcacttcctctgtctccactctccgacatctacatctattaaacataatgatgtcttaaatgttaatttttaataaagaataattgattttcattttaaattgggtacttgattataataatggattactatacttgcacgttaatggtatgagttagatactttgttttatggtgtagaaaagctggcttttaacccattgttcataattaatcactaaatcaggttggatccttctagcgaaaaagagaaagaaaaaaaaaatcaggttggatcctactaattaataaaacaatacaaatgtgtagaatgtatataattagctagaaaactaaaacaaatcccacttgattgtaaattgaattaaaaaaattctatccaattaaaatgagtgtgctcaaataataaaacagaattgaaaaacaattaatttttggagctgaggagatgggacggtgggaacgattttctagttaaagggtttcttttttatttattattttttttaaatgaatagtgtttggttgaaaaataattctttttaaaactggttttattgactctttaggcttggagcatattcaattaactttcatgttctctttctttctattttgtattatttatttatattttttttaagaaagttttagcttttaatttaatggttgttagaaaagattagagaataaaagaatggccagtgcatgagcaattagtaagagtgtgaaagaagaaaagaattgtaggttattttctccaagttgtatgatataaaatgaaaagaaggtgggtaataagattaggaaataatagataaattttaagtactattttataataaaattatcttattacagatttttgaaagtagtgtgattcatttccttttccaattatgttcaacaatgggcagattcgactgttttgccaattagaaggggctttttttttgttgcctacttctaagtactagctatgtcctaccaaacagttaaactatcaagaaatatcattccctctccaaatctacttaaaatatatatttttggtgaaaaaaatttattaattattaatttgatttatttttatccaatgtagtttcaatgaaattcactgaactttactagctagttattccaaaaaaaaaaaataaaaaactttatcactagttatttactatctgctacacttgtgttgtataaaccttttttgtaatgagcaataggtatctataactgcactaaatttacaattataactattactgttcattgaaagttatgtgacaaacttgattggattattatttttttgcttaatactcttttgtattgaaatactctctttttttctcctagtatcaactcattattttactctgtatttctttttttttttttgagaaaagtttactctgtatttgaaacttcttctggtaatcacaaacattcttactcatcgttaagcgtttacactgaatttggaaatattgtaaagtatatatacttcaaattacaaaacaatgataatattattgtatatactgcattctaactttatgttgtatagtgggtacaaataccataactcatggtaaaaaatatagtacgacagaacagaagaggcattttatcgttgttccaatcctatactaggaatatatatttatttacatatgtttgctttatttaataagaaacagatgaactacatctaaagctatagttgatcacttcttgaaacagtgacaccaaataaccctggtgacaccaaacctgtccaacccggcccatgtttaccaaacatgaagcccagaagaaaaaagggcgcaagcaaggccttctggtaacttcaaagtcaaagttacagttgtaaggtaaagattattttaaaggttgtgttttgtaaaaattattggttggattatctattttattgaattataaattggacttattttttaaaatagtactttcagttgattttttatcaaaataaaaattaataataattcgatttaaaaaaaactgattatattttttacatttgttcatgataggaattatcttcaagttattatattaaaaaaaattgtgaaaaattaaacttaaagttttatttgtactattctaaaaaagaatatataatttattgtatcatttaataaaattaaaaatttaattagtaacttttataaatcactaaaatagtattaaccatagttttaacagttttacttttaccagatgctgatgtgactaaggactatgcatatattagttcaattattgtaaactccagtttctcaacattgaaatacaataaaagtaaagcataacaaaaatataatactatatagaacccaaaacccaagacaaacaaaattttgtttgtttgtttgttttcttaattgacttatatattttcatacatggaaaaagaaagagagcatgcatgggttagagatacaagtattctcattgggatcagtcagtcatgaatacattaccaggggcctcagcttcaaaatctgatataagtaacactgatactgatacatatattacatgtaggactagagaccagacctagctaaaaatcagacatgcatatacacccattggcttggactctgtcctgaaaaattgggctcaattaatgttatatttattcttagttcacaatttcatgcaactgccaaatcatactgcagggatcaaaattttatacaagacttcatcatataagaattgagaaaaaaagaaaaagtgcataatttcttttgtctaagttctcaaattattcacatgaaattaattagtgactttatacactaaattaagtcacttttatggtatgaatgtgggataataatattaatgttactttaggccaaccaccctattgacaatgatagatccaataaaatatataatatgatgtatatatatgtatgtatttcctacagaaatatgtagtcaaatcacactttataggagttgaaggaataataaatattgcaatatatatacatatatttatatactactactaattggttacgtgcgtgataaaataataagatataacgaagacctacaaggttagggggtatcctagttctttctatatatgacaaattatcgagacatatatcacagctttctttgaccaatcgatttgtatatatattatatcactttttttttaacaaaattattatttcaattttcaaatgttcattgttaatttgtgatcgccctcaataaagtcaaaaaataagtttggattagaatatataaggcgacacaactgctggtagtactgccagctcgtgaacaaagtgaaatcataatcatttcccttacaatctaattggatttgtgtgtaattagaggtaattacacaatttgatatgtttgtctgaccatgtaattacactgtaactgtgtaattgaaagtaattgaaggcttccaattacactctccaatt

SEQ ID NO: 42321 - DNA, 1363 bp, Cannabis sativa
ggtacctttttagcattttcaataataatgcatacatgtgtgactgtcacgtgacacctaatggcacatacatgcgcaggttagcaaacaagacatagtggacacatttgacgtgccgtttagaatgtgtgtgaaggaaggtagagtggcaagtgtcatgtgctcctacaatcaggtcaatggtgtccctacctgcgccgaccctaatcttcttaagaacactgtccgtgcccaatggggtcttgatgggtaaactcatcatcaaccctttctctttcgttctcttaatttctctatctaccaaccaatatatcaaccacattcatatatttatattctttctaataatataaaatatataggtatattgtctccgattgtgactctgttggagttttctatgatactcaacattacacctccacacccgaagaagcggctgctgatgctattaaagcaggtgattatcacaaagccattatgcataataaattattaaaagacaaattggaatgacctcacctaataatcataagagagactagaaaagaaaaaacctcactaattgtatggtgtagtaacaatggtaatgatgccattttctaatatgttaaagaaggacttcggatatcaccaattccgtacctgttgttgtggcctggtggtgggatggaacgctgactcttaatttgaattgattggattcttttacttgggaaaaagaaaatgacaaggttaattagaatctattgaaaatgtcaagtattgtacttttatgagaaaaagactatgtgctagtacgacaaataatgtaacgtatatctatgcatatccaaagcatgacaataattggggtgattttgttttctgataaataaatgtgggcgattttgtattggtggcttaggtttggatttggattgtggaccttttctggctgttcactcagaaaatgcagtgaagaaagggcttttgagcgaagctgatgtgagtaatgcattgactaataccctcaatgtccaaatgagactgggtatgtttgatggagagccttctgcccacccgtatgggaaattgggcccaaacaatgtatgtactccggcccatcaagagctagcccatgaagcagccattcaaggaattgtacttctcaagaaccaaggcccttcactacctttgtctacccgccgccaccactccgttgccgtcattgggcctaattccgatgtaaacgtcaccatgataggcaactatgctggtacgatttgtaaaatatcatattctttttttttaaaaaaaaaaaaggttattttattataaatttttaaatattaagcataaaaaatcatcaaatttgtaattt

SEQ ID NO: 42322 - DNA, 1964 bp, Cannabis sativa
atatttttcttgatttatttcttattaaaatattatttacgggtaagtgtgcgcaggttagtaaaaatgagtgcacatgttagcaagttggggtgggtacagagtaaatgcccaaaaggcagggtcaaggagttatatcatttatgtgtgtctgttgttttttttttttattggtgtgaccaatgcgcatgaaaatccgacaaatcttttcgaaggtaattttaatggagcgtttacgtcacgcgctctgtttttgtggtggggtcaacgagtgggccgataaagtaaataacgacaggtgtgtgggaaaagctgacacgtaggacgcgcgcaaatgtcgctgttgctgatcagtgactgcaacggccacactctttttttatttatttatttttttttaattttaataaaaggaaaaagtccaaggctgccattagtgacaagggatgagtccactaccaccaccaccacaccacccccgaaatttactaaatgtacgtttaagttattaagcgccagcgttgcgtaatcaagacgacgacgttggacctgaaaatatcatggataagtgggacccattaattagtcccctactcctctctgaccttatcagtgggccccactcttggattcccaaggtttttttttttttttttttctctattcgatttcgtagcagtaatatataaatagtagctagtagtggtgaaaaaaagaatggtgatagtggttgtacgagccgcggtctacgtacgttactgtgcaccaccatacacacaaccccactactaacgtactatgattttaaataaattattaattaataataagatgggaaatgacggtgttgttgtagttgtttgatatgtataggtggcattgtttaattaaataaaataaaataaaacttagaatttttggcagtaattgttttttttttttttcttttgatataaaaaaatggtaaaattatgttttgaggaagagagaagtacggttgtcctttgactcgtataataattaccacggcagtaaatgctggaggttaaaataggaaataattttgtcaggtgtgctgttgcacctgagctgcacgtgatttattattattattatttttttttggcagcaaaattgaggtcaatggtaagataagtaagagtttattcagaaaataataataaatatagaatggggtatcttatctggaaattaattttgtttatttttttttttgggtggaaaaataatggtatcatatggagttggaatttattttataagtataaacctaaatgtgagacttgaagttattgttattattaaaaagaaattgttatatttatttaatatgtaagaggaagtggagagaccctttcatttattgggtcctaccaataaaaaaattaaataattaattactaaaatgggaattccttgtctcattgaaaaatataaaccaaaccattctttcatatatcctaacatttattgttgtcaagacatttttattttattttagttggcaagttggacttgtaattaattagccttttatttatttatttattttacaaaaataaagatacgtacaaaagcatctatatatgtataagcaatttaatatttccctaaataaattaaataaataaatacacatacatacatattgtcttgtgatcactattttcatgtgctttaaaacaatgaatttgtacccatgttcttctttttttaatggtatcaaatatatattatatattacatattataatttattttattttaggttttacttcatttctaaaattaagtaaagaagaaaaacattgttgctaatggtaacaaatgaccatcttttgaaaatgaaatttaagtggaatttatttattttttatataacttaggtttgtgggaagcaacatttttatataatatatatggttattattgctattaaaaat

SEQ ID NO: 42323 - DNA, 4702 bp, Cannabis sativa
ttatcttatatgtgtgcgaaataaattatttaaaacgtattttatatatttttttttttttttgaataagaagagaaaatttcattaagatagagccaaatcagccattactttattgttgatagcagaaggaacattgctacttacaaaagtacaacctaaccaaaaataagtaccgcaagcaagacattaagcggcattattagcaaatcgtttaacaaaataaacttgaacattaacaagagaatcaattaagattttgcaaactgaaattacagaatcaaaaacagaaggcataacagcagtactctcaatagctttaaagagcacttctttttcaactttagaaaaagctctattattccaaaagttgaaatgaattttgatccaatcaactagaaactgaaaagaagagtttttggttctgccaaaacactgaggcaaacctaaatatttttggtttattgtctagtcctagacattgaaaaaggaaagttttttttatcttaaattggagtaagaagagaaaagaactgagtatttattaaaattcaccaattaacttgaagccttgtgatatacatccaaagcttcttaagctagacaggaatttctatttacaattgtaaataaaagatttaactaggaggggattttaatggctcaatgctctaacaaaattaagtacacaagaggttatatggtatgttatgagttgtgtctttttataagttttcaatttcattccattctattcttattttcatttcgtccaaccaaacacaacctaaatttcttcaaatcgcatctttcttttttctcctaatagaatcttcatagagaaacatcatatcattatacagaagttaccctctaagcaaaaatcatgctaagatttccatccagatttgtgatgataatttggaattttcacttaatattttctctaaatcaaaaatttaaagaaaacaatattgtagcacaaacacccaattatatttcattgatcttcccaatacaaacagagtaactactaaaaaataaaaatgaatcaacacattcattgacacactgctgaaacacaattacttggtatgaaaggtaagtaagcaaactacatacaagtatgaaactgatcagttgcaaaaaaaacctgaaaaatgtataaaactatcaacaagtatagttcttattggagacaaaagtctggtgttgagtcaggactcgataggagaagatcgaaaggtttcttcttccctatggtgtcttttaggattgtgatctgaccatccttgagaagtatctcttcgtcgagagactctaacttctttttcagtacattaacctcagagttcaaaagcatgttcttttcactatattgcttcacttcattccacatcaaatctctctctgcagagatttttggcagcatacctctcataacggttaactccttgttcgattcttgaagatcattctggatactgttaagagtatcatccttcttaagcatctatccacaaacaaaatgcagcaagggaggcacttcgtttagcaaaatatattaaatagtaatgaaatatttcttctcatggttttatgttttccagtctatggtctaagaaattacctgaagttcaagatctttcaacttgtgggcgacaaaggcagcgttgtccattgcattttggacttcgcattgaagtatatcggtacctcttacagctgttgcaagctcagcttgtaactgttcaacctcctgttctttagaatataatttttctctcaataaacttgtcaacaaagtttctgctttgagttcatactttatatggtcctgtgtaagttatagaaacaccagttacaaaccacaatatagaagttgcataattcaaaagcatgttttgtagcagcctacctctggagtttgccaatttgaatgcaccaaaccgtttgcatccatgttctttggctgaaatatagaagctgttagtttggacttgtcatccaacaaactggaaattgtcagcaaactcctcgataagctttcaatctcgcgtctcattccttgaactttcatttcagattccatgacaaagtgcccatctaaaccatgcttgatagcttcatttccatgctttgtatctgaacattggacaattctgcctttgacaaattcaagtaattttgagcataactgtgaattttcggttaacattgacagtccttgattttgtaaacagcaaatgcgagtccacatttccttatcgagctgaatagttaaagtaacaccttctcttccattgctttttaacctggttaataaattcatattctcacgtcgaagagaatcaacttcaagccttaaagtttccaactcccttctcaaggccacctccactcctgtcaatctcatttgctccatttgcagccttgccacatgcttatcgaaattccctaactgttggctcttctccagttcctcatcaaaggcttctcgcaaaccaacaattgtcttctcttgttcactgcaggttcttaataatcttgtgatagacttgtgtagttctctgcattctttctctttgttttcaaaattcttttgtacacaaacccgattttcttctgcagctttatagttctcttgaaactcagtaagattcttctgaagatcttgattctcctctttcatgctgtccaccctttcggtcaggtccttgtattgttgctcaaaataggtgatcttgcttctgctctctgcatctttatcactaaaacttgagacttccctttgaagtgatacattttgctctgcaagctctctaactcgctcacgaagcttttgttcctctgactgatatttctcaagcctacttgaccactcattggacctcctgtctatctccctctccagtgctgattgtaactcatatttttccttctctagtcttcgggtttggcatttcaggtcttctttcacatgtctaagttcttccttgaacgaagctcgttcagcaatttgtgaatgcagaaggcttgaaacatcatgtgccaagcttactctttcctcagcaagttccctaattttctgaaccaaagactgcacatcaaatccacttccatgtagaaagctttgttgctcgagttcttcagataaaaccatgaccttctcctcagcttcctttgatcttctctttaagtgcacatccatttcctccaaaacctcacaatgatctccaaccactttattttggaagtatggataatcattatcatcctccccatggtattttttaacagtttcacaaggttcatccagtgaataatttcttggaggaactatgtcagaattagcatcaaagcctctattcatggatccaccataaatgtcttcgagtgtaactggcatgtcgtagctaatctccttttgactagtttcctgaacacgaggctgtgaaagcctctcaacaacattcttagcaagtctgcggggtgattcgtgaccaaatccatattcagccaagtctgtggaggagaaacgaagatgagagcttttggattctctaaatgaatgacctcttcgtttatctttgacactttctgctggagaagaaggtgaggcatactgcaggcgtggagggcgccaattgcctcctttgccactacttccacccaaatttccctgagcattgtgttcaggtttgttctgtccttggtgttgctccccatcaatgtagcgatccacaactttactcgagacattactggaggaagtggaagagcttcctgaggaatcatggtgcttcttaggagaacaagcagaaccatgtctccctactccatgtgtattctgcaaagctggcatttcaaaacgcttggttgttcgcctctcgggtgtaagagaactatatcatacatgccaaatccagttacagaattagtgtccagaaattaaaggttgtgaaatgttaatgcaatagaattttagttgcagttttgtaagatgaaaatcagacaatgtacaggatcctcaccgaagggaacgatcactatgctgatgagggacaccaccactccttacactagaagtgggagatctactatgatttcttgaggaagagaagtcacattgtgctggctcaacaccaacaaaggctgctgatgacatagaacgactcctcctaagaactggggtattattactcgaattctgaacatcagatacttgctttcgagacttggaaaacaagcctttgggacttggaaaactactctcagccatgtgactggcttgacttgatgacagattctcagggtaactttcttctttattattcgagtttccagtgccagtggcagaggatctgaaaaagaataacttcttcatctgcaaatcttaagctaagattgctaacaaggggtcatgaaactctgtcaacttcaattctaatctctactcttctttcttttctttttttgttaatatataagcctgtaaaaaaggagaagaaattagaaaaaatgaaagaccagtacaacacacacacacacacataatcaccatcattggaaatggtggttggcatatggaaattaaattgcagatgagtgttatcattactacatcaattcagtaccataaacctcgtataaagctcaatttggacagacaattccacataaagttgatacataaagctaa

SEQ ID NO: 42324 - DNA, 1703 bp, Cannabis sativa
  modified_base (345)..(350): a, c, t, g, unknown or other
atatgattaatagattatttgttgatttgaatttatcatccatatatattattcaaatcagttatatatattattgaagtccatttctaactttaaaatagaaaaactaattcatttaattttgtatttacatgagtaatgataagtgcacttaaatattacatgataatttttttaatcaattacatttaactaaattggaattgtgatcctaaaaaaaattgaattgattatgtgtataatatttatagggatacggttttgtcccgcgatatttcgtggtacattagatgggtctcagggtacattacatgagtgtcaaggtacgttactattttttaaccnnnnnnacccctagatcaatctcagccctcaaatcaaatatctccatcatctaacggttgtctataattttttaaatattgtctaaattagaatcgtgatccattaaaatatgtttagagtttttttaaacacgtgtgttaaattggaatcagaaactatgtttttactattgtaaaatattcataatttttaaaaaatcacaagagatgatgttataattctaatgaacaatcactatgaaaaaaaatatttcaacatataatttcggatacgaagattgactaaaaggttgtaattatcacttctagcatattactcttatatattgttgacgctgaaaagtggacaacagcagctcgctagattgatgagatgaataacaagtttaagtaaaaaaatttagagagacatacacaatttatagtagttcactcctcatgtcgcaatgacaatagagttacgtcaattttgagtttttatttctcacgagatagtaattacagaaaaaggctaagtgtttaacctttagtttctagaaagagaaactagagagagatgctctaaccttgtggatagtcttctgaatatgaaaaatgagctaagggagctctccttctaaaagtaaaaaatatccacaaaaataggaaaaaaataattcaaaatatatataaaaaataaattggctaattttgatcgtagatgatgatctaacggtcaaaattaacttatgagattaatagttaattttttgagttcgagccatgtcaatgggacctgctttgggtaagccggagcttattttcataactcttttggggtaaaattcgaggtcgataacttaagaattgtgattgatgtgtgatacatgacttgataattaaagcattgaatttgctttaaaattcaagttgaattgcgtcaatcgaatcaatattgagtgagttgtgttcgttttactgaagacagtttataacacttagctcccaagttgacatcccagtgcccatattggcgtcataggttgacgtctaggggatgtaatttgtgatgcctaagtgatgtgatgtgatattttgacatcacttagtttgtttctgtgttttggcgaagttggtcactagtttctggagatgttactgttctacggaaatgagagactcgaaactctttatttttgagtgagtttcttatattagaaatgagaaatacaaagttgtgaatttgacttctttgacttcatggatcttagttattgtgaaaaactagacgaacggttatatcagaatcaaataagcagaacccaacacaccaggccattttcaacctaggcattggatacttcatttttgggctctcaa

SEQ ID NO: 42325 - DNA, 1164 bp, Cannabis sativa
tttggtactctagtctatggcattgtaacgtaaatcatttttcttaaccaccaaaactgttccaaaataaaagttttgaaagaagaatttgataaattcttgaacatgtcattttttttttcgaaatgttgtcacaattaattgcagagccaagattttacaaacaatatctgagatatatattaataacctctgctgttacttttttaatgttcactcattgatttgtactagtatttaatttagaagaaaataaatgataaagaagaagatgatgtgattaaatggtatttgtgaaattaagacatttaaaattagcccaggccagctttagtttccactctctactaacaactgcgttgtttttcgggccggattgcacacaaggtgatggattggattaggtttgttcagtataccacgaattttgtttgggttcttataccacatacctaaatttttaacattttttttttactagggcagatttttttaaaaaaatactgtttttttttttaaaaaacactgagtaaattttataacgtgttaagttttcacttgttccatagttgtttttaattattctgttttgttgttttataataattttaagttattttataaaagcattattattgtaaaaattccgtgtggttgtaaaatggtaaattgttactagtacttttataaaaaccttttttttttattattattattttcattttgtctaaacaagagatcaaatttttactacgaagttcttatttctgataatgtgtataaatttgaaaatttacaaaaaatgtataactaaacacaattcaattcaatatataaataacatagcctaaagaaacggaattttaacattttatagtattcattatttttaatacaaagtatgatattattcaaaatgtaaagtacaagtagtttattttttgccccctttttttttttgatagaacattacacaattagttgaattgaattggtaattgctgtagtttatgttacatattattccttttctaatttattttgtcacctatttcaatttcttttccaaacattttgctgagtgaacttgatatcatatcaaggattgaaaagattgcattagagtaaatttataacttttttttcttctatttttacgttttt

SEQ ID NO: 42326 - DNA, 2067 bp, Cannabis sativa
  modified_base (822)..(841): a, c, t, g, unknown or other
tagtaagagtagaaggagaagaaaagaactagaatgaagaacacctcgaagccgatctccgtctctttcttgctctctttgagtttctctctctaattttatagttttttgacttattccattggtagcctaagaggtcatatttatagtgcttgaaaatagatgaatcatcttagaattaggattctatttatagtgcttcaagatagatgaatcctattagaattaggattctatttatagtattaagaaatatatcactaaaagaaaagataataaaaaaatcgtaactaaaagctatctttattttcgttatatttttctttttagaaattttctactgcgacgactgatagtattttgaccataactttctcgatattactcggaactagatgattcaagatgttctggaaagctaagaacgagatctaaaactttcattttgagctccaagtccagttctacctttaaggttgtctgaatttacaattaagttctgccttataaacagtagctgctaattagatggctatagtaatatgattttccttgacttactcagtttggctttagagactctgcctaggaatttgactttccaatttaaccaaactttgattccttccaaacattttttgctgtaagaacaaagcaaaaaataagtatttgatgtcttcactatatatcttccccacacaccatacaatgaagatccaagctcagttcaaatctcactattctatcctttgttataagtctttgccacataatgagtcacattataaatttgtgtttaggaataataataataataataannnnnnnnnnnnnnnnnnnnataataataataataaaggttatgctgctgtgttttgtttgcaccatatagtgagtgcgtattggctgagttaaaaattttgctcaaaataaataactaaaaaaatggaactctcaataagagataaattatatgctctaattatatttgaaaaataaatgcactattatgttattaatttgaacctaattacatttattaaaaacttatataaggtaagtactaagcaaacataaacctacaattaggacactttttaagtctactatttaatatattttgcatacactcagggtgaaatacatgaccgcaaggaaattttcttacggtcactccctgttcgtattcttctaagcatattgggcattcttctccttcagatactgtattatctccacacggatacttgtcttcaggaaatgcgtctatagtaagcacaggtacaatttcttcgagtgcatttcgtgcaggtaaattcacattcggtacattattttcaggtgcatttacagttaattggatagatggattttcttcgtcgccgtgaacgttagcaaaatatgcagtgtggatgcatttaattatcaaaattaagaaaaataccccgattaaaagcatcatgagcgaaatttcactattttgaccatagttatctttggatttaggtactttttgattgatttggcctaagacggtagggagtatcataaaaataatgatgtaacgaataagagccattgctgcaaaaataatttaaagaattaataataattagtataaaaaaagtattgatcattaataaaattaaccaataataaaagtaacaatgggtgcttatttgagaaagtagaaaatgaaaccataattaatagagctcatcctcttttatctgtctaaaaatatatatgataaattgaaaattatttatgtatattataacctgaggcaacaaacaaatagaaaaaatctttattagcaattaattatatatatttagtaaataacaaaagtatatatcactataggtttgattatatatatatattaatataaaaaaggattaaaaagacgtacatatatagctatagggatcgatcgtgtataatatataaaaaagattaaacaaaaaatttaaagaaaaaactatactcattgaacaattaaatttttccataaatgataataatatatttggcctatattaaatttaattatgatatatatat

SEQ ID NO: 42327 - DNA, 2935 bp, Cannabis sativa
  modified_base (1436)..(1445): a, c, t, g, unknown or other
gatagtagatacaacgctaagtttgtttagctaagagagcttgcagctctaaatcacggaaccccaagccctctttttccttcggtttacataaatagtcaagtggtggctaccggatggctcttgagttgcgtaaggaagtggcacaatcggataatagtcaagtggtggcttggtggaaatatttgtggagacttaaaattccaccaaaagttaaacattttgcatgagacttgctcattcttggctaccgactaatgctggtcttttcgctaaaggtgttcatattgatcctatttgttcgaggtactctacgggagctaaggagaatgtgtttcatgtgatttaaggatgtaagtctaatcgagaggtgtataaactgtgtgggtggcggtagcaggtaaagcggcatgggaaggaggatgtcttggcttttttgatgcggttggctaaggtatggaacagagaagactttgaatatattttagttctctcttggcatatgtggtatatccgaaataatataaaacatggtgatactcctccaagggctgttgacatggtagagcggccgtctgctaattttatttctaagtataggggagtgaaggttactactgcgggcagcaataaaaggcaggctgctagatgggctgctctttctcagaatttgttgaagatgaatgttgatgccagtgtccagaaggggaatagtggattgggtttgggttgtgtggttcgcgacaatggtggccatgtggtatttgcttctgctgtgggactgtcgcaagctctctctccttttgcatgctgaagtgttagctattcataatggtttacaggtgggaattcaacaacgattaccccatttttgtgttgaatctaattgtcttgaagttgtccaattaatctatagtaaggaggatggttgtagagacatagatggggttgcgagtcatattagggacttattatctaatcacaatgttgttggggtttcttttgtatatcgtgaagctaatggggtggctcacgtattagccaatcatgctttgttaaacaaagttagaactatgtggataggggtttctcccccttgtgcgaggcttgctttactgcaggactcacccattcctttgtaatttgggttgctgaatgaagtttgtttaaaaaaaaaaaaaagactaacgaatttgaataattataaaaatcttttctggttgatatttatttataattagtgtcgtgttaatcaaataggttttgataatatattattaaataattagtatttttgtctcatgaactttaagcactacctcactttgtctcctaaaatataaaatttgttaaaaattctccctaaaatataacaattacatagttatgctccttctattagcatctgtttcttttagggtgtgtttggaagtaannnnnnnnnnactaggtagggtaattactagggtggtaattacacagtttagtaattacactctattttaaaatgcaaggtgtgtttggatatgaggtggtaattacacatgaattcccaatatcttgtttggcaaaatagttaataattacatgagaaaataatattttttagtagttaatgtttaatatggaaagtttttagtatttacacagtgtaattacattcaattctcatggggggccatgagaattggagagtgtaattggagcccctcaattacttccaattacacagtaacagtgtaattacatggtcagacaaacatgtcaaattgtgtaattacctctaattacacacaaatccaattacattgtggctttccaaacgcacccttaccgttaaaaattagcatttttattccctgaattttgaccaatacaaaattttgccatcttttatttaaaaataataattttaaaaattataatattctattaattctgaaaaaaaataataaaaattatttaaaaaaacctaataaaaatattaattttacttaaaaaaaacttaaattatttctaaaaaaatattttcaaactttattttatttataacacctatcttaaaaaatcaaaccaaaattattgagaattcaataaataatttattcaaactaagattttctgtagaaaaaatcaaacttatttatatttataaactcatatattaacaaataaagataaataataaaaaattcaacaaaaatataaaattattttgaaaaaagttagaaattaaactaattttttttatgtttacttaaacatatctacattttttgagaaaaataaaaatagactcaaatttgttcccttaaaatttttttttcacaaaattaaatttttaatatatatatatatatttttaatatctaaatgatttttttaataaaaatttaaataattttttaaatcccttaataaattttgaaatttttatttcttttttaattttttttaatcattcaaaatgattttttaagatctaaattaattttttaagatctactaaaaaaatgttgaatctttatcatttttattttgagggggtatgatttgatagttgttaaagtttagaaggcaaactttctaatttataaagacacgtcaaaatttgaacgaaattatgggacgaaacctaatagaaagactaaatttctataaatgttaaagttcaggagagattcttaacaagccatatattttaggtgacaaaattaatattgtcgaaaattcagagaaaaattgctaattattctatattatttatgttattttatcattattaacttatactaaactaacatataatgttccaccacagtgtttagtaaaaataccttgtataagctcgaaaattttttattattgtattttacatcttaataaacattgttagattccatcaaaaaataaatgctaattaggatttttgtcc

SEQ ID NO: 42328 - DNA, 1025 bp, Cannabis sativa
cgcttagcacgaaccagtgattctcttctttctttcccaactgtaacggcgtgttgacgcctgcgatttgcagcaacattcccgactaaccgaaaatgattagcaattcactcataaacaatcccatctccagcaaatttaacagcagaaatgtaagaaaattaataagtccaagtattcatatttggttcctgggcataatagaccctcttttcatcttctaaacaacacacacacacaaaaaaaaaaagtctttcttttctaatggctaaagtgcatacaatagtcaaatacactcacttgctcatccaatactattgccccctaaaaatgcaaaactcggtcaactcctaccactaaaccccatttcaaaaccccagaagcaaacaaaatcaatatggccataccctttttttttcttcaatttaaattgctttcgtgattaaatttggcacccaagaaacccagataaacagttcatttctcttctaattctatagcttcaaccattggtaaaacaacttccccaaacaaaaagaaagaaatactttccttttctttccatcaccattttacctcaaatttcttggcacagaaagctcaaaatcaaacgaccacatcctaaattgaattcaaggcgacaaggaacttacctgatgacttaatagattctcttttggggataaataaggcatcttcagacattgcaagcaaagcttcaaagggtttcgagtttaagcgaaatctttaactctattcaaagggcttcgaaattgcttcatcaacctcggtgtttcccgtcgtagtttcattatatttagccggcgtgaacccaaaagacgaaaaacgacaatttatctggcatacgacacgtcgataaaacgacaataaaatagtaaaatacaaattttccctaggagtaattagcaatttcccctttgaacttttgacaaaattgattttggcccctaaaatatatagcttgataagaatctcctgaactattacatttacagaaatttagt

SEQ ID NO: 42329 - DNA, 943 bp, Cannabis sativa
  modified_base (460)..(461): a, c, t, g, unknown or other
aaaaaaaatgggtaggtccaatcaaaataataatatttgatgagtgtataagaagagaagtagtagctagctagagatagagaaggcaaaagatatatctaataattgatgaatatttgtactttgaaaaggcctctcacaacacaaggccatatacttttaaaacctccatgtggagtccatgtggagaattattattattattattattattattattattattcaggtttttttatttttatattaattttatcgaaatttttttagatttaattgtctaacatatatcgttatacacacaatataaaacgggcgaacagaattttacatagaaatttctattgtaactaacagagcaacttaaatcgcaatcaaaatccgtatagcaactcacatagaaaccatcggagaaatcactttagaaactcaaaccataaattttaaaaaaaaattaaannaaaatagtatatggaataatttcttacaatattattattattattaatccatttttctttaattatttatatataatatgtccttgtctctctctctctctcttatatatttttcttgtgataaagccatttcccatgccctaaattccctcttcttatgaaataggacccatttgcatactcagctccaccatgttttccggatcctgccaattctcttctttttccaaaaaaaatcattctcctttttcaattttatatttttattttttctcctccaaacatatataaatcattgctttaaattttataatatagattgttttcatatttgtataaattagtttatatacactataaaaatttttatttttatttacaacaaaatttgtgacaaaaagtaaaaaagcgactaaaactaaattaatgacaacttgtttctaaataatatgttttagtgacaactaacttttttttttttt

SEQ ID NO: 42330 - DNA, 1287 bp, Cannabis sativa
tgcagagtttttcgaagagaggcttgtgatgatcttggtggagagttctgtgagcatgactatcagaagagtgtgtactagagagaacatgacttggtttttagtgtacacaacactcttttattatgttattatttagtcttgcatgtgtataaataaataatatgatgatccgaatgaagaaaaatatatattaaagtagaacatgattgctatatttaacttggaaaggatttaagggtattaaccaaaaggtcaaaataataattggttgggcattcctaattaaaacatggtgaattggtgcaatatgaaagatttttttgttgttatgtttgggtcaaattaataatttacaattacagtaccaactaagtgaaattgactgatacttgaaacttgaaagtcaatcgttccagttagagtggcttttttagaagtcttaaatgtaaacctttgagagtcagacatgtcacttttgtcttctttctcagaatccctttagcacaagtgacctgctccatcgtagcaaataaggttttggcaaacatttcttagatggggttgaaactctcttggtaaggtcgagagatgggagccacataggtagctcttctccttttcaggaccataataataataataatcagagatatgattatcatttaagtgagctcagagtaaaggaaatcaaggagatcccatgtttttcctctaaaagatattatttgcattaatattatagttattgtgattttgatgtgtactactgattgagaagcagataaaaagcttatccactttctaagttcttcactccaatccacattaaggtagggccaatatataaaatatgtatcttcaaggagacaaccatcacaatcaagtgaaatatatctgatctttatagattatttcagccaaatttccaatcagatataaaaaaaaatttacatggtgggtcattcttagcttaagtaaaaacaaaatgtgcaattcattactaattcttcaatgagctgaattatctacttattttacttattaaaaacaacttaaataaggtatttcaagcaggcaaactaaaagtgccactgaaattggatagtaatattgctccaacccaagtacatgaacatgactttgcaatagaaacatattaccaaaatccacaataaaaatttctaattttgctcataagaagctcgaaacataaacacattaattaaatttcttacatatttgtatttatgaaccttcgttggtaagaacacaatgtggaaagtg

SEQ ID NO: 42331 - DNA, 1586 bp, Cannabis sativa
aaaaaaaatataaaaatagtaattttttgtagtgccaatataaatgttagggtttttagttgctaatgaattggccgatttgcattgcttctttgaacctattgatgctattttgtgttagtttaaaagtagcattggtcccaatccaatgtatattaatagtaaaacatgaaagagagctctacaatgtataaattattgcgatcatgtactaatacattgtcaaaaaaaaaattatgtgttgacttaagattttcaaatctgaaaaaagtcttcaataataaaattgaaagatcatgtactatgtcaaaacgtataatttagtgtgtattttatttatttgtttatttatagttttaggttggtttttgagtcatttcaaaaagtatatatacttttcaacttttatcttgacatattttgtaacatattagaatgtgcataaatgtttaaatttcccgaacattattttgtatttgcttttaattattctttgttgaaatttatgttctttattgagtgttgctattaagtgcaagtagtgcctaataggtagcactgaatgaaatagttagtgatattttataattcctaataactaaattaaaatatgtaatttaattagagtataaaagtatctcgaatggtaaaattttagaggatgtctatacaaacgttgcaatactgggtagaatagtctgaataggggagagttgaaaaatattagggaacccaacaatttaaaactatcgactatagtcaataatactataggccacagtttaaaaccgtcggctatatttaaaaccattagctatactatagttgacagtttaaaccgtgacctatagtatagttaatagctttaaactattgctgtagtggattgtccaaaaaaaatatatcgtttcatcattctcgaaaccatttctcgtttatgccgtagctgctccaaaacctttacaagcttcatcctcctccaccgtctcttgactcgtcttcatcctccttgaaattttcttttacaatcttcaaattgcaagcttttgatttttttaacacacacataaagatcaacaaactaaatcatggtaaaaaagaaatttaaacaatagataagagaatattgtgctttcacgagagagcggagcagagggatgaagcgagagagagtggaggagagggatggcgcagctcgtggctgcaaaggagagagagagagagctgggaaatgaagcgaaatttacaaatgattttgaaaaaatgagatctgatttttttgggagaatttatatcttaagaagcgggagatgaaaattttgaagtttaagatgcgcaagaaaataaaatgttagatatgaaacacgttaaatttaaatataggcattgctgactgtttaaaatcgtcgaccaatatataggcgacgattttaagctattgcttatacattgtctgaaggttttaaaccgttggcaattcccatttaaaaaaatacgagattttttaaggcacgtttaaaaattgtcgcttatacctcttgacagtttaaaaccatcgagaatactttatttttccctatggtttt

SEQ ID NO: 42332 - DNA, 709 bp, Cannabis sativa
ggctaaagtttagggttgtaagactttggcaagaacactctgtaaaaatactttataatttttcaagcttaataatactaactcgtggactaaggctatttaaccccaaccactcttatttatttcttaaagcattttttcttagcttaatttattatcaagtaattcgatttccaaaaataataccaatcaaaaccatttgggtactattttatttatttatttatttgctatatgagtaataaattaccataatatttaatatttacaatgagagaatatcaattattacatgatatatatctttttttaactaaaatgacgttggagcggtaaaatagatcgaacacgataacacgaattaaaactcacacgaaataaattaacgagtttggatcacacacctaaccaaaaatggttcatggatcttttaaggatggaatctttggtggggttgttcttgctattgacaaggattcctttgactggtttgtgatcactttgctgagagtgctcttgctacagaaatagaggcaatttccttagccttgagatgggtattcgatcatgatcactggggataatttcattattctatttgatgccaaggtattggtccatgctattcacaagagaaaaccttcgttatcgactttatttttctccttgttgaaactctcgtagttatttttggattgtaatgttaatt

SEQ ID NO: 42333 - DNA, 610 bp, Cannabis sativa
ctctggtgactgttgagagtcttaaaggtgttcccttttctttgtttggtccatggctatcccctgcttccaagtatcacgatgtgttctccagcgttttgtctcagccattgtcggctcagcatttggcgatcttgccagtgcaccctcctcttgctgggacgtcgaccggtaatgggaacggtgatgccgtggtgaaagggacgcccattgatgtgtgaagctcgaggaaagaattgagggggacgtctcgtccattgactggaaaaaatgtgctatcaaagaaaaaatgggttcccaaggttcggtcaggagagggtgtacgaagcttttctggttttggtaatggggttaagattaattcaaatggtaatggaaatgggtctgcttctttcccatgtttggagacaatgactaatggtaagggaggtgtcaactccttttttcttgggccgaccgttgagatgggtcccacaggtgtactaaatagtaaagataataggacaatcaatgaaaaggctatttctacatctggtgggcctcgggctgggcttaatttttctgtggggcttctcatgggccgattattgatactaatggtgaattggtg

SEQ ID NO: 42334 - DNA, 2703 bp, Cannabis sativa
  modified_base (2403)..(2422): a, c, t, g, unknown or other
ataacttttcattcacaagttgcttcgagattattctccttattagcgatttctcaccaaactccacaacttgttcctcatcaacttcccatttctcttcctgctccatagccagcttatcaatcaaattaactatctcctctacatccccttctttcaccatgcatagtaaccattaagtccaaaaccataatcaaattacgcattttgtaaggtcatattgaccatagagattcacttagggtcactcactgagaccatttcgattcaataaaatattagtttatgtatatatatatatatctaaatttatacatatatgtatgtatatatagagtaagactatgtcattttatccgtacaggcgaaaaaacttttccatcttttgatagtgaatctgatgcttatatgatttttggatgtatttgttgtatgatttttgttgatagtgcttttttttattcttattttgtttgttttttttattatactagatgtttctaaaaaaacatagtgaatacatatttttttatgggtttttaggtaattctaatgtagctatatatatatatatatattttgtgatggaattgtgtgttctcatttaattttgattgattttgtagaaattatttcaaacatgagattttttttttgtgtcttacaaaagtaaagtagttttttatttaaattttatataatgtttttaattttttatatttttatgagatttttcttatatgtttagtttatttacccgaaaattagtttctcaattttttgagtgcatgataataattatttatttgttggtaatataggtgcattttatttgtgtagttttttcagcaaaactttaatttatttatttccagaatcgatttgatttagttaatttaaggaagtagttttttttagtatattttaggagccgatttttaatttacttaattcaacaaattaatttttgatttagctattttcatgcaattagttttgtgtgtatttttttgattgctttatagaactagtttttttatcttaaagtttttaattatctgataagggtagctggttttttttttttttttgttatattctaatgttcaatttcggcatctaactctgataaccataagaatcctgaagactttttcaacaacgatgaaaattctggtgacttttttgatgaattttctcgcaatagtgacaaattatggttactttttttggcaacgatgaattgctctagtgactattccgacgataatggctactccagctattttttagctaccttcacaacatttttagctaaatttgtttttgaaaatcttgctaattttatttatgatgttttatttgagtatatttttaaaaatattttaattacgatgatatttttatatgtaactgtaaattacgtcttactgaaaataaataaaagtacacacaacatgaataatactctttaacataatttagaataaagtattgaattttcatttaaattaaaaataaaatagtgtggacataatctgctacacctccttgagatacactatctacattatatattttttcgtagtatgaggacaaaaccatagatttcccctaaatatatatatcaccaccaaacagtagtactctcacataaaatgacttcgtttaatgtttgaacaataacgaccaaaccctgacgctgagtatcacagccagacatgcactataaagtttgaaccctccaccaattaatctctctctctctcattaaaattaaaaatagttattatagcttgttctattatatggatataaattactgaccacctagctacttctttattgtcccttgtattgggtagtttaaaggtagatacattaatactgctatacattattctgacccctccccagtaaatttttaggggaagaatttacattattaattgtatgcatggctttggtgggacattaatttattcacctgaacctttttttttctttccattattcgtaacatgcatacatatatatatttaaccaactataagaattcagcatttttcattttgtttatctttttttaacatgttgaacatattattctatatagctaataatacttttatttattaatatattttacacgtataaaatgtggttggtctgtccgtatatttatttatgtatcttttattaaaaaatcactatctgtttccaggtaagttgccacaggttactgccagcctgaatttttaatatttgtaagtagtagtgttttattaagacgtagttattaataatgttttttttttttttttttttatatttctcatttttcttagaacatgtttttccttttgtacatatcatcatacaattatattattattattattnnnnnnnnnnnnnnnnnnnntattattattattattatttagtaaaattctcgcattaaatgatcattattacgtgaatgtcgaagattattaaagcacgcgtagtccttcaacacaatctttcacgtatctaatattttaaatcaccatataaatgatcacaccatatatattactcttaatagtgttacggctaatattataaaaatttaaatttttatgtttagtttttctatttaattaaaaaaaattctcatttttacattatatgagttaggattgtaaaaataaaaaaaaaaaa

SEQ ID NO: 42335 - DNA, 684 bp, Cannabis sativa
ttagtcttaccagctcataatggcctaaccttgcggccatgtgaaggggagtgtctccgctttcgttgctctcaagcaccagccatggatacaaattaaggatttgctgagttgttattatgttcccatatttgacagctacatgaagaatagtgtcttttcggatagtcagatcatcatcatcattatcaccatatggattcgtgtctttgaaagtgatcccagaacaagaatccttggatccattcttgacagcatcaaagatagctactttcattattattattgtggctaattaatatgcaaacaagttaattaatatcaataaatgacatgaacttggaatttattcttatatattatagaacatgagtgtttcaagttatgaaagtaaacgcctaataaaaaaattaaaattaaaaacacgccaaacataggaagtgcatgctgcgttgtgtttcctccagtatttatttttctgaacatgttctcgtgtgtatgaatttgtgtatatatatttatattaagagtattgctattggacaccagtggtgtctataacacttctagacatgttgttttgtgattggctagcgataccctttaaaagttattatattaaactatattataagactcaatacaatagtgatattgacatatagaaaagtaagtatcctttag

SEQ ID NO: 42336 - DNA, 2099 bp, Cannabis sativa
tgatgatgatgatgacttgataatataaaaaatgacatgtgataattttaaatatttataaagccttcctttctttttattttagtgtgagtagatatgtagatatatatatacagtaatttatatggaccacaaataataataatcccttgctgctaattaactttccttagcacacttgcactaattaaactaatatataatagtgtagttattggctggcccttaataatgattaactacccagcactttgggatataaatatataataatattggaaagttgtccttgtaatgttatattatacaaaaccttacttcatatagcttgtaatattactaaatctagaaaacaattaattattatttttttaagaagaaaacaattaaatttaacttcacttgtagataacttttctatgacatgcacacacactcctaataacaattaaatccatatcttagaaagcaggaagattgagaaaggaaaaacaaaagaaagtgaatatagaaggcagcatgttccttttttcaatcaggaaaagagaatctatctagtgacttccattagttctttagaatttatataaaaactaaaaagggaaattcctttttttttttccttcttttatgagatcccctttaatttgtttttctgctggtcatcattagtcaaactaggaagaatatatgtatatatacaataatctccgcgatgatctaaattaccaagctagaatgatcaagaatgaacctgtttgtccatatttgttcatctttcacttttgttaattggtccttttgtttttgtccttcccctttgttaattaataggagatttactttatacatatactatttttaatttttgtttttttaaatttacagtttgagcttttaatgttatttttccggtggtttttatgtgggttgctatcctattttttattgcgatttaggttgttccactagttgcaataaagatttctatgtaaaattccgtaaaaatgtaataaaaaaaattattttgaagtgtaaaaataaaataaccctatatgcaatacatatttatttaaaattgttagcttaattattaatttaaataataataataaataaatctaatagaattcttaataacttagttatcaattttttaaatatataaaatatagcttaaagttcttttataaaaatatatatctaacaaattttattaaacaataaaataaagggattatttcaagaaaatacaaaaacaacaaaaaaaaaaaaaaatacaaaagtactgttatttacataaaataacaaattttacagtttttaagattttatttacataaaatacgttctttcgatttttttgatattatactcttgttattttgttgttaattttttgttatttgtatataattcttttaatgtcgttctgatgttgtttggataatgttttcatattatttttatgtgattttttgttattttgatgtaatttttataaatactataaaaatgtaaaaaaaaaaaaaaaaaattaaatgtaaatgtgtaaaaagtttgccaaaaacattagtttatgtcaatcttcttaaaataaataaataaatttaaatattttaaacaataaaactaataaatttgatataaactatcattaattaattaaattaacatttaatttaaatttaaattaagattatataaaaaaaataattatctaattttgttaatacctttaaataattatataattttgtttatacttttaaataattatttaaattaaatttagtaaataaatttaataaatttaatttaattttttaaaactatctttttaaaaaaaaaaatgagataattaattgataagtttactatataataataaaaatatatttttagatatgtgtagtaaatttaaatttgaattacaatatatattagatattttcaaatacgtaagtaaatttaaatttgaattacaattttaaataatctattatacattaatataatagagttatgtatatatatatatatatatctttatactaggtgattcttacgtgccaagccacgtagtattagttttattt

SEQ ID NO: 42337 - DNA, 3720 bp, Cannabis sativa
  modified_base (34)..(39): a, c, t, g, unknown or other
  modified_base (3459)..(3462): a, c, t, g, unknown or other
aaacataactagaaaaaaaaaaaatatatatatnnnnnnatatatatatataaacgacccaactaaattggagtttggaccccccctagagtgaagactaccttcaaatggttaaaaagacaaacaaacaaacaattcaaaaaaaaaaaaaaaacagaatcttagactcacttcaacaaatccagaaatgggctgaagagataaaaacaatccaataaacataaacagaatcaggggctaactcatatgttgttactaaatttagctcaacttgtagaacttcaactcgtgattcttttttctttccttacctgaaatagaaagagacccggattctgattctcacctacgaagctcattgataaatctccaccttcatgccaatttccctctccttcgaacaaacctctaaatcataactcatcacagtagacgaaatcctatcagaaaaacgactatagcactgcctgtagcaaattatctcagaagctctcccaagaaatttctcagctatctttccgtaccattttgagggagcaatctaaacagtgccctgaagattgtggtggtgaattccgagaagattcctttgacaccgctgtaccagcaaatctgtttgggagctcagaaaatataagaaaagacaaccggttctcttttcttcctactttccttctttttttttttttctctttctttctttagttacttagagaaacaacaaatccaactcttctctctcacataagaaaaaaataatcataatcatggtcttaataattcagccttgacaggctgtgaagtaaggaggcaagaaaatatgctggagttggcaatgtgtgggtgcttgtgctataattttttataaagaaagagcgagagagagagagagagagaaacatataatactatatatgtgtatgtatggatatagacataaagatattgttgtatacatatactaatatatatatttaattaaattactttgttgttatacttaattcaattgtacttactttgtacacacactataatttgtgatgcactgtgaaagcatgagaagaaagatgaataataaggagagagagagagagagagagtggtgagtgggaatggaaggagtgagagagagtggggccctgacaaaatagtaaaatagaaaccaaacgacaatcctaaacatgagcaaaggtaggccagtgaacaagatattccagacaaactcttgcagatatgcatgaattgaaatgatggaaagatggtgcttctttcctcccccaaatattattaataataatactttttctattattaattatctttttcaccgaaaatattcttaaaataaatatatataaataaatcttcacaataccctttattagcgtaaatttcaccattaatttcattttagtcaatgatcttaatcgaacaaacacttcaaattaattattatattcttaaagataatgctgtcatcttattcgataattattgtcataagttgtttcactctcaaaactattttagtgttgtgacctaaattaagttaacggttcataaatatttgatcaataaaagtatttatttattggttagtagtggaactttctttcttttgacgtgtatgagggttttattttttcttattatatagaagaagaataataataaaatacctgtaatattatattgtatttctcttttatctttttggttatttgtaggcattcaacgaatccgaattgattattctctccgtactaaacaaacatatctagtccaaacttgtgattgagattttatctgggtacagagatgttggattttcataatggatcaaactcttcaagtttggtacctatggtaaaaatataggaatggctacgtggcactaacctacaaccttgccattttttgttagtcattttattattattattatttttattgataattagtattcttatgaaattaaaaagcataaaatttaaaatgctgtttttttctttaaaataaaaaaactggtacataattgcagttttttttatagtatataatattttgaatcttatattttataaaattactaattaaactatttgttttattaaataataaattggaccttatatttttttataatagtacaaaaagtatttaaaattgattttttgttaaaataaaaattaatgataacttgattaaaagttattataacaaaactagatatattttttgcatatgctcgtattagaaattattttcaaattagctatattaaaaaaaatcaaaaattgagtttaacgttctattttgaataatttaagaaatacatggtttaatttgccattttacaaaatagagagtctaataagtaatttttgaaaaatagaaagtacaaaataatattctaggttttttaagggaaataattgaagtttttaaattgattaggataccaatctattgccaaaaaaaaaaaatctcttattttttttgaaaataaagtattcattaattatataaacgagttagacttcatcatcattaaaaaataagtccgtagacatagtgaatatacccatcaaactgtagtagttgtggaagaatgctcacttagctactttatgtgcagcaaaagtataagttcttataactttagaaaacatacaaccaaaaaaagaaattgaaatacaatgacagtgactagtgtagttattaatttctaatctggcccaatctattaagaacatcgatgattgcactagaatcactctccacaattataaacaagcaacctatatcaaccgcagtctttaacgccaaacgacaggccactgcctcaccacaaaaaaggtcacaaatatccaaacacttggcaaccacccaaatcacctcacccgagtgattttttgcaaccattgtagcactagcacacaaagcctcccctcaactttgacaacacaattcagttgatctactccgttggaggaagaaaccacctaaggagagaaacttcataatctgttggaaactttttaactaggatcttatttactactcaagtatattaaattaatgctaatctaacatctgttggggattgttttaccaggatttagatgtactaccatctatgttgtttaacatcctaaatataaatttctagaacaatagaaaataaacacatataaagttcaagaaagcttatattgattgcagtagaatttaatgtctccttccactcagatctctaacccttgttgctttctatcacagagtattatcaagatctgagcctgattctccttcatgtggtggattcttcacagtcttatacactatgattgagtactagacttgttatctgtgggtatgtactctatcaatatgtggctcaaaaattgaagagaaagagagaaaggattcaaaaatagagagagagagagagannnngagagagagagagagagagggctcaaatttaactgaaaggcttatgttgcatcatcaatagtttactatctatttataggaatctttctagatttaggtttgacttacatggcattaaaaagttgataaacaaatggctgaaaaagagcttaagtcgctgaccataggatgtgggccccactaattataatttttccattttattcaactatttatccttttctttcacaaatagcatattttccaatttcaatcctt

SEQ ID NO: 42338 - DNA, 2526 bp, Cannabis sativa
tctttcactccatcacttttcttcttttcctttttatctttactcttcttatcgcctttctctttgccttcctcatgctcctcatcttctttcttatccttcttcttcttcttttctttctcaccagtactttcttttccctcaccctctccatccttgtccttcttttttgtgtcttcattcttcaccttcttcttgtcttctttctcatcatctttgttttctattgatttttcatcttctttctttcctttcttgtctttcttctttttcttttcttcttcttcttcatctgcattcgtatcatctttattcttttccttcttctctttcttcttccctttgtcttcatcgtcttcaacattcgtatcatcttttttcttttccttcttctctttcttcttccctttgtctttctttgtcacttcttcttcatcgtcttcagcattcgtatcatcttttttcttttccttcttctctttcttcttccctttgtctttctttgccttctcttcttcttcatcgtcttcagcattcacatcatcctttttcttatccttctttttttccttctcttcttttttctctttcagatcttcaccggtctcatcgtcatctttctttttcttcttctctttccctttctccttttcctctttttctttcttctttggcttctcctcatcatcgttgccatgtttatcctctttttctttcttatatttcggctttactttctccattgacttagatttcaattcaacttccatttcactcttctcatctgattctatatctatatctttggtcttgactttgacatgtaatttttcctctttttctactttctcttcgacgaattcagatctatccgccatttctagacaagttccgagatgcaagctataaaaaaccaaatgaaagcataataagtaagccaaatagctaaaattaaagctttttaacacagataacttacagtaaaatctctacacacacagctttataaactttgatctcttacaatgttacctaaaaccaaactctcaacaattctcttttggtttagtaattttccttcacaaatgtgaaaatgaaaactataatacaaacaatgcaacaaaaacataataaaattatacttattagatgaatatatggaaattgagcaatgaaagttacaattttatcttcttgtgagtgaaaaggggttattggtttttagtgggaaaaaacaaatcaaagaatgttgaactcatcaaattaagtgagaaatttttatttcatgttaaatgcaattgataagattatggtgataatgtgttagaaagtaaattcaaatgcctaattttaaaataggaaatttctgaaactacaaagcataacaactacttggtatgaaaagatggggattgatgatagtaaaagcatgattcattcaagacaccaaataaacaaaacacagattgagaagcaaatgtatttactagtctcaaagatggtagaaacaactttaaaggaaagatggctaatgttcttattacaaaattttctatatgtttcttgttttacataatcccccaaacaaatacatttcactattcttgtaagttgtaaatatgtaaatgtggaagttgattagccaaagagctagttatacttagtttaatactgttgaaaactgcaattagattatctctaatctatcattaaaatatatattatatatacacacacaagcaaggaatattattacaatacaatgactcagtgtaagaattcagaaaatgataacttgggaaatggggtaataaaatattccattgtcctaaattccaattaaatagtgtgtcaaaatgcagatctataacacaccccattcaaagttctcaacataatccacaaaacatctatctttgagaaagaaaagaatgttgggattttcattattaacaaatatgaagcacataaaaaggtaattgaatatctatccatggaaattcaaaccaatataatcaagaattatgtcaaaaatatcacacacagaacaatacacaaggattttgattaatcaaaaactagcatgatccacactatccaatgaaaatcatagagacccagataatgaaaatctctatccaattgaaaacaacaaaaatgagaaaatacccagatcatgaaaacctctccccaagccaaaacaatgattttaattgcaaattagtgtaaaacaacaaagaaaagaaagataaatacttgatcaagtgatgatcttccaattaaaacaagaagaaagctgtaaaagaaaatggttggtaccttgtacaattatggagatttgatgagactatagggagagagaaaaagcttcaagctttagtgttaatggaggttagtaagtaccttaccttcttcattcattcttctacaaacatcttatatagactttggtgagtgtcagcgttaagttaagtcttgacagtacaacgcgtttcagccacgtggaggcccattcataattctact

SEQ ID NO: 42339 - DNA, 1985 bp, Cannabis sativa
cagagtagtcaaagtcaatgacacgtggcactaccaaattggtctaaattattaatttgtttttatgtattataaaatttaaatataccaataaaaataatacaataacacgtgataataactttacacttaactatatttatttgcaaacaaaaattaaacttatcaatatttaaaattctgacccgattttgacactcaaatctgaacccagaccctggccccgaccctagccctagaccctagactcggaccccggcttcgaaccccaaaccctagccctgtctccatcccgaaattgacttaaataaaattaaaaaatgaaaataaaagtgaatttacataatacacttttattttctgtttttaaaattaaaaaacaaaagtagttgtagaatatatttttgtgattaaacatttaaaaaaaaataataatcgcgttaccaatgaccacgttgtttattaatttttatactaaaatagcatataaatcttattgtatactttttaaataaattaggaaatatttcatatgagtatgaaaataattattattttctatatcctatagcctttctctctcgaattgatgtcaaatgttttgtctcgtgacatgcctacttactgctacctagtttagaatgagtgaaaatggcgagttcacagttaatgttgatgttgcagtgaatttgaaaaaaggataatcaatgtccgcttgagcaatgtgggggcatcgaccgctaggataatagatattacattttaattaagatcaacgaattgagtagcacattacataacaaagaatgccttatttgacaaggtttttgttgaatgtgaaggaggtgtttgatattcctctcctttgatttgtagtcttatattggttattttgttttgactatttaatattttcactttatatttttactaagtaaattgagtttttgttgaaatattaagcactatggtgccttttaacaattataacatggagtaaatagagaaaaattataaatatgtctcctataatgtattagatacataaatattagaaattctatccctctttttaacatttgacacaaaaataaagtattacttcaatcataaatcagcccaaattctacaaatttttacaaaattgaaaaagtttaattgagtaaaagataaataatatacataagttataagtatgttatataacttaaatattatgttgacataaaatcttaatgcataatgtggataaaaaaattcaagatcaaaccaaaataaaagaaacatgagattaatatttgatatttcatcatcatcatctacgtgagaagagctcaccagccagtaatttaataagaatggcctgtaattcaacacaaaacaattcataataacaatcaaaatcatcactaattgttttgtaatcgattcaaaccccatttaaggcttcaaaaattactttaataacttgattaaatatcatactgtttaattattatcatttgtgtacattcaaaataaaaaacttccattaaaattgtttgtttagacattttccgaataactaatcataggttcttctctctattatgcttgttactaaacttgttaaagagattaaatataactattagagattgaatcgattaaaaacatattatgaactctttattaacatataatattggcctattctaatcctgacaactaaactaacttcaactgaaataaacttcatgcactcgatttgaaaccataatgaagatattcagataaggaacgagagaaagagagaaacttacgggactggaacgagttgacgtcagtgcctgatgtagttcatgggacgagactaaaagctttaccggacgaaattcaatggactgattgtttcctcggttgtctgcaaaactaattaattcacgtcgtaaaaggtgctcgaatgcctgtagtaaacacaacaacaatgtcataaataatgaatt

SEQ ID NO: 42340 - DNA, 1368 bp, Cannabis sativa
ttaatattccaaataaataaaaaatttgaaatttttcccctctttttttttttttttgaaaaagagacaaagttcataacttgacctcttcccaattagcttcacttatagcagaggaaatctgtcgtaaaaatagtgatatttttaaaacaaatcccaagacaaaagtagcttaggacatacatttaatatagcaataaaacgtttaaaacaataagatgtctaagccaaaaaaattagtaactgcggacaagatacaaccccactctatagtaaggtcttggaaagaaagatcaccatagccttttgttctacacacccatgaagctacccaaaatttgatcgtatcccacaagtcgtctactttttttttttttttctaagattctaccattcatctctaaccacacgacccaaaagatggctaaaactgttgtggaccataacttggaagacctctttccacctttaatcttgcaagacaacaactgtctacaattcagtggcatgcaccgtagtataataccaaactctctcagcagtctactccttatggactactccatagggattgactaaatggacatttatgtaataaatgcgagatagtgtcctcactattattgcaacgtttacaccaactggggatagtgactagtaaggtcttctttttttagaatctcatgaactttcaaattttttaatgctattgctaataaccacccaaaaaccttgactttggatgggacacaactttttcgcaccactttagcccacccttcttatgtaacaggctgattcgataccaagcactgaaaggtgaacttacaagaaaaattccattagggttcggaatccgaagtcttgactcctccaacatacaaaaatttgggttttgctctagtttctagggtagaaataataaatttgacacctccccatctctcaaatttcttttgaaatggagattcccgccagagttagaagctgacaaggcatcaccctcgaccaccatcctttaagacgtttatttcgagtgttagagactagtaccaaatccgaaaataaattcttcagagcctcatctcccacccaatggccttccaaaaatgaattttgtcaccatttctagtcttgaaaccaaaccattctcaagaaaacatcatactatgttgctatacccttccatgctccttaaaagacaatcttcccccccttttggtatcccattaattatcagtagtcccatgtctacttttgatcactttatgccatagagccttatctttcaaagggaatctccacgaccattttatcaagaaagcaatgtttgttaattccaattatcctatacccagaccacctagg

SEQ ID NO: 42341 - DNA, 2021 bp, Cannabis sativa
tcgagccggcttcgcaggtgtagatttggaggagaagaagaagaaacgtgaagccgagccgagccttgataagcttaggagatacgtggcagtagctgatttgttaagtggtgatgggacccacttacctggcatcgtcaaccctacccagcttgctcggcttctacagttgtaatgtaacgggagttggttgtgacacgtgtactaattgtatgtgggtcccattttgctccccaatttgaaaaatgtaaagagttttctctctcttttttgtttaattattatttattttatttttataatttgtcttgtaaattatggtgaaatttcctctctcatctctaaacagaaaaagaattggaatattattaattcatattaacttttagggaaaaacaaaaaaaacctataaatctatccattcaatatatttttttgtttcaaaaataaaataggaagaataataatatatgttaaaaaaaattctaggaatttcaattagttttagaaatctatatgaaattttgggttggaattgtttttgagatctagtttttaaatttatattaattttgtgaaacctaaaaccctctttttctttacatgatagaacaagtgaaatagaaattgttggtttatttttatttttaattttaagctttaaatttgaatgaatttttttttatatatttttggaaaaaattatgaaataattgttggttggaaatgacttgttacttgttagtgaagaccttgtaaattattatttagtcaaatcattacataaatgtgttcctaaaaagtagattagatcaaaagagaagtattcataagggttttgctcttatttgcaaacattttagggttagtgagaattttagactttcacttattattattattataattatttattatttaagtttatctatttatttaaaagaaaagtttttcagttattattattggagtttggtacatctgtttttagtcacattaatttatactttatgaaaaaatatgataagatatatgaaaaacaagtcacacattattgatttttttttcataaaatgcaagacatatgttttacactacattttatgtttactttaataaacgttttttaaacaaaatgtacaccaattaaatatagggtaaatatgaatgagtttaataaaaattaatgatcaaagactctattttactaaataagaatttggaattagttagatgtgttatgatcaagctagttttttattttttgtttataacattttgaaaatctaatgtttgaattgcacaacacaaaataaagaaattgatcaataattttttatttttatttttttgaaaaaatagcttcagagaacgccagcaaagagcaactaagaggccgagagctaagatattgattgatcagtgacctcagtcaaaataaaattctaaatacaacttggataatcaagccactaaagtgtatattgcagtagttgttaaggtagattttacaagagtatcagcaactacacaattttggagcaaagtaaaactcacaacattaaattatttacataaaactttaatatcatcaataattaaacttaaagatgaatccaagaacgtaaacatattaacatcatgaaccaagctttggtagtcgaatttaaaatgactgttgtgaattctaagagatatgcattacgaaactgcttgtctaatagcaagggcatctggccactcgggttgatgaagagactcacatttccacatcattgatgcatatacctccccattcgaatctcgaatgaccatccaaggccacaagagccactgttgacgtcgagagcggcgtcgatattagctttgaggaccaatcaataacttttacaaagtacaaaacgcatatttatctaattaaatatataatttatgggatacaattttgtcccgtgattgtactttcacggaatgcattccgtgatgtacgacagccgtcagatgagggacttatttgatct

SEQ ID NO: 42342 - DNA, 1459 bp, Cannabis sativa
atctaattaaattaccatagaatcttcagaaatagctcttttgatttaaagagtaatctctcaaatttcatagtgttgatagggtaaatttacatagcagtaacataaaaatagcggaaaaacagtctcccatatttttctaaaaaaaaaaataaaatttataaaaatgtaaaatatatatatatatatataaattcatacaaatataaactctatatttttgagtattaatttgaagaatactatacgtggctcatatcatagcattaacatttcagtatatgtcattgtttgtttgtttgtttattacattgataaaatacctaaataatttttatatataaatatatatatttatataaatgtttattattgttattattattattttggtgttttatcccaatgtaggcatcggcagcatttaacatcattatgattatcttgttaatttgacatactgattaatcaatcaagaatcaacaaaacaaattaaaggaaaaaaaagaaccaccatacatacaattgtattcttggtgccttagcaaaaaaaattgtattcttggtggatcaactttatatttgtcagcaaatttttagaaaaaacgacgtccatggtctcttattattttgggaggcatcatcttcagcttactaaggggtcatgttcttcaaatagtggttgcgaaccacataatctctatcttcctcgtcagcaggtactgacactttttgccaatctaaaaactttgggaccttgaagtcattagtagattggtctttgccgagaagagcgcaagccttcaggttgttctcgtacaacaagaagtcagttgctcacaattcgaaaagaaagccaagaagaatcatgtgccttttctcgatctcaggagttggaataagtctcttggtaatagctgttaacataacaaaaataaattagtaaagtatggccaatgtacattgaattaaaactcaaaaccaagtttatgagaaaatctatacttacaagtaatttgaaattttgtggtgttgatgggaaaaagactcgtggtccaaaagaagtcatccttgaactcttttttgttgggaagcctcataacaatcccgtgatcgttggtaggtgttccgagatagtagaaaacacttgcacctcgcttccttgcacgacaggcctttacggaataaaaacaaagaatttttagtggggtcggacactcccacatcagaatgtgatataaagactttaaacaggccagtatcctgtatgagtttggagctaactagaatggaacaatgtcgaggtagttgcaaatatccttgaaatagtccctaagtgggagaactgccctagctcttatatgttctaggctccaagcgcctatccaagaaggttcattggtgctgcaaccttcatctcaagatagacgttcaggggggcaaaaactgaactccccct

SEQ ID NO: 42343 - DNA, 539 bp, Cannabis sativa
tctgcctccactttagtccctccacaaacttttacttgcttcttcaaacattcatgggcaacatttcttacttatccaatcatatttatcataaaaagtagcaagcttaaaagaaaaaaggaatgacttgatggagattcatttattgagattaattagtcagcactatcaaagagttttattttgataatgaatagaaaattaaaactaacctaaaaaatgaatagaaataatacattttattagttattatcataaataaatagacataggttacgtttaattatatatttactaaaataaatacatatataattatttttttttattttttattcttaaatgcaaattactttagatgacttttagtttgactactcttactaagtatttttaaaaatataaaaaataaaaataataagacaattcttttataggacctcttaaaaaaactccacaggtgggggtgttgtagatctaatagaaatgcgacacgtcaactaatgagtttaatgtttgaaaacatgagaaacactgca

SEQ ID NO: 42344 - DNA, 771 bp, Cannabis sativa
  modified_base (271)..(274): a, c, t, g, unknown or other
ccccctcttctcttctctttccacgatgcctcctcttggcttggtgcagagccgaaattggcttcgatttagctttgagtacaactgtggccggtggggataggatggaaatgtctacgtcattcgacggtgatgagttccaaagcctatagtctagattggggtctcgtcggagcatgttaggccctcgactctagctacgaaccactacgatttggggactcttcttgatttgtctcagccaccactttcttctctctctctctctctnnnnctctctctctctctctctaaatgttgttttccattgggttccataaaaatagggttttggcttttgggtctaatgaattcaaaaaaatgagacagaagaagaagaagatgataggtgttttgccattacatgtattttgtattttgttgagattaaagaaaagaaaagaaaaatgagaaagagtgaggaagagggagctcgggagggcgattttttgagtttatggggccggagctcgtagtagattttctgggtttatggggccgaagcttgaggaagaggggatattttttgggtttatggattttatgggttgacgaagaagaagaagaagaaagaagaagaaaaagggaaaacaaaaaaaaaaaaaataaaagaagaagaagaagaaaagaaacaagaaaaaaaaataattattttagaaaaattatttgtttttttatgatttttaaaaatttaaaatattttaaattatttttttaatatttatattatta

SEQ ID NO: 42345 - DNA, 2490 bp, Cannabis sativa
aaacgttactcttcaattattaaatactacatatgtatataattatagttaattctcttaattaatgcatatatacttatacactaggttgggttttctagtggattttctttcccatgctgcaattgtgggattcatggccggagcagccattgttattggtcttcaacaactaaagggtctatttggcattactcactttactaccaaaacagatgtggtctctgtattgacatccgttttcaaatcactgttgcacgacccagtaagtatctcttacatatatataaacacattaattggttaataaccttactctaattaatttaattaattgactttttatgttacagtggcaccctttgaatttcgtcctgggttgctcattcctgatttttcttctaattgcccgacacatcgtaagtaattgtaaattcatatgtcaccacaatatagctttgtttttcttttcttttttttttactttaaatataagcttaattaataatttacgtgcagggtagaagaaataaaaagctgttctggttgccagccatagctcccttaatatcagttgtattatctacactaatagtgtacttaacaaaaggtgataagcatggagtgaatatagtgaaacacatcgaaggaggcattaatccaatctctgctacaaaattacagctcacaggtccacatgtggcacaagctgccaaaacaggactcatttgtgctattattgctctcaccgtgagtaatatttttatttaatttctcttaattattacctacctattaattaattaattaattatatatttattcatatatatatattatcaggaagcaattgctgtaggtcgttcttttgcttccattaaaggataccatctcgatggtaacactgaaatggtggccatgggttttatgaacgttgcaggatctctaacttcatgctacgtggctaccggtataattaaatttaatatatataagactctgaggtggattctctctaaatctgtattaatatatatataaatatactgcaggttcgttctcaagaacagcagtgaacttcagcgcagggtgtgaaacagttgtgtcgaatatagtaatggccataacagtgattttgtcactagaattgttaacaaagctcttgtactacactcccatggccatcctagcttctatcattctctcagcacttcctggcctcattgactttaatgaagcccttcatatttggaaagttgacaaactagatttccttgcttgcattggtgctttctttggtgttttgttcgcctcagttgagatcggtctattaattgcggtaattataactaatttcattaattaatattaatattttgttaattatattattatatatattttaaaaaaaaaaaaaagaaaacatattatagacgtgaccatgatagaaccccatcatccaagttgtacaatataaataatttaatcaagtcaccgaaacaataaaaacatgccctcgtgatgttgctctctataatagtactataaatattggaacacactgctgataattatatcaatcaacttaagtaatagcaacaaaatttaataggattatatatataattgttgttacgtatataaaattatattgtaatattcatgattggtatgtaatattataaatatatatatataaaatattttattgagtcgttttccgatttaattgttgaatgtgtgttatatttggtatttatgggtggtggagatgggctcctcgtctcataattgagcacttgaaattattttggtccagtcttgatcaatttttctttagtggattcttagcttttttatatatatgcatatatacatatatacctttccaaaagtaaggctactagtcaggtctctagtcttgttacagacgttatatctaccacttacttcttagctctattggcacatttctcttggcccatatacatatgatatatattcttatttttgatcatgggtctactttaaaatttaccaacaaagaagaagaagaaggacttgtaaacatgtgtaagcatcgacatcataatcagcgcacaatacatgatctgggtcccattccatattactacttgtctagtagcatttgcacttttacccatgagaatataattttaagttgtagataattgtatatagaaaaattaaggtagtaaatgatgcaacttgattagtattaagtgttagaaattaatgttaattacatgcatatatctgcaggtaagcatatcttttggtaagatattattacatgcaattagaccaggggtagaattgatagggagaattcccagaacagatacgttctgtgaaatcagccaatatccaatggctacaaaagctcccccaggcatcttgaccatccgtatcaactctgccttgctttgttttgctaatgctaatttcgtaagacaaaggtacatatat

SEQ ID NO: 42346 - DNA, 595 bp, Cannabis sativa
attaagagggtttactacgacggtactgcagtttgagaacctcgacggggagattattacaacatcttgcactgttggccgctgaagcgagtaagattcgtaaacaagaaacaaatgtgtctaggagggttacttccatgataaatgatgttttggttgaacccatgaccttaactgctgatgttgataattacagcctatttttcagagctctagagtttcatctatcagcagtttgttcagtcgaagtacatgattcgttcaacagtacgctgaggtggggagagtaccaaaggacttttcacgattctaattactctgttttgactcctcctgtggaattttggactgtggctgaggatggatcggggatcatagtagatggtgggaatgcaaatgaggttgagcatggattgcctagagagccaactgattgacaagatttcaaagacagactttattggattttacttattgaattttgaagaacatagcactctacatatcaaaaatatatttcatagtattctctttcagattggaaaaagaaaaacgtttagccatttctttcctaactttgataatcatctgttac

SEQ ID NO: 42347 - DNA, 877 bp, Cannabis sativa
agaatcgagattattaacaaacttatattgactaccagaaattgaattacaacaagctccataatgtactggggattaatttaattgagaaagaagagtaaggtaattttcagttattcaaacacttgctaggcaccaagatggtaaaagaagagttgtaataccaggtgtaattaaatagggatcgattttctctaatatgcacaaataaattttatattggcaagttttactgatcaggctgcagaggtgaaataagtttgcaatttcgaggtgatcacagctctagagccaattggatttggaagttttctctttcaagattatttggattatttaaagatggaaaagttgttgaaggagttaaatgctacggtgatcactttagatccaaagaacaaatgtgcaactaatgtaagtgaataccctctaattatatgttgtaatgttatttataaaattataacaaaacttataagttctcgattgagaattgtactgctagacctaattttttagaatcagagtggatttatgcaaggaagatatattgtctacaacattatggtatgcaaaaatctcgtgagacactatggaagagctaattctaagcctaattgcatgattaagctggacttaaaaaaggtatatgatacaatagaatgagagtttattgaagtactacaagattttacgtttgtaataatttgtataaagactcttaggtttgacctaatgatatattttgaagctaaaagagatttgcggcaagaagatccaatgtcctctcttctctttattcttggcatagagtacttattgagaatcatggtcagagttcgggtgagagaatatttcaagtatcatgagagatgca

SEQ ID NO: 42348 - DNA, 2433 bp, Cannabis sativa
acattccaaaatggacttctcaaaaactttttggataccattagttccagagttgatgagctttgcgaggtagccaatgagggaaaaacaaaggcaagaaggggcaagtctttgggagtggatcttagaagtcaacacctctcgctttgatccaggaggctacttaaaaggttctagccttagaggacttatccacctctgttatcgacctgatagcactagttttggattgtgtgcctttacaataggtacccgtggggcatgttgaagaggatagctcagattgcaatggcccaaccatggttcccaggaagtagtctagtactatagatggtggtgccaagaaaacgagggtagagaccaaggaaaatgtgcaatagttggttgttgtaaggagacaagttgtcgaatctcagtcctgaaagggatctgatgtctctaatggttgaaggccagtcaggaggagcactcaaacaactaagaaaaataatgatccacctccaccaccctaacactcaaaagcattcctaccattgccaaatagtttcctagagagaagacaactttgcctccatttccacctccatatttcaatcttccaatcaggcttacatctataccaaaggaagtgagagcgcacatggaggtcattgaacaatttcacttgaagaggcatggcagtgagtatgacgaatgaataaggttaccaacaacatttcctccaggcgcaatgctgagtttgttaattacgataagtgggatgagcctccaactgacatcatagatagagtagagatgacagagagactttgtcctagactaaggactgatgtggctccattcttatctgatataatggacaagagtgctacaactagttgtaaagttggggctaacaggctcacaatgatggcaagtggggaccccgcttacatggtggatactatgaggacccaagccaatgatgtaagttgacttttacgttagttatttcagacaaaagctatctttattttgtttgtctgattcatttacaattcttttcataggtgagcctgatggtggagacgagctgctcctttgtcaacaaactggcctatgaacttatgttgatgaagtctgaatgttccaatgctgaacaaaggagagaagaagccaccaaagctttagcggatgttaatgccaagatggattccatcattaaacaaagggtaaatgattctttaggtaaggctatttctcatgagaagaaggtgaccaaggttgagaaagaccatggggaaaagtacaaaatatactcaagctctctctcaaatcaatgacttagaggcgatgcaagctaatcttgatttcaaagagtcagaataaaagctcacccttctatctaaagaatacgacaagcaaactcaaatactagattacaagattgttattgaagccattttggatagaaatgtgaaattttcttttgaattgtggctaaaggcaaaggaagctgagaaaaaggctatcaaaacggccgaggaaattgtagctaagttgagctcttccaaaaaaaccctagcttaggcttgtgaagaatctaagaaaaagactcccaagatggagcaccaaatttaaaaaaatggctcaggagaagtcggaccaataggtcagacatcagaagcattaaagtaggcttttatgtattctctgtacacattctgaaaactcaaaaactcagtgatggattttttggatgatgaagatagagaataaccgatgccccatgttcttgaactagctaaagcagaataagccaaggagacattgagggtagtagaagtcgtcgatcttagaacttccaccctagagggtgagaacttggaagacctagctcttccagccattgaagctccttccgtgactaattctatgatcttgaaagtcatcactgatgtatagcctgataatgctcagcctccaaaggacacatccatgccttaatcaagtttatccaactcttacatattcggggataattttttatgcccttacagttggacttttaagcatatagtcatactttagacatttacaaactttcttaacagcaatgaccgctttagtaattgagattagtaaaggcaattagcacaaatttttgacatttttataattatttatgaatttaattatttgtggaccccaatattagaaatgggtattagagttataatttctcaatttcagagattttattaaattctaggggtattatttgccttatacgtgaaatttattatttttgtaatttttgctcggcaacaaccaaaaatgcgatagattgctagtttgatcacatgggtaagttttaaaccttatttcttagtgggaaatattttggagaaaataaaatactgagattacgccgggttatggtttttgaccatt

SEQ ID NO: 42349 - DNA, 596 bp, Cannabis sativa
aataaacaagacttttcgataatcaagacttgccaagtcttcttttagaaacataaattagtgtaaggagtgttatcttataagattctatcaacaattcataatatattttccacattcaaagaacagcaatcaacataatcatattatctactttttgagcaagtgtgctatgtcaggatcatccaagttcacatccaaccatccattcaactgcatgtactctatgtaatgatccggaggcctcactgcgcgcggctttgctggagtgaagccatgagtcctctcgagatcccgagtaagccacctgacgtaggcatggtctaatggaggaacaatcttcaagaaaatctcttcgggctcttgcttcgccggtttgtttcccgtgtttcccatgtgcttgcttccccaaaatccaagtgtaaactgttagtcagtgataaacaatcagcagaacttgcaagggcacacttttaacagggtacacaagtccataaagtcattgaattcaaattatgaagattttagttgaaaactttttgcaagcagaaagagcccatgaatgatattaagatccatattcagattggacatgt

SEQ ID NO: 42350 - DNA, 850 bp, Cannabis sativa
  modified_base (150)..(173): a, c, t, g, unknown or other
taataccgtgtattttttgttcatttacaatataagttgttgaatttactttcatgtttaagctagctgactaatgtaggggttcaatatttttgggtttttgtttgttactaatgtggtattggtgtatttatatatatatttatatannnnnnnnnnnnnnnnnnnnnnnntatatatatttatatatatagcaagcataatttttcctttaacttgggagattgagaaatattgtgggcatctcacaagttaaattcttccaagagattaaaatttgaagtgttccaattgagtaaaaatgcaaaaactatagtagaaattgtaaaccaaatctagattagcttgtggattgtgaaagaaataaatgattgaataaataagatacaacaaaaaagataaaggaaattaaagaagaagaaaaggttcaagcttttccttaacctttatttccatttttattttattgattaatgtaagaactacacttgagattaaagtaatatgtaatcattttgtatacatcatccaacaaatacaaataataatcaatttggttttcagttgccatttcttagtccaagcttgatcttaaaactcgaaaaaagactaagtttaacatgattccacccagctgcacccaggaattttgctgtccaaaacatttctcaatctcccagcatcattccaccgctcggccgaggcataaatgttggcgaggagagacgaatagcccgccttctcgggctgtaacttgaggcaattcctagctgcgatttccccgagctcaacattgttgtgtattctacacgcgagaagcaatgccccccaaaccccggcatgaggctgc

SEQ ID NO: 42351 - DNA, 3116 bp, Cannabis sativa
agttccaaaagccactggtcccagtagagcatctctctctcgatcttgattcccacaatccgcgctagctcacggtggtatgcgcgacgaagagaagggtggtccccatcatcatcgtgttcccgtggtggcctttgttttggtccttgacatataggagaggtgctcgctacactcacactatgaaaggtgagggagctactgagcttgagaggaagagagcaagagagatcaaagtgtgtccgagagcgagaggggagagtcaggtttgggtttctggggtttttgggtcttcattagtaggtgtcatcggcggctggagctcgttgctgagttgtctccgacgccacgacaaaagaaagagggagagagaggtcagatgggaatggagaaggaattagggttatgattttccattatgttaattttatgcccctttaattaattatttttttaattattattatttatttaattagaatgaacccaaggccttcggacttggcaaagatttctctaagtcctaactttgccataatttaggcaccataggactatcttgtctaaggcatgaccttcatagacagaataggcatccctcttcatgggactgtccctgggtaaggcatgaccttctcagataggataggcatcccttttatgggaccatccttggcaaaagcacgaccttcccagacaggatgtgcatccctctttgtgggaacattctcggttaatgcatggccttcccaaataggacgggcatccttcttcatggaaccatcaccagttaaggcatgaccttgctggataggatgaacaactctcttcgtgggaccatccccaatgaaggcatgactttccagaatggatgtgcatccttctctatgggatcatccccatctaaggtatgccctttttaaacaggatagacatccctctttatgagacattctcagataggatagaaattcctctaaatcctaaaggtcgccacgacttaatttggcacactaagaatgagcctaaggcctctaggcttggcaaaattttctctaagtcctaactcccccatgacttaggcaccaagggaccatctctatcgaaggcatgaccttctcgaacaggatgtgcatccctcttcatgggaccatcattagtgcaagcgtgaccttcccaaacaggatgagcattttttgtaggaccatccccaacgaaggcatggccttcccgaataggattagcatccctttttgtaggaccatccctggcagaggcatgaccttcccagaaaggatgggcatccctcttcatgggaccatccttggttaaggcatgacctttctagacaggataggcatccattttcatgggtctatccttggcaaaatcatgaccttctcaaagaagatacgcatcctgtttgtgggaccattcctgggtaaagcattatcttcccggagaggatggacatccctcttcatggaaccatcccccactaaggcatgaccttgatggacaggatgatcatccctctttgtgagatattcccaacaaaggcataaccttcccaaagaggattggcatccctctccatgggattttccccacctaaggcacgtccttcataaataggaaggacatccctcttcatgggaccatccttggggaagtcatgaccttctcagataggatggacatccttctaagtcctaatgctcgccacgacttaggcacactgagaatgagtctaaggcatctgggctttgtaaaattatctctaagtcctaattctgccatgacttaggcactaagggaccatccctggcgaaggcatgaccttcctggacacgatgggtatccctcttccttagaccatcatcgatgaaagcatgaccttcccgaacaggatgggcatccttcttcgtgggaccatccttggcgaaggcatgaacttcccgaataggattagcatccttttttgtgggaccatttgccaagcctagaggccttagggtcattctaattacataaataatagtaattaaaaaaattaattaattaaaggggtaaagaattaaaacattaatagaaccatccctgacaaaggcatgaccttcccaaacaggatgggcatctagaaatggcatgaccttcctagataggatgagcatccctctcaatgggaccatcctcgacgaaggcttgaccttcacagataggattgacatctctctaagtcctaaagcctgacatgacttaagcacactgagaatgagcctaaggctcccgagcttggaaaatttatctctaagtcttaactctgccatgacttaggcaccttaggaccatcctcagtgaagtcatgaccttcccaaataggataggcatccctcttcatggggttgtcctcagttaaggcatgatcttctcagacagaatatgcatccctcttcatgggaccatccttatagaaggcatgaccttcccagataggatgggtatcgctctttgtgggaccattcttggaaaaattctctgtaagtcataattgtgccatgacttaggtatcttgagaccatcctcggcaaagacatgaccttcttggataggatgggaatcccccttcatggaaccatgctccttagtgattacatgaccttctcggatgagatggttatccctcttcatgggaccatcgacgtgcatgacaatgagaatgagagcaatgccttcaggcttggtgcatagttatgacgcttcttctgcttaaggtattgcaaataaggtgtgcacctctcaagctttgtccaatcgattggcatgaggaaacacaacaatcatgagtccttggagtacaaaaggaatgtttcaagtcttcactgtccaaaggttgaatgaagacttctaggctaaatgttgtccctatttttgtcaataaggaaaagtgtcactccaggtgaagggccatgaaccattaggggcaacataagctgaagccctaataaggatccaagtgtagcggggatcgaactcgacaccataggctctcaaaagacaatcttcctcttggatggtcagtgtccttccgaaaacctattcccaaataacctaca

SEQ ID NO: 42352 - DNA, 4068 bp, Cannabis sativa
  modified_base (423)..(427): a, c, t, g, unknown or other
cagcgagcactacctataagtggtgtaatataaatagttagtgatattcataataattattaaattaatttatataggatccaataattaattataccaataacaaaatgacaccactaaataataatcctactaaattatatttaatatttattgtaaaattgatcccattttttatattaagttatcaataaaccccatagtcatatttaatattaaaagaacattttcgagattgatgaatggataatgacaactttcattttaaccattatcggctatagtaattaataattgagtatgactactcctactctaaaccccaaactttataatatacataataagcattcttattggatattaatacgtctgatatcttttataagttacgttttactattagttagtgatattttttannnnntattttcttaaattatataagatctgatacttaattacaccaataataatatgaaactgaaaaaatatgaggcaccaatagtaagactgtacataaattattgtaaactacccaacttgattaacccgcttaaaccaaatcgagataactcgacgaaaaatgcaaactaaaaaacccgacgaaaatataacttactcaatctttatatcgggcaggttgaaaataataccaacccgcccaattaacccaaactaactcgaccaatccgatgaaatgaactttttttatatatatatttatatctttttattatatacatttatataaattatatgatctttaaaaaaatataaagttcaaatcaatatatcatttttatagtagttgattcaaagtttgaattcaatttatatatttgtctcattattataattaatcaaaatataatcattgaatgtaaaaataaataaataaaaaataaaaatattagttgtaaatttagacgggttaattcgatcaaacccactaatttcattgagtgggttactaatttttttttgcgagttgcatttaaatttttataactcaatttttacattagactgaataaaatgtaacataaattaaccaaaccgactcatacgtatgacgtacggcccctaacaaataataacttttaacaattcacgtaacataattactaggttgaacacttttcatttttaactgaaaaacatccaaaaacaaaataattacattaataatttcgtttttaaataattaagataaaaagtcctgacaggtaaacaggtgaaagcaccgttaggttttgacattaggaaacatgtaatgttgtcctccacatgcccattttttttttatttatatatatataaaaacagaaaaaaacaaaaaaaaattaaaaaaatattcaaataattcataattaccaaaacacccccgggtcccatcctagccgttacaaccttttcgtttttttcttccaccgccttttgcccctttcgaatccacggccaagggcattttcgtaatttcattcaacaactcctcttcttcgtttcattgtcgtctctctctctctctctctctatactgtagcaaactcttttcacagcttcagcccttcataaaaatcgaacccatttccctctctcaactgtaaattttggttctttttcaattttcttttcttgggttttagttgaatttagggttggttcgtttttttttggggtggaagtcgatgatggcttcttcttcctctgatcctggtttaaagccggaatctagttccggtggcggtggtggaggagagacttcggaggctgtgattgcgaatgatcagcttttgttatacagaggattgaaaaaagcgaagaaagaaaggggttgtacggccaaagagagaatcagtaaaatgcctccgtgtgctgctggaaaaaggagctccatttaccgtggagttaccaggtatggagtgagaaagtgagagaatttggtctgtttggttactgagaaaatgattgaattgagttgggttttagcttgctctgtttagattataggttttatcagtgagagtatattgtgtaaagtttgaatttttattaatagtgaaaagcaagaactgtgtggagaattgtaattatgttgatttgatggtgtaattttattgggtatttaggcatagatggactggtcgttatgaagctcatctttgggataaaagtacttggaaccaaaaccagaataagaagggaaagcaaggttttcattctctattcctctctcaatgaacatgtttatattatatgacttgtaattttcattgatggttatgaaaaatcttacattaaactcttttttgcatggaatggttggtcctgttgattcaaacattccagtgtacttgggtatgttggtatcttcactttcattttagttcctttttccttttcaaattttctaattctatgataatatttcacattgacaatcattgaatagcttattatttacaggggcttatgatgatgaggaggctgctgctcgagcttatgatcttgctgccttaaaatattggggtcctggtactctaattaactttccagtaagatagacaattccataatctctcttgacctttttatgaaccctttgattccattctgcttttggacttgttgtgagtcaaactgtttgattctcagtggtattctttaagaaatgtaaacaaacttttgtaggtcacagattacgcgagggatctcgaagaaatgcaaaatgtttcgcgagaggaataccttgcatctcttcgaaggtgtatattttacgtttgcaattctattttttatagcctgaattttgtgctgtaactcaagcgaaatgatctttacagaaagagtagcggtttctcaagaggaatctctaaataccgtgcgctttcaaggtgtgttttcaatattgaatatccctcatttgtgttgtactctctcttattgtgctcagtaatgtgtttgatgctgttttggtacagtcgatgggaaccatcatttggtcgtatggccggatctgagtaccttagcagcatacattatggtaagtgatttttatctaattcatgtggtcctttagaactgaaaatagctcttcaccactctttattttccattgaattaagcattgtttcttctcatataaaggtccaggggatgatctagcaacagatagtgaatttgtaggtagtttatgctttgaaagaaagattgatttcacaaattatatcaagtggtggggtccaaacaaaaatcgtcaaggagaagctagtgttaaatcatctgaagatgctaaatttggttgtgttggagatcttggaggtgagcttaaaccgttagaatgggcagtcaagactacagaaccataccagatgcctcggttaggggtgtcacccgaaggaaaacagcataaaagttcaaaagtgtctgccttgagcatcttatcgcggtcaccagcatacaagagcttgcaagagaaagcatcgaaaaaagaagaaaccaatgcagaaaatgatgagaacaaaaacaaaaatactatgagtaaattggactatggcaaagcgattgagaagtctactaatcacgatggggcgagtgacagatatggcgctgaattaggaatgagcggaggattgtctctgcagagaaatataaatatgttcccgttgtctccccttttgaatgcgccactgctgaccaattacaacaccatcgatccattagtcgatcctataatttggacatcgcttgctcctgttcttccaggtggactttctcgtacatctgaggttagtatttctcgaaatcactatttaattttcttaacatgacagaatgaatacacatgattgataatcaagaacactattatgacaatatatgaaagtattaaggtaaactatacctttttaagtagtaacaattaatatgtttatacctttttggaccgtgtgatttataaaatcaactttgggaccctttgatttgtaaataaattatcaaatcctaacatcatgtgataaactaagaaattcaaatgaaagcaaggagggatttttatatttt

SEQ ID NO: 42353 - DNA, 2769 bp, Cannabis sativa
tccataggttctttttatttttaaatgtatatattaaacttgataggtttatgtattgtattgtcactatttttcatttgattccatagtcaattattattatataaagattattgcttgatgtttgatgcgaatgaaagttttgttctttaaatatgaaaattgtgcttctgtgtataagttttttagattctggctttctgctatgcttatttggagctaaatttcattctggtttgtgttctcaggagattgagaatgaaaaactaaagcttgagcacgttcagctttcagaggagaacagtggattgcgtgttcagaatcaaaagctagctgaagaagcttcttacgctaaggagttggcctctgctgctgcagttgagctgaagaatttggctggtgaagtgacaaagcaatcattgcagaatgcaaagctggaaaaagaattgttggcagcccgggaactagcaaattctagaagtgctgttttgcataacgttaatggtgctaaccggaagttcagtgatggaaatagacctgggaggaaagtgaggccttctggtcgtgccaatgattattctagcatggggggtgatgactttgagtcattgattcttgatgcagaggatatgaagttggaacttcaagcaagaaaacaacgagaggcggctcttgaagctgcccttactgaaaaggaatacatcgaggaagagtataggaaaaaggttgaagaggcaaagagaagagaggaagccttggaaaatgatttagcaaacatgtgggtgcttgtggcaaagttaaaaaaagaggctgcagccgtccatgatatgaatggcgatgagaggcagagtgatccttctgaaactattaatggcgggaaaacaaatgacttcgacagtgctactgtccctaaagagagagaaattgttgaagttactattaaaccagctgatgagattcccaaggaagaaccccttgtcgctcgcctcaaggtatcacttcttttcctcgatttcattccttgcataattttaaatccacaaggaaaatgcatttgttgatcaagaaactaaaaagttctcgaaaaagtgttaaggtatctcaaactcaagatgtatgttgttttcaggctcgaatgcaagagatgaaggaaaaggagctgaaacaaatggggaatggagatgccaattctcacatgtgtaaagtatgttttgaatccccgaccgctgcaattcttttgccgtgtcgccatttttgttgtaagcagtcatcatcattcctatgaatcctacatgcttgatttcacttttaacattaaattaaaactaatcatatttatcattttgttttgcagtatgtaaatcttgttcattagcttgttcagagtgtcctatctgtagaactaagatttcagataggcttttcgcttttccttcttaactgaggctgcagttacccccttccaactaaggttcttcttcttcttatgattattatattacaatatatagacatatattcataggaagactcttaggagcatcaatttttgtatatagaaaaattataaactaattttattttatatattatgcataaattcaaataataagttgtatttactatttaaattttatatttcactttgtaaattaacatttgtaattgttatacatataaccataataaaacaaaaattgcggcaaaaatatattgtcttacaattttattgcagtcgtactatttttgattgttaagtgtcagcttagagacacgaggtgacatactattagaatgcgtatcaaaatatatggtcacatgtttctgaattgacacttgatggtcaaaaaagagtacaactgcaataaaaatcgtaagatataaaaaatatttttgtttttttttattagggtcatatgtgtaacaatcttaaatgttaaaagagtttcaccgcaaatattataatttttcgaaaactggcgggatacatattatattatattgtcgaaaatagaaaacgctcacctaaaacacttcttatatctatgtatttttagttatttgaaataattttcttacatatatatatttatttttattttacagggaagaatgttatggtgtctcagatgttctaaaattttccgtgaaattgcggtgcaaattaaattcttttattagtttgcatgtatgtaattgtaaactgtctaaaaggtatatcattaatatttgtttttcttttccttaggggaggctgtaaaataagaaatttttaaagaaaagaaaagagaaaaaaaaaaggaattatcagatttaaacactatgcagaatgttgctttgttttttcaagatgcagcagaatgtgtgattggtcttgtatagaaacaaacaaatatattcgtaacaaaatttatatatatgtttttgttttcttttactacatatatatatttatttatttattttgaaacaaatgcattttaaaacttgtagtattaattagcattgattaactaccctatattcttttgaaaatacttaccaatgtaaaaaatttaaaattggttataaaagtatgtaagtgatgaatttggttgcatttaactaatggaaaaaaaattgacattaatttttttcatcaacaatatctacaaaagtaataaaaatataggggaagttttggctttattttttatttttatttttaacatactgagggcaacaaataaagttacaaaattagtctagccacaattatcccactgaact

SEQ ID NO: 42354 - DNA, 3425 bp, Cannabis sativa
gggtctcttgatatgttgagttttttcttggaaattgtgatagttctggatagagaaatggctattctattctctagagcttatcttgttcttgtctgtcataattttcttaataaaatcctgttcatcttgctttgttacatgagtacgtataaatcaatgttttgtttcctcatgaatttattattacctttattatttcaggggcgcccaaagggtgtgacacccaagttcagtctaaagcctcttgttccaaggctttctgagctcttgggctatgatgttaagatggcaaatgactctgttggtgaggaagttgagaagttgattgccgagactccagagggaggagttgtgcttcttgagaatgtgaggttctacaaggaagaagagaagaatgatcccgagttcgccaagaagctagcttctcttgcagatgtctatgtgaatgacgcattcggtactgcccacagggctcatgcttccaccgagggcgttgccaagtacttaaagccttctgttgctggattccttatgcagaaggtaataattgatttaactaacacttattaccaacagtttccagctgagtgttttacttatgtatgtaccattttacttggtggttttcaggaacttgattatcttgttggagctgtggccaatcctaagaggccatttgctgccattgttgggggttcaaaggtgtcatcaaagattggagtaatagaatccttgttgggcaaagtaaaccttctcttcttgggtggaggtatgatctttaccttttacaaagcccagggttatgcggttggatcatcactagtagaggaagacaagttggagctggctacttcacttatggaaaaggccaaggcgaaaggtgttacgattcttctcccaacagacgtggtcatcgctgacaagttctctccagatgctaacagcaaggttagtaatagtaagttgggcttggtacattagtggtcattttctatttccatagtaatatgctttctttgcagattgtgccagcatcgagcattcctgacggctggatgggattagacattggcccagactccatcaaaacattcagtgacgctcttgacaccactcaaactgttatctggaacggtcccatgggagtttttgagttcgaaaagtttgctgccggaactgaggtacaacaagaaaatcattattccattgaatttaaacattagtatttcttagtattgctttatataactgacctgagcatgttcaatgtatatccatccacaggccgtagccaagaagctagccgagctcagtggcaagggagtgacaactatcattggaggaggtgattcggttgcagcagtggagaaggttggacttgcagacaagatgagccacatctcaaccggaggcggtgccagtttagagcttcttgaagggaagccactccctggagttcttgcccttgacgaggcttagggggtttcttgtttgttgattccccaagttttcctgttttgcaaaattaatgccagttaaatggttggtttttcaaccagaggatgatcttaattatcctgtagagagccatatagccttttagatcagaataagtgcttttctttctcatggtgtgtttatttatatttttcatccatgaatgaaaacattgcttttttttggaggaatgtatctctttgggaaccatgttttgaactcaacaaacagatcgactccaattaattgatgaaagtatgtttatctttctgcaatggaaaattgcatatcatcattgttatcttttctgctcaaactaatatacaaaagaaactacaacatctaaaccaaacgacatgaaggaaggaaatgatactactcattgaaacaagttccattccatgcataaaaattcgaaaaagaacaaaattaaatgcattgcgatcgcgatgggactcgaacccacaatctcccgctccggaggcgagcgccttatccattaggccacgcgatctttgcttttgctttagtttagcaaatataatatttaaattaaatgttgtttagaaactagaatatattttcttttttgaaaaaaaaaaactagaatatatttagtttatgctttgtattactaatattccatcatttcttttttatcaaatgtattaattatggatttagagacagaattccattttcatgatcaacaactataccatttctttccattgtttctttaataaatatatttatgcatattacatgtgtattatttgtgataatatagatgaatctataatcaaataagcatagtaaattgcatttttaagaacattgctattcagcttcttttctttatttacaagtgatacgttatgattggtgagcgatttcctaaaaggtattctctgctagacaccaataataccttttagtatttctctatttctaaatccatgtagttttctactttttagtagtatttatgaaactatggaagtttttaattagtttattaatttaaaaagcaataaaaattagggctgttcataaagtatctaatttgatccaatttgcaaaatgcgaattttcgcacttgtgcagattagattggattaaaaaatttgaaatccgcacttatgcggattggatgttgtttaacctcataagctaaccgatcgaatccaatccgcacttaattatatatatatttttaaaaaattataaaatatataattttattatattatatatttttttgatagcatatatttattatattatattattctatagtaatataaaaaaaaaagacaaacctaatttctaaacctaaatataatccttccactttctcttctcctatacccagccgttctcttcactgaactcaaacctaaaccaaaattttcttctcttcatcactgtcaatctctgtcgccgttcaactcaccaccgaccaccgactagtctatctcttcagtcgacggtagactccactcgctgccctcgccgaccagtccagaacttcagtcgaggtctactccactccctgccctcgccgacctgagacaaagggttatcatttgaaagcagggcttgttattgaaggtattaacaaagtgctgtattcattcttccattgctttttaattgtaatgtttcaaaatgagatgtaattaaaaaatatatgtacctacgtcgaagaagagtttcttgaaataaataccatgtgtttgtttgattgcttgatcttatgcattccaatattttagtactaagatatatggatgatggataaagagacgttaatttcaatttcaaagtcgtcaatttcaatcttgggtttactcttgattttataataaatcagtttttatggcgcaagtagtagacaaatgttttggagtttagttgtttaa

SEQ ID NO: 42355 - DNA, 3656 bp, Cannabis sativa
agatgattagatggttatcactttttttttttttttttaattttagttggaataaatataaatttagatattatatttttgtaaatattactgattaaattatttgtttaaataaataataaattagacatgtaatttttaaaatagtactctgaactgtgtttgttaaaataaaacttcataataatttaatttagaggtgttatgataaaactgattatgtatactacatcttttcgtgttaggaattttcgtcaaattaattatattaagaaacaaattatcaaaaattgacttcagaatcttatttgtacaattttagaaaatatatggtcaattttattaattgacaaaacatagatacaatcaataacttttgttctaaaatagtatttaacctttagttactcttttcttttaaagaatataaattttcttttaaagtattctcttaacatttctcaaactaactagacatttagaattaaaatgacatacaccccttttacttattaaaacatctatatttttactaattaattataactaaaatttggataactacaagattaaccgaagcacaataaaaaaaaaaattaaacaaaactaaacaaccaaagtactaaatattaatataaaaaaataactaattagacaatttaatttatctaatttaatcaagtttcaatcacattaataaacccttattcaatgcaaaattttgcctaaatttagaataatacttacataaataaaaaactatagccacaaaattttgaccaaaaaaaaaaaacatcctaagacaatgctaagactcgcttgtctttctaaccacaaatgtcgtatttcccattctaggaaggaaccaaaatcgttaatctcttcaaattctctctctttttttttagtgtttaaagttttcaccatgaaaagtagtaactttctatttttttcttagcctctatttttcacagttgatataaagttaatttctttacattctttttttagaattggataatgatttttgcagagattaaagttgtaaagccgcgtttttatttaattaattaattaattttttatttttcaataaaggcaaaaaaaaaaaaactagagagaaagaaggttagctggtcagcactaacctccgatgtttcccagcaataccaatcctaaaataacaacaaaacaaacgaccccttcttctctctctctctccattttcttttgtaataaatattaatttttttattaatatttattttttcttctaataagtagctgtaaagatattccatttctttcttgattcatcgtcttattgttttttagatcaacacccttttcttcttcttcggttctttctctgttcatcactatcatcttccactttttttctgcaaattggtactaaccctctttcatattcatctaaagtagcttaaatttctcatctttatcaatctaatcttatgtttttacaagatttggccttaggttggtatttttgtgatataaagttgacttttttttttcttgtttagggatgttatagaaggtagatttatgttttttaatctcttgatgtagaaatattccaagatttgtgaaaacccatgtgactgatctgcttatttaggctttttaacatcattttctttgggatttgtttatgtattatgtatgttgttgaccatgaatctaatctgggttttgttgcagagtgtattaatggtaataactcattggatgagtaggaaaagacagtgaaaaaggtttgtttttttgtttcatgggcaatacatgccgtggatcttttagggggaaatactttcaggggagcgagcctgaggaccaatctgcttccatctccaaacgcaacactccttctaatcgttctgtttcagaccattcatcaacaagtttgaactcccaacaacaacaacaaacatctcaagaattagccaaagccaaagaaaacagtaataataacaacagtaactgtaacagtaacaatccagcttttgttacttccaacaagaaagatacaatcatgaggaaaggtcttgataaccaaacttactatgttttgggtcataaaactgctaatattcgtgacctttacactttgggtcgtaaattaggacaaggtcaatttgggactacttatttatgtactgagaattctactaagaatgagtatgcttgtaaatctatctccaagaggaaattgatttcaaaggaggatgttgaggatgttaggagagagattcagataatgcaccatttggctggtcacaagaatattgtcaccatcaaaggtgcttatgaggattctctttatgtccatattgttatggaactttgtgctggtggtgaattgtttgataggattattcaaaggggacattatagtgagaggaaggctgctgaattgactaagattattgttggggttgttgaggcatgccattctcttggagttatgcatagagatttgaagcctgaaaatttcttgttggttaataaggatgatgatttttctctcaaagctattgattttggtctttctgtattcttcaaaccaggtaaaaacataacaatacaacaatcatgttccattttgaattgtatgcctctcatttttcatgctgattttcaggtcaaattttcactgatgtggttggaagtccttactatgttgctcctgaggtactccttaagcactatggaccagaagcagatgtgtggactgcaggggtcatattgtacatattgttaagtggagtgccaccattttgggctggtatgatgatttggtttttgttattagcattgagagaagagtcttccatttttactaaatgtttcattcttttcgattcagaaacacagcagggcatttttgatgctgttttgaagggacagattgattttgactcagacccgtggcctgtcatatctgatagtgcaaaagatctaattaggaaaatgctgtgctctagaccttcagaacgcttgactgctcatgaagtattatgtaagttcgggttttatttgtttttcgaagttgattcatcgatggagactaatttttcctatagaatttagtgtaaaacttttctcctttgtataggtcacccttggatttgcgaaaatggagttgctcctgatagagcactcgatccagctgtcatgtctcggctcaaacagttctcagcaatgaataagttgaagaaaatggctttgagggtaagtgcacttacaagtttagatacaaacagatttacacatatatatatgttgtgagagatgaatgtgatactatgatctatgttgttttatgtattgacaggttatagctgagagcctttctgaggaggagattgctggtctgagagaaatgtttacagcaatggacactgataacagtggtgctatcacatttgatgaactgaaagctggactgcgtagatatggttccaccatgaaagatacagagatacgtgatcttatggaggcggtaagataagaaattgatgttttttgggttgacattgatatccatgttgtgttctctgtaatgacacaattagctgagctactatagttgttgacaggctgatgtagacaacagcgggactattgactat

SEQ ID NO: 42356 - DNA, 1311 bp, Cannabis sativa
gccacagtgagaattattctcacaatttcagtatctcttcattggcatgtaaagcaattaaatgtttctaatgcttttctaaatggtgaactacaagaaactgtctacatgagtcaacccgaaggatttgtggatccaaccaaacctattcatgtgtgtcaacttcacagggcactatatgggttaaagcaggctcctcgtgcatggaatcaaactcttcgagacaaactactggaatggggttttagtgcatcaaaatcggacacctccttgttcacctatggctcgggtaacaacactataattcttcttgtctatgtggatgaatttttagtgacaggtcctaatgtttccctcatctccaagttcatttctgatcccaacaagtccttctcactaaaggacttagggccggtccgttattttcttggtgtagaaatttatcgagatcacacaggcatgtatttgtcacagacgaagtatattactgatttactggttcgtctcaatatggaaggagttaaaccttgttctaacccaaccagttcatctattaaactctctcttactgatggggaaccatttggtgatcatacactttatagaagtacattgggtgccttacaataccttactcttacaagaccagatgtagcattcattattaataaactcagcagtttattcattctcccacaactctccattgggaagcttgcaagcggctgatgcgctatctcaaaggcaccatacatcatggtcttcatctcacacctgcttcctctctaactcttgaaggttactctgatgcggattgggcttcgtgtgttgatgatagacgaagcatagggggttatgtgatgttttttgggggtaatcttgtgtcatggtatgccaagaagcaacatgttgttgctaggtccagtagtgagagtgaattcagggccttagcaaatgttgctgctgaaatcaagtggttagtgtcacttctttctgagttacatattgcttctcctcattgtccaatactatgggttgacaatcaaagtgcagctgctattgctgcgaatcctgtattctatgcccgatcaaagcatattgacatagacttacactttgttagagatctcatcctctccaaacgaatatctattcggtatgttccagctatagaccaagttgcagatgccttaaccaagcctctgtccactgatcgatatctctatcttcggtccaaactcaagatggctgacactccttttcgtttgagggggatgttaaacaattaataattacataacagtttttctg

SEQ ID NO: 42357 - DNA, 1584 bp, Cannabis sativa
  modified_base (1532)..(1532): a, c, t, g, unknown or other
cttcatgcaaagggttatgattttggctgtaaacactagttagatattggcaagaacactcttgtgtaaaatactccatagccaaagagctcaataatattgacccatggactaaggcttgttaatgttccaaacacgtaaaatctttgtcttctttatatttaatcattttctataagcttaatctatttcttaactggatcttaaaaaattagttaatattttggtgctttcattgagagcttgaaggaagtcttcaccattggtgtcatctacaaccatggttacaaccagaactacgaccgaaaaaccatccgctcacaacaataatgataatgttgttgctgaaaattttaactggcctcctttgcagacgcttaggcggacatcatgggaggtagcaagacgtcaaaaatggccaactgtccacctcgaaaaggtcaacaataagagaagcatgttgatgaaacccccataaacaaagatgaccaagaaggccatgacgaggactaacgaggtgcttacaataaagattatgataaaatctaccaagaggagtgttgcgaggaacactcagagctgatacaattaagacagatagtcttagaccaacaaaggatgctgctagaaaaagaagaaaccacacgccagatgcaagaaaccctcttatagctacagagcttggcagtaaagggaaacctctgtgctgagaacccactagtggaaaagttcaatcatccatgggttggaccctccaatccagtaaatgataagaggaaaaccaaaatggcaaagccctaaagaagaaaacctccatctagactcgcacatgatgctcacagggacaacaagatcgtgtcgatccactcttctagagagaaagggttgaccaagccctaggattaggctgcccaaccgatctgcaaatgagggttttgcaggatgataggccccatactcagaaattggggctctgccattagaggaaggaaaaacctcccaaatgattctgataaacaaagcatcgacatggaagatttagacctcgaacatattattattcatgattatagtgttgtctacactgtgaaaaataatcattgattatatgctttaaattgtttagtcccacgatttattagtgcactagattcacggtgacatgataatcaatagtgtgatttacttacagttatataagtggaatgtcctttccagggtatcagcaaaatacactttattacacttggtcatgagttacttggtcctgtgtttgctgtcctgaattccacaaaatttcatttcgatttttccataatgatacactaatgcagctactacagcagtaagaacaactttacaaaacttgctaattttagctctttatagccatcttaacagcctgttaagtgctgtagcttcaacattccatcccagccaagatttcacgtgagatagaaaagaaaagagaaggggcaagcataatttgaaaaatttatttattttttgaaaaattcgtgtgcttggtgatnttacattcttgactaatttcaattttgtgatttaaaagaacatggaatcata

SEQ ID NO: 42358 - DNA, 6407 bp, Cannabis sativa
gttgtagaaatcatgttaaatttttaagtaaattgcagtataaaatacataatgtttcagattttatacacttaaatacttaatatattatttttaaaggcaaaaatacttaattttacaagtttttatacttgttactaccatttctgttaactcataaatatagacacatagagggtctaaatgcattacatttatttattttttttatattaaaatttaatatttttaatatcagaaactaaatgctatttgtttttctaagttctcataataatttagttttgcatatactgcactggttcactcagttatgttaatttagttttgcatctctcttatttatcattgggtatttttgcctccaaaaataaaaataaagtatttaaatgagaaatgctaaaggacacttgtggtgcctagcaccctcctatgtgtcagtatctctattagtccaactaagtattgagtctcatataatttaatataatagtttatagggagtatcgctaaccaatcgcaacgtgacatgtcgagaaggtgctaggcaccactggtaccttatagtaatgctctatgtataaaatatgaaacattaggtatttatgccgcaatttaccctaaattttttacagatatagtccttcgaatttaaaattttaagtttaggcctatcaaagtttattttattcaagtgggaatagaaattgtgttaaagtgttaaactgatggcaagcggcttctcgttacatcagtgactaataaaagttttgattttatttttgtttgtttcgtttaaattttacttgaaaatggtcaccactagagacagataaacgtacaatacccacaaaacaagaacacacctcaaatccgccggctaaagtttcttttggacagtttgtgtgcgtgtctatgtatccaaccttcacatataatatcgcatataatatacattatctcaaacatagttcattccgcgagctagctaagtaactaattataacaaaaaactgtgatcacattattaattattctctctgttgtgagatcaaaatatggaaatcctgagcagattcagtagtagtagtaatcaatcttcatcaaataagaagaaggtggttatgggtggtggtacagcagatcaatctcgacgtaataaagcccaaatagcagagcctgtaccggacctcactgatttcatgaacgatatgttttttggtaccataaaaactactactagtgctgatcataatcatcataacattgtttataacttgacgggtactactactactactactgataccgttattgtaacggatcaggaaaaggaaaaagaagaaaacaaattggtaagaagaagggaagagtttagctcaaggagtagtagtagtagtagtagtaagttgacacaggattggcttgacgaggctaggcgcttggtggcttcttctccttctcgcagtacctctccctctcgccttgttggctccccgaggttcgcagctgcggcggctcaaggatcgccggcctcggcctcgtctcttgatagaagagatccactctctaggtctgctagaaggtatgtaacattaacatctactattattcatttattttctaagtttgctacaaggtatgcaatttactaccactttttttcatcatgcaattcaactttttttttctttaatcagcaaattaaatctcatgtgttgctcatccatcacttttacttaattaacatattgtaatagactaataatcatttgttatgttttataaataaaaataatgctaaagaatggcaataatcattatattaagtgtaacaatacattttctacccaaaactataaagttgaagtattctcctggaaaaacaataatctcattaaattctcaatggaatgaaagactgcaaatattgctatatagatttggagcattttgaagaaaaatgtataaattggttttggtgagaacaacagatacagagcagtggagagtttcagcggagaaatcttgtccaagtcagccacacacagtcgcaacaaatcagaaacctttgcagccggcgtctccccggcaccggactcccctactgaagcaccccgtctttcctcttcctataactggttctccgacattctcaatccaacccccacaccgcaacaaagcttcgaacctcaacctcgagtccccattctcacttctcgcccatctctgccccgaaaatcccgattccagacagacccctcttcgccacgcccacagggtatcccgattcctccggcccggaactttcagactggtccggcacttttgaccgagacccatttgctctctccgcccaaaaaccttattgagtcggctcaaaggaggtctgtgtcttcgtcgacgtgctccatcgacaagatttcttttaagcgtagctcaaatgggttgccctctgaatccggggaagcttgggagtttgggctcaatgggttcctcaaggaacagaggattaagcttggaaaagtcttggaaggtgatgataatgctaaggccaaaatcatactttctgggacttcgaacagttgagtaactttcatatgaatgaagtgaatgaattttcgttttttattctattgatggaagtttttgttaagtttcttagtttgatgaaaaatgcaggtacgagttcaatggtggcggccatatgttatgcgtggttattggagaacagagtgagaaaggaaagtaaggccaaaggtgctgatgaagatgaatatgttacggttccggttatgaatgtaaagagggagacaatgtggaagcttagacaagctgcttggcttttctaccacgttggtcttgatgttaacgcgttgttctttgccaatgaggtactgattccttgtcaatgatattcttatgcttcatgttttcgtagcatgattaagttttttcaactcttcacttgaaagtgattgttgatagagtgtttcatgcttagtatgctttgagatggactgtcaagagattagaaaaattcgaattattttgactttgtttttcaaagggaccagttgtcatataactttaggtataaagtggcagtatgacgtgttagaagtttacaaaacaccaaaatactaaattgcatataatttagaacactgtgattaattgaataatatagaagacataatttagaacactacatgtaattgaataatataaaagacatacctgattttgatccattgatataattgagaaatagtggagattggtagtgcaatactaataagtctcctttcctaagtctttaaagatcaataaaaacatacaactgtaatataaagttagggaagagatctaacaacaaaattttagttggactgggcctcctcatgacttcagttaactagaaaagttcacacttctatttcaactagactttgataagccaattaactataaatcactaactaactatataggctgaaacggaaaaacattatttattaacccataaaacatgggaaacatttatgtaagcccaaaataaaagtggtacaacatggttacaagtgactttgagctaaaataagtttatgtgttagtgaagaaagtgcctgccttttgtcttgttttgacattgtcaatagaatagtatcaactgtgaatagcttattaactatgtaagttgtcactgtaacttaaaacaggtggatttggaaggactaataatgactgggaagttaaatatgctcgtgattggacaagatgtccttaaacttaacggcgaggtttgtattttaatacatgttcataatatgtggttgattttgaggtttagataaagggagattttggaaatacactggcaatgaaactcatttaagttcattggtttttataggtaggatctcagtgcactattcttactgataatttctgtgaagatgcctatgatctacttcagacccccatgctgaagaaacttctggtaaattttgtttatttttcagaatcactaaaccaagaatatatgttgcaattacaggatattaaggtcctctttctggattggaattctcactcatttattgcagcttgcagctatcctgttagacactcagaacctaaactcatccagtcaacattctatggcaagagatgcagaggcagttcaattgctgttagttggctcaaccccaaattacagaaacactctttttgatcaatgtaagtgatcttgtcgatctctgaacattttaagattatacatgctgacataattgtaaatctccaagtttttttggttatttctttcagtgatccaaggtcaaagagacaactcctttttagaagctttgcggcagaattatgggaatccatctaaagacagtaagctatcactgttatttctttttattaaaaaaaaaaaccttttatgcagtttgcaataactgctacaaatttcagttaaaatcaagtcattagtcttgaaactttgcacagtttgacaatataaatttcaacgatgtaacttcattgcattatgactttattctattcaagatataaaagattatgaaaatgagttatatgtgtatgtatatagacgtatagtcatttctaaatatttgttttaggatctaatagtttgttgttcaaggttacttgtgttttttctcttctaaattttcaatttaattcttatgctagttctctttgttgtctagcaaggttgaagccctgtcaatatggttttaattttaaagttctaacttgaccttaacttgttcattttatggttcttgaacatttatagtgtgattattcagcatacttgtttgcttttctttcaattcaaggttacatatttggagttccttaaaagcttaaacattcattatgatatgtttcatgttttatctgctcctgactgtatgatcacttggattgttctctcatttataggagtgtcatatttttagttctagtttccattgaaagtaagcatcaattgtcttgacataattatttttatggtttgtctcttttggtcttacttttataggtggtcatgagagtgaggagcatgtggggcataagattgtggatagaaaatcactgtctgttaatcgccatgaagcaatggcacaacattcagaacagaaaaataatgcaaaacctaacaaggtttctcaaaaatcaggtcagagcatgttctcttgcctcctaagctatttttctcacacgttaacatttctagagacaaacgaaatgttttttttccctaatcttaacaagaagttcatgtgtcaagcttgcattatacaaccaagttttcttccaacttccagcatgtgatcatttttaccctaatagcctctgacatcattttcccttgtagaaaaaccaagttcagcacatgccaaaggttcttcaacgccgccaactaaagcaaaccccgacgcgtctcgtggaaagaacaagttcttccttgcaaagtggtttggttttggttcaaaatgaagtaaaaaatcaattttctcaccgctaacaattacttctattctacagagaaaacaagagttttgttctattttcttatcaccaagtcaaagataggttcaaccaaacaaatggggtttccatttcacattactacagatttttttttacctataaaagtggtgatgtcagtgtaagaaagtaaagcccaaattttcttttgagttgttgatatattttttttttctttgttatgtcatattttattgtttctcattgtgattctgacttgggtatttgatatataatataatttattacttgtacttgtcaaagaaattgttgattgaaatttttgcatggcatgttcacatctagaaatagatgggtgctaacataacatgtcttattaaatattaaataaccattgggtagttttcagaagaggacatttcatagctctcacaacacaagctcacaaggtgtgaaaatgtcacaactttatccttattcaattgtctttttggcttttctcatactatgaatatgatgagacggttcaagtggcaacactcgcttggcgggtttctttccaattgctcaattctatccccaatttaagcatagagagacaaaattttcccttaacataatacatcacccaactaggaatgacacaaaatggtatggcttcttattatgaagaatgataactctattattacacatgtaatatatgatcctacctctatatataattatatataaatatatatatatttaagaagtgtttcacatatatatatatatattttcgagatatagaaaattattgtacattttatccaaaattatgaataatttaaaatgtgaaaatatgatttaaagaa

SEQ ID NO: 42359 - DNA, 1320 bp, Cannabis sativa
tcatcaagaaatgaaatcaatcttgatgccatcaatcttaactttgcccaaaccactcttgggaaccaaagtaactatgaccttatcatcatcatcagctccgatatcctccaaaagctcagatatccccaaattcagctccgtcttgatgttatgaccaccttcagggttatgtggcactgtagcgaaactgccagcgaactcagaattctcaggaccgctaatagcttcgtcatcctcgtcgttaatctaaacgtcaaacttgacggcaacgttattagcaaagtcaatcccttgaatcaccaacacttcttcttcatcctctttctcgaacttgctcctcgatttctttggtctcgccaccaccgtcttcaccgtcttgtccaacgttatcgggaactggctaagtggaattatattaacgtcatcagcacgtgcaattccatgctttctcaacattttaacgatctttgacttagtagctttaggcttaaacttaagccagtcaataggaacatcttcgtaaacgtaacctagttttctactgtcaagtgagtctccgaccttaacgcgaaccaactgagcattctcgtcgtagaagacgaaggtggagttgagataatctgggtcggatatatcgactcttttggatcccggaagagttttccagatattccacattcggtcaacgttagcatggtgactgtaaaagacgggatctcgtccagcagagtagaagtgtcccatgtcttctccattagcccgtctgttagaatctccggtccatacatggaccggactgtgtggaacgttctcgatggaacctgctccaggacttgggggactaccagttcgataagggttgccgaaaaatagcgtaccgattttgcaatggaccatctggcggtacatggtataatgattagaggctatctgttctgggtctggtagtgggggcttagaggggtgcccatcgtcagtttctgcgtagttaaggtcgattatggttggaggcaagtgagtttggtttcggttctcatcgtaaagagaagaggtagggtcatcgaatatggttggaatggtgtagccagaagggtcgtcccagttccagaatggtaaagagaaagtgggatcgcctataagctttcccaagatcttctcgtgaaagtataaataccaacggtggaatggaaagaagagccatgagttgtggacttgaatgtactgatcgttcggagatttgacttgatcataagcgccattacaataagcacagtgaactttggcttgttgaatgaaatttctcgggtcgtccttagg

SEQ ID NO: 42360 - DNA, 2580 bp, Cannabis sativa
  modified_base (1973)..(1980): a, c, t, g, unknown or other
  modified_base (2496)..(2496): a, c, t, g, unknown or other
tacctttcataattattaattaatttcatacataaaccttaattatttaataatttaaagcattaaccatatgcggtctttacattgatgaagacttgtccactgagaaaaggccaaattatatacatacctgttagaggaaccaaaagttcatggagctcatgatcacacaacaagagattggggtatcacccgcacatagttacccacatataacatgtataagaacattttgacatttacatatacatatggataaaatatgtgtgcataattcatgtgcgggtaagatttaagtatttagtggtatattttccctccatctttttcttttgaatataaaatttctgggaacgttgatgtggtaaaaaagtattatttacccacacatgcatgtatatatatggccacatatggccggaagcacttgagattgccaaaaacaaaatagtttctccgacctgacctcaacggaggaagaaacatactggtagtcatcacaattgagctggtagaactttgataccaagtttattaaagaaaaagattaagagtaaagaggaattgcagagaagtactgtttcttgtaattctcattactctgaataatgaatgcaatagaagtatttatacacaaagctaaagactaacacaatcaagaaaaggatcaactgaatcacaattacagctcaggcaaagctaacaaccaaaacagaataggacactgactaaatgatcacgagtaaattaatcataccatgagttttgattctcttgaaatatatgtgtatggtgatgagtaactttctctatgactctggcatgagaatatagagagccaaacggagccaataaatgctcaccgattgatatcctcaaatcgttgaaatttgatgttatcgactttaaaaggcagtcggcaagtcatttttggctcatgttcactctctattctcttcatgcaagaacgaagaaattgatccatactgaaattcttattatcaccctcatatatatttctcttattcacataatatatcacctgatctatacatatatatatatatatagagcctcgagagttgacaaatgggatttataatatttgattttcaatagcaatgatgttgacataaataagttattttatattccctcaatttcctttttctttttaaacaaaattatttgtctcgtccaatgcatggaggacaccttattatttattatgtttatcatttcattcaagcttttaaaaaatattaagatatatatctattctatataaaatgttatacaactaaatttttagtgtaatggagtttttttattttttttttacatcaacttaaataaaatatccaattacttaacaaaatattttttataacttttataatattattatatatatatttaaaattaaaattatgtatatattttatataaaaaatttaatttaattatatatattttaaaataaaattaaacctatatataattgtatataaaatatatatatttaaaccttaattttacaacaacattttgttttcaaaataattaatgatgtatatatatgtttcggataatattttattataacaacactttaactacaaattaagaatattgtatctatcactattattattttttttaaatatatgtttagacataatatataaaatgtattttgaaagtaattaatactctaaccaaactcaaattttgtcaaaatattttatacaatacttatatataaagagatcaatataaaatatatatgcataaaatatgtaaattatgtataataataaaatttattctttaattgtatatatataaaatacgtatatataatcacatttaatgagcacacatgtagctgcaatagcaaaaacaaaaatcttaaatatcaaaatctcaaatcctattttaaaaattgaaaaataaaaatacattacctaatnnnnnnnnttaaacatacatgtattgcacttaacatcacttaattaaacttaattaaaaagaaaactagttctacgtgcattgcattgcatgtaacatcaacctagtatatatatgtttgaataatggtattaattttttttaggcatgttgtttagttttatatccaattttaatgttatttatttatttttattataattatttattaaaaatactatcattcttctctaacttctctcttcttctcccactttgtctaaagttcttaaaaattactaataaaattgaacaaaaattgtaaccaaaattaaacattttgatttttttttaacagatatataatggttgagactcaaaatttttctaatagcaaagttaaagaacaatgcaaaagttgtttttggtatatatgatctgagaggggagagatgtctaaaagctttttttctattattttttgactttgctattagagaggttttgagtcaacctctgttatttaaggtggcgtttggtaacacntttttaatcagttttctgttttttaaagtgaaaaagtaaaaaatatttttaaaaaacatgtttctataaaactgtttttacttt

SEQ ID NO: 42361 - DNA, 657 bp, Cannabis sativa
aaataatagtattaggtgtaccaatataaacgtgccaagcagcccatagtgacagttaaccgaatgacaccttaaatttgctagtagttcagtagtttggagggttctgccgtcaaaatttgagcttgaagagttgaatataagtaaaacgatagttaagaaaattttactgcaaaaaactcaaaaaagtatattagttgatcatttttaaagggtgttttatagaagtatctaaaactatacatttgtgttcttttaaaaatgtttctttctaaattggagaacaattttggcgggcccactaaaatttctctatctgatttcttttctgttcaagttttcattcatctttcctatcaaatactctacttttcttgctttctacttttcgaataaaaatcatctcttaaaaattaatattttatattgtgttaaatcaatctaaatttagcacatcaactaattttttatttattaaaaaattaaactcttaattgagtcaacaaaaacaattaacatatttaatataaattaaattaattaatatgttaaatttaggactaattagtaatttttttccttgaattttgacatgtactaaatcgtgttccttgaactttttttaccgttaaaaatttctcctgaactattgagatt

SEQ ID NO: 42362 - DNA, 672 bp, Cannabis sativa
catttgattttaaggttcaaaatattcaattttgtttaattagtatcttttctcaaagttttttttttttatactctcaatttttttaaaattcaaaatttttattttgattattatggatagtgtttgaattgtatttgttggagatactcaaaattttattttaattttttcaagtatgaaaggcttgaatctggggagaaatggttcttaagggaaatttattttgctaaggattgtttatttttgtacgagtttcttggaatgttttctatgaaaatggagctcaaaattcaatcgaaagtgtttcgggcatgaaaatactactacaaaataggaaatttatgtcggtcataaaatcatttttttagcaccagttcaaaaaaaaaattaagtaactgttttaaaccgatgactatagtttagaatttttgtcaattataaacactcgcaaggaattcctatcgattttgaagggtcgtgtaaataatggtgaagagactaatttacttgtttattccattgagaaaataacttatatttatacacaacttaggcaatctattagaaacctaagagaataaaagaaactaattatcctaatttctagctaatatatacatatctaacacttctcttcaagttggggcatatatgttgatcatgccaagc

SEQ ID NO: 42363 - DNA, 659 bp, Cannabis sativa
actctaatccagacagtacgcaaaggatctacgccaatgggtgagtaccttcgacaaaagaaaaactggtctgacatacttgctcttgcaggtgacccgtaccctgaagcgcatttggttgctaacgttctgtctggacttgacgctgagtatctctctatcgtggttcaaatcgaaggaaggtcaagcacatcatggcaagagcttcaagatattctcttgagctttgatagcaaaattgagaggttacaaactctcaccatcaatggcaaaaccagcaattccacaactcctcaggcaaatgttgctgctaaaaacaaccctggatccagttccatgggtcgagggcgtggtgctaacaatcaaagtagtcacaatcaattttctggaagtggaggtcgattctctgggaatcgtggcagctttggcaggtttcgaggaagaggccgtgccaatacaactcgaccaacttgccaagtttgtggcaaatatggccattctgcagcaatttgctacaatcagttcgatgaaaacttcatgggaactgaccctaatcaatcaaatggaggaaacaaatcatcacagaacaaccacaatgcttttgttgcaagtcctgaagttttggagagcgatgtttggtttgctgacagtggagccag

SEQ ID NO: 42364 - DNA, 1402 bp, Cannabis sativa
  modified_base (26)..(31): a, c, t, g, unknown or other
ataaaatgatttctgatctttattannnnnnaaatctgattatattgaaaagggttttatttagggcacaaaacccaacaggtcatccaacaatgcaaaaattcttacaaagtgccgcaaggggcaacaattctctcggcctaatgaccatttttctagattaaaagaaacataaaatgataaccaagtctacactgttagagacttggacggttcttcttcttctttttcctcggcctctgcagcctcgtgcttcttgatttgctcaaaataagccagcatcttcgcgactccttctcccaaaaagcttaaatccatgttaggatcggctaaccagacataataatagaacgattagctatttaattaactctagctatagcattctcttcggccccgtcaagtttcgtgttggcctcatcaagtttttggttcgcttcattaagattttgctttgcctcattgagttcttcattgatttttttatgagcttcacagagatccttagcctcttttttagcaccatcaagctcggacttgtggcttttcttctgttcctcagcttcctttagtcaacaagtgacttcgccgcgagagtcagtccattgccacgcaacaacctcacgtttctcagcagttgttcgaagctcggactgaagttgtttaattctttgaaggcctctttcatgagctagctgagaaaagagagatgcctacaagataaaaataatttaggaagaaggtattaaaggaaaagaaaagaagttttgaataaacaaaatgaagattaatgcttaccgagaaagagagatttaaactcctctgacataagctctcaaaatccccattcttgacaaaatcccaatcatcttgctggtaagattggaagtgatgccagcaagaagtggcaagttgcaaacaggcctgcgagcccataatgccgacatgattcgacaaagggcaggtaggcttcaagataaccatctcgggttgagaacccgagaatttaacttggtgaatagatcctaggacatgttcatctttgttcgcaaataccgagattggagagggtatttggggattttcaggctcaatgactatttgtttcgaggagcatttcctatttgttgtagtctttttagccctcttcaatggttcagggtttgttcccgaggaagtttccaaaccaaggacgcatttcttacccttcttggaacttggagggcttgtgaaaagattttgaaaattcatatttgtgaggcaaaaagaaaatatgtcagcacttatccaagataaacaaaaagaaggtggggaatgaactcccacttaaagaaatttaccataattatcatatgagaatgaagaaaaactatggtaattactaaattccctagaaccagta

SEQ ID NO: 42365 - DNA, 529 bp, Cannabis sativa
  modified_base (201)..(206): a, c, t, g, unknown or other
cttcctctccaagctagcttactcttagctgttctgaaaaagcttgtggaaattgattttggaaagagagaagtaaaaaattttgggtttgtggcttggtttttctttggttagagagaaaagaaggagaagagatgatgagggtttttttttgtttctattgttttcatatttattaacatatatatatgggtgcactcnnnnnnggtattacccatgaatgagtaatattagaaaaattttagtttttatgattaatatttctgtttaattagaaatatttctcatttttacattatatgggctgagattggttcatcaattgaaaaaaaaataataagaaaaaagtttttcggtaaaaaagtgataaaaaaagttgactttgacttaaatatttttcattataaacatatttttgatatagtgtaaaaagaggtatctttttgatattttctttaatttagtaactaaattaagcatagaaattcaaatttctcttttattattcgttatcagaccaaaatttaat

SEQ ID NO: 42366 - DNA, 5830 bp, Cannabis sativa
cttacgttctatacagtaatacaatataacttacacataagatggcatgtagttgttccaaatcatcggaattggaaatattatagctgatcttgttgatagagtcatcaacattctcccctcctgcgtcttctacatactaatgatttgaagttcatcaaccattaaaattaataaatgcataataagggtattacaagttgtttaaactattcttttcaattatttctcttcattaaatattattacttcctacatttaattaagacagtttatttacaaccttgaaattgatatacatgaattactatttgttttgtttaaagaaaaaaggggtacctttaacttgaatgtttctttagcgaatgaccacagtccctataaagaatatgaatctgatcaacaagtggttaattcgacatgatttgcagtaattaaaataaatgaaaggatgatgtactaaacaacatacaaaaattatgtataggacattatgagagcccaatacagtataactacagtgactaaaaaatattttagaacctaataataagttaataataataataaaaaaaaaaatatctatttcatagagataatgtgatataataaattagctagatttatgtttttcttttaacactgaaagtcacttgcaatatctataaacaagagatttaggtaaggaagttatactatactggtatgttttgagtacattgttatattccatccatgctacaattggtttgaacgacgatttcctgcttgaagatacattagtcaagcataagtaattttgtttaatctgcaaaagagtaaatcatgtgtgagtacatataataaattgaaattattttccataattaatgtttttacatctattttttatgatgtgtaagaaatctgccaaaatcttattacattttataatttatgcatggcttttcatgttgtcatatgtcaaatatggggaatcacttattgataatcttctttgatctctagctttattgtttttacttgtataatataaatcataaaacaaatatttacctagaaaaatttattattggatattattctctcaaatactattttttttctgaaccaaaaaacttcattacaccaaaattattttttacaaactaaagagactttacaattagcctcaaagtactttctatacaaataattttgcaaaataaacaatatttttcatttttttacaatgtctcaaaccacactgactctgccttggttatcttcttagattgaacacaagttattctatattttgtcaccaccttaactctgtgtacaagctgctctaccaattgtattagagaaaaggaatcgcacgacgtatattctcgtctataaataggagactccattatttaaaaaatatatggattcttgatcataccataccagtcgaaactctgccagatttccaaattactctcgagcttgtgactgccaatcgaaggaaagaagagaacgacaattcatttaggaggaattgtgtaattttgtagagttgtaatctttgattagatcaatcctggtgtattgaattgtaattggaaatacaaatttgttgttgagctaattttcaatgtcaacagctggcgttgtctgtggaaataatttgaacaaaaagttgaggactaggctacaatctagaatgggatctaagaaagcgtcgcaaaatgtgtagaaaattgtagtttcaaatgaaggagatatgtcaatctagatcattattcttatcgctgcagtggcagtagaaataaaagaaataaactaaagaatgactatgcaggacaaacttaaggaggaactacgacgtctcacggaagagaagctttgataagaacatcacattgttgaagaaagacattaagatgaacaagacaaaaatcattagcatcattaagatgccacttagtgtttgcagaagtttatgcaagaaacggcataggcgtacaaagatgaacaacactcaaacatcacaagacattggggaaacaagatatatagatccatttgtgggaatcatttgaacaaaaagttgaggactaggctacagtctagaatgggatctatgaaagtgttggagaatgcgcagaaaactgtagtttttaatgaaagagatatgtcaagatggatcactattcttatcgttactctggtagtggaaatgaaagagataaaccaaagaatgactatgcagaataaacataacaagcaagtacgacgtctcatagaagagaagttttgacaagaacatccccttgttgaagaaagacatcaacatgaccaagacgaaaattattgtcatcatcaagacgccacttagtgtatgcagaagtttatgcaagaaatggcaaatgcatgcaaagatgaataaaactcaaacatcacaagacgctgaggaaacaagatatacagatcctctgagaagcgaggaaaggttttaagagcaactgcagtagccaaaatctcctataatatgggagaagaaaggagaaaccaaccaaaaacatttgaaaatagaaaaaaaaaaatctgctcgaggagaaaaggataaccactacaaaaaatggaaaatctacgtccttacaaatatccaaaaatattgttggcgcaaagcgaacactttaaaaacaatttcaccaaatgtatggtaataaaaaaaaaaggaggtagagtgtgatctcaagaaacaaagaataacaaagaagtttccattaattacaatccaatctcgatattctgaacttgggcgatctaaagatgacaattgttataatgaaaataaaagataatgaaggaagtcatggataaaattggagaaggcgagctaaacaacccaaatagagcgacactggaaacttagcaaaatctccattcacaagatgaatcgtagaagattcgaagcttaaagacttcaaaatgctaacctttgcattattcgatagagtatgcgatccattagaacatgtgcttcaatttgaacacaaaattgcattcgagacaaataatccagcaatcaagtacaaggccttctccacaactttatggttcaaataatagaaggattgattgattaattcattcaatgaacttgtgtagcacttcactacacaatttgaaagaaatgccaaaagcaaaaaataaaggaagaacctctaccatatagaatagaaggaaggggaacatccccaccagtccttacaaaggttcatgacataatgtaccaagtgagcgaggtaactccaaaagacgcgacaagctatttcaccaagaacttgttgttcgctgttaagcgaacaactcatactttcaaagctaaaaacaattacagaagtaatagagagaggtgaaggagtctttgagctaatggaaaagcgagatgaagaacaaaaaagaacaaaaaaatggggaaagctagaaaataagaagagacaaaaagaaaggagagttgctctgatctcaagttttcctgaaggtcatcctcctccatgaacaagggaaaaacgctatagaagctctaacatgaggccagaatataatcaaaggggatatgttgagaagaggtgaagaattgagccagattttaatgtcaagctcaatgcaacacatactcagatctttcgtaaaaatcaagacaaaccaatatagaaagagccttacaggattgttgtgccaattgagagaatggttagacaaaacattttgccttccataatgatgtaggctatcacacaaatgattcaaggtcactaatcaaatagatacaatcaataatcaaggcaggaggtctccaacaatattaaaaaaagagtcagggaagatgagttgaagaaccttatactgaagaaaaaactgaagggcaaataaggcaaataacgtgggaagagcatgcgtcatcttaagcgaaagcgacagtattgatgcagatccccatgattctagggaatacggagccaaccattcaccacgaaaatatcactcgacaagagaagtgaattgtagaaagagtaaagaggatctaagctcagcagtacaaggtcaactacattcttcctgaagagaatattttccaactctgccaatcacttttatagaaaatcacctttgaggagtgaagttatcgcatgatgatgatttggtgatccaactacaaatttcagattatattttagacaaaatcttaatagatggaaggatcaacatagatatactattctataaggcacttatcaatatggggatagatgagacattgccagtactctccattaagaataactaggtctaccccatgggagcaattaaactcaatgtaagagtcgtagggagaacttttagagtggatttcattgtgattaaagaggtatctagatataatgcaatcatggtgagaggattgctacacaggatgcaaggggtggcctctatgttgcatcagatcttcaatgtccatcgtctaatggagtgcacataaacatcaagggatgtcaaaaactagccaaaagttgatgcatgctgatgaggaatgtcaatggagtgatatgggaaattgcggctaaagagaataaatagcaaacaaagggcctcttacaaccatatctaaggcacctagagggggaataagaaaggataaataacaaacaaatggacccttacaaccatatctaaggcacctggaagggggaagaagaatggagtgcaagagatatcacagaggatgagctggaagaaatcccacttgatttgtcaatatcatgaaaatagtgctagtgagggtgttaatcctaaaaattagcaaggctagtccttgagattacccgaccattaacctgaagactagcagagacaccttaaaagaggtaccccacatgtgtgatctcggatggccacatatgtgtcccgacatgccctgagaaaagttactcagccttggcatgaggaaggccactcagaaatggcatgaggaaagtcactcggccatggcttaaggaaggtgactcgaccacggcatagggaaggtcacttggtcttggcttgaggaaggtcacttggccatggcttaaggaaggtcactcagccttggcttgaggatggtcactcgaccatgatttgaataaggtcacttggccatggcatgaaaaaggccacttggtcttggcttgagaaaggttactcgaccatggcatggggaaagtcactcaatcaagtgttgagaaaagtcactcgaccaagcatagaggaaagtcactctaccaagtgttgaggaaagtcactcagccaagtgttgaggaaagtcactcgaccatggcatgaggaaagtcactcggctaagtgttgaggaaagtcactcgggcaagcattgaggaaagtcaatcggccaaacattgaagaaagtcactaggctaaacattgaagaaagttaagcatgcatgttacacggcatgcccaaccatgcatgtcactcggcatggtcaagcatgcaagtcactcgacatgctaatgcatgtcactcggcatgctcacgcatgcatgtcactaaagcatgcaagtcactcggcatgctcaagcatgcttgtcactcaccatgctcaagcatgcatgtcactcgacatgctcaagcatgtgagtcactcggcatgctcaagcatgcaagtcacatggcgtgctcaagcatctaagtcactcggcatgctcaagcattaatgtcactcggtcaaggtagcatgtaagccactcgaccaagatttgcatgcacattaattaatcaagcatgcaagtcactcggcgt

SEQ ID NO: 42367 - DNA, 1069 bp, Cannabis sativa
tttttaattgtatcacttttaaataacatagaaaaaaactaacataaaatttagtatacgtgcctcgcacgtagctttttgctagtatatatatataaatgagtgtatatagtagaacatatatataatattatatagaagagatgaagaatagtgaaagaccaataaaaatagatgaagaagaacccaaagtgattgaaggatgattactaaacgaacaaggttttaacacatttgtccaaaaagtttatttactaaattgtaccgtgagatcttaaaatcacaaaaactacactccaaaaatgtagtgcggtactgtacggtttgagcggtttacactatcatcgttatcaaatattataatgaaaatttaaaaatcaatctaataaatttttaacaatacaacaaaaattattaaaattttaatatcataacatatatactaatcatcaattcattatattgaattgtttctaaaaaattaagtaatttacacatatattacatacatttattcttatatagaaaaagactaaaattaaaaaaaatttaactttgtaatatatagtgtgatatgaaccacaattattaaatttaaaaccgtaactataccgcattgcatgatctggcaaaaatgcaaactataacttcatcgcgtagaatttcaaactatattttttatgcaatgtggtgcagtgcgaacgattgttggatagatttgatgaacacccctacttattcgaggtatctctatttttcatagttgggcctagggtttataataaaattgggcctgaaaagttgacctactggaccaagtcaaaacttctctaattttctgttaatcggtcgttaatgaataatgactaatcctcaaatgaaaacacacgacaaaacacaacaacccaacacacttaaattcgaaaaggaataatctagttaatgattaatgattatttgtaaaagggttacaactttaatcggtaaacatgaataaaggaaaggcctttagcttcttggactctcaaaacaagagcccaaaacccaagaccctgtctttcgctttcga

SEQ ID NO: 42368 - DNA, 1067 bp, Cannabis sativa
ataaagaagactttctcattttcaaacacaaatctctcattaaaattaatattatatatttaattcttgttcctctctctctcataatatgacaaaattaaaaagacatgcaaatatatttacaactaacctaactaaatgaattaacccattataagtataactagcaatggactaaccatatatataatagaacatataaacaatacaaaccagtcataatcagttccacattagtctcctcttgttaaactaattttcaattttttcaattctgttagtctattcttatgtatttcatttacttattttgttagctagtcttactgctatttcttaggcattagttaacaagagttttactcataaagattcttatatttgcctatataaagactacatatcaatgagaaaatcgaatcactttttcaaatcttatatatattacgttaaattttttaggatttagagaaaaaaaaaaaaagaaacatatattatctcaaatccagagcacagcctgcactagaccttgtcacttgtttacaaataacaaatgctaattagtgattcgatcattttaattagcgaaacataattagccaataataatccatgcgtattgggaaagaaaaacaatcaagaatgtaagttttacacagtatgtatgaaggaattttaggtctttctacaactaacaggtttcttttcaaaatttatatcaataactgaattaactgatatatagtacataaactgaaagcgatcattcagttgataatcaatttgttgttctggaaccacacatgataaactgtcgtttatacaaatgatctttctttaataccacaaaaacaataaccataggcacctggctttcctatttattttgaaggaccgcataatattaatatgaacaaatgtcaattatctaggaccatcattgcctcacccacccatgcatactattctgctcatcaaagtcttaagcatccaccatgtttctagtccttatataatgcatgtaaacatattttgactagaccgatcatgttcctcctcactagtta

SEQ ID NO: 42369 - DNA, 520 bp, Cannabis sativa
cctgacgaccacctctgtttccctaaaactttctattacttcacggtgctccagaagcttcagccttttgtttgtgatctgggttaccactgtcggtccccttgttgacattaccacccatagtagggtttgatgtcatgagagaatcctttgcaacttgctctttaactacatgctactctgcctctttaataattaagaataacttgacaactttttttcataaggtatcgtgatcggtggtaattttcaagtcccgactgatagtggcattcattcccatcacatacttttgttttcgagtgaaatctgttggtaccaagtcaccaacaaacttagatagccaattgaataccagggtatactcggccatagtcttcttcccttgagtcaacttcacaaaatcttccatatgtgaagttcttacggtaatgttgtaaaatttttcctcaaatagactcttaaactcttcccaagacatggtattaacgtctcaagtctgacccacaatatcccacca

SEQ ID NO: 42370 - DNA, 641 bp, Cannabis sativa
aatatcaagatctatgagaaagaaaaagaaccattcgaatgggaagaaaagaaaaaattgaaagaatctagtcttacttctacgttgatcgcgacagtgacattcgcagcaagatttacataagcgacgaggctggacaccgagaacaaggcactgcttttctcaggaataacgcgacatttcaagccttcatgataacgaacacaatagccttctctgctacatctgtctttgtcaacattttatttaatgtattattttggaaaaaaggattttatgaagacctcaagactaagtaggtactatggcatatgtatgattttaacaatggcagccatatgggatttatgatgatagcattgtcaccggtacatatgcagtgttgtcactttcaattcctcttgctataaccacttgtttgattggattgtctttctttttaattatcattttcacaatgatcaaagtgtgatcatgaaagtaatatttgtgtaaattaataatagcttcatatataacttcttgttttataatatcatgaataaattttagggtgtttttataatgcaactcatcaacatgggtattttagtgcaactcctaactgttttggtatttaaaagaattttttagtttaattt

SEQ ID NO: 42371 - DNA, 544 bp, Cannabis sativa
gcacatgatcaggcccatgccatttcgaacttagcaagaagcttcttggatggctacaaccttccaacatcagcccactctcctcttgcccgttcaagcaggtcctcagctcctacatcatggtctcctcctgatcctggtcgcctcaagctaaatctggatgcagcaattcctaatgacagatcgaaggctgggtttggtggtattatcagaaatagtgaaggcctcgtcgtagctgctctgacttgtgtattgaagaacatttccatgtccatgagttagaaacagactgcaaagctatcacagatgcggtgaacttccccaaagacgacatctcgatttttggcgatcttataaggcaaatcaaggaagctttgtctcaactccctgctgcccaaatatctcatgttaatcgttccgctaatacatttgcagacaggctggctcaatgggcttcggggttagatgaagctgctatttggattggcgacgacccttgcaatcttagtgattttctttttctctagcgggctccctttcccta

SEQ ID NO: 42372 - DNA, 778 bp, Cannabis sativa
atatatatatttgaacttatcactttggatacatgttacacatggtgtgagaactacacatttgttttcccttaagtcactatagcccactagtacattgttcccttggagcttttcattttcaaaatatccacttttgcaatatggataaaagttggtcactacaatcataatggcaattgtgtcgatagaagcaaatatttattgattgaacattactattaggcactattagggttcgtttggtacgccgtataaaagttgtataacactatgtttagataaaacaatgtattgtattaattattacgaccaaattttttaatacaatgtatgttgtattatttaatacataataaatggtctgtattagcttgtattataatatttacaaaggatttggggtcaacaccaatctccgacccggacccagacctggaacccggacccgggacccgaacccggacccaaaccgggacccggactcggacccggacctgggactgggacacccggacccggacccggaccaggatctggactcggacccgaactcggacccggacccaaacttgggacccagacccagacccagacccggacctggacttggaccgggactcgggaccgagacccggacccggacctcaacccggactcaaccccaacccagacccgtagttagtattggaattgagtgtataaaaatatattataacttcacacaatcaattaatacaagtcaataccaaatattgtattatattaaataatacta

SEQ ID NO: 42373 - DNA, 1333 bp, Cannabis sativa
cgattctatggttgtttcagatacacctgcgttagataatcctgaattgatgcttgctgctcgctctcttgctgatgctataccttcccttgacttgggtcagtcaactactgagaatgttgtccttgagatggatgcccctcgacctgatcctttggtcaaagctaagggcttagcctgtgcctctggcgttaaaaggcctatgtttcattctcatcgagccaatgttggaggttccctccgttcaatgttaaagcgtgctagttctagtgatagggattctgagttttcgtctacagctgctgatcttgaacaagcgggtgttgcagagcacacccgcccagaaaaatgaatcttttaagttggaatgctcgaggactggggaatcctcgagcattcattcagctttcccttttggttaaaaagtgtagacctgttctttttttgatggaaactaggctcaagccccattctgtagatcggtttaagacttctttaggttttgattttggtatagaagtccctagattgcctttggtgggggtcttatgttactttggaaagttgatattaatgtacatattttaaactattctcttaattatattaattgtaatatctctgttaatagtaatgaaatttggcattttacctaggagttgcttcataaagtcttttataatgcccccaagcctcccttgagttattatgggtgactttaatagttatctttttagtagtgataagagtggtggtagagtccatattaattctaatatgtcttcttttgttgagtttttaagtaaatttgctttagttcctttcccttatgttggaaaaaagtatacttggactaataataatgctagtgagaggttggattgggttattgtgtcttgagacctggtgtgaccttttccttaataatacccttcagcacttaagtttttatggctatgatcatagagcccttaagcttattcttaataatagttctgttaggcctatgaattttgttaataagagtttcaggtttgagagtaattggttagaggatcccgacttttataggattgttgaggatgcttgggtaaattctgttaatgatagttacagtagcaattttcagcattacattcacaagtagaggcaatgtgtcaatcatcttaaatcttggaataaaaagcataactatatgtttaaatctagaatttcccagcttactaatgaaattgatagtcttcagaataagctttctcttaaccataatgattttcttaggcttgcccatcttaagtctgctttagatgctatgcttttcaaagaggaagtc

SEQ ID NO: 42374 - DNA, 1645 bp, Cannabis sativa
ataaaaattattaaaatgaagtatactaataaattattgagtgcaaataaaacccctaaaaaattgaagtaataatatcattaatgtttgtgcaaataattattaactaggaaatgcatttataattaatatgatgcaatgccaacatcatggcactataaaataaggaagaaaaggctaagaagaaaagatgtgtatagctttggttaattaattaattaattaattaatattaaaaataaattataaaaaatatatgaaggaaagaaaaatgacacacaaaaccaaaagatgtagtagtatagtcaatagtgtgatgtgtttaattaagtactcttaatttgaaaacgttgactaataaactgattaattacgagaattaattaattaattaattaattaaggtatatactaagatgcttttaaggtccttacattatatatagtggtccaattccttaatattccttgacccattcgatctcttcattttcagatattaatccaacataaacaggtcagtaatactaattagtattaatcattaaaattcctctctacctcttattcattaatatatattctctaattattcaatatttattagttgaagcaatgtcttgttaattattacgttcatatagataatccactcatggtctcattttaatcacgtggatatatattaattccttttatatatattatataattctttttttttatatatatatatatatatatattttccgctgaaataattgttcatggagttacatgaatgattgtaattcattttagtttgcaaataaattaattaacaattaatataatatatatacatgttatgtctaattaattacgtaccttctgttttagcaaaaaataactaaaaataataataattaaaaaaacagttcattatacgtttccttctttgccttgaaaattagtgtaaattacaagattagatgagttcctataattttattattcaatacaacttttttcttacctaattaatgcaatcaacgtttgatgatgagataactatcatgatatgaagtcatttatttaattggctgcaaataatttattttctacgacatcatcatcaaaagttgttttatttatatattaattaaactgaattaatgaatttgtatttgcatggataagataagagtaataacaaaagttattagttgttttggtcaaattttttcatatattaaatttatagtattatacgtacgcatggttaaaattaataagacaagagtgaacatgcatgttataataatattttaatttcattattatatatttatatatataaataaacataaagctttctttcgcctgcaatatattctatttagcaggtaaaaacaagcagtagattgaatatttttgtgctattaatgaatgaatgaatgaattatatatttatactaaaaattaaaaagtaatgtatagctatagaaaaatgatgaatatccttcctcaataatattagatatatatcctataaaatatttatgaaagatagtttatatatatagagctgatgatttgttaattctttattaatttaatacattttttgtaatttcatcaaaattttgaatgagtgaatagccac

SEQ ID NO: 42375 - DNA, 828 bp, Cannabis sativa
  modified_base (218)..(228): a, c, t, g, unknown or other
aggttaaagacaagaaatttaagtctggagacattgtgttacgatgagtattcctgaagatgaaacatgcagttgcagaactactcaaactttcttgggaagggtcatacgtcatcattgaagcactataatctaaaaaatacaagttagcacgctatgaatacaacttcaatctagtgcatggtactggaacggggtgcatctacgatggtactacnnnnnnnnnnnttgtcttcaaaatagctcgcttcataatgagatacactttgccatgtgcaagtgaatagattacttcttgaaccaacaagatggaacgaaatcatctttaggtcaagaagtatattatcaagttatggcccctacactactagttgaacattatattaatgtagtaggaatcaactgagctaattcttgatgaaaaacataaatatgcaacaagtatttctttttctttagttgaacatgaggccttttatccaacttttaatacttgacaagataaaaagtggggtaaaaatatattgaagtgttttatcccacttttactcttgtcgcatgaaatatgtagctagttttttttggaacgatgtccatatttggttctgaataataaaaaaaaatcaaactaaaaaaattagttaaaaatagcttaaccaacccaacatgtcccttgttggccttttatcatggtttggaccaagggccatatttggctagtcacagaataatgtgtttttgaagcctttgtaaaacttaaagtgttttactgaaaaccgggcttcatataaaagaaacccttctaaccccaagccccttcctcatttt

SEQ ID NO: 42376 - DNA, 1240 bp, Cannabis sativa
gaaaatacgttccaaaaaatttaatttattgttaacgagttgaaaaaatttgactcactctaaaagaagatttttaaagatagaatagataatgccaatttaattaatcaagttgctagaaatatgacaaaataagcagtgactttactacagacagggcacatatatatggacttcttagttataagaattgtattataattaaatcatgcaatgcaaggtggtcgcctcggctgcttttatgttttttttttctttcttttattgggttcgaatcaaatcactacttcacattttaaacatggaatctttaatcaaatgcaaaattattaattgtaacatgaagatgtaatataataacaatattgctgtttagaataatattataataattcctttcactttttacgaaaaaaaaaataacaataataataacataaacgacatcgtttttgttgctgccaattaattaaatggtcgatactagagttaattgggaggagatattattgatggcagaattgcattactgacgttccaaacattatggtatggtcttctctctgttcaactaaattggctattatgaatgaattataatccattttgatggtaaaagctaggcagcctagcagctgcaccactagctagctccttcaaatactataatctttattgcttaattaatattatatggggtcgggtgaggtgagcaaggcctaaagtataaatttataatataatataatttatgatcatttggaactttagttatactatcaaacaaaaaataaatgttaaggatgtgatatcgttattagtataatttaatatcgagtttatttattttaatttaataaaaaaatgtaaaaaaattcgctaatcaattatagagaattgttaaaaggcattcgtgatgtctagtaccctcatcagtgtcatactgttattagagtaattaagttttgggttttaaaaaaaataacttttggaaaatatcgttaaccaatcgtgaagcgccacctaaaaaaagtattggacaccactaatgcctaatagcaatactctcacttataaaatgttcatgttggtgctaactgcaaaagcaccttgctgtaccttgaaagccaattttttttaggcttatgagtaatttttcccctgaactttgacatgtagtaaatcgtgctccctgaactttttttgccgttaaaaattcccctgaactattgagattgtt

SEQ ID NO: 42377 - DNA, 1141 bp, Cannabis sativa
ttggggggcaacagtggcaggggggttgggggcacaatggcagatgtggagggctctggtgtttctttgggtgcggatggtggaataatatttgcacttttaacataatcccccacccgttttgtttgggtctggaatgcggtcgaatcatgcgcccggcttgtgtttcttcgaccttatccaagcccatttccactgtggggacctcaccctcacaattggtcttccaatagtcaacctcccaattctgaggatacaaattttgaagaacaaccatctgaaaaaaaaaaccaaaaaaatatttaacaacatatagaaaatcgcattaaaatcgcatagaagtcacataacatcgcagaaaataacagattagcaaataaaataggtaaaatcgcacaaacctcgcatgaaacttgcataaagttgcacaaaataaccacttaatatcgtacaaagatcgcataaacgtcgctcaatatcgcataaaataacagaatagcaaaaacaagaaaaatcgcacaaaactacttagcatcgcacaaaatgtcgcacgaatattgcataagatcgcaaaacaacacaggcaagcaaacaaaaaacatgtaaacattgcattaaaatcgcataaaatcgtagaaaataacagtttatcaaaataaataccaaaacaacaaagaaagtaagattgacataccttctcaaatagtgcagccacatcaggttgcttcacattatgtttcgtaacggagttgggggtactccaattaaacattcgagggaatctagtccctctggactacccgtacttcttccccaaatcttgcatcacctcaaaggcccagtattgtagcgccgatgcatatccataggcattgtacttcgcctctggttgtgtaattttttctccttcttccctttcttctttgtcttatccttagtggagaccttatcaatgtagttcttccttaggtcagtcatactttcagctgtggatgacaacaacttctgataagaaaggaggccccacagatactcgaagaacttttccacgttttctactaacttcaacatatctgtccatatataaacaccctcagcccttgataatagcacaccttcaacaaatgcacacagccccagc

SEQ ID NO: 42378 - DNA, 577 bp, Cannabis sativa
atattatatatcctctattctagtttggcttctctaattcacacttagctagctagggaaattgcagtggagtggaagaataaaaatctacatagatctttagggatttttctaagaagtttcttagttttatagtaaacgtaagaggaattgaagtcaatccaaaaacataaaggtttcgctagatatgctctttcctaagaagccaaaagaagttcgattcttaactgaaaaaataacagcattaaataaatttatctcgaaatgaacagataagtatttgtcattctttaatatattgtgagataaaaaacgatttgagtggacagaagaatgcaagaagatatttcagaaaataaaagaacatttgtccactccatcagtacctctttcatggtaaatttacgagtatctctttctcatcatatattttattttatttttacaataaacatatgtcatttaaataaataataaacattttaaataaaagatatattcctgcatgtcattctttatcacaatcacaatttgtgaatttgatactataataaatttattaaatagggaagaaaga

SEQ ID NO: 42379 - DNA, 989 bp, Cannabis sativa
atttattagtcatggttacgtaaaaaataaattagtcatggttaatattttaattcacaaaagtaaattaaaatttctaatattttgttggatcgtatcttctattccttatttatatttatttttttataatttttagataatgaaaattaattcttttataattcagttcaaaaataatgaaaaccaactattttattactaaaagcaaaaaaatttatttgcttaacccaacacaagcctgacacgcacatcaagtcaagcacattccaattttcccaaagtagaaagcttctattataagcatcttaagtctttagatcactcatcaaattgtatactttaaaatcacttgtcacgactacatcgcgaggtaggcatacttgttagcaatagccagagttcagcactgtttcttttactgttgtaaccgtttgctatgccacttgtttttgctattttcttttctctgtttcttgttttcctctgtaacaaactctgcctctccttctataaatggtatcaggaagcttttgacccacgtcgaccatggatcctcgccaccctgaacccgctaccccgatgtagctgattcaccagctcatcaatggaatccattccagaattctttgaattcctcgctcactgttcaactcgatcgaaccaactttcttgcgtgaaaatcgcaagtcattcctaccgtcatcagtcacggcctcgatgatattctacttgctagagttgctcctgttcccactcttgttaatggcaacatcaacccaaaatttaccacatagaaaagaaaagatcaattgttactcagctggctccgatcttccatgtctgaaacgattcttggatcgttagctcaatacaactcctcgtatgatgcttggcgtgctctggaacagagatttgccaatcaatccaaggcaagattacttcgaataaagtcccaactctccataattcagaaaggtaatctctct

SEQ ID NO: 42380 - DNA, 3720 bp, Cannabis sativa
  modified_base (44)..(66): a, c, t, g, unknown or other
ttttgccacggaccttttaatcacaatataagaataataatttnnnnnnnnnnnnnnnnnnnnnnnttttagtcacaagttttgttatgactacaaatttgtgactacaagtaattaagattttttgtagtgtaattttattattgcacctaatatattgtcttcactagtgaaatatgcagatatgatcttatatcaagattttatccgattatttaacacaaattatatactattattatatgaccaataaacatattctctcttaaattttaaatggttgttgctttgatgacacaaatattatattatatttagtataaaaaattcaaaatttataattgtatttcaatacatatatatatataaatttacataaaagaatacatataaatataaatcctatcataattgatgttaattaaaaatatattatataataaatttttacatttacatttaatgccaatatattaaataataaataatctcgtttttagaaattttctttttttgagagtttcgaaaaaaacaatcatttagttgcttttgatatgaataagatatcaattaattacttttctattaaaatttcaaaattttacacatttataaataataaaataattattttgatatgtgagaaaaatatattattccgtctctaaaaaaaaagacgactaatattaaaagaattttttatatatatttttagacaatattatgttattttattgtttaagatacgaaattattattatttttttttaaatgtaactcatgatgtttaaggtactctttaatttatttactaattattttataaacttattaaaatggtttataaaaataagtttatttttatttaatcttgtagtgtttatatttaaaaataaaaaaaaaataataatttattaagttgttcgatatattaaattttattaaaatttaaatactgtttatttatttattaatatataaataaaatatttaataaaaaaaaagtaaatatttaacaagtttatcaaatttactatatatataattgagtcacgtcaaaataaaggtaattaccaaaaaaaaaaaaaggtgtacgcaatatctaaagagccactagtatatgagtacaattcttcccacttatcaaaataataatatttaaaagtagattataatggtacaattctttagcacaaaactttgttaatgtagtgaaaacatgttttaaaaaatatatcaacattgcttcataaaataactagataacatacaattagtaactttaattacttatgaaataataaaatatttttttataactaatgaaattgattagtgtttttattttgtttaagcttaatttttttttattaattaaattaaaagaaattaaaaaattacttttgattcatgaattatcttttttttaatgccagtgaaaatatatatactttccacatattaaaataattacaataatcctaatggtaaaacacttgagagcaaataattaataatgtagttgatcattgaaaaagatttttaaaactataggaaaaaagagagactatatttgatgtgtcccatcatttttttcacaaaaacaaacaataaaacaagagattatttcaaaaaaaaaatgtcttactattataaaagtgacataattgtgtaatatttttagactattttaccctctattgaaaataatattttcaaatttttcattttttttttctttccctattttatattggctattttcttttaaaataaaattatattctttttttttttttttccttcaatcattattggtaaaaaaaaaattataaatttatcccaccccattatctattatagtataacagtgtattatgagtaatctatgttgataaagttttacattatttttaatgacaatagtgttataatcaatataacctattcacctttttctttttatttaattttttatttaaggataccttcattttacttagtctttttttttttttatttaagcgtttatatattacaatacataatttagaactcaaattcagtacctccaacacgctcacactcttctatggtcacttgtactaacctcaattgtgctaacctcaagtggttaccattctacctagctttataaagctaatttcttcctaagtaaattttttgtctattttaattactatttttaatttttaatttttttttatgaaagaaaagatatttcaataatcaaacaaatttttacatgaaaaatacaaattgatattttatttacaaaaatacctccataaggcggggcaacaattttgtttttaatgagcttttatttaacaaaattccacttacacacgctgcatgcatgtcaactcaaattccatcaatttttcgtttttttttttattatttctcttttattttcagtttcgaatttatacttcagtttctctttccatttcattttcagttttacatttaaaaactacattcttcccccacgatcaaaacccaccacgaaatatatacacgatcaaaattcacttccagccataaccatctccaacttcttcatctaactgtcaatattctcattcgatttttttatatcttttatttcatctatataatggcgatcacccatttctctgcttctccatctccattgccaaaaaaaaaaaaaagcttccaaaatgcttaaatgagttgctaacaaatcaaaaaagaaacgttgaagatgataactctgattttgctcccctcatggctaaaggtgattgtccaccagtgaagaagaagtcgaaagtttatttgcctgaaaaaaattccaactgtcagaagggaaagaaggaaccagatgactttcctaaggtctgtttgtagtttcgttttagtttttctcaagctctgaaattttatttatttttgtttttggttggttttattgttctaattttactttagggtttagtttttgttgttatttttcatgtttttgttacttttattttatgggtttttatatatgtaaatatttccatacatgtaattaatttgtattttgagtagtttgttgtaattttggatttatggtgttatgtatgttaattgttcacatttcatattttttgttgttatttagttttgttttttatttttttttttatttttatgttcgtcattggtactaggcctaatttctaacaaattttatggtttgatactgagtggtttatttatagtttcgtagtagttgtattcctattgttgtttggatatatttttgcatttccctgttatcattacaatttttttgtttgttttcaggaatgggaatgcaaattccctatttttgatcattacgagtcgaaagttgcgtctacttgtaatgataaagtgattaggaagctcaatgagaatcttttcccaaatatgaaggtgtcccgttctacacagtttggtaaatttttagacactctgtcatttaaattttaccctcaaactgtacaaggaattctgttgagagaggtccaacactcaaatgccaaggaattttggataaatatttgtggtcggtgtgtgcaatttagtgtagaggaggtcacactcattacgggtatggattgtaagggagatgttgttgaaattccgtattttaatgttcccagtttaattatttaattaagtgattaattaaatgcggaa

SEQ ID NO: 42381 - DNA, 630 bp, Cannabis sativa
tactttcgttgagagttgtaggaagcttttactactccttctattttccttggtggatatcacgccatggctatcacttcgaataatcaaaggcccttgttgtgtcctgaccctctaggacatgtggaaaaagacattgcctcctaagtcaaccttgaagaagatgtcagggatgacgtagacggccaggactatgggctcaaaagttacccataaggctacaaagaagaagattacaaaaacatagagctcatatccctgcggtggtgagccatgtaacacaaagctgagttggctaaacagtgagaagccaacatgagaatgcaagaggccttagaggcaataaagaaagttttagcgatggaaggcttgaacatagactcagtatccattttagtgatacgtaataatccttctagagttggtccctcgtgacctcaagaaaagaaaaaggatgatgcgcgaaaccatagggcaccaagtcccattaggtatcctgctgaaaaagcctcacaataccagggtatgctctgaccacctgcaagggtataggctccacagatggagtaggacggtggggaacaccgcaacatgcttgtcaaccaggggaggaggaacagccagcgcagc

SEQ ID NO: 42382 - DNA, 1849 bp, Cannabis sativa
aaaagccactagcagggttagtagacatgaagttgacaatagacggtggaacacagtagttagtattttttagccatccagaagaaggttggtgaaaactagaaccttacccttgatgttttgtcataacaaaggtatgggggagttggggattcttcacaagcctttaagtagttgaagtatccattgttgtagctatagcccattctactacagaaaaagtaaatatcggggaggttttcatgcttcagagtgagccaaactaccttgttgatactttgaaattcaatggggattccttgaagaataggttgtgagacattgaacatgatttgaattctaaagtatggacaccatgtttccctaaagaaaagtttgtccacttccagcataggccctagtcttaaggcaatcaaagcagcaagttcctcactacgtttgagaaagggtgtgttgtgaacttgcacccatagaggaatagagtgcaaattgtcaccattgaggacatcaagagaaatggagataccgatgagaatggcattattttggtaaatccacgactactggatcataatttttcttctatctccatcgcatccaaacgccacaagaagaaggtttgggggcctcttagtaatgacaactagaaaatggcaaagtttgttccaatcctttgccattgtctctctgaagtgtttcttgctataagatttgatcgagtggagttttgcaataatgaagatgttaggagcagggaggtttggattagtttgagaggaggagccttgaaaagagttgactgtgctctttgtatctgtaagattgagagaaatagaaaggaaactagctaagtcatccatatttggtaagattgaaagaaaagacagactagagttaggcaaattttgagagtgacagtagaaggcaagaagagtaatctcagcaataccaaaaacagtacgcaagtcatttatacccataatagctgacgaagcattaaaaggagagtatgtttgttgggcttctcttctagtataattaataaaactaaaacacaaatccaataccatcacacacaagatcccctaacatactaactaaactgggcgtgtaaagagagattaaattgggatctttaatgttcacacttagaaatcacagtataatccataggaaaatctccttgaagaacaacaaatttactacaaatgtggtctagaatagatgtaatcatgccaaaaattgaaaaaatttgttgagagctcacattagggtggaaaaagggctagagatgatcatacctctgatggattcactaaggcatgatgggaagatgggtggttgagtcataactccattgtcagaccttcaaaatcttggtctgttgagattctaggtatggaaaagacaggttgcaccgccaccggagttgggaagattggagcgggaaaagggttctaccatgtgaacacgatttgagctgaaaaaaaagatagtgccttagagttttgtatagtaaataggaactcggagaaaatatttgattctctttataatttatattattttcttactatataaaaatgtaaaatgtgccattacctctcgaaactagtatatatatgagtactaattattaatcttaaaaaaaaaaagtattaagataaaaaaatacgaattttttttttttgaatgatatacatttttattttttgtaagggaatgatatacttaattatatatataaacattcctttttgtaaataaatattcatttttttttgtacttatcattaacaaagaacaaaagcaaaacataaccgacttttgccatatacgaatttcacgc

SEQ ID NO: 42383 - DNA, 1086 bp, Cannabis sativa
taaaatatatcattattattattaaggcaaaacattcccacaaaaaaaaaaaaaaaaacctcttgagagagaaagaaataaggtagagcgataaaatgtggttttttacacgctaacttgtttgtcctctcacaacttttcgttatttcagatctcaaattcttctgtaacgaagcctgggtgggtctaacttcaaaccttttcattcgccttcatctaatcattctctattgcccattttctgggaaacaaggattttttttttttcctttctataattgtttgatttcatgtatgaatagaatatagagcttgcgatctaagctttttaagagctaaatgggttcccgaaaacgaaccccatcatcgtcttcttccctcggaactgacatgtctacatcaggtaagctgttcaaaattttgtatatattactcctttgcccccaagcttttgatttgatttgatttgatttgaatctgtattgcttccttaatcgttttttgtttcagtttcgttgttaaataaaattcgtctcaattttttctgtttggtctctgaaattttgaatcttttcttgttttaatcaattttttttttttttttttggaattgggtataaacgaaaatatcatattatagctggttgaagagtgaagtagacctttattgatgtaaacggtcttacccaagctgttgagttaccaaagaaatatggagatcattaggaagccttggttaacgtttttgcctattacgatatacacacacatatatatgtattttgaaaaagtgtagatatgctgatcaaatttcacttttattacttacgtttgaacattcctttttattgtactgtgtgtttttcttatttgtgttatatgtggtacatcataaatggaacactgtctaatgattattatttatatagaaaacaatgtggtacatttgaggaatatttagtgtttttttttgggttataaatgtgaatcatagaacgctgtacagttgaatcctaaagttctctcgtaaagttttcttcttggaaatttagaagtaaaatttatcccggatggtcaatgaatcac

SEQ ID NO: 42384 - DNA, 503 bp, Cannabis sativa
atctcgttttccacgcaagatgagtttcattagagcttatttctctgtacacacatatacatgtttttctctccacaatgttctaggaaactttggtctccaatgttaaaaagtgaaaatttctaaacttttggagacatggaatgaaattataatcctcttcccaacacgaggctcttttgaaagagaaaaaaaaagcctcgtgcagttaataatacctgttttctttcacagcttcccataggtacacaccaatggtcaagctttgtaactcctgaagaattgaccctgcttctacagcgttcatcagtttcggtaagccaacacatgtttagcatttacaacctattaaatttgagaattatgtttttagtgcccaacaaacaacatgaggtgtcataccaattcactatattttgcgtaccatatattttaatttaataattattatagaaaattactctagtgtccaacactctaaaaactatgttgattggttgata

SEQ ID NO: 42385 - DNA, 1223 bp, Cannabis sativa
aaattgtatccaaattctttattagatgatgtatattatattaaagttatagaatgtatctaattaatttcttttaataattaaaatcataattcaaatagtcgattacacatgtattttaatatatgtatgtaaaatatttagattcaacatcataaattattactatgtcaaaaaaaaaaatcataaataatttgattttttttttctttttattgtttttttttttaaaaaaaaaaaattgtggtgcctactatacccatgtattccttcaatataaaaaacgaaatttaatttttccattggcctatattagaaaaataatttattgtacaaaagggaagggtaaattgcttattcacgtgagaatgaaaaaaaaaataagcatatgtgcaataactagctcgtttgaattatgtattatttaaaaatttattagatttttgttatatgtttttctatttgagtgagttgtaacatgtttgttatgtaggattataacttttccaccccactgcaaaaccaaaggagaccacttgataattttccaatggtttatgtatgggaattttaaaatgatgatgaacaatgtaaactttgtgttggatcctatatttattttataatatatttagataatgtgagtttcaacttttagtcaaataaatatagacatattttagttcgatgttcacaaaaattcaataattatgaaaacaatatttagtgagattacttagtctaactcaagcttcgtttgaagaagtattttagagtcacacagtttagtggagaaaggtgtttcttggtttgtaggtagcggctgcaacatttctgttctgggtgagccttggctccctgaggtgttgaacccacaggtggtttctgaccatccaagactagttggaacacgagtttgcaacttgatgaaacttggggagcgtagttgggatgaggatttgacgcatgacatgtttgtggagagagattggaggcttatcaagaacatacctttgcaggtagcttcagcagacgaccatcatatttggtcgaaggacaatttaggcatctatactgttaagagtgcatatgctttgttgcaaagcctgaagggtcgctgatatgtgttgctataatttataaacactacgcaagtatacgcaatcaagtagtaagtctcacacaggtgaggtcgatcccacagggaattggattaaatacca

SEQ ID NO: 42386 - DNA, 684 bp, Cannabis sativa
tgcagcatctgtcaatgcatcttctttgtcatcctggcacagttttaaatttgcttccattggggtgttcataggcttgcttcccaaataaccaaggtcttcaagaatttgtaaagcagggggtctttgggaaataacaatcccttgttcagatctagcaacttccatccctaagaaatatttcagattttcctaatctttgagtttaaacttctgatcaagtctaatcctaagtagctccatttccttcaagttgttgctagcaactatcacatcatcaacatagacaagcaaggctatgaaatcatgcttgaaatgtttaatgaagaaggagtaatttgtagcggaatatgtgagaatccttcttcctcaaggcattagaaaacttctcaaaccattatcttgaggcttgttttagcccatataacgattcttgtagcttgctagagaatttgcatagcacgtttaacttcgaaaattcgtggagcattttttttttgactgaacctatctcctacgattcaacccaaattgatgaagcatttttgagatacattatgctatcttcgatatcattcgagacagcatgcaagatccaagaaatgatcaaactattgcatctgaaccagggatcataatctttatcatgttgtggtagtcttccatccataaacttgactttgt

SEQ ID NO: 42387 - DNA, 562 bp, Cannabis sativa
cttgaagcgaggacgttacagcacgttcatggacgttattcgaaaactaactccaagtgataaaaacaaccataaaacaacaagttatcaactatgaaacaatagttttcagaaaacttaatttttagttttataactccccttcaagctagattaatttccaatattttgatacatcataatctcacatttatgagcatttatactctttcaacaactataattctacatcatttgattttcataatatatatacaatttactcacatagattatatatttatgtttgtgatccataagttacaaaataattactgctttgaatttttatttatgttacaatatttagtttataataaattgtaggttatacaatttattaatactataatatatattattctcataataacgtatatttattacattttaatctatattatattattaaatagtccaagtataaaaattctatttattctacttaattataaaaaataagcaaagaaaattaaaacataataattttttttaagaaaaataaaattctcattaataggta

SEQ ID NO: 42388 - DNA, 508 bp, Cannabis sativa
gtatagtttttttaaggtttaaattattggtttaggaaaaaatttttaagattttctaagtatagaaaatcaaatttcccttgtgtaacaatgaataacttcataatattatacaaactttaaatattaaaaaactcaaacacacattgttatccttttaaattaatgcgcttttaacgagaaaattaaaaatatatgcatgtgtattcaattttcatcgctaagaaaatattttattttacaatattaaattatttaaataaattcaattaaatatatcgtatgattaatgatttaaataaatctgcggtcaaattatgaagagcagagagtacattttttagtatgatttggaaagtaatagcatacagtagtactttgaaatgggtataccggacatgcaatgcaactacagattttgtgggtttgatacaacacatatttatgcaagttgtattcttgtttgcgctttattaatttttcatgtcacgaatcgtatttgcgtcgg

SEQ ID NO: 42389 - DNA, 1445 bp, Cannabis sativa
cttaactacaatcctcgtgggatcgacctcactcttggtcagtctattacttgtaaacgatacgtgcacttgcatgtgcaaaatatcacaacaatatgacaggaatcagcccaaaagttgtagttcaccaactccaagtcaacccagactaccctctagtcagacaaaaaaggaggaagttcgctcttgagtgaaataaaatcatcaatgaagaaattcagaagctgatagatattggttcagtcagagaagtagactacccggaatggctaccaaatgtagtcgtggtgaagaagaaaaataaaaaataacgagtgtgtattgactttacagacttaaacaaggcgtgcctgaaggactcttttcctctacaaccagattctcaagcatctagacgaccaagaaaagaccgcctttgttacttaacgcaaaactttctactacaaagtcatgtggttcggtctcaaaaatgctaaagctacttcccagagactcgtcaacaaaatgtttgcataaatgttggaaaacacggtagaagtctacattgacgacaagctcatcaaatcccttgttgttaatcaacatatcgaccacctgagataggaatttgaggtacttagaaaatataaatcctactaaatgttctatcttcaggaaaattcttaggttacttggtgacgaaaagggggatcgaagccaacccagactagatcaaatcagttaaaaacattcaatcaccaacctgcattaaagatgtccaacgtctaactggaaggctggcagcgcttagtcgcttcatctctcgatcattagacaaatgtcacttgttttttagcactctgagaaaggtcaaagattttgtgtggactgaagaatgtgaaatcgcgttacaacaactgaaatagtacttgacgtcacctttgttattgtcgaaacaaaaaaatggagaatcactctacctataccttgctgtctcagacacggctgtcagtgcagttcttgtgagggaagaagaaggaatacaactgccagtataatatgtgagtaagacattacttgatacagaaacatgctatagtcaactggagaaacttgcacttgccctaatcaccgctgcgcgtaaactccaaccatatttctaatgtcatcagattattgtagtctcaggctacctctttcagagcatattacacaagctcgagctttctgaatgactgacaaagtgggccgtagaattgagtgagtatgacatagtctaccagcccataacattgatcaaatcacaagtcctagctaatttcatcgcagacttcacatcaaccgcaaaagaccaagctggcaaagagttactatttctaaatgttgagtcaaaatcaaaatggactctatcggttgacagctcgagtaattttagaggcagtggactaggcatagtcctcacctca

SEQ ID NO: 42390 - DNA, 504 bp, Cannabis sativa
aactctttgtgttatcgttctcataaagttaataccaaggctgctttggttaaaattgagcacaaggctttggaaatgaaggcttcgacatcttttgtccaagtctgcaatggagaagttaacatagctcaggcagagaagagttcagatgagcagcacagtatgagtatcttgcgaatggatgagggttttcagaattatattcttactgatgcttcgtggctcaatggggatgcaggcattgctgcaatcagtgtagatatgacaacaggtagctggtttgttaatgcccaaaaggttcaggcaatctcggctttggaagcggaattaatggcaattcatcttgccctcaacaaggctgctgaggatggatggactgaagtacagattttttcagattcaaaagtggctgtttgtgctctaacaactagagtaattccggattggagggtagcaaaagttttttatttaaatctaaacttatctaatagtttttctagatgt

SEQ ID NO: 42391 - DNA, 733 bp, Cannabis sativa
catactttgttttaagaatttagtttgttttggaatagggttttgagttttcttggctgtagaatttgtttaggatgtgatgttgagtatatgtttgattttgaataagtttgaagctgaattaaaggtttgtttagggctacttaacttgaattggattaataattcctaaagattgagttttctaaacttggataggtgattttgattcaaagactacattgttgtgttttggagcttgaaatatattgtatttatgttattacactgttctggaatgtttggttaggtttggaggaggtttgggtcgaaattgaggaagaaaacacaaggttttcaagtctgccagatatggtcgactggttgccttacagggagaattctcgggttttcttcacactacaacaaaagggagtttttatcccactttttacacttgaaaaaataaaatgtgggataaaaacttttgatcccacttttacttttggagccttaactaaaaatttggaacaagggccttgtttggaaaatagataaaaaacagtgttagaaaggctatttttatgcatttgccaaacgcaacttagcattttaagtgggactttttatcccagtttttagataaaatctgggacaaaaggtcctcatacatttgggctttttaattgttgggccggctacacatataaaaggaacaattaacttttagggttttatttttattagggttact

SEQ ID NO: 42392 - DNA, 1776 bp, Cannabis sativa
acaacagtaatattgacagtagccactcaacaatggtacttcaagctaacacctggaaagtttgattcctagaatgcctttacatttgagttctacacccaattttcctcctccaaatagctctttgcacacctcaaagacctggttgaggtcaaacaattataaggagaaacgttgaaggactatacattggttcataatagaggccactaaggtcaagggactaactgaagaaggacgactagttgcagtcttaggagggatcgagcccaagggtgagctttggaaggacatcaaaaggttcactgtggggtcaataggagaattattagatcgggttgacgaatttataaagctcaaagaagcagttaagagggtagacaatgtcacccaaaacaatgtcgactcaatcaaaatcttatctccatttggagcatttacatcctcctcgaacaattaaaccttccagccataaggaagtaacaacaataaccccaataataatagtggaaaatgtccaataacaagaataatttgaggaatagaaagaagaggaaattcaacatcactgatcaacaaaacccctgcatgaaagatctttgtttcacttctttcactattctcactgacaccagggaaaatgtcttcatggcaacccaatcgtcagtactttacaagagaccccctctgatcaagaaagatatcagtaagaggtacatcacccaagtttaatcatttttacaaagatttcgatcatgaaacaaatcaatgtaataaattgaaggaggagattgagtttcttattcgaagaaacaatccacacttgaatcagtatgtaaagtccgatcagaatcaaagggctccccaacaagataatgaccaaaacttcctaatgccaccaccagtggatgagcacctacatgttatgattggaggcccacacattgctggagatacgagcaaagcccaagaaaggtatgcatggacccctccactataagcaaaaagaaaaaatattggtcgtggaggagagaaatcacaaatcgtcacggagaagtgatactattgtatcattaaacgatgatgacgctgctcatgttcattatctacacaatgactccatggttgtagaagtacgaataactaacatgacaatagctcaaactatgattgacaatggagccttgtcgaacttttttgactgataagacaatagttaaatacttgtttattaggtctatatggtgtaggtaaggagtcatatagtatagtgtgggtacaattttactgaacccaacctccgtcatgtagtctaatagttagggtttatttatcaaaattagacttgggcataaccttttatgtgatttaatttagatactaatattactacttattgttgatcacaacgtatataattttataactatttgtttaaatatgttaattccaagtatgtacgtaagatttagttattttttcttatttacatgattatgtgataagaattttcttattagatttaggaaaatttacactacatactgttttttcttattttatttcaattttactgttataaggaaaatattacatttttactgtattttttatactatgtgtactgttttatttatttatttattttttttacttttttacttgtcacaatctgtcaatcacattaaataaatatatatatatattataaactgtaaaaaacgtgtgggagtggtttcttttttttttttgttaattttcttttaattaaaatta

SEQ ID NO: 42393 - DNA, 10473 bp, Cannabis sativa
  modified_base (10284)..(10292): a, c, t, g, unknown or other
gtaatgggttttatttagggcacaaaacccaacatgttgaatccagacgatcagacggttatgagtgtcgaagtcctcgtcaggctaggagtgaagcatggttggattattggatacaacctctagaaaatgaaataaacagaggttaaggaagtactaaacaaggcagtcgaaagcctattgcattcactgccactggaagtaaaagaatgagaggtgcttggatgacaaaagctttgcttcaagaaagtcgcaagaagtattacgaagaataagggtgatggaaagaggaaaatgaaaaatggcccaaatttataatccaactgatggcccaaatttgtcctcccaaaaaatcatcctttgatccaatggatagggaaccaaaagggttgcatttaatacacaacatgaacatttaaacaagtctcttgtcttgtacacattaatttagaagtcacctcaattgtcccataatcattacttaagggacgctatcccaacaagcatgcgacatcagcagatgaattagaagtgccatatgtgggacagactaatgatacttgtgattatcatcctgatgcatggtgacaatgcatgggatgtatccacgaattaggctagtgccacgtctacaagattctctactagaagcaggggagtattataggcttctagatcatagagtagcccaaaagcttgagggtaatgttatctgcctttttgcagagtaagacacgtggcatgaaaggatgaaattcacattttctccctgcatttaaaatcctatggagcacttatgaagtctccgtaaactaagagtcgttcaaaatacggggatgcgtgagaagtcgcatgcgttggtaagtacttcctaaaagtgggatgaaaagtatctttctcaaactcggaagggtctaacagagagactcttgtggttaaccttaggatacatgcccttaaagcctaaagaggatgtcgaccttcactagatgttttggatgtcgactttttctatgtgctaggtaatgaagtgacagttatgctttccctgatagaatcggatattgtcccttacaataccgcattgtagtacacgcatcaccaccatctttctatcgagcagataatttagacatctatcctcaaaggagcgagcttagagtaacaagtttcctttgattttaaagattaaaccattgtgtgacacatgtccaagtagtacaaagtggttcccattaaccacctactacacgcgcgagcataaggctacccacgggagcaacagtcattcagctctatattgcatgaaatttaccctctagtaggatttgagcagatatcctaggtaggtaagggagcgatccatacccgtcagaaaggctataaatacccccttcattttcatgcatcaggggcaagtcaacaaaacacatagcaaaatctttgataaaatcatccttgaccttctttgtcttcagatagaaattaaggagaaagagttatggtttcctgcaaaacattgtaaattcatcaatatcgcccaatgacgctaatagactgactcgtggactagggtatgttaacaaccgaaccacgtaaaaaatcttcctctcttattttctggcatttattatttctttagctcttgaatattttattttccaaaaatctcataaaatacaagcttttttattaaaaaatttgttagattaattattgtcgccggttcaaaattgaaaaaattttaaatgtacaagcaatgctgaggaaaaaattgtaaaaaagttgcattttttcactattctacaacccaacgtaacaaaggaaatgtcactaaaaaaccattttttttttctctttgaacagttaatctactatgcaaaaccattggcaataagtgtacatgcgattgtttatccccgatagttttgcacaatcaggaaaaagttttatcgacagttttccactgtgacctaatctatccagttttcccaaacgtcgaataggcatcgattttagagactgtcgtgaataatttaccagactatttaacacagttgggaaaatgaagttttttagttgtgatcactaaattaaattatatctttcatctaaaagacgttgtatatctcagtttctttttgggcattgaggtcatagggatgagaccgggatctatcataaccaggctaaatacataaaaggattttctgctcaacacagctatgcaacatcttgagcaatgtttaatccctatgaaagttggtaaagctttctaaaagtcagatggagagccacatgaaaatccaacttcttgccgaagtataattggggttctgcagtacttgacacacactcgacctgacttttgcttagatatctataacacactggagtgcaatgaaacatgggcttagatatctaaaatgaacattccatcttgaattgcacatctagtacttagagaaattcgacttaacaagttactatgatgcgaatggggcatgttctctcgatgatagaggaagtattccagtgtactttgtttatttgggagatacattagtgtcttgatcatcaaagaaacaggcagttgtatcctgcttaagtatagaatccgaatacagagccttggcacatgtggcggcaaaaatttcatgaattcaaggcctacagaatcaattcaggtatcctctttctcaaactcttgttacttggtgtgataccattagagccagttttcttctagctaaccccgtgtatcatgatcggactaagaacattcaattagatgtcaattttgtaagagataaagtgttgaacaaaagccttatcatcaggtacataccctcacataatcaaaccgtcgactgtctaacaaagcacctcactcataattgatttcattttctggctttggtgtggttgaaacccccttcagcttgataggggctgcttgaaaatgaaaatgatgcttatcctctcactactataaaaagggctttcagaggaggtttttcaaccctttaaaggtggtttttaaaaaaatcgtaattgttggcgttctaagggtcgctaaagggttaaaaaaaaccacctctaaagggtcctttagaagtgattattagcaaatatctgcctctaaagggaccctatggaaacggttatttgctaataattgcctctaaagggactctactgaggcagttatattttttttatttgcagttcgacagagaacggtgaatagagcaagagaaagtcagactttaactaagaaatcatagatctaaacgtaacagtccgagattacacattttttctttaaaaaaatgcaccataaatcttagttggccacgagaaccaccagcaaataacaaaaataaaatggtaagagaaaacacaaaaagatctagcagaaaaaaaaaaaaatagaagagatgggacctttggtattggttgggtcattggcattgggttcttcgtggttgagtcaccgccaatgctaaacagtaagagttttttgccgacggtggtgggtggttcatggttgaggcgcctctaggtcaagggtttatggtggcatcagctaagggacacaaaaaaagggattgacattgaaagaagagaaaataataaacttttcatggcggctgacgcggtggttggtgagccaaataaacggagagagagagagagataaagctagagagcgagagagagcaagaaagggcgtttctttagggtttgcagctgaggcggcttgatttttgttagggttttataagggttcgttagggttatcttatgggctgaagctcttttagaagttcacaacccctttagaggcggttattaggcgtgttaccctttagaggcggttatttccaaataactgcctcttgaaagaggtttcaagctatatttttttctcttttaagatgggcaacacttttcttttagtgacttaaaaaatgcttttaaaatcttttttgtagtagtgcttccaacattttcagtactctattagcagatgattgttatgtgattttgtggtcccaaaatcataacaaattcctttttgtaccgttagaatatttttggccttatcaattgtaaatgatttgtatgagttatacacatttagcatattcttttgtaattcacactctataaatacagagttcgccagcctcaaaagtatgagctgagcattttattcattgggcagctctctgtttttataagttctcttcattttaagctggttccattttcattatgtacatatttgtgatatttgtagtcatcttctttaaaatcaatgaaattaatatttagtaataagttcaaattgaaaattcataaaagctctcggatatacatgggccaggcatggtggttgcaaagggtcttacttgggtgtttggcggaatttcccttaccgaatggaaattattgtaaggggatactttaaacataaactaaaactggaattctatggatgcatgtgggtttggtacaatgtggtcacgtcaagattgaatataaatatataatatataaaatttaacaaaaaagcaataagatatgacattatgatgggctgaatacttattaattgagtattcttcacgcccaaaacttccacacgtaatctaaagatacagagcccaacagaaataatttgctatcaaaatcctaacgaccaatctttattcccttcgcctgcaatacgaataacgaacaaaaaaaatatatcataaatgtaatatattttttgactctcggtctcgtcgaaagaataaaatatagtgatgaagcatttgtgtccgttagatgtaacgcagcttgatctaaagcccatgttggattggtcgatattactactcatgattcttgcagtaacacctataagttttgggggctcatggttaaaataatgtctatttccaaaactaaccattatttatagactgaaaacaacatatgtttagagtcttaatcaagtactaccgcacccttgtgattatactatatgtttgaatgatacacgaaagaatcattgacttcttatgtgtttctttagaattatgttaacaattcatttatttattctaccaatatatagcatgcgacacaatatttaatattttatgtcatgtatgccttctatatatcataaaaaaaaatgtgtggaacggtctttaatagtaattctactggtagaaaatacataaaaatacattcaaataatagaatcaaaggtagtttttctttcgatttcattaaacaaaaaatatcaaactaaacatttttaatcgcgtaccaaccatcaaattaagggttggcctctattacagagtcaaagaccaacgacaagttttataattgaagcgaaaaagacaggccaccactttagaatattctctatataaatcataatccctgccatcaaacacactagtatagacacacttgtaacatataactgaatgtactatctaacattcatcttatatttaaattttagagaggactcattgttaatgatttgtgaacgattattaatttgacccttcatttaaagtcaagtttccctccaaacgttaaaagcgtcatcagaaccatgaatcactctctctccatctctgccatcttatattttcttatcatctctccaaaatgccttccagctacagtaatatcggaatacaagacattggaagaccgacatagcaaacttgatccgtcggtaaaaacctcaagcgcagcctcaccaatcatagagaattaccaagtgagcttcctcaattcaaatagagaaagcgacatcattggattgtcaaagaattaccttcatcgttttggttatctccgaccacaacaaaaggtaaccttcaacaacgaattggatgatgagttggaatcagctataattcaatttcaatcgagtcatggtctctcagttacagggaagctcgatttcgaaactattgcacaaataaaaacaccaagatgtggtgtggcagatgtaatcagtacgttgcatggatcaaagcggtaccaatactttcctggaagacccagatggactcgaagaatgcatatgactctcacatatgctttttcaccagactatatgatccgttacttgagtttttctgacataagagcggtgtttaagcgtgctttttcccggtggtcgtctgtgattccagttggtttttctgagactgaagactatgtctacgccgacattaagatagggttttacagcggcgatcatggtgattctgagccttttgatgggatccttggggtacttgcacactcgttttctccagaaagtggaaagtttcaccttgatgcggctgaaagatgggccgtagactttggatcagaggaatctaccattgctatcgacttagagtcggtagctactcatgagatcggacatttacttggattgactcacactccgatcaaagaggccgttatgtatccgagtttaaagcctagagagaggaaaacagatttgcagcttgacgatatacaaggagttcaggctctttacggatcaaaccctaactttactatgaattctctattggaatcggatatcgctacaaatcacgcttttcattatccaattactactactaaattcttcaatatttttgttcttatgcttttgcttaaattgttatatttttgaaattgtcaatagatatactcaagattttttatacgctctcataatttgaaattattctttaattataggctgttaaatttcattcgtaattagtttttcaaagattgattctcaaatatatttatgaattggtttttcgaattaaaatttctccaagaaatttttttttatgacattatagaatgatgattgtttatataattatactgaaaaaccactttctactaggttcagcatgcaagatcaaagaaaaagacttaaaaactaaagagctccaattgctcctaaaaacaagaaagtgttaacctatatctataagactattgatggttacatatcaaatattatttatggattgtttagacttttatttgtgtttaattaatttttattggttttattaaaatttgggtttattggatagttacttactgtgtgttagctcattttatttgtaatcaatagtcaatggacttgacatctatgtgtataaagtctagttaaaacatttgatgagccggtccaatccaactaagattatgtaggtaagtcgtctcattgtaattgtatatttttttgataatcacataaataaacttgcttctaatttagggatctatggagtaagacttagggtacatttattttttaagatctatacatctgaatctgaatgcacatctgaataataaaataacatatctgaatttgaatacagaaatattaagactgtttgttttttcacatctgaatgtaaatctaactaataaaatatcataccaaaattgttatttatatattatgaacaaatttattgtactatattttaaattttaacaaaaaaagtattcaaatattaaaaaacaaatataattaactttaagaatttatagtatttattgtttccctttctttgcattaggtttagtgcaagttcattcctcaaattgtttatgaattgtgcatcttctgctctccaaatggattcataattagtttcctccaatattttctcttcaagtccttcctcgaagattacttgaggttgatcaaactaattgaataagtccatcatttatgcgctatttcttgataaaattgttaattgcaaaacatgcaataacaacatctctttggacatgaaactcatatggggccatcttatctgttatttgaaatcttgcttttaaaactaacgtttgataacatttctatgttgagcatgggcatggtttctccttcgttagagcacacctacgacgataatgtcctaactaatatcgaacattatggtaaggaggtaaaaatccccgagtggatggatatgctgcatcacatagataatacttatttcaagtttatatgcataaaaatgttaaattagttgaaatacaaaattaagtaattgtactagcaaattacatttcattaatcacttacttgtagaaggaaattgaaaacaattatctaaattggctactatctcttttagaactcgcgaatcatttgctactccttcccatcctacataaacataaataaagaccatgttgaagtagcatattgctagcatattttggtagcagcactactacaaaaatggttttacccgacatttataagcagtcgtttaaaagtattcacgtcggtttctataaccgtcgcctatacgaccgtcgtaaaactaacaaaataggcgacagttaaaaattatcgctactgttgacttaatgtaaaaaaaatacagatttttttgccattaatggtagaaaaatctgtaatttcccccattattttcctgcatcacactactacaaaaaaggctttttgtgtcggtcaacgcgtctggtcaaagtcattgaccgacgcaaaagtcaaccttaacttttttgcttcggttggtaaccgatgcaaataatgattaatttgcgtcggttattactccgacactaaaacaaaaacagatgcaaagataaaattaaaaaaaaaaattgacatttatcttcggttagaatttgaagcaaaagtagttagcttctacgttagcttctttggctaactgacggtaaagggcatcttcttttacaaaatcccaactcaaaattaggttttcccatttagaaccagatacccattttaagtcctcttcccagtttccacagtctccttcgctctttctctaggttcgtctgcccaagctgcctctccctttctcgcaatatctctctctgctctctctgtgagtggttttcaggtccgttcatcgttgtttgaacggagcttggctaccaccccattcggtgttcgagcttctccttctccgtctgctccctccgctcctcccccctctcaaaggtaatgtatatatatttatattttcatttatatatatatatttataacattttgttcttgatgattttgttttgaaaatgttttgacccattttttgttaaggatttttttcatatttttttagtagttatatataataggatttatttataataatggtgttagattctcgtttgcacaggatagggacatcgggaccatctctactctgctcactgtggtggattggactgagattgatcatctcttctctaagtcaggtgagttcaaccatagttttttataactccatgtaatctcttctcttggtcactgtagtgttagttttttccattttcattgtgtttttttggctataagagaataattattgttaataattcttgtaatagcacggtaatgttttctgggttttctttagtttaaaatttggatgaaattgatgaattatattgtcactatttggtgctcttcatcttctattgaaacgtgtatcgccctaatttgattgtttcagtgtttattgaggctattgattgttacgcaagagctattgatgagaaagttttaagtgattccatttaaagataaagagttattaaagctgtcaaattgtgatacaaagtcatcgggcttagcagctggtaataaaaatttttaccatgaccactatatgctttcgagagactctctctctcatctctcagatttcttttttttttcacttcaatttcagatctatttcaaatcagaatatataatcgagacaataaatttgttttagagacatattttctgctatacatatatgatttaatggtggcagcggcttgatgtgcctttaacatgatttgaattccttcttcattcaaatattttatttattttgaagggtgcttgctctcattcatgatttgagattctattagatttgcttaattctgatttcacttgcatttatatttaatggtgagaagtatggacaagaagtcataggtcgtgtagtatagatgcttcttgaagaactttcaattccctaccccactcacccacctatatcacctattgtttgaaatgttgtgaatgttttaacaaaatatataagtgtcttagtgtgtgtgagttggaaagagtcccacatgggatatgaacactcatttataaaggtataaagagtgcaactttggcatttgggtttgggccccaagggnnnnnnnnnttttgtgtgaatgggtgaggacacacacacttgacccaccacacacgcgcacgcgcgccatccgtccgtccgatccgagccgggctgcgctgggctgggttggttggtgtggtgtgacactatattattttttacagaaaaattatttaataataaaataattattttttatttattaatt

SEQ ID NO: 42394 - DNA, 4821 bp, Cannabis sativa
aattttaaaattataatattaaaaaaaattaaaaattaaaataaaattaacatacgtaacttgacacgtaatatttatctagtatactataattagtgctatattatatgtatcatatataattagtgtatattatattttcaatgtcatattgttattaatagaattatgtatctaattttatataatttaaatttataacttttaaaggatatgactaattaatagaaggtgataggcaccataaccaattgcattgctatatatatatatatgcaattatgtataatgtatagccgtattatatgtgtatgtattaattatatataatgtggttttgtattggatgagtgactgattattgaccaagtttctcccacgcgttcatgccagctgtctggccatggattccgtgattgcatacatgatggactatgggacctaccatggtcctactctactctttaccatttttatctttattattaccttttttagttttcttttaagaatatatgttccctaaaaatgtaaactattttttaatatcaaaattaaattaaacaagctatcaatatgaatatcccaattttgcaaggaattattattgaaagaaaaggaaaacactgattttttttttttcagtttctgattgggtattggcatctttattatatttaacttgataaaaaataatcctcacaaaaaataaaacatttaataaataataatgtattgttttgagtgaatatttacttaataattaattttgctccaaaaagtgtaaacagtagattttttttcttttaagacatgaattaatattaatatatatttttttaaatatataagaaataaaatctagtgaccatcactgtattatgtgtacacgtgtcaactcaataataacatgtcgacaaaatagaaaaaaggaaactctgaataataattaaaatattcagatttttgtcttttgttggcatttaattcaatgtgttcaaatcaattctatcaattctctcaaattaaaaatttaaccttttttttttatttttatatttcataattaggtggcttaatttggaaacattaaactcacacggtaaaaatctaaataaatatttaaataatttataagtaaatatgtacatatatatatatagagagagagagagtgagaaagagagagagagagtggtgggtgggtggaagagggagaggcgtgtgtggtttatgagttttgtgtagttaatattcacattcatagactttactgagaatagaagaagaaccagagattaaacaaggcactacaaaggaaaccccaaaactcaaaaaccacaatgaaacagagcatcttcattctcattctctgtttcgccatttttggttgcacttgaatttcaaccagttaagaagggtttcctttctttttcggttttgtttttgttttttgtatttgggattttgatccggtgatcaaatatggccaagactggtgttttcgattctgatccgacggttatgaccaaacccacctcggaattgaaaaaagagcttcagagattggtgaaagccatcgttgaagatgacgattacagtactgaaaccatcgatcaagctaagaatactcttattgctataagagatttcaagcttagaaagcgatcccactctttgaagagtccagatacaatttcgtgtccacatgagtttcgatgcccactctctaaggagttgatgagagatcccgttgttgttgcctccggtcaggttagtgccaattttccttctccgttcagtgtttggtttctgacaaagtgagaagagaggaaattcaagctctagttggtaaattttttctgggttttgttggattccaccattaacgcagttaatattattcaagtctttttctttttattttgtcttaattttcctaccctttcttcctaatcaaacggaaggttaaaaattaaaattttctttgctgttcgtattttctatattcattaaaaataaatagagaaaaatattattatcaaaatattaaattgactgctctaactttcggcagctcaacatagctttttttttattattattttattttattttttaaaaaataatgtttttgtatacgttatcctctgttcttggtccaagatttgtatggaaattttctactaagataaaatatatatatacatatatatacattcattttaaaaactacttggatttttaaaaaggggataacaaatttttgcttattatttgttttgtttgcaaatttttggaatttcaattctgggtcgtgataggttttacagtattggccaaagttttgtactgttgttaaaatgggcacttgaagcagtaatttttcaattgggtcaggaatctgaagcttttcatttccctatatatcgacatgcatgtaattgtcataattttcatgagctctagtctgaaccacacaagtcctgatgattaatgtgattgagttgtctttagttaatactcagaaccaaaaataaaaataacaactttgagaaaagaactgcattgatactttaaagcccatattatacaatctgttctgattttcattttttgttttgttttcttttgctagacttatgatagaccctttatccagaaatggcttaaggcagggagcaggacatgtcctcttactcaacaagtcctttcacacacaattctcacccctaatcacttgattcgggaaatgatatcacagtggtgtaagtgtacaggtattgaattgtctgaccctgatctctatttaaatgaagatggtatcacagcagccgatcgagaccattttctttcattgctggggaagatgtctttatcattaccagatcagaaagtggctgcaaaggagctcagaatgttgactaaaaggatgccgtcgtttcgggcactatttggagagtctttagattccattcctcaattgcttcgtccactctcggaaggcaagtctcagactggtgttcatcctgaggttcaagaagatgtgatcacaacgctattgaatctttctatccatgacaacaataagaagcttgttgcggaaacacctatggtaattcctgttctgatggacgcgctcaaatcaggaaccatcgagacaaggagcaatgcagctgcagccctctttactttgtctgctattgattctaataaagcgctcataggtaaatccggggccttaaagccactcgttgatctcctcgaagaagggaatcctttagctatgaaagatgttgcctctgcgattttcaatctgtgtatcatccacgagaacaggacaagagtggtgcgtgatggcgtggttggggtaattcttgagaagataacgaatcgaacacatgtagatgagttgttgacactgcttgcaatgtttgcaacacatcaaaaggctgtggaagaaatgggagagattggagctgttccttgcttgcttagcataatcagagaaaacgcttgcgaccgtaccaaagagaattcaatcgcgattctccacgctatctgttacaacgatcgaaccaagtggaaggaaatgagggaagaagagaaaatgtatggaacattatctaagcttgcccagactggcacatccagagccaagaggaaagctagtggaattcttgagagaataaacagagctgttaatttgacacacactgcatgatttggatattttggtaccatcacagactccacactgtgacttgtaaattctcccatctttgttttaagcaacattgtcctattatgcaactttttcccctctcagatttccaatggtctttctcaacaaccatcactctgtaaattccttgtttcttgtgagtgtttaaatttcagcttagtccatgtgaataaaatacaatacaagctttgctctttatttttcattctctctaatcttaatataatctttaaacaaagatattaagggggagacaaaagtattaggtaagagatttcatccaatcccaatacttctaattataataataaattaataaatctccaatgatgattatctagcactaaacaattccttaagcagaaagaatcagtcttattcaaagtatataatatatgtcacaagaaaccaagttgctccttttgcttacttttgacctattatattggaatagtggcatacatataatttaaagtgaaagccactttggctatagaagattccaaaatgaatgaaccaacggttccaaataacgaaagagaaaaaacacaacgagaagaatatggccattttcaatggcgttagtgtgaaaataaatataggtttgtggtccaatatttaaagatgcctctccttgtgaaaaaacataacttgaagcaaggaaatacgtacgtataataacatatatatatatacgtactattttggggtatataaatctgtattgtatagagatattcttcactagaattttcattacacaccttatccttgtgtggattctcaacactttctccatattatctatccatcgttccttttttctttaagttttttgtgtgtgtgtgtgtgtggatactattgatttgctttgaagtttttaaccctttgccttgatccaacttaatctttagtaaaagtcatacttgatcattattctgtatacattttgtcttttgtgcaatgaataaaacactcatatatacatcaatgtcatggtgaaaaaaagaagaaagaaaaaaaaaaactactttttactatgcttaagtcttatcttttgtcctcatagttctata

SEQ ID NO: 42395 - DNA, 6930 bp, Cannabis sativa
atttcaaaaataattcaacattgaacaattgaacattttgcagcaaataaataggaaaaagaaaatgtatataaccggaacgaaaatatagatgaacagtactcgtagaaagaagattgagtcaaaattaagcttctaactcttatgaagatagacatgagtgcaaacacattgattcgaaaatattccataaaaatatttcagtaagatatttaaccaaaagcatcacttattatagcaaaataatggcaactattcactaaaaactgagctaatgttatcataccgcaacaatgtgtcttctctcctgtgcttggttaagcttgaacctagcacgcctctcaacaatagagcatctgaagtctaagaatgtctgtagataatataaaaaaaaaatcttaaccagaccaaagacataacatacacttgtgtaaagataaacaaaagcacagctactaaactagatatctgcaaggcaatatggctgggagctcatgattggagaaaaagcttttaagtatcattatcagtatggttttgagcatctttcaatactcaaatatgcattccagcacaatattttgatatatactatttatagagaaaaaaagcacgcaagcacactacaagcagttttcgagcaattgcaatataggctttctgcctgtacagaacaatgctaaaaaaactatgactcagcacacacactacaagcaattctcaacaaatttttttccctaatgattagcaacagcaatatagggctttacaggatccatccatcaatagacaatttatttgtccacagaccaatgcaagtatatcacctttcaataaactcaacaggatccaacaataaagggtaaacacatcaaaggccttttattttgcaccaaatcaatatataagaaatagcacattttttttcattattaatatgttttatttcctagaaaaagagtaatgaaaaaagtgagacaaggtccaagaacctattatgcaaacaaattttgaactagttgttacatagaatattacaacttttatggccgtaacaaacaaattctacgaaaatatagtttaaatccagaaggtcaaacttgtcatacagaaataaataaatttcaaacagggcatatatgatctaacaaggtctttaatgataattcacaaattatttttcaataccagcagcaaaacataacaacattaagaataagatggaaaactaggtgaggaaccacaaactttatattaagaacccatgacacaatcttggataccataactgacagactgaatgtcactttgaagatgttgctcctttaaagcatttcatatcaactgcatccacttgccttttactatctctctcagactcagttactttctcaggaacatttgacggatgttaaagtctaaaatatgtaaagttgatggactaaatgatacaaatataaatattaggtaagtagtcacctccagcaattcctttagacccattcgtctaggttgtccattgagaatactgcagaaatataaacagtgaaaaaaaactgagtaaatgaattcaacaagtcattcatgcagagaaatggagaaatgggtaggcttttttattataaaaagaaaagatgtaaaagtagctgtattagaaaggatgtgaaaatacatcctcttgaaaaagtcacaagcacaacaagattcctcaggttacgtcaggcaaaaaatttaactgaactattatatgccacaacaattattctcactacaggctaaaacagttacgcaaacacctaataaaaagctcaattcccatcattacagttgtgtcccatttcaatttatttcaatccttcatcttaaattaaataaaatgaaacaacataactccaaaatcaagtattatacaggaatccaataccattgaagtatctgaggtgacttacagccgatattctaatttaacaagaggacaaaaacctaaattcttagtcatatttcaatagtcacaaagaaataactcaccccaccatgttacagctaaaacctgattgaagagatgtaagacggaagagattgtttagaacaattgaagggtctgatccccgtttgagctgatacaaacgaatttcgaaactttcaacaatagaatctttcttaaatatagcttttatgttgttgaaaaggaaaacaatacagcaacaacagctcttctcacctcaataacaatgcgcattccagttcgatcactttcatccctgatatcacttatgccatctatattctgttatggaaagagatcaaaagatatattaactagctaaaaaaagtaattatgtcaaaaatgactatttacactataaaactgtaagccatgagtaatgtcaaaggagcactgttttcttaaaaattcgatatccattttatctacttgccataaatctctagcttaagaaatatatttatttatttatttattttgaaatatatgtatatattggctgatttatttgaccaggagacctcccagtggattgtagggattgtagggattctaaccttcaaacaaatgcctagaaccactttctgacattccttaccactagaccacccgttggggtttctagcttaagaaatatatagtgaatggagataggcaagggaatcatacccatcactccatgagaaatagattaccaccaaaacaaaataacattaacaataaattttgtttcttttcaaaaaacattagcaatgaaaaaagataacagagtaaaagcagctaaagattcaatgaatagcaaacaaaagattaataactgaactttagaaagcaaacaatcaattatttacagcaagaagcttgaatggtggtaggaatttcatgcacttcacacagagatatggaaggaagaactcggtggaaactgtacatcaaaccaggaattcgagagtctagtgtctcccaaaggattacaataacctgacaaattactgaataaaatgcatgtaccctcctcaaccccaccctgggtgtcttgttcccactaaccaaaacagtaaagagattttgtcctcaagctaacagtcaatcacaggttcctcaccaatacaaaatcctagccaattctctgctgaaatggcgtcaatagtggttgacttggatttgtgtccaactacgtgcgtatgtgtaagcaattggaggccattcaaattgctaccaaacctccaacaaaaaatatatatgtgtcaacatctaaaatttcacacaaataagattaccttattttccacaagttcagctatcttttccacaagagcagatttgttggtttggtaaggtatctgcatcattcacatcaacgaaatggccatttatttttttataagaatcaaaaacttaactaaaatttaagaaacgaaaaaatatactcaaggactaaaaattcacaggaataaaaacaataaatgttaatatccatggccaaaccagacaaatcacaaaaagcagttacctcttttatgataattgcagttctctttgtcctagaatcaagcaattcaacatcagtttttcctctgaccacaacccggcctcgcccagttcggtatgcctctaagatgcttaacagagtaaacatacattaaaacataaaaaagaatgcaactcgtaagaaaataataactaaattgctatggtcagaatatttttatgtaaaattaatataagcacaaatattacatatctaacttacccaatattgcccatgatcagccctccagttggaaagtcaggtccaggcatgtattctaacaattcttgcagctatcaaaaagtgaaaccaaatgctaaaggtcaaattttgtgcttctaaatgctttgatgtatgctttgagatgagacaattatttccttagtacaaggtaacatctctaaaatattgttagatggccttcaaagtcttaatctaactatttttatattaagaaaatgtatttaatattttatgataagccaccatcttaagctacagccactggtgccaattggtatttggtgctgaaaagtagtgctttaaactcagttttaaagatcccaatagcgaccaatatttcactacaccccacaaggaggagtatagtgaaatattgtatctataaatggttgttgctcacatgcagtctattttaatattgcaacatacctattaagaaaatgctgctacgtaataccatcaaattgaatgcatccattactactaacaaaagaaaattacatttctcagttttggtatatttgaaaaagactacccttatcaagctatttaataaaggtgtttctgtgagaatagcttgttgcaactattttgtgagccacatccactgaaaacatttgcatgaaaattagtttaacagctagtgaattatgtaagcagaactcaaatatactgttacttactgtagcttctggattttgaatcaacacacatagaacgtcaaccaactccccaagattgtgaggaggaatattggtcgccatgccaacctgaaattaatttgacctaagaatgaattaaaaatagacaatgcaaaggaaaactaaaattgacagcactttttagttagtatataagatagatatgattagtacaactggaacatgactacggtaaaggatgacaatggatcatcttaaaaaccattctgtaaactatataagattattgaataagagaaaattaccgcaatcccagaagatccatttaacaataaagttggaagtcgggcaggaagaagtgaaggttctttttgtgaattatcaaaatttggaacaaaatcaacctgtaaaaaataaacattcatgattgaatatgacagaaaatagattgatatgcttacgtgaaagtaattaaagagtgaaactcactgtatcaagttctaaatccaccagtaacattgcttccgtgagtggctgcaaaacaagtaaaagcctaccgcttataatcatagatgtcaacagtaatctcaaaaaccaaattataagtgtattctatcagatatagtaccacatcaagataatgtaccacaagaaaagaaagaaaagctgctgacaacagcaacaagaataatgatttttacttgaaattcaaacaacagtgagaaagcagagtggaggacagagttccaaattcatagatttctttttcttcatattgagcacttattacacataacgcgtcaagacaaactaatataacaaacatacatctaatctgcactctgtgtaacgcattgcagcagctggatcagcatcgattgaaccaaaattgccatgcccttgaataagtggggaccgtaaggaaaaatcctggagaagtaacaattcaagtacttataatgaattaatcaattctataaaagagcaatataaagaatgagaagaagtgaactggagcaccctatacacactttaaataaatcaaggaaaattatcaaaggaaaagaaaaaaagtgaactgaagcattgtcacaagggctatataataacctgaatggactgaatcaaatgcatatggctcttctagtctaacacctacatttcacataaataaacaaataaataattgaacaattacctgagccattcgcactaaagaatcatacacagcagtatctccatgcgggtgaaatttacctaaaacctgcaaagagatacatgttagctgcatctaatgcagagaaaagatagataaaacactacactattctaatgggaaacaggaagagtccgtgttgaggttttcagatagaatatcatagattgtgaacctctccaacaactctagcacatttcttgaatggtttctttgatgcaagtcccaattcatgcattgcatacctgtagttttcagtattagaatacagctgaaaacagtaagtacaacaaacacacacaactatttacagaccaacacacagaaataactcacagtatccggcggtgaacaggcttcaaaccgtcacgaatatccggcaaagcccggccgagcaaaaccgacatagcgtaagccatatatgcctcagtagcctccttgtggagctcagtgggcacaatcctgccatcatttccagttccctccttaaccagaacgctgccgttaccattggagccctcggacccggaagagtctgtggcgggctcgtccctctgacgggacttgatggagcggactttccgtgagggaggaacagtggagaggaatcggaagtccgggagggtgcggcggagccttaaaaagtgagtagaagaggataaggcgggagaagcgagacggcagcggaggagggaagagaagcggaggccggaggtgaaagccattgttggggaaagcggtgagggcggtagtggtagtggggttttggcggagaacggtatcataggagggtgagagagaggaatcccattcgggtctctctttttctttttcttttttaataataattgttgttaatatccatgtctgaaactgaaactgaaacggctaaaacccttttgtgaaaattaaaaataaaaaagtataaaaccctaggaaggacagtaaaaaaaaaaaagcaaggagagaaacggggaaattggataggcttcactttgtttagtttgggcgccaaaacttagttgcattattattttattaagttattttcaatgtaattacttatgtttatgtttaattcttatttagtttagtttttttttatagtaataatatttaaattaatttttaactaaaaaattaaaatttaatcacctgaacattatcacgtgtaatggtgaggtacgtacaaaaattacaaaattataacttaagtactattaccattaaaaattagaactaagtattaatttacaatcaaaaattaaattta

SEQ ID NO: 42396 - DNA, 4485 bp, Cannabis sativa
tgtaaagggttttatttagggcacaaaacccaacaataaggaccacaagtctcctttagagaagcagtatccacttctataaagcgccctaagactttgcccagcctatgagcaagagcacgggatctcttgagaaaaggaatcccagaaacttggacccaaaaaggtgtgtgggtaagcatatgagccattaccacagaacctgcttcaagaggtgtcattacaattagtttgtaatcgaaatgccacggttgaccgataagaacacggcgtcgatcaccaaaacatccaaactcaacagtaaagaagttgggttccttttcaaggatgttgattgagaaacgttcaggccacatttgcctaagccgattcttgaaagcttcagagttgtagtggcggttggtcaaaagctcgacagcaaggacgcagagggttcatcacgttcatcatcttgaggatggtcaggggtttcagagaaagagtgaatttgagtttctaaagcagtgagattgagggtggcattgaaagtgttggataagtcatccattttcaaaagatagcagggtaaacgagagcaaaaaacggaaagggaaacttgacagattgcagaatatatataaaaaaggaaatttgacatagaagtactgggtgcagtgagaagcagaggatagtcagatatatagtggtctgagcaaagaatgagtatcgtgagggattgtaaggtagcgaaggagaacttcttcatgtcaagtaatcgaatgattattcctgcaacattgacagtggctcctataggaattctagcgttctctacgagtgtagatttaattatgatccaaggcggttcaggggattgagggctaattaatagataagcagtaaaggggttttccttatagacaagtttaaaggggagaaaagatcgatatagtggagaattaatcacagatgggacatcaacccagaagttattacaaattagaagtttaccagtgagggagaagacaaaggactttaatggtggattccgtatgttagctacaaacggcttcagggaggtggagatcgaaccgtcactcgatgagaaaacccatggacggacatgaacgtcgatagacagtgacgacgacggcaacattgatggcataagaagattcgtgaaccctagggcactctctttctcctagttaattattatacaacctttcatacggcaaaaggaaaaaaaaaaaaaaaagtcaattcaacttgcagtgaaaaacaaagtaacgatttacaattagaaaaatgcaagaccgcaaggaaagcatacaattgttaaccaactattaacaagaacaaaggttagaacttgttctacgcaaactaacaagaactagtaagattaatggtcttcatggtggtagatataacgtggtggtgatggtggagcagcataggcataatggggtggataggattcgtcatatgggtaatgaggaggggaaggaggatggtgaacatactgtggaggtgaaagatggtgaatataattaattggggaagaggaaccaggttcactcggaggactagcaccgtgggcttcacttttgtctactcgaacttgtatcacctcttcttcaacttgttcttcctcaaatgattggaaaattggatgcaaatatgcatcggccaaatatgccttcatgtctgcctctgaacctttctcttctgtatctttggccatggcttcctgacgaagaaaatgacatgaagttattaagtatttaactttgaaacattctccccatgcatgtctagtaaatttgcaacctacaccgttttaacccctagattatgttcttgcactaaagttggtacattggagatttagaacagaccctgattatatatgttaagcctacattaaatgtaagtaagacttggtacaataggaaataaactaccaagtggaaccagatcaaattggacttactgtaattttaaactaagtgcccccttctttccatgatatacaagtggataactaagaaaccaatatcataaccaccattaacaaataagtcaaatttcaaaattcaaagtatccctggtctataacccgtaaacctactcaatgaaacaagaaagccaattttctacgaagagcaaaataagaaatttcagctccaatgctaagatttatatctcacctcaagagggtacttcctaaatgcaggttcaaagcggcttttgcagtacttgtggaatgataaagttaatatcggcaaaacaactagtaagggagtggaattagctgccttcttggtgctaagcaaacccatcaaaagaagttgagatatcaataaacttgcaattatgcggctgtgaacttgtggccaaaaggcggcagcactttcatatcgttgttggtagacattaattacctgtcaaagtagaataaggataaaatatgaatttagatttcagtagcatatactatgaaaattgatttacacaaagaaaaaggaagaatcaagcaccgtcaataaactgacctgatgacggtaaaccaagtatgcaaatgcaaagaagactagtatgaatggaagaagaattggagttacaacagcatacacaagccccaaaaggaagtacagttgaagacttgggagagtctctgggaagtctacactgccaggatccatagcattctctctatctctttcagttttgaccaaaaacatgtttttgagatgaaagataactaaaggcttcaaacggagaatctcaccggccataccagcccatccatcaaccattatataagtaataaagaaagtagccttcattggtatggagaccccaatgtttctaggaatcctgtgataaaacaaaaacatctaaatatcacttcaagcaaccaaaagttgaagaacaaaaatgaacgtatggttagggaaagaattgccatcattagattttctaaatcaagaataaaataatcaatctatcacttaagggtgtcagttaactttgtttgatgattacagtcaatgcagctttcaagaaaccattgagtgacattaatagctaaaattagttttccatgtgtatattttcatattgaaagttccaaatacaagctcttgagagaatgatgaaacaaataacatagggacacatagtacaaaagctccagctcttcaaaataaataaataaggacaagagaagagatactcagagctttattttgccaaagctataatggcacactagtgttaacaacaccagcaaacttttttaacttctcaagaatcagtcaactttagcttcattacctcaaatcacaaccctatttaagttcattaaagggttttaaacttgagctcatattataattactatatttggcacatgaatggggattcctcaacttaatagattcccctcaaaagattttccaaaaatttgtctgctaaaggaatcaccaagagctgctaatctgactacttctgatttatgttattattttaacattcaggcttaaatcattcattaaataaattattttgaaagcaacttaatgcatgtaaaattaacaatacataaagattttaactgaaagtacttaactctgattattttttaaaagcactaacaaattggaaccacaacatacaacctatgaaatcctggcaatgcatttcttgatcaaagaaaaaaccctatcacctcaacagaataaagctacattaaatctaattaacgaactatagagatcaataaacttttaagtcagaaagagatatagaagattactgagtaggaggttgatgaaggaaagcatccagctgctgaaaggctgttccggtcactatacttcccaaaaatacattaacaagcataaaataatagtactttgctgctgacttccgctctaaagtggatagtgctatatgcccctcaatttttgacatgatcatcaaaacagatggaagaatgtacaaaaatattttaagtgcgagaccaggaaggaaaccttgaagaaatgacttgatgaatttcctgtcataacattgcatctctgtaagaataacaggagagaatgaagacaaaaagaaaaaagagctcaatgcactattatcaactatataaaaacctcctcgaaatggatgacgttaattaatttcatgtttacaaggataaaacaatggctataagctacgatgaagtcaatgtggtggaaaatttatgaacataacattacaaactatagtaagaagaagcctactgcaaaatgtgttacacatatgtataaaatttccaattgaagaaaatgaaaatggtacagaaaaagaaaaaagataaacttcacaatcaacaagagattgaactgcatatctaagtgttgacaagtaatgataaaaaagggagcaaattaacaagagtataaaataaagcacaaccatatttacaactaccaggatgcatcataatatata

SEQ ID NO: 42397 - DNA, 2339 bp, Cannabis sativa
gaaaaacgctactagttacatgactaaaattgacatatttcttagcaatcgttgattccacatcaaaatattcatattaaaaaataataaccaaatattttgattattacattagaaaatatattacacaatcagcctttactctttagtaagaataataagcctaagcccaatcccaaagtaagctattttctctcttctctcaattaggtcacaaatttgctcggcaatggagatcgatttgctccaggtgttatggtgctcagatgaccgacaacggcgacatgctctatcgaattttttgtttacttttttcttccagtagcaagtaccgcctctttcagctgctcacaatatcacattctctaggtttgactctggtttcgattttagaggtatcaaatttatgtattcggaagtctcttcatttcaactatggtttgattctggtttcgattttgcaggtatcaaatctatgtgttcaaattttacttcaattcaactatggtttcgaatttaaaggtatggagtttaggtagatatcgaacaacgtatacaatcatccttttctaagtttgtttctttatttctctttcactttaatgtctgcaatctaagatttttttttcttcaaatctatagatctataaattaatctaagatattctctatgctttgctttacttctctttaatggaagagaagaagctaaataaaaacaagaaaaaatggagtaagataactacaattactttggcctatttgagttctatcgttgtttcttctaatcaaatattgtttgtaaagaatattactgctataactgctataacttcacttatatcattaatcaattattgtatgtaaagagtgtacaggtagatttctaagaaactgatgaaagtgaaagttctacttgtgaataagggtgtttttgttctctgcagagtctagtctaggtttatgtttttcatgtttgattaagaaaattagctttcactgctgccaaaaaagataaaaaaaaaaaagctccaaaggtatgttaatatttacttttaaaggtctctagtttgcatgttgaatgattatatttatttatctttaattttattgttcttactggacttgagaaatgatttgtgctctttttctttttggcagagtatttttagagaagaattacaaggatttagatacattgaaccccaaatttcctatcttgatccacagatgtaggtttaacctaacttatgggcaagatatgctattcttttactcttgtctttctaatttatgccatgattctttgaagtaaattccttggtttgacagagagtgcagggtcattgacaagaatgatagatgatgaagagagaaaagatgcatgctttggtgggtcgattagcagagaatggaagccaaaattattgatcctgatacttctaacccattgcctcctaatcaaagaggagagctttggcttagaggtcccttcattatgaaaggtgtatataattatttttataataatccaggttttgttataaaatttgggatggaaatttaaacaataaacttaccattgatgcagattatgttggtaatgaaagcaagaagtattctagctaaagctcttagattttctcgtgggaatggttatgtttgccaaattcttgcattgcttgaagttaaatcgcattgagcagactcgatatctatctatttgagcaaaccagcgagtgtaatcccagaagttgtggcagttggctggtgagtcttgggggattcttctcttagccaaagtaactatttgagtgaatcttaatgattgatattttttcattgcttctgagacaggcatgggcacaaatggagatgcagcagaaaaataacctagctgctaggcaactctttgaggtgactatttcttatctctaaattgtagcattccattgcatctcttttcattttagatgaattcaaatctagtaacaacttaagaattatgttgaactttaatctagaatgttataattgattaaattgtttctttgtagtctaatgtaaagtaataaatgtatttggtgcaggatctactgaattggaacatttacttcactcccatctcacattgttgatgcagctgtgattatgtaactactgtgatcttgaaaagttatcacgccaagttttgttttttttttctttactgattgaagagatagcttcaaacagaggatgtttgggtcttttggagattgatgagttatttttgtgagatacatgtgttctctcaatttctatactggcccatactgtcattcacaaatattttattt

SEQ ID NO: 42398 - DNA, 2159 bp, Cannabis sativa
ataaaacttagtaaacaaaaaaactcccacaaataacatgtatttagagtgacaattcgtgttcgtaaattatgtcttatcgagacttaggtatgacctatttattattgtgtcaaaaactaaaactcaagtccatcccatctaaccttacacatgagtttaaccatatatgtaaataaggaattatgtttaatttttgttaatttatcgactcattaacatgtttgtaatcttgttacgaccgatgtatgagcaatttaatatatttatgtcctatttaactaagaaatataatttacatacaataaatataataaatttaagagtgtatactatactcttacaaagtcattttcgggttgagagttttaactcaaaaatgaaccaaactctgtttaactcgtgcaggtttcgaacgtgttatcgtgtctaacttaaattgtcaccctttccatttccgaatataaatgagtgatagccaataaagtgaaaaatggaatactaataccaaaagaaagataaaagaaaagaacttcaaaactgattaattattgcaaatccatattgttaaaggaatgcctaagaatacaatcatgatactaattgcatggagaagaaagccatagagatcaatattcaaagttatcattaatgatcataccacacagatatcatttcccctctgaaattcgtccgaaataatttgcaaagtgcttgacgagacgttatagctggaattcattgcaggataagccggagttattatcggcattaaatgatatctatctctgtgatatcttcttggatcccaaatttgaagccccaaagatccttcttcaatgttgcagagcataactgggttgggccatcgccattgagtatacacccgaaagaatcgggatactaacatgctgggcaatgcattaggatataattggcatattcgagccacaagcaaagcccagtttatcccaccaagaaatcctgtaacctggccatgattaaataaacatactctaattagtaaaaagattgttgttctaaaaaagaccgttgtttttcccgtaataaaacacaaatccgtaaaaaagataaggtgtattgtgtaaatctgaagcatacattagaataaacaccacgacactttgcccataatctcatgcatcttagagtcgtgcgaaaattctgcatacagaaaagaaaacaagataagatcaatgaaacattgtaggtgtatccacacacacgtccaacctaacaaagctataaacaaacctgaatatttggaactaatcgtagaatctggtcagtgaccctacaaccattcagactacgaactgtctgctcgtctgcattctccagtattgagttgtgtgataaatctagctcctgttccaaaataactataagtcaccgtagaaacaattgaaatcatcaaatttacttagttaaatccattaccataatttcaccagacaaccattaaacaaaattcaaagccaaattttagcatccctttggacgtgtgtggttaaggtgcatgaacttccatttcaaaactaaatggtaatgatatatggtattatttttccacatattagtaatgttggactatttctaccaaacagtacgaagagaacaatcatcatgaataaaatacttacttcaggaataatccagagtgacagtttagcataaagtaaatctattgaaaccccactaaacttgaacttcataactggaacgtgagcatcaggcactggatgcaactctgtaacttcaggcatggctgccaacattctacctagttcaccaaagaaatcttcctgcatccaataattgataggaccaattttgattatcaagttcagaaaatagtaaaaaagaagtaaatttactagtgtttgtgttacaaaagaggaaactagatctcacttctcttgttgcatatctaggtccaacgcagagagtgtctatatctgcacctggcccatgcacctgtcgaaaaacagagaaaataaataaataaaaggaagatgcataatataaataagttagtgacaagatactactagtgtggtgttaaatgaaacatcaaagacattttaaattaggtgaagaaatatcctaatcaacagtttctacttttacagcaaaat

SEQ ID NO: 42399 - DNA, 7333 bp, Cannabis sativa
  modified_base (4336)..(4342): a, c, t, g, unknown or other
ttggattggatcggttactttttgaggtcaaacaacatccaatccgcaaaaatgcggattttagatttttcaatccaatccaatccgcacaagtgcggatatcgcacttgtgggattcgattggattggatcgtgcggattggattggatcggatactttgtgaacacccctactagacccgaaccccggacacagaccccgaaccctagtcctgggccaagaccccaacattgacctcgatttcgaacacggacgcagacccagacccgaaccccagaccctagacctcaaccctgaccaggacctggacccagtctcggaccctaatctggacacaaacttggatcccgaatctcgacccgaacccagacccagccaagaacttacgacctagccccaggttttggatccaagttcaggattaggtctagcttcggggttcgaggtttgagtctgggttcgggttggggtccaggtgtactgtgggtggggctgagtgtaggtctgagtttggatcagagtttaggtctaggtctgggtttggagttaggtttgggtttgcgtctaggtccaggtttgggaggagacacactagggtgtccacattagaattttcgtaaaatatttatttatagaagattacagtattgttatttttgaatagttagcagttttgtggaaccctcataaaaaaattcaatatttagttatgccaatcgctatggttgtagcatttctcataagtttacatgacactttgaagtgaattaagctaaaacagaaattccaacactaaagaatgatgagaaaaagatttgttgtaaaatgaaaacaatattttattagaattaggagtgaatgtacattcaattgtttcccacataaatatacaagtaagattcaaaaagtaaaatatccagtttttacccatttttggaatgggatgcctcttttcccccaagtgtttgaataatggcttccaagaccttaatctccttgtcgcgcttgtagatttcttcttgctttgctcgcaactcttccatgtgcagttcaaacacctctgcaagaaaaaacagaatacaccaaagttaagggccaggtattttggtaatgaatttcgcttgcaaaacacaagcttctaataagaataacgaaagtgagtccaaaggtatacagaatgtttgtagcctatacgaaataaaggaactataggtaagtaggaatagtttcattgggataattgaactctaatcagcataagcaaccaacactttaaactacgattggattggaaatgacaaaagcccagaaagtgcaaagataacatgcttaatctacttagggaaaagaaaaagtggattggaaatagaagttccaaaaccattaaatcttaaaaaaagttacaagtctcaaaactaaaaacgctatcattcgtggccaaatttgaaacggctaatgctggtcttactttcatagagagagatcaggaacataaaactttgagctcttgtcaggaagactagaagttgctttatttaattcactttcatatagttttatcaataattttatctaaggtttgatagcattagtctttatttaggtatggtcaccattctttgtgcaggtgattctacatgacagtgaaaattgaaaaagactaaacattgacaagaagagtttgttgtgaccaatgcacacagcacagtatgctctagtcccttttcaagcatgcccaacaattagaatttatttatttatttttgagaaatttaggtcacaacaatggtgtgcttaaaaacaaaatgcaatcaaccgaacaaactgagacagtcaacaccaaaccaaacaatttaactaaactagctaaaaaatgaaatgaaatagatttaaaatgaagaagactaaaccaataaccaaagtagagtaatttttaaccccctacaaagaaatagattgtgcaaaatattcaagactatttgaaccttattcaaatatttacatccatacagaaattccatattgatccagaaccaatacaatacttttcacgactaatttatattgtttatttagtttcaaaatattactagaccaacatcactgcaaacgatgaagtacttgcagaaaaaactgtaaataataactttgaagccctagactatgtatcttaagatcccgggcaaggagaattctaaatacatcgtagcatatagctcaactggaagatgttcgaagtataaaatggtctaaacactaatttgagaaacaccgctctctcgaatatccaaaagcttgcctcttagtgctacaacttgtttctaaatagcatactaccttacaacttctcttttattgcagaccatcattgtctagctaatactatcttgaccattaaacaaagccgtgaacaaaggtgattcagttatgagcaatataatggtggaattatgagcacaatatccatctagatttctaaaattcaaagatcaagacattacaacagcatacctcaggtgttctcgagaaactgaaaaattaaaggaaacaaggaaagttgggaaggaaagaattcaattgcacatacttgtggtgttctcgagctcttttgtaatctcctgtgcacgaaactcagcagctttctgtgctgcctcaactgcttgtttttctttacgtgcacgagatgatgctacaatggcagcatcaaggtccctttccaaagattccaccctttgttctagagcctaaacaagacataaagttcccatatttgattattaatgtgaaatatgaattacttctagacatttaaatagcattagcactatcgctatgaaaacatttcaccacagatgaatctgaattataaagctgcaaatgatacatgatgagaaccaacattgatcagcccagccccactgtttagcttgtatttaaaggacaacccatttatatacatgacgatttgaagcatttaaaattttaaatagtaaaataagtgactaatttaagtaaaagcacaaaagaaattgaaaccataacttcatcaccaaaacccttaaccatgagcaacaaataaggtttcaataaagaagtattaagattaaatacaaaaatatatatcaagtttttcgatcaagtaatttgagaaagaaaaaaatgcagccacttctgaatataatcatctggaaaattgaaatcctttctttttaaattggagtttctgaagaatgcacatcatatgaaacaaacataacagcacccataattcattgtattcaaatctacgatctatcaatatacccattacgaaaaaaaatactgatttcaaaatctcatgttttacactacacgttgatcaatactcatgggaagtcaacaccaaatttggaattaaaacccagaaataaaataatcagacagagaaagaatcaaggataaaagcaaagcttaattaattaactaactaagatgagaattgcggaagagaccttgatggttcgggcttgttcggaggttagagaggctttggcaaaggtttcttcgtcaacgaaaacggctttcttgaagagaatcttctgaagggagtccaaattggaagacaactcggtgagattggtaatggctccgttccatctttcgctgcctttctcctccattattgttcttcttcactctccaacacttttctgaagaaaggtgcgaacaatagcatatttattttcctttcaaaaaaagaaaaaaaaaatatttatcctttataatatttaaactttaaaattaaattcaaaattcatctttttttttttttcttttttcaaagaaaattcctactttatcatttttttttttttgaattcctactttatcatttacgcatccaaaatatgtatatattattattttttaattatttcataaatatacaaaaaaaaaataataataaaaaaattataaaaatataattgtatggaattttaaatatttttacaattttttatttacagagtttacaatatttttatattgtatttttatttgttgttgattttttattatttgtatcttattttgttatagtttttgatattgtttgaatgttatttttgtgtattgttttttttttcgtgttatatttatacaaaactataagaatatatatatatataaaaccagttctcataacaattttcacattgccatttcaattcgataatcatgttctatataccaaattggtactcagttgtagcattgcatctctcttatttatttattttttttttgaaccaagtagcatttagcttttgatattaagaatattaaattttaaannnnnnnaaataaatgtaatgcatctgggttttctaggtgtctatatttatgagttaataatggaagtagtagtaacggtgtaagagaattgtaatattgagtatttttgccttcaaaaataaagataaagtatttaaatgtataaaatctgaaacattaaatatttatgtcgcaatttactgtttttttatcttttcaaattatacattaaaaatggtattttgtaaagtaagacaaaatataaagacattacgactatttattaacgatgctaatactgaggtgatattaaactatgtgggaatgaatattaaacttatactaaagatcatcatcaacgaataggaaagtaatacaatcaattgctatagagtattcacataaaaaaattaatcaatcaatacattatttttattaaaaaaataagaaaaattattggtcagtgtagctagacagtagcctcgttacaacaataactcaaaaaaattttaattctctctcctgcacctcatcccaatcctctccgtacctaacaaacaactcaaaaacacccccattaaacttgccctaatagtattatgatatatttaagtgatcttaatcaccccattaaattctaagtttgtattttaattttattttaaagattgtcattctaatataattgtgttttttttttatttagtgctatattttattaatttcgctacttctaacaacaactattattatgggaaggtatttttttagtttggtgttatatgaagatgttatagttttattgtctaaatttataagggcagttttgtcccatgtggctcataataaaaattttacagctcatggtttgacaaaatatgtctttcgattagacgatgaactattctagtttgaggaggtttcaccaccaattgtaatttgctgtatttttaatcatatctgactctgttcaccacgtcaaaaaaaaatataacttaaaagtctaagaaaaatatactaatatattaaaaaaataaataaaatattaacaaatccttacccagacgagagtgtcattcgcattccaatcccgtttaacatttgaagataaaacataatctttaacatttgaaaataaaaagtaatccatctatattctttctttaacttggtttcggatagtatccatttaacatataaggatgtgtcatacaattatataaaaaaaatatattattaaagtatgataaatacgccattctgaattattgaaaaataataatagttttaagaaatcaagacctaattttgtttagaaaaaaaaatccctaacatctcacctcaaaaacttatccaacaatcgaaaaaaataaacaaaatcattcataacttattggagattttcgtgtttgctttagcttcttaacatgatcaacattttactcactatgatttacattattcaaacatgacttgaatacacagctagccaaaccaagtagaatataatatgtatcatagccaatcctagtgccttggaatcaagcgcgcacgcaaaggattcttcataacaatggtgaactcttgtgcctcagataaatcaacttcatcaaccttattccactcaaacttccaaaccaaattagcaacaaaatactccaaatgaagaatggcaagaccagaggcaggacaaatcctcctccctgccccaaaaggcatcatcttaatctccctattcccctttatatcaaactcaactttcttatcattatcaccaccaaccaaaaatctctcgggcttaaactccataggatcctcccacacattggggtcccatcccatctccgccaccatgaaattcacactcccattcttcggcacaacatgtccgcccacaaccacgtcctcactcaccacgtgtggcagcacaaagtgagccggcgggtggcgccgcagcccttctagtatcacagctctcaaataaggcatattatgcaaatcctcctcttctatttccacctctcctgttcgtactaacactacccctttaatttcctcatacagcttctcttgaatctcttgatgtttcactacattggccatgatccactgcagtgccgtggaggttgtgtcggtccccgcgttgagaaattccgagcacaagctcaccatttcctctgtttcaagctttcttttcttctctggtaactccaaaccgagtaaagtgtctacatagcaaagcacggaatcattatcatcatgagcagaagaagccttggctttggcttcttcattgaccttttttcgggaatttatgagggggattagaacagaatgttgttgttggcgtagctgaaacaatttgtgccatctttttctgaaaagaatcttggtaagagttgggcagatattgagtaagttgaagccggagaatgccctcatcatgcgacgttgcatagttttgatttctttgatctttgattcctcgagtttgtctccaaagcacatcaaaaccaagagacaaaacatggcgtactggaagtgatcgattacgcggaccgcggcaccttgtgttagagaaaacatatgatgtttgctcattcttcataaaatagttatattaagctacatttatatataaacagattgaatgatattgaaaacagtttattttatttggagcagtgccaccactatagtattgatttattagcaatagtctttatatatagaaacagaattcataattttcttcttttatattattttgtattgtatatgttttttcactattgtgtggttaaggtttttgatattacttaagaatgtaatttagcaattcttcatttgtgttaaaccctgatggatttttttttaaaaaaaaaaattaaaaaaattgggaaaaataatataagataactgattaccttttattgcttttctagtgtatttttttaaaaaatgtatttttgcaaaaatgtgtaatttccaaaaaagattttgggattttaaataggg

SEQ ID NO: 42400 - DNA, 3919 bp, Cannabis sativa
catatattttcattatattcgaaacgaattgtcgttttaacgaactgtcgtttcgaatcattaaaacgattcgtcgtattttgtttgtcttctcccaaaaaaacagagtatcaaaaaccctatcagtctcagaacctcaaataataaaacccttgtggagtttcgcctgaattttttttaggaagccaccgagttcactcaaaactcggaaacacgccatggacgagtcaccagccgacgttcaactcgttcacgaacctaaggactctgctactccagtagtggaggcctcgaacgggcagccagagtatagaacaccggaagagctcgttgccaaggctatcgctccggtcaagcgagagtttcttcgtcctcctccggttcgacctgtttcgaatagtaacgaagacggtgccgcttcggagtcgaaggagaagcctgctcagcctagtgttggtaaagagaaaaagtctaagcgccaagccaaacgtgaccgcctccaggtactctctctttatatatgtaatgtagttctctatatatgtgactatgagcgtgttttaacatggtatggaagattgaaagttttagctgattctccaaaccttttgggatatattatatgtaaattttatcatataaatttctaatggttctgaatttttcagtttagtgattttgttgtatgtattttatttgtatatgagatagaatagaaagaaagaaaaaacttttggatgactgtacggattaaaaatgatttttttcaaccctgtagcaacaaaagtctacttcaaatatctgccctgaggttgcaaagacaggagatcctagttcttgtccatatagtgataaatgccgtttcagccatgatgtggaggctttcaaggatcaggtattgtaatgatcattttattttcattgttgtttactattgattgggttgattttttcttttcttttgcccttgtataatgtctttggcatttgagaatttattgagttagatatttctgaatgtagaaacttgaggacttggagggggaatgtccttttgttactgctgaagaaccatgcccttatggtttggcatgtagatttttgagtacacatccggaaggtgtttctggaatgaaaagcactcgaaggaatagctcggaggtgaatggattgagaaaagatgttcaaaggttgttgtggaaaaataaaatgaagttcccaaaagcagatgccaaagttaaagctcttggactcatggtatgagcaaagttatcagtcaatagtcatatctcgttatctgctctttctctttctgcgtccttgtgtgtctttgccgaattgctttagcacgttttgttattttgttttgattatctctggtgatataattttgcagagttatctgattacattttcttttcttgtgatgcatggttctcattcattttgcttagttacatgtctgccggtttaattgtggtattctagatctctatgtttagaggtgaaatcgtggagtaaaaacaccactgatgctactgatgtgtttgttgtattataaagagttcactctattttttaatcctttgtgcctgatttcaagatgattcattcagtaatttcttcgcttaaaagtttcaacttctttgctcttcattacttaaatggatatttcgtagcctgttcttctgacaataaattggtttttaagggtttgaatgctccctggatttttgtatttatagctacctgtatttttgttgcagggaccggccaattctaaagccaagatttcagaaaataaggatggtgatgatgtcattactgcaaatatttgtgatgctgccaatggaaatggctccaatgcattggttgatgctacagaaattgaaaagtctgctgtattagaagaaaacaaagatgttgaagatccatctgaatccaatgaatcacggccattaaagaaaccaaaatgtgtagatgcggaagattgttgtgacaaagtagaaggtggaggtttgtttatccttattcttctctagatttttcttatctattctgttttgtgttttcccccttctttattatcacaggtaccaatgctctagttgatgtattgttaattaatttgcaataggtgtaagtggcactgagaatgttgtatgtgaaagctccaaacaaccagaagcagattctactgctgaaattttaaccccagaaactgatggaagcctgaaagtacaccctcgcgaaaagaagattattgactttagagataagttgtatcttgctcctctaactacagttgggaatcttccttttagaagggtttgcaaagtcttaggggccgatgtgacttgtggtgaaatggccatgtgtaccaatcttttgcaggtttgtatgctgtttccgctggtaaaagaatttgagatagattatcataatttcattttctgctggctgaataattgagatgtaaattaaaatttggttggagctcttaatattttgtctaggctgatttccttgtagggttaaattaattgctttaacgcgtttttaattttctaaggagcatgcaattatttatattataccattttatacgtacaagcctctccagagtggaaatattgcaccactccattatacatatttttgtacgtgggagagtttgtgagtttgtgtttacaaagttaaagtgcgttaggaatttctttgacatttattctgtttcttgtaattacaaataaaattacaaattatgtatgactagtattcttttatttatcacttgagatgttctattttcttgaaatataagaggtgttagcttctattagttgattgtaaactttctttaatatgtttgcgtggatacaggttttttttcatcgacaatcaaattaaatgcataataatgatttttgacattatatttaattacaattccacatgggaacagggtcaagcatcagagtgggcattgttacggcgacatgtgtctgaggatctgtttggtgtacaaatatgtggagcattcgcagacacggtctcacgtgctgttgaacttatagaacaggaatgctcactagactttattgatataaatatggggtgccccattgatcttgtttgtaacaagggtgctggatctgctcttctcatgaagccaatgcgaatgaaaggaattatagaagcagcttctggcacaatggaaaaacctttaactgttaaggtactaaaattttttctcatccaaacaaaagttctgtatgctcctgtagtgtggtagttttttcttgattttcttatatgcttgattgcgtacttcttattctctccttcagatttcatcatttgcttggctacgttctgaactcctttttgatgagatgcattttaactttttttcttcttgctgtactaggtgcggacagcctactttgaagggaaaaatcgtattgattcacttattgcagacatgggaaactggggtgccagtgcagtaacaattcatggtcgatcaagacagcaacgctatagcaagcttgcagattgggaatatgtataccagtgtgccaataaagcccctgatacattgcacgtattgggaaatggagatattttctcgtatctggactggaacaaatgcaaggttgattgccccaagctgtctacctgcatgattgctcgaggagcgctagttaaggtctgtagtaagtagtttttgactcacatatattcttctttttaacaatatagcttaaagtttatatttctgctttgcagccttggttatttactgaaatcaaagagcaaaggcactgggacattagctctggagaacgacttgatattctaaagaagtttgttcggtttggccttgagcattggggttcagacacaaaaggttcga

SEQ ID NO: 42401 - DNA, 3329 bp, Cannabis sativa
taccaaaattataaaagttcggcctcttgatgatggtaataccctactccctttagttgtaatgagatgtgagtagataaacaagaaaacattgatctccctcgaaagctcttacaatgatctctatgagtattttactcttaaatctagattattctctcgtgttttctatctgaatgaaattcatgttcttgaatagtgagatgagtccactatttatagggagtaaatacatcaaattggttttctaaattcagcaaggaataaaatggaaaattagtttactttctataattacaataagtagaacaagaaactaggtaagtttcctttctttttcaattctatgaatttatcccatgaatttatggattgtgccatatccttcaagtttgaggatatataagatatatctctaaaatttgtttaactcacgcctcttggttggtgtatgcgagccatctacttaatggaagccgatcgagtgtctccgcatgctctgcttgaatgtcctaacttctgtttatgacttcaagtattaaatctccctgcatggctcattaaaggtgggattgcccatccagattatacaatttattctacgtgttacccaaataaatgttacattatcctgcctagaaatttaaataacataaataaataaatataataattattctctattattctttccctaaacataattttaatattatatacatataatattttgttttcttaagaatactttaataatatataaataatattttatttatattttaataataggatagtatatataataaaaagtatattatttaaataatatagaggtaaaaaataaaaaaagttgatatatattttaatgtaaaaaattgaggtaaagttttcatattgtattttgaaggattttaagagcattgttattaatattggtgcctaggtgatgttttacgattagctaataatattctttgataattaattacaataataatataatatggactaaattgctaagtagggcctttagcaattctcagggtgatgggagtgctcacatgtgaagagtgagaaaatcagtactgtgaccaagaaaataataataaaaaaagaaaaagtaaaaagaaataatcaaatgatagctgctattctagtgacctttccaaagtgtctttcctagtcaatttctttcacgactctttagtcttaagtcttagtctttatacttctttctcagtttcttcttcctcagctactacagtgccactatcacagagtaatcgttcatggcatcttcaccatcatccttgaaagctcaaaattctaacaaaagtacacacagtgaagcttctacatcaccacctcctatttcttcacaagatcattttcaagatgatgactctggttttcaaacagctccttcttctcccacaccagaaccagctattcctcctcccaattcctctacttttccggtagatgtttcaccccaaagcggaacttcaactcaaatctctcctcctcctccgacccagactatcaaaccctcttcctctcttcctgccctactacatggtaccactactaatactattactatacatctcttttctttttacacatctctgaagaaaaatatttctcattttgtgcttttgtaaattacagagagagatgctctcccaagccaccatttgctcaaaattaagtccttttcaacacttttgaaatctcccatagaaaaattcagtaatgattttaaagctgggggctacgaatggtttgttcatttaaatttgtgaactaagcttgtaaaaagatcattattaattaatatatgctgaaatttattttaatgtttaggaactttactatatacccaaatggggacaagaacaaagatggagaaaactatatatctgtctacttggaaatagtggaaacaagtaatcttcctgctggttgggaagtcaatgctatctttaatttctttatatttgatcatattcgcgataaatatgttggtctccaaggtatagcttcctaacagcttcatcatcatacattattgaatgcttttacttgaccaaattttataactgaacctttttgttcttaaccattgtgagagatgcagatacgacagtaaagagattccattttatgaagacacaatggggtgttgtcaagtttattgatcttgaaacatttaacaatccatgcaatggttaccttgttaatgacacatgtggttttggtgttgaggtttttgtggttaaaactacatcgaaagcgcagtgttttagtttgataaacaagcctgtgacttatcaggtcggttgggtttttcgtaatgtgataaaaacaacagtcgagcgttacataactgagtactctgttttaggagattacaaatggtaagtgtacttacaaatgatcatagaagagtattaattggatgaacatacacctgtgatgatttgagttgtttttgttctttttctctctcaggaggctgctgttttatcctaaaggataccaagtagaaggcaataagatcaacaatatcatatcaatatttcttgatgtggataattcaactctttctgctggctctaagctacttgtgcatttcactattcgattggaagacaaaaagaaaaatagcaaccattttgaacgaagcggtgagatatcataatcttaattccatgttttcccaccatttctagtgtactaaagatatatatctttcacttttcagataccacagcacttggttccggtgctcggggatttcgtaattttatgtcagaaactaagttcaaagacccagaaaatggatttgtggtggatgacaaatgccatataagtgtagaatttgaagtacttggtgtagtgacactagaataatcaatgtagcttgtcggttttacatttttcttttggatgtaacgttatgcataacttttcaagtataattacccgtttgttgtttggattcaaatgtaaaatagaatatatatttgttagagtcgcacatcatggaaagataatagtatgatctattcactatttctcttattaccaactagggaactaagctgcgcttcgctcggaattgaccctagttttgtatatttttttactaactgaattatattatacaaaagggtaaatattattttggaccttgtgttttgcaaaagctaccaattggactctctttttgttgaatgataaaaatgactttatattttccaaaatggtaaaaataggactctgagctcaattttcaacaattttattttttaatataatca

SEQ ID NO: 42402 - DNA, 6410 bp, Cannabis sativa
aaaaattgaagttatactatgtctttagtttctactatatctagaaagtaaggttttagaaaaaaaattgaattcctcagttgaaaagaaaaaaattgtattcttaggagagaaagtgaatgaataattaattgctctcacaaagtgagaggttcaactcccttctaacttctaagtatctacagagcaattgctgtagtttttctagtccccaaatatggtagggctaggtgggatcttagtttcaaacaaaacaaaagattaattattgtaatacatttttgaatcatgcgtacatggtatttttttaaacatccaactaaagaaaacagccaccattagattatgatctaatcaagataaatggttagggaaaaaaatcattacatatggtgatatatatatattttttctatcaatattgtagaacccaatttaaagaaataaacaaaagcttactaaatataataaggggggttatgtttacatatttatctcaagtaaaatgactaaattgtactcttttaaatctttaattctatttgtaaaattttaggcttagttagtatacccaatgtctaatagaatttaatactctattttttctttaaaaaaatttgtataattcaaacctaataataggaactaaatggggtgatgctatatgaataaatgtgttttcctatttattgaacgggtgtatttttgtaatatttattgaactggtgtttttctataatatttcttgaccatgatagccatcgtctcagttacacccttctttttattgaagccaggtctttgagatgtgtgtgtgtgtgtgttttttttaacttcgtaaatatacccaatactatggcaactgaatttaagctcatggatttgatggaagcttagcagagattgagaaaatatatgagattgcattgaatggttcagatgatgagaagatatcggctgctaacattctttgtggggcatctctttttcgtggttggagtattcaggtcttggtgattttgtttactaatgaaaaaggcagacaacttaaatctaatctcccactttttagctagttctctaaagttactaatgtatatactttttattttttgcaggaaaatgtgtgtctttttatcataggattattatcacctccggttcctgcagattactcaggaagtgagagtcatttgatcagccatgccccactcttcaatgttcttctggttgggacatcgtcaatagattgtgtacaaatcttctccttgcatggcttggtaggttatagttagaaattctcttgctgatatccgcacttaaatgttgtcgtaagctaaaaatcgattgtaaacaaagttagaaatgatatatcctctgtaaaataaataaataaaattaaactacagttggtttcttagacaggatgtcaaggacatgagtttagttgtttgtcttggcattacggggtagtaggtttaccagtcttgtttcataattttgcaacagaagaaaattcattctccttgttttttgaattgacatggtaattatcatttgagacttcaagtcctgaagaaacttgttctttttgctctttaggagacctttctgccatataaagtaataaagcgtagttgagaatgaagtttttaaacctttaaattttacttgtatttattgtcaggttccactacttgcaggagcattgataccaatttgtgaggtttttgggtctagtgttcccaacatctcaaggactcttccgacaggggaagaactttcttgtcatgcagttttctcaaatgcattcacacttctactgagatcatggcgatttgatcatgcacctctagaacatgtgatgggagatgcgaggacgacaatgggatcccaactgagtcctgaatacctcttattgattcgaaatgctcgtttagcatctgttggaacatcagccaaagatcgaattacaagcaggagaatttctaaacttatcaccttttctactgaacctataatattggactcttttccaagattaaaactctggtaccagcagcatcaaaaatgtatttgctctacactctctggacttgtacctgggacccctgttcatcaaattgttgatgcactcctaagtatgatgttcagaaaaataagtagaggcagtcaaccattaacccctacaacttcaggaagcagtacttcatcaatctcggggcctgatgactcctcaattagactcaaagtgcctgcttgggatatcttggaagcaacgccttttgtgcttgatgctgctcttacagcttgtgctcatggacgactctctccccgtgaactagctacaggtctgtcaaaaaaaaaaaaacattgggggtgtgggggtggttgtagtagtctttcaaaattgatttctattagccattttaaagggttgctttgttgaatgtttactgttttttaaatttatgggatgttgatctgtatcctactttctcaggactgaaggatcttgctgattaccttcctgctactttagcaactatcttaagctatttttcagctgaagtaacaagggggatatggaagccagcctacatgaatggaactgattggccaagccctgctgcaaacttgtccgctgtagagcagcagataaaaaaaatgcttgctgccactggtgttgatgtcccaagcctctctgttggtactctcactttcatgtagctgagctctgcaattttaattttgttaaaatgtctgttattaaatagaaaataaaataagtactgatgtgggacagtttccaacattctcgagtgaagttgcagtctgttgaaatcttaatgctgaaaatttgtcagaatcaattagctaacactaaacttctcatgctattacttgcaggaggaagctctccagccacacttcctttacccttagctgccttaataagtcttacaataacttataaacttgataaagcttccgaacgggccctccagttaattgggccagctacgaattccctagctacaggttgcccttggccatgcatgcccatcattgcctcattatggtcccaaaaggtaaagcgttggagtgacttcctgatgttctctgcttcgcaagcagtcttccaccataacagtgatgctgttgttcaacttcttaagagctgcttttcgtctacgctcggtctaagttcctatcatattcacagcaatggtggggtgggttcccttcttggccatggccttggttctttctcaggtggcatatctccagttgccccagggtttctttacttgcgtgtacatcgctcagttagagatgttatgttcttgacagaggagatagtttcacttctcatgttctcagttaaagagattgtaagttgtggactaccaaaagaaaaagtagaaaagttgaagaagaccaaaaatggcttgagatatgggcaggtttctttagccacagctatgtcacgcatcaagctagcagcatctcttggagcttcattggtttggatcactggcgggcccagcttaattcaatgtttgatcaaagaaaccttaccctcatggtttatagcagcacaaggatcatcagagccagaaaaccaagaaacaggatgcacattatctgttctcgggggatatgcacttgcatattttgctgtgctctctggtacatttgcatggggaatcgacccagtatcacccacttcaaaacgtagatcaatgattctcggagcccacttagattttctcgcaagcgcactagctgggaacatctcattgggttgtgattgggctacttggcgagcatatgtgtcagggttgctgagtttaatggtggggtgcacgaagaattggatgatggaaatcgatgtggatatactgaagaggctaagcaagggtttgagacaatggaatgaggaggaattggctttggccgtgttggggctgggcggtgttggagcaatgggggctgcagctgaactggttatcgagagcgacttttgagcttttagatggacggtaggctatatagcatgaaacattgatttattaacacgtacgtaagtgtagtttgttttgttatatcctccttaggatcttttttctcttccgaaatttagctcatgtaaattttaatcaggttcaggttaaacatgtttattggaataattattgaaatattctttaaatcaatcctgcgtgacaattattattcaccttcattgtatgatttttttggaagaaaaatctcaaaactccagcctaaagagcaagggctctaaaaaaaagggggaagaggggatatcattaaaaattcatggctgccaccaaactttactagttgctataggtaaaacaaacttaataagattagatcatctcgaatgggagatgtaaaaattgtactatatttgacacaaaaagtagttttgtcgtgagtttacatcaaattttaactttgtgctcaatgtataattaaaaaattttaatataaaatttaatatctaattaatattttattaaaaaagtaaaaactaataattttattatcaattttattattattttaatatataagtaaaaaagtaatataaatgttttataatttaatattataattaaatatactaataaaataatacaaatgacataaatataaataaaaaagtagtgcatttattgtggtgtaaattttaaatgttgtgtcaaatttggcacaaaatttgctatcggctaaatttacattactttttagcaaaccattggagcacactttttattaaatgagttatattttaactttctaccacttatttacatctccattagagacgctcttatgtgcaacaatattaaatgtcttagaacaatgagacagactcacattattaaagagatctaaattacaataaatatatcgaagaattaagcctaacgatgagtctaaatgaacattatagttaatttttttaaccatattaagacaatcagtcttaaaatgaacaatttccagactaaaacaatgacattggactgttgcatgacgacaaacaagagctttaacaacttcaacctgaaaatgttcaatcatgtgctaaatagctgagataaagacaactccatgagtatcacgaataatcatactcatacaacaaaaatctcccgccgcatctaaagctgcatcaatgttgaccttagaaaactcgccaaaaggggatacccaacgaggcacagtgagaggagaagaagaagacacgagcgatcttgatcaaacccttttggactctaaggaggcttttgataatcacacaaaaaattataggtccaattgacaaccaactatggagacatcagagagttattatgcaccattttatttctcctataccaaactttccacataatgacaagagctataaccacttgagaaattggcaacaggtccacgaaaaggtagataaaattaataaaatcagtacaagtaaccaaagggtctccgagattaaactcacaaagttttcggcactctgaaagagtagatcatccccacaaagcatgatgagtggtctcctcctagacatgtcacaaaggacaaacgccatcagtaagcataccatgcttgctcaaattaaacttgaatgagatccaattgtttgaaattttccaacgaaacattttaactttgtggagattgttaaggcaccaaagtttcttccactatcctgaaaaaacatgtgaaggagaaggtttatcacgctctaaataacaagtagcaaactaataaccactcttgatagaatagaagcttgaagaatcatggtcccaaatcaatatacgatatatttttcaaccctaaaaaatcctaagtgccaaactctaactctctctctaacccacacaccactttctctctttagagaattggtgtatttcctctcatctcagttcacagtatctcatgacttgagtacatactgtgatagaaaattcatctaatcaatcttataagcccactcttatcgtgagtgttgaggatgatctagaagacctggtgtgaagtcttcattaagttcatatttcttgtagattggatgatcaaaaatatataaaaaaagaatcaagaatacactgatagacatcaagaggtaaaatactttttctcatagtttagatttaatttatgtaattatgttgagattttgggattatggttcatattagattcaactaaaatatttttataaaaccaccgcttctactttcgactctgatatggaccataaaaatttacaaatggtatcagagcctgttaggctaaaattagtctaagtttcgggtcatattttcagttagttttcactctttgtttctagttttagggct

SEQ ID NO: 42403 - DNA, 11892 bp, Cannabis sativa
  modified_base (6060)..(6079): a, c, t, g, unknown or other
tatttagtagatatttagtctcctaactttgtatataaatatgtaccattctatgaaatagacatataattcgaatcactattttctacaggtataaaaaaaaacatcatttataaaagtgggtatatctcaaaaaatatgaaaataaagataaaagtggtatatttaattgaaatataatatgaaaatatttttgattaatatatataaaaagaagtatctctcaatttatccatgtaaaaaatcaaaacataaaatagtttgggataagttgaggaatactcttttttttttatctattaatcaaaaataccttcttatttatattttagggattttttcatttttacacttattgtaactaacgaagcaacctaaatcgcaactaacgaagcaacctaaatcgcaacccacatagaaactactttagaaatctattgtatatgaaataatttccttattttttattaaaatatattcagttttacgagtgagttgtctaaaatattttcattatctatgtaaataatttattttaatttaaggagtttattgagatcatcggggtatattttaaaaaatatgaaaaaaaaaaaaaaattaaaataagtaaaataaagtgatatatttaattttctcaaatagattcgctgcaaattcactagactggttgggagttgggaccaaaaaaaaaagggggaaaatgaagggtagttaggtcatttccgttagagtgttgagagtaagaaggctttcactgtgtcgaccttccatggtaatcggctctactcacaggcgacttcgacgggaactcgcgacggattgggcacctgggttctcaaaggagcaagagacttcgtcggggtttccaacagtgcaggtgattttcattctctacgttcctatattacacttggccttttcatttctttttttcttttccattgatgaaatttgagttggtgtcgttcaagttaataagtttttggatttccactgctaacattgttcaaaagaacgatagaagaagaagaaatattgaaaatcacctcaattaattattattaattttcctgagttttgaaattttgattagggatgatgaagtatattccttttaaggttccatttctccctcaattttgttttaatttatttttttgaatagaattcagagtatcatcgtgagaaaattagtacagatttttatttatttctcttctaatttattgcatgttaagatttatttgaactcttcattcagtaaattgagatggaaatgattttatgttccatttctctcttttgtaggttaaatttagggtttctgaagcgtgacttatctatctctctcactcctcggtatgtatagatacatgtgatatatatatatatgtttcatatttgtctctgtttggggggtaatgaaaaaagagtgaaaaacgagttattattattttatgactaatgaagctgagagagagaatgtgcagaatgcgattttgataaaccatggagggaaatggtggagagaaaatgatagagcccattgtgtggatggaggaatattcgagtgttgcgtttggacaaccgagtccagtattaaggaaaagaaagaggatagagttttcagggtggggttcaacagccttaattgaattcttgcattcaattggagttgacactactcatccaatctctcagatcaatgttaataaaattgtcaatgagtatgtggagagtattctaccctcctcaactacaagtttaatgcttgattttagtcaaaatgggaggaagaagaagaagaataagaaaaaggttatttgtgatgagaagcttcgatcgcttttcggtaaaaaatccattaaccggaccatgatatataaattgttagaatcccatttggctgaagctaatgatcaactttattctgatgacgatgatgcaattgattatctttcttatgcgaatgaagaagagagagttaaagaagaaaaacgagaaaaatcccatcgtcctaaaagattgattgttgaagcgtctgcttctaagtctaaccttaaaagttgctttgctgctgtcattcctgagaatataaagcttgtttatttgaaaagaagtttaattgagaatattatggaggaggagaaggagaaggagaagaagggtgagccttcaactttcgaaacgaaaattgtgggaagttttgtaaggaccaaatctgaccctaatgactaccttcagaaacactctcactgtctcctccaagttataggttttctcactttcttcctcatatgcttagttatattcactctgaattttacatctgcaatatctatgttatgaattgaatatcttcattttgtattttgactaggtgtgaggttctctgaatccaataaaactctttttcaagtttctggttttataaaagacgtccctctatctttgatttctgatgatgatttctctaaggtaatctaatatatttatttggatatactttgaattgggttgatttgagttatggcttctttctatatttttatatatatttatgggcttataccttaatatagcttgtgatttatcttgtcagcaacatgtgtaatcattggattcggcctttgaaaaattggtcatattgtatgttttgctggagtttccggctgttgattttgccttttactgtattttttatatatgtttccatggtgccaagtctttaaatttgcatattctttgacattcctgttgtaagtctagatgtatttgggattttctgctacgtgaaagtgctgataagtagtgattagtaggcttctatattttcgttggaactttggtaacaatgtcggtttgtgatatctagaatcgcatgcagtaaaatgttttttagtcctgagtttcacctttttaaatttcttttgcgtactaatcttgttgcaatgccttaaaggaagaatgtgaggatttgcgtcaaagaataaaaggtggaatgctcaaaagacctacggtggtatttttcctctatttcgtttgcatattaaatttctgctctatttggataagcttttacttttgcttataactagaagtataagctaagtaaaagctttaacttattttttctatttgaataactattatataaagatcttttcttataaaaagtccttttaaagtgtttgcaagttattaaaataacatcttttctgagtaagttaggaattatgtaaattattctactttcaaaaatgacttcttaaaagtccttttgggagaagtttttgagagaagctagaatcctatcttctccccaaaagagtttttaagtttttttgtgtattttaaatttgattccatttttattcccattctcatttctattcctctatgttttcattcattctaaccaaacaccaccttaatgtattaaagaatgattcattaaaacattgcttgtaaaagtgaaattcccaaaaagcttttatcattcaacaaaaataaatttgcaaggagagagagtttggcacgatgattttcgtgcccttacattgtaaatgttcttaaactttctaggaggagctccaacagaaggcccagatattgcatgaggacatgacgaagcatgtatgtattttgttactgagtattatattatgagaaaagaaatctgctgtattatccatattaggctgcctatttgcttaatgctttatatctgttgctctgtttgggatattggtctttgaatgttaattgtgacttgcagtggcttgttagagaacttgctttgctgaaaaatcttattgatcgagccaacgaaaaaggatggcgcagagaatatccttacaatagatctaatagtttacaatgtcctttagggctatctttaattttagtgctgcaataacagagctgatgggtgtttccgaattccaatagatatgatttttgttaaaataatgtgaaatagaaacacatttggtttttgatgtttgatgtttgatccttaacttttctctttcacgctggccgagtacttagaaagaagggagctacttgagataccggatgaacagtcaaaactatttcaggaagttcccaaagtaattgcagaagatatagaacctgaaattgatccacagcatagtccagaggaagtaaaacaagcaaatgatagttcacctggatcaatcctcccaggatctaaggaggctaatatgtttgatactagagaagacgaatgtgaagatgaatttgcattaacttgggccatagatgacctaatttctgaaggtacatttctatattacattattacttgttattttcatcaaatctctaaaattctatatgaatgttttaggatgtatactctatttagttttattgatactgatggaaaaattagctttgggtgcttttaatgaaccctctttgtttttttcgacatctagatagttttaatagtaattattatatacgacaatgtacatattcaagacatcctgtaaaatttttaatgagttcagtctgtctattttataaatgtataaaataaaagatgactatttgacacattaaattatttagaatttttcgaagattttcaagatgtcttagataactacgatgcaatattgttttattaaaagaaagtaagattgaaactatttgaatacccctttttgggggcagcaccatagaatttcctaatagctttttatcatgcaaatgctagggtaacaacctccgattcccaatttgcgccatttctccaaccatttttgttctttttctctttttggactaatttgcatgctacaagcacaaaaaaatattaacttaccagattcttgttctcgtttggcttataatgtagtatctgagcatagcaattcattgcaagagtcagaaaaggagccaacaaaatctgaaattgaagcacaaaccgagagtgtaccagaaaagaagctttctaatggggtaaaggagaaagtggtgattgatttgagcgacgaagatgaagatgaactaccagctccaactcaggctccggctccagctccagtttcgaccatgtggcattacttagatccccagggagatatacaaggccctttctcgatattgatgttgaaaaattggaatgatgatcataagtgctttcctccagattttaagatttggaaacaaggtgagagctcaaagaaggctgtaccattgaagatggttcttgaacagacttttccatattaattggagagaagagaaccagctttgctttttcaatgcttaaagtgtttcacctgtaccttctcatttttgtcattcaccaaaaaaaaataaataacaacgaaaaaaaaaaaagaaaaacattgaaaattaaataagaaataagaaataattgtatctgacttaagctgtaagaattcttgtaaagctgagctaatccccattttttttttttgacaaaggtgtaaattgttgttttagatacaaatcaacatgtattttctttagcaagaagaatcatataaacttcagagagaaaatacaaatttctctagctaataaaatgatttcgtgtcatttaaaaccaaattattttaataatttatcaagctaattaggatttttgacccttgaactttggcatgttcatgtcccctgaacttttaaagtcgttaaaaatactcctgaactattaaaattgttaaatttaaggattttttttttcaattttagtaaaaaaatctgacatgagcatggtttagtacataaacaaatagtaaaattgaataaaattagacaaaatctttaaatacaacaatctaactagttcaaattgacacttgattttattataataaattaaaggatctttttatttttatacttcaaatcagtttttcttttgcatttttacagaattctacatagaaactcctattccaattagcggtgtaacttaaattgtaacaaaaaatcgtatagaaacccttattgcaactagcactgtaactactttagaaactcaaaccgtannnnnnnnnnnnnnnnnnnnataatatataaagtaattttcctaaattaatttttttttttattttttagtgacaaaaaaactcaaaattaaaaaaagcaaaaagcaaaagaggatggacatacatacattacatgggatgctttactcttcagtctctgtctgtctctgtctgaactcgatctgcggatttggaaacacatttacatttactcacttaactcagtacagaagaagaagaagacgaagaagacgaagaagaagaagccaatggtactccttttactactactacttccgttcattcactctctcctccccacatccactgcccatttctcatccttttcttctacttctccttccgcttccttctccgaatggcgacccgctcgtgcaacctactacgccgccgcagaccctcgagatgtcgtgggaggcgcctgtggatacggagaccttgtcaagagcggttacggaatggccaccgttggattgagcgaggctctgtttgagcggggtcagatctgtggtgcttgctttgagctcaggtgtgttgaggatctccgctggtgcattccggggacttcgattatcctcaccgctaccaacttttgtgctccaaattatggctttactactgatggaggcggccattgtaaccctcctaacaagcactttgttcttcccattgagtccttcgagaaaatcgccatttggaaggctggcaatatgcctgttcagtatcgcaggtattctttttcagttgaaatttaccttcactttagtctgttcataatatattcatgtgttttgctacttgttctgctttagcatctcaatgcaaaatgagttctgagccataaaaggcatgtggctttaacaaagatgcagattatgcagtctattcccttttagttaaattactgagcgcatcttaattgtttgatgtgcttataattttgaaacatatttcctattcttatttgtagagattgtggggatatttagcagtgattttcaaaccaaagttcaaactagttcttgattgtgcagatgtctctgttcagcattatatttagggactaggaaactatagcaattggaggtaggtctcttgcaagggcaaaccacatttactatgattggggatggaatagttattgtagttcacttgtatgaagtagagttacttttctttgaattgagtatagaactgatggcctttaagtttttacaacatgattttgtatttatctacagtaatttaatttagcttccctttataagctagaaatttaaggaagaacaaaagaaagaaagcttttttctttctgggcatagttggaactgatgatctagtttttctgtttaattaaagtttccaaattttctgtcattccatctgaataaacatgctgatatgatatggcatattgtcaatagaagctattacaatttggaagaaataagccttctaggaaaagattagagttccaacttaaaaccaattagtgataaatgaggtacttggtaaaatgttatggtgtttttcatataattgtaacaggttttttctaaatttgttattaaggaaaatgggggcgatacaacgcaatcgtttgttgactatttcatgtttagacttgcatgtagcacttaagagatagtgaaaaagatgagatgacaatgttgttgtaaatgtggcatattgatgacgaaaactatgttcggtgtgattaaatctattaggaaaaaatgtggcatgttgacaactagttaatttgacttctgtaacagaataaagtgcagaaaggaaggaggaatacgattcacaattgacggttcaagtatcttcatttcggtgttaatcagcaatgttgccggtgctggagacgtatctgctgtgaaaattaagggttcaagaactggttggctttcaatgggaaggaactggggccaaaactggcacataaatgctgatttaaaaaatcaacccctatcctttgaagtcactaatagtgaaggtgtcactgttacatcttacagtgttgctcccaaagattggaacttcggacaatcatttgaaggaaagcaattcgggtcgtagaaaggctattccagctttgagaatgaggattgaatggtaacatttcgctttttctttgcggtgtaagaagttgtttcttttatattttttatttttcttttctcccatgtagtttttggtctaaaatagttaggtagtaaatttgcatgacatgatattgtatactaaatattttggaaaaatccattaaattaaatacgtggtattgaaccaaatacctaatatgttatttattggtattaggcagcatgttacctaacacttttaggaggtgaagttttataaatgattagtggttttatataatcattattaaagttattgtataaatttataaaatttgttgcattgcagtttgacctcaactattaaatttaaaattgcaccacctggttcggcgaaagtacaaatcacagttgcaccgtaaaatatttcaatttgtattttcatgcaatttggtgtggtgccgatggtttgagtggtgtggatagtttgatgaatatccctatttcactatgtttgggttgaactcattgaaaagggagacaacctaatgtcgaatggcttgatctctattatccgccataatcattgcattttgaccattagtaagagtcttttcccttgaagcttgctgcccatcttcttgattttccatcactactatctcttgagctctttgttgtgtttttcttttttctcttaatgtgtgttcaatttcaggatcaataggaaatagtttaggattaataaattcttagtactcgttcataaagatattgcacatgtcaatgaacaagagtcaccaaaaatgagtacaaaagaaaaataaactaaaataattgactattacaattaaatatttttataatctccggtaacaacgttaaaaatttattgtgaaaattagtgtgagcaagtgtacacaatcaaataagtaatacaatgataagtagcttgtcttcacatggattgtaaattaaaaaagtaatgcaagagctaattatctaacccttgaaaaatgcccgatcagttaccattaaagtctgattacttcagattttcaacggaggtggttttcggtaacttatctctctcaatcaccacaccctttaagcccaaatattgaatctcttcttttcctttccacactcaaaaaccttaggacctttaaaacatttttcaacccttgaaaaatggtccatcagttaccaccaaagccatccgctttttcacacatcctagaccataagtggttccgcgggactaacccagaccatgggtaatcgatataatagtataatattttagaatattttcaatgtttaaaaaaagaataaatattatgctatattttttataaggagcaaatattatatttagtatatttttttaaaaaattattttaatatataatgtacaatagcattttattttaaggtgtaaactggtaagaaaaattgacataatttttgacatattaatatttattattatgattattttacaaaagtgctaaaatgtatagtactccaatagagctgctattagtaatcaaatattattttatcaagttagcttacgcgagaagaaaattatttattacatagaaataaaagagttaaaattgatattgcgtcaaaacttaaataatatttattttaaatttctataaaaggaaaaagcctcatttcaaattttgtcctaggcctctcaacaccttgagccctaagaccaatcctattttgccacctcaaccataaaattaccacctcaattgataaagtctcacctcatcttttctgcactatattaaactcttggccactgctacttttgctgcagtaaaatctacacaaaacttcagcaaaactaacacttcaactattaggctcttttctttatcaaaatccactcaaatgcttccaacctcccactaacaactctaaaataaaccaaaaatgagtacacaaaaaaaaaaaaaccctaaatcgttaaaaaattgagtttattttgggtttgtccacagtattttggttatcttcccttttgggatcttggtggtgtgcattatcattttggttattttgccttaaaggcacatccagtccaacaggaatattaccattatgacaatggcaacattgcccattagctttgctttcaacttcatcatcactaatcaagatgattgggtacgtattgactactaacttttgggttatccctccttggtcgtggttaatatttttgattttgtagcccatttcaccgattattgggctaaatttgcactccctgattgtttttgtacaggacaacattatctcttgaaccatctcctctacgcagggggttcatctattctctcggcctaaaagacctgggccaacaattctctatgttgttctacccaaagtagtgtcctgtgaggacttgttcatctgttatatgtcctccattatattcacttgagatcttccatttgggtatttacctctgcttggaccattcctctagtgttggggacgctctttgggtccatacactggaccacagtctagggcataaactgtttacctttgacaggaatttgattagtttgggttgtgtgggcctgaggccctattcccctattccttgattatattgcatgaaccttttcatcaactttgtaatctcttgggttcggcggtccatttcttcatgttgaaccctcatctcccgtgcattttgctctatccaaacttggaaatctcacatttgtgctttaaaaccttcattagccattgtatgggtagcttcctgcttgtgatgcatgacattgctatgcccttgcacttggccattaaccttcctgagtttcccctaaccaggtattctagtgcttgtattagtctacccaacatatcaagatctaaaatagtattaaccttaaacataatagtaatgctaaaaaatatggcaatgctccaaatgttactttaaaagagaaatgctaccaacattaatctccgtacaaaaatacatattctggaatattttttttcaaaaaaataaaattcataacagtgttcgatatagttacaacatcatctctactaatttttgaattgtttatagtgtcaaaaatatgtttgaatttttttgaacacctatggtaaattagaatattacaaactttatttttgaaaaaaaatatattctgacatttgattttgaacacaaaatttaactaaaaggttacccgcgagtacctgcccctaatgggggcgagggcgggggcgggggcgagtatgagtttaaatgtttatacccgagtcgagtttggagcaagggcatgggaatagatacccacccgatatgatatatgtatatatttaggttttaaaatcataattattacaattaaaataattttatgctttaggttttttattgattacattaatgagacatttcagttatgaaaatgtctgcatcgatgcatattaataaccacacttaattgataaataaaaataatacttaaccacttattttcgattaccaattttattttactaacttcatctattatacacactattccacttatgtttgttgttttagtaagtttttattagggctgtacaaaaaaatttgtaaaccgcctaaaccgaataacccgcccaaaccgaaccgaaaaaaccgataaaaattacaaaccgaaataacccgaaaa

SEQ ID NO: 42404 - DNA, 3665 bp, Cannabis sativa
attgttggttgtaagtcttgccttggagaagccagaaagggtagtcgaggtccactcatctttgccactagagccgcatctagctttttgttcttttccatgaagcgcttcatagtggcttcaagatcgggaaaaaagtgaagacaaggctagaatttgttcaaactctagcacatgaaaaccttatcttcatagagcttcttgcattgctcgcaagtgatgggagaaggaagtcggatggtctttttatctaaaacttaattaaccaatttgttagagtcccacagcaaatgaagctcctccaactccacacacatattggcaatagactgtaaattagcctgatgaagtttctcaagatgagagaaacgttgcttaagactatcattctccaattgaaccttagataaatcagcctctttctaaagatacacttgtttggttgccagcagctgagtctaagcctgtcatcaagtcttggccttctgatcccattccctcaatgtcttctgggccaagacattgtccttaagagtctccacctcctcctctacatgcttttatttggcttgcatctctgaaagccctcctaaggtagcggctgcgtgaccttaatcattcaggttcttagaaaactggcgagccttgacagtagcctagtcataatgaaaacaacatgacaataagcctaggtggatgagaaatagacaagtagatcatagtaaagacaataatttaactcgccgaagccaacatcaagcttaagtcttgggcctggtagactatgttagtggatgcacaagcaacaaatctcttagttggaagttggtatggtcatctagaaagtgtatgtaatatctacaattagtgtgagatgccatagggcctggtccccataaatctatatatattaagtctaaaacattagcagcatgactatcagatgttggaaatggtagggaatgtgccttgccaaattgacaagtatcacaaaggttgtgagtttcgttgacactaaaatgtacattggacaactttattacacttgattcactacacgacaagagggatgactaggtgtctatggcaggtatcctttagggaaataaaaatagattgaacatgatattgagtggaaatagtagaaaaaggaccttgtgtgatttgaaaggcatgaatctatcttggaataggacgaagttgattgaggccatctttaagcgttccttgtagcacctccttccttgttgttagttccttcacacaacaaaaaccaggggaaaactcaatagaaacattattgtcactagttaatttagaaacactaataggattttgggtaatagagggaacacgaaggaaatcatttaaaactagacgagttgaacctgtagtgttaagcaaaccagtaccaatgtgtttaatatcaagtttgctaccatagccaataatcatgtattcattaccattatagtccactttgttggtgaccttgtctaattttggagtgagatgatttttaccccactatctacataccaggaatcatcattcagtgtttgtggagtggctacaagggctctcaattgagcatttttgtcttggttctctctgtgttccaagaatcatcattcagtgtttgtggagtggctacaagagctctcaattgagaatttttgtcttggttctcactctgaggtggctggcccatgtagttatcgttgtatcgataatagcacacacatgcagagtgaccaaatttcctacacaattgacggttggtctagaggtatctctgctaaatctgcctcttccacgattgttattgttgttgtggtggtggttatgaccacctttggatgagtttccctagtataagcttctacgaccttggttattcttatatctattacttcttctagaatagttgcctatattgtttggattggagggtctttgtgccatgctagcagaaggagtgtttaagtgtttactagttggtgaaacagctccccatctttcgagtttactattaaagctaaagagagagccttaaaattgctactaagttaaatttgttctatgctccaggagtagcacaattgataagtactcaatgtcaagacctaacaacatattggctattagatgtctttctgggtaaggatcgccaatagagccaaagagtctgccacattctcttcatcttcaagtaatcagtcattggttgagctccctttcgtgttatcaaaaattttgtgtacaaatcattcatattttccttggaatgagctccgtaaagttcttcaagagctgtccaaagtgaaaatgcaatctgcaccccataacctttgaagcaatattctttatcatagatccatatagccagcccatcaacaactagtcatggagaatccaagcttcgaaatcaagatttggctgaatttcagtgactatagcttctccttcactgtctttttctagtgagatgaactcatttggacatggttccaaagcattcaagtagccttctaatcggtgacctttgattatggtatacaccatagttttccacaagggaaagttgtttctgtcgagttagacagtaaatagctgactcatagtaatattgaaggaagtcgctagattgaagggggtagcaaccacagaggaactagtatgtgccatggagcttactcgagagtttccaccactagcattttcaggtgtttcctgactcgtctacctttggttggtcgacatcagcaaaggccttcaaggttctgataccaagtaaaattttagggaaaaaattgattggaaaacttagctcatttgttaagtattgcatattttattatatagccaagaaatattacaaagctagtatttagaaccaatacaacagctacatgtagccgagaatattacacattaaaatatgcataacaaaaattggttacacgacaataattagtcactctgtcttggaattccctaacttatcaatcatttgtttcttgttagctcagcactcgatttactctttgctaattcaatttctctaacaagtaatatgttaaatataatacaaacttattttttgtgccaatttagtataaattttaaatcttacattggagatggtgtaagggtgtagcatagaatttttcaaaactaattagcctatataggcgtatttacaccaaatattaacatttctctaaattttacatttatactttgacaagaaatttttacatttatactttcctaatctagttattttttttatgttttttacttacttatcaaagcttttaaaagagtttttttttttctcttctttatatctttttttaataagctttacctgactatttattctattttttcttctctttttcattttcttactattctcattctaactctttcaaattatttttctttaattaatcacatttaataaaaaaatctttatttaatttcttttaacttttactaaaatataattcttttactttcattgttttatgataatttgtttaacactctttttctctctaacaaaaaagttaagagcactctttttatatttttctatcttttacttgattaataaaatgagtatacattttttttttaaatattttgtagtttat

SEQ ID NO: 42405 - DNA, 10523 bp, Cannabis sativa
  modified_base (911)..(913): a, c, t, g, unknown or other
  modified_base (9082)..(9087): a, c, t, g, unknown or other
  modified_base (9121)..(9126): a, c, t, g, unknown or other
  modified_base (10258)..(10262): a, c, t, g, unknown or other
aaccatgcaacataaaatgtttatttctcatctttattaactaataaatctgattatattggaatgggttttatttagggcacaaaacccaatagttgtaccactggccactaatgcctataagtacacccatctcatatatgagagggggttggaagttcatttttgtaactcatatagtgaatgcaataaagagaaaagtattcatcatttcacttttattttacttcttctctttatctcatctcttaatagttacacatttttcgaccactaacttggttgacgagttttaactgtcaacatatataatttaaattttaattataataactatttaattaaaggggtatttacataaatatggaaaaaataaaactactttacataaatatggtgaggaaatttaatagaaaaaaatgtggcatttaaaaaaaaaaaaataataaacataacttatatgagatatgtcactttgaattaccataaaaaatattaaaatttctttcaatttcttttttaagaaataaaacaaatgaaactacaatgatcgtcggagttgtcactgggaccgaaaagtcgctggagtttgctgtcactgtcgaaaaagtcgtcggagtagctgctggtgtcagaaaagttgccagagttgctgctagtgccagaaaatttgtcagaatcggcattgtcaccagaaaaatcaccaagaaacatcaagaaaccggtttcttggtaatttttccagtaatttttctagcgacaatgccaattctaacgactttcccagagttttttatcggtgccggagaagtcgctgaagtagctttcggtgttggaaaagtcgctggagttgctgttggcaccggaaaagtcgtcagaattggcattgtcgctagaaaaatcaccaagannntggtttcttcatcaagaaaccaagaaatactatttttttggtatttttttagtaatttttctgactacaataccaattccgacgacttttttggcgccggcagcaactccagcaactttctcgacaccggtagctactcctgcgactttttcagcgccggtaacaaattctggcgacatttccagcactagtgacaaataaaacttcctaagaaacaaataaaaacattgaatatgggctttgaaaacctaattgacataggtatagcatatcaaataccataaaaatacctaaaaataatatctaaaaataaaaaaaaaatgtcatataaattgatcaatatttaagtaaacaacttttaaaatctcatagtaagtgtaattttttcttaattaaattattccgaaccatctaatctttttcacattttttccaaaaataaaaaatttcactttaataaatttataaatatttaatatttaaattttattttcctaaaaaatatccataactaagccttattataatattaaaatttataaaataaaatatcccaataaatatacaggatattttaatatcaattatcaaatacttaaacataaaattaaaatattcataactaaactaataaattattaatattataatatataaaatttaaaaaatatataaatgtctaagaaataaaaaacaagagttcatttattatttaaatagttttattattttatttttttgaactaattgaaaaagaattcaaaacaaaaatttagtgtaatcacttgccatattattaaaaaattatattcaaaattattaagataaaaaattagtaatgaactaccaataccaatttttattacttctcaataatttattttatatgtgtaatttaaaatttgtatacgaaccacaagttatttactagtaaaataatatactgagaaattctcatctcttctccttttaatttttctaaattatattattttctaataattcggctacatattttttttttataaacactaatctcgtgctcatcatagttgatatatcatgcaacttttcatttagtaataatagaatcaatgcaattaatactaatagaattaaaaatcacttttgatatactataaattgcatgatcaaccatgatgatgatcacgagattagtgtttataaagaaaatgaataattggaaagaaatggcctaactgtatattctcctctctctttctattattcttttggtatgacttagacagtacttgctagtaacgacaacacaatcgttcttagtgaagctatagcattttttctcttctcatgccattaacatgcttcctattctatccattacctactatttatatgtgtttcaaatcctcaatctctccaagatttctcatatatatatattgagtgtttgattacaatgtctagagaagatgatgagaaaaggttataccaaagtgtaaggaaatatgataaaatagtagcacaggtaggttgttactataacaagtgtttgacatattaatgtattgtatatctatatttagctttcaatattgtcatatttggaggaaaatctaatcatctattttaagttcggattattgtatttaagtttagatacaaaatgtaaatgtttttgaacattcaaaaaattatgggcaattcattcccgaacgggataaatgtaaaccatttttatttttgtatcttttcttttatataaaagggacaatgattagtttgtgttctgttgttttgttcttttcagtttgatgatctgattgatataatgaactcaaagacaaaactgccaaaacgaagaaaggcaccctctgttagatctcccaactagagtttattcacttttattctttacattttaacaattttactcttattttatttttttgtgttgtctgctttacagggttcaaaagggaatacttcaacctctgccccaccgtcctcaacggttcaaaacaccgataacaatgaggtatttgcacagaagatcacaaaattcctccatgaactgaaaactaatccccctgcagagtgatcaatcactgaataagctttccaaaggttgagaattgttcttattgagcccagataagtaatggtgtgaggaactcactttcatcaccacacatctaagtactagttcttatagcatagctataacataaatgtagggaaattgcttggaagaaatgaataaacaaatatattcaagctttaaagttgaaactatttctacttttatgtggttaattattactgagtagtttatacatctcctattatgatatcataagtattatgaaatagtgaaatgattcatgtaattcaagaaaatatggtacaagaaatgaagagcaaaacaaatattttctcatattaaatatatgtatcacaatttacacactatttagcaggaaacagaggctaatttgaaggccaaatgattgggtattggtttataaacatttctttaactaaattattcttgggctcagggtggagggaataagcctataaaacgtattgtgtatactcccacaagtaaaactgaaaagccaatgcttctcttcgaaagcctcctagtttcttctaaagcatctcctccaaaagaaatgacatgaagccacaaagcctgctcaatagcgaagcactgagtagttgaaaattggttgattctaagaaaacctctttcaaacttgatcttgaatctagtgtgagatgcatctcagcttctcagtctcaagttcttgttttaaagcttcaactcgttcaagtaatgccatgttttccttcagaaatagacaaaactagtgagaagggagggggaaaaaaaaaacagaaatccaagtagtttcttaaaagcccagaactgtttggtaatttcacaaaaagtttcaggattgactgttaggagcaacaaatattgctaggatactagtgataatagtaaaattcatatgaccaattttgctgaaagtataactttgactgaaataaatctattatctgcataacagtcaatcctgaaacaaatgacaaattaaagtagaaaagaagataaaatatttatggaaaccatgaagataataaacatcttaacagggctcagtaataaccttctgcagcaattccaatttctggttcgcattaccagtgtcatgatcatcttttttagaagactccttgacctgttaaagaatttaatgttttatgagaaatgcacaagtcactctcttatctagtcatcaattctaagatggatactcgtaaaggcgtaaatctaaagagttactttataagaagcacagaggcatatacaagaatctcaatggccctcaaaccatacaatctggttataagatacatataatatatccattattagttctatgtgcagaagtcatacaaaccaaatgatccacagcagaaaaaacttacgaaaattccaataagcttgggaagaacatgttatctagatacaaaagtcaaaagcgaaaaatgatatataagatcaccaacagtctactaagctcccaagtaaggcattttgtcatttacaatgaccattccattaactgaactattctcatgattctgagtgcacatagttgctctataaaactgaattgaaatttgaaaaatctatttaccaaagcacgaattatttctttaatattagaagctaccaaacaacactatcacatgtagaaaatactccaaagtaaagacttttgcaggtagacacaactccataatatgaaaaggtgaaggaatcacaaactataagaatactgccaaataggaaaactatcatatacttgacaagaacaaattgtcaagaaatgaagaaatgataacttaacaaaaagtattcaggaaaaccaacaggtgaagcttctaagaaaaacattcaactatagtgtacttgacaagaacaaattgtcaagaaaaaacagagttattaccaacaggttaagcttctaagaaaaagattcgtcctttctagtaacattaggttaaaagtcacactcataagaagcacaaatcctacataatggacattaatctcgtttagttgttaacacattcccattaccaattatttttcttttcacattttagttattccaagccaaaccctctttaattgagatctgaagcaaaatatttaataaaacccagaaatgtgctcctttaatatttgaaataaaagctaccttatgaagcaaataggacaatttaaaattgagcagcataaggactccattgaagaaatttgcaggtccatttcataatataattcataaatgtgaggttatacatattgatattcagaattactatgaatcaaaataaacacatccaaaatacctgtttgagttcactgaaacattgggcagtcttcactgcttcctcatcatatctcgctctccactcagccgattcatccaacgcttctctgttagccaagtcgaactgtcgtctacccagtaaagaaaaaagttttaatctttgaaaacacaaatgtttgaaatattgttgaaagaaatgaatagtaaagagtattggagagtgtaagcaggtaacctcaagaggtcagcgtcgaaggaagaagcggagtaatcgatgctccaaagtcggaagtaaacggcagtgcctagaatgatgaccactgccaagcccaacactatttcgtttcttctccatcttcccaccattcttcgttctcgcctgatgttcattttggctctctattttcaggtgaaagctttgtttggttggttgggtggttggttgccgggtcaaattcagtgaatgtagggctttgggcctcatgggcctaactatcttctttgaaattatacccatttttttttctttttctcttttccgaaagtattacaaaaatactcatttatatctttcattatttttattgaaactcatttttaattaaacattctaattatgtctccagttcaacttattttgtactgtgcccaagcaaaatttatgtattttagtttattaagctttaaattggaagctaacaaagttaattttctttttgtaccgttctaaaattttattacacaaatgccaataaatttcttttacttgtatttcagtaccaacctgtaattttgattttgatattggactaattaatgattatgtgtcaagatattgttactccatatccatattttagtactttcacaatcaaaaaataaattgttttcgcttggtgagagtaaaaatgtgacaggaccgcctatagttgtgactaatattttcacgttggtcgtggagataaagacgatggtttgggtggtgagtgagtgaggagtttgggatgagcttgagtttagggtgtattctctgtagagagttcaagattccccctcaagttgcctatgtacccttatataagggaccaaatcccatcgtagttcagttgaagggtagaatagtcattccactccattattcaaatgtgttcacctatcgttgtgggctatacacccactttctcgtggataccggtccatggcctaagatagtgggaatagttgtaaccgccttggagtagtgtagtccataaatcgtgggcataaccgtttcagggctagacttgctctaaatgcactgtgcaacccacaatcgtgggctgaccacgtagttcaaatgagcctccatgtatatggacttaccactccttggaccatatcacaggtctaagtatgtctaaagaattgttgtgggttggcctacccataatcaagttaggttgtatagttggtcgtacagatcatatacactgtaatttaactaatagacattgtaatttaactaaagcctattctgtaatttgggcccttgagttttcttgtggagcccatgaagggagtggcttgtacagacagcctggtggtcatcagctataggttatgggcttattcaactgggccaagatctaattagaaattttacccttacaatttatcccccactctctaaagtggtatggctattttagagagtagtttgatggtgtctgacatacgactttgttgtttgtaaagactatgaaaaattcgtttatttcatatatagttaggttcaaggtgtggtgtgtggaggacactatgatttaagaggtgataatagtgctcatatattatatggtctgtagagataatatcatttttgagtaatgtaggttgtgtattcacaattttctcattttaataagtgaaatcctatgaaagtaggaattttatgttgatcgtaatggaaacgattaaggaaagtatcttgaaagatcttcagtgaattcctctagtcagccatttgcgttacgcgacttgctcgaatccctcgttgcgaggttagatcttgagcccgttcgactaataatcactttgagcatttatacttcaatttaatttggtattgtcttgccctactggtacattctggtgtgatattatgctcaagaacgaattttcttgccacgtgttagcttgccaagtaatcattagaataaattttgggataacaatatgtatatatatgaaagaaaaaaaaaaaaaaaaaaccctaaaagtagttatacaaaaactttacttaaatttcaaattatcgtataaatcaaaatcttgtgtaaaacgtaatatatatatgtataaaggaaaatataacgagtactaaatgtaaatatgtttctaaatataggtgaagtccatagtttatatgggcccaatacggcctgtactattgtgacagttgggcccagtaaagcctgagtagtgatgctatagtaatggactacacggtaaggcatgggcctccccagagagtacgtcgccatcatgggagggagtagggactacgttggtacgtgtcagtgacatcatacgtgtggatgtcggtcgatttgaatttcggacgccaacccaatagtgggctgtgggccccaccgcacgggcgtgggcttcattttatgccaatgaatctctgtcgttttttgccatatatatatatacaattttattttggacttttaattaatttgtttaatatttatacgtgtatctatagatagacttactgaccttgatggagaccaagtcttgatagttggaagaataaaaaacatttaagaaaaaataaccaaaatttcacaaatggacttcagctgggtccattccacaaccacttcttcctctttttcctttttcatatatacatagatgtgtgtgtgtgtgatgtttttaattaaattaggaatttattagggttcttctattgattcacaagtgaaaccaacaggctgtcatcagatgcatcatgtgttgatttatagattatatcaaatatgatgggatagctcatcaagttttctaaataggggagttgcagtgatgtaactaacatgtatagtgggacggaccaacatgtaggcgagacacggttgtcctctgcaaaaaaaaaatgaaaagaaaatatatataatttaattagttataatatatatttgtaataaaaaaattatatttattgatataatataaactttagtgtaataattaaaataaattacatgtataaaaaaaattatgccccattactttaaatcctctgagtccctcagtgcacgtacgaaaatgattaaggttaaccaagttcacatggctgcaattatacatactaataattaattacttaatcatgctgtccaaatcttcattgcttctctcttaccatttttgaagtgtcgaatttaaggaggggatatgatcaaattattagtaaattattggaagaccttttaaatctcttctgaattaattgattgctatatatatatatttatggcttcagtaattgaattgattcaaaagtataaatatagtgttttaattacaataataattaaaaaaaagttttttttttttattttctttaatttttacattttaaaatattttttttatgtttacagatttccacacacaaactactacagtaatgaaaggagtaacctaaatcataactaaaattcatatagcaacctacatagaaatcaccgaaactatccaaactttaatttttttnnnnnnaactatccaaactttaatttttttaaaaaaaaannnnnnaaaataatatataaaataattccttaaaaaaattacaataatttcttttttattataataaatatatttcttgtatggaatatgttcaatttttcccagatacataaaattattaaatataattagaattttatagttttttttttattatttaaacatttatatattacaatacataatttaaaatttaaattcaaaacctctaacacacacattctagattctagctacttgagctagcctcaattgttaaaattttacagcattagttcatctcagtttgtgacaaaatattaaaagtccagctggttaactaacttataaaaataatgtcaaattaaacgttcacgagtcacgactatgttttcccaatataaaattatatattgtatgtataatgtgtcattccagcaaaaacaaaaatgtataatgtatcattacatacaagtacaactactaacaacaaagttaatgcaacgttatttaattaactcgaatctttttcaaaaaaaaaattaattaactcgaataatgtagaagcagagaaaaaaaaaatatagctagtaataaatttaaatcagtcaaatgtgtagaaagcctaattttgttcttttcgaaatgatagaaaaagcttatatatacatacgtagttgttagatttaaaacttacttacagatgattttgggaagagatatttgaatttgtttgtgaggaaaaatatatagtaccactaaactacatcaacaaaggggaaaattgtaaaataaattagtaaattatgtaaaaattaattcactactaaaacaatcttttaaatgctattttttccataagttttataataagggaagctaaaccacttgaggttagctcaagtggccataggtgggtgtgtgagtgttggaggtcctgggttcgagtcccaggtaaaatatgttgtaatatataaacgcttaaatcaaaaaaaaaaataaataaataaaataagggaagctaaaaaatataaaaaatacttacttattgaaaattgacatttaaagacagttttttttttaataaccgacgtccgacgggatagggttaaacaaaaattctagggattatttcacaaaaacataaaaataacaaaannnnnacaaaaatacggtttcacggaattctaaatatttttatgatttttttgattttatttatagaaaatacggtctttttatgttgtaatcttattaatttgctgttaattttttgttatctgtatgttattttgatgctattttcatattacctttatgttattttttgttatctttagttaagttgcctaatagggtggagaacattaattaagcataggttttttcaccaataatattcattaggcaacattgagaaacat

SEQ ID NO: 42406 - DNA, 2118 bp, Cannabis sativa
  modified_base (69)..(72): a, c, t, g, unknown or other
aaaaattcgtaaaaatgtttaaaattccgtaaaaccgtatttttgttattttttttgttgtttttgtgnnnntgtgaaattaaccctttttttttatggtccattaaattttaggacagccctactttcactgtaccaaacatagcctaaaaaaagaacattttatataggttagggttattcaattgggctttttcttaatagcccatttagtgtatattataaccaactcaattgaggtttgattcactaaacaatatatgtgtgtccaaactctcattacatgacaaattataattatacaatatgatcatccaaattatgcatcaatacaatatataatatttttatagggaattagctataagtttgccaacattataatacacctctagctgttggatatggtggttagacttaaagacaaagactttgactatatcaaccgacccaagcccaatgccacatatataatacactacactactatactactatggtttagtactaaaaaaacctaataatatgcatgaaatattaatgacctaaaagactaactttgactccataaaatcaggttcgtccattgccttgtacgtaagacatataaatataataatattatgtatatatatggcccccacgtataaacattatcataatatatatttgtagtccttatatgaaagatgggtcccactaatccacttaaggcagcaaaatgtctttttgaattaggacagtatcttttgaggaagttaggatccattttcctttgagggtttggagacaatttaagtttattttggttctatatgtatgttccttattgtattgctcaacaatcaatctatatatatatacgtacaactaatacgtaaaaaataaaagaggatgattacaactttctttttttttttttttttttttttgggattaataaagaagaaaaggactaactattaattgaagttgacagaggaagtatcaaagaatttgggtttctaaagcgaacaagattgtcttcttcactttgaaatagtcaagaaaatacactttgtatacatataaagacgagacctatgatctcttttattaattatttactttatctattttggtggattataaagctatcttatgaagtttcctttgcaggtacgaatgtcgaactatggctagctaggttaaataagggtacttcgtacggatggaaattatataattattaatttgatcatcacatcttcatgataaaattaattatttgatcatttttaataatttattttgtgtcattgaatggtacattgttttaacattcataaaaaatggtgtgctatatatagtacttgatttatagcttaattggtcattaactaatttaatttcgtgatagaagtaatatgttaatcgggtttatacttttagaccatttatatggtccacattattaatattagtttggactttgtgcttttaaaaattaatgtttatattttttgtataccaaaattaagatttagttaaaatacatattccgacagttgaaaaaagttgatgagctctaaattcgacaaaatattttgataaaaatcgggtctacaattttacgaaattgatttcaaaaattaatattttaataaaacctctattaatctgtggattaagatattaattaattttccacagctcactgatttttagtaaggaaatataatttctagcaatgcctgtcaaattagttagagtacgtaattatatataaccaacattgataatgacatcaatataaaattaaaataattatacgtcattattaatcaataaagggatagaacttcaagggtgaggtgtgatatcaatatatataataataaattatttatttatatattgattggtattatttctttctttatatattaagttacgtatgttatatgcttactatatatataccataaatgtaacttgcaaatgatcagtgtttccatatattaatgctaatttgtattagcaagtaaagtgtttttctttagaaaaatattataaaagtttaattaatatattaattaacagtactaatgagtaattggaggtgaaatattttccaac

SEQ ID NO: 42407 - DNA, 2854 bp, Cannabis sativa
  modified_base (2531)..(2541): a, c, t, g, unknown or other
aaaaaataatgaacttaattctttttaaataccaaaaaagataaaaggtctacaaaacaacttttttaaaagggtgaaaattcctatacaatatttttgtactaaggagaaattttacaactaaatataaatatgtaaatatatattatatttgatagactaattccctaataaggtaaatccaattaaatatttgaagtcatttaaagactgtagtactgatcatggtgtgtctttttgtatgtatatatgatatgggtaaaacatatatagtattgtactaattcactatatatttatatttcgtgagagacaaaataaaattaataaataaagctttgtactttttggctttgctgatcaaccaagttgatcatttatttgatgctctgcttataaataaatatatatataaaaaaacattgtcaatttcataagtgtacatatataagtcataagtgttggtgaacttaattttttgtgaatggaattttcaaattttggacatacaatttattccttattatcggttagtaagtagtctcactaaatactctaatatgatcatgcatgtaattacaaaaatagagctatctattatgtatatggctaagcactttgagttgagaaataatccaattttgagtatagaacaaaacggcttatattagtttgttaattaattacaattgtccaataattctaatatcaaactaaatatccttgcctcccccaactcctccaaaaaatattttacttaggaaagggaaaaaaaaaaggtagtgatattgaaagctcaacaaccaatcatatagtgacaagtaatcactacttgtgagggacaatattgtaaaaaatattgttattgggcactagtggtatttaatactacctaaaagtgacgtcctataattaatttgtgatataatctaaaaattattaatttgagttatataggactcgatacttaattatctactaataatatatatgatactgaaaaaagtattagacactactgataataactaacatttttttattgtaaatattaatttttgattcacacacttaatttaacttattcaatgctcatttaactacaaattgagagattaacccatgttttggttttttttttttttttcttaagttgaatttggattcaactccgattctcccataatttgattgagtgaatagtttttaattattagaacctaaagtaaattaaaatagaaatgtattttgtcatttttttcaagaaaaagagataaaatttaattattgcatatatatacatatatatacaaaataaaaaatgaaaatctttagaaaaaaaattggaaataattaaaaaaaaaattaggtgagtaatttttagtaaaagagtgaagaaatggtgaaacaagcggccacatttattttttgacacgttttgctaggatttttttgattattattatttattgaaaaagagtatcaaccgcgaaacatcaagaacaagcactctattaaaataggagtgaagatttattcaactacatcatccactattattaagttcggaatacaagtaggattccctaaatccctgaccaccaattatattttttaaaataatcgacaacaccattacaagatctattacaatacacaaaactaacatcttggagcctattattacaaagaccaataatgtcatcaaaattaaatcccaaataattagtaatattagttttatttttcagtttaatcacaatactcaagcagacaaactcaataataatatgttatactcgaaggagatgcactaaaaaaacgtgttgcgaatagttaacgcttcagccacttcagaaacaaaacaaccatccaaatgctaacttgtcgaaactataggatttgctttgcatttcattactctttttctcttcaaaattaattaagaccatcttcaaatattattttagtgtacatttttttattgtatattacttttggtacaacaaatttaatgatttaatatcaaatatcattccaaatatgatatcaaataaaaatattttgctttaaagatttcatattttatattattcatattgataataaataataactaatttatgatgtaattatataggcaatcactcaacaaatagtttaatattatttttaaaataaattaaaagaggggctaaaatgaaaaaaaaaaaattatccaccaatttagtgtacatttaaaatctaacatcatttatatatagtgtagaacttgggacatagtatacacaactttagagtgaaatgatttgaaaatttcgaatcgatttattataataatgtactattgaagatgctctaatacactaacatcttcatcccacatctcaaattttaaataaaaattaaataaaaaaattatttatgtagaaagataattgttgaccgaggttttcgacaaccaatataataataatatttaagaaagctgtaagaagttaatacgcaagatttttacgtggttggggcannnnnnnnnnntagtccacgagtctttgttatttacgagagtatttattacagagaatgttcttggtggtttttctctctagttcttatgaaacccagaattctcaacccctgccttaatgagtttgtgggtatttatagtgtttttgtggggtgatccccagaactgaggtacatgtctttctgtattattcagtaaaggcacacattcccaacgagtatatcataagaaatgcatggtctaacccctaggctttttaggggttagctggatgtaatccattatcctttcttgactgatgtgatttctcataaagtagccgtc

SEQ ID NO: 42408 - DNA, 7747 bp, Cannabis sativa
  modified_base (53)..(70): a, c, t, g, unknown or other
gattggatccaaaaaatgaaattcgcacttaatgcggattggatgttgtttgnnnnnnnnnnnnnnnnnnggatcggatgaacagccctacctaaaactttatatctcattttgagccataaggctctaagtctaaaactctaaccctaaaacgtccaaagggctctctctctctctctctctctctctctcacacacacacacgcctccaaggcttcatctctctcacattagagacatgcctactgattcaagcattgtaaccttaagagagctatatcagatcccacctataatgatatgaatagtattatctctcagtattaatacaacaaaaatgggagtaggtcattacccactaactcaggggggcgaacctctataaaaatctttgtgttcttttattatttagttctaattgcgtaacacgtggcaagcatcagtttaatacaaaacccactatcggttggccaaattctaaagtcaacagtttggtgctctcattgagagcaagttaatatcacatctgatcaaacgccatggttaacacgaggacaactccggttacaccatctgcatcatcggggcttcctcaacatcaaaaccttctcaccgcaaattctaatgtcaatgttccaaccacaactagaattcccattaacactgcaaatgtggttaatcctgccatctcgacatgaatctggccactacagctggccaggatgacacaaacatcccggtggatctgaacaatcggcccttgcttccaagggaggaccctccacaggcacctcccaatgaaggaaggacccttggagaacagcccccaagaacaacaaccgaacctcgtctcccagtactatgctggagagacaagaacaggaatttgcgagcctgctatatcagtgagcctcatgtgaacttgggagaagatctcgagttagccagactaagagaggtcgtcggtgaagctgacctaactgaagaaccacaccttgttgattgtgatgtatttattcagcagatacgcaaattcctgagatgaatggatgaccaagagtacatcctttaatttcacaagcgaagttggatcaccgcaacagagaagccaacaacctgataagattgttcagttagagaaccaatagaagaggcaaggatctctattttttaggtagagttaaatataagaagtaaaatacctccatacaacaatacaaatgaattctcaatttaataattgaattttgagcttttctttttcttttttttttcttccattttatcatgaacttgttattatgatacacatcattttttttttaataacaaaaaaaattaattaccttaatttgatttataaaagttaaataacaaggaaacttttgggactaggctgaactaaaaaacgacaccaaaccatatgtcgctttcctaatctaatgaaacaaagtatatcattggtcgttcataagatacatggcattatcattgtgcataaatatgagattgaaaatcataacaagttgaagatttttcagtaatttctaactaataaatctattagattgataatagtcttagtaaaagacttgcaaagagtggctgtgccgggtgtggaactttcatgttccaatacaaaattttgaaccaatgtttggttttcttggagtgtaagaaaattaagaatagccttttgagcatttacaaaaattataatgaacccatttatcctaacagagcagagcacactttgctctcaaaaaacattgataataaatgggattaaatactctgggccaactcaaaataaccgaaaccaatctcaaatcactcttcctccgccaagttccgttcgctaattaggtaattttaactagaaagactagaaagcatgcctccacttgtagtaggtaagacaacctcccaacccgggcctttaaggggatatactgcagctgtgccgttagtcttctctgcatcgacagcaactgtgttcaaagccagatcgctgcggtccatcaccttttccaaatcttcatcactgatatcagtttgaatcaacttgtcttctgcactttcttcatctcggagaagagccaatagatcatcttcctgaaatatgcaaagcaaatcatggctaagccagaacacaaaatgaatagaaaggatatatacattaaaggataatataacaacatttttttatgactttcttaaggaaaagtacatccaaatctcctaattatttttataaaaccaagcaaataactggcaagtatcaaccatgggaaccaataaagcaaacctccgcaacatcagaactattctgagctggtctttctagttgaaactgccctttcccaatcaccacgtgctcaagcttcaacttgctaaaagctcttttcaacatacgaccctgcaaaacacaattatcaagaagtcaaattctttcaagtatttaaataaaaagctataggttaaaaatggtcaatacaaattcgaaacactatttgcgccacccaagtccaacatacctcaactgattgagctgttgcaagcctgtaaacgtgaacaggcttggtctgaccaattctgtggcatctatccatggcttgcaaatccatttgggggttctgggatgcacaagcaggtaagcaactaatttattatgatgtttttttatagaagaaaaacaaagcatgagatcacaaaacgtacccaatcactgtcatagaggatacaggtatcagcagctgtaaggttgatacccaacccaccagctctggtgcttaaaaggaaaattctgaattcgctattgaggtcattgaactcctgaatctgtttactcacacataaatttacagcgccgagaataataattatttaaaccacttcaaaatcaagatgtttagcagttaggcatcattttgataggcatcgtaagggtaattgtaatggggtattagtattatatatatgagtgaataggaaaggaaaatgtgagaatgaatgtgtaacagaacagtagctcttgccttgggagagcactgggtctctcaaatacccagtaacattgtccacttgattttctactatcaatatatattagctattttccatggttgctactgtttataccaaaatgttaggaaattcctttcacatttctggcacaatgtcatttctttcagattaagtataaactaacgaatcaaagccaaaacttaggtttgattaaaggacgctgaagacaactgaccaaagaacggtcaaggatagataatcagtaagaagcttatgtttcgaggaagcaatttcttcaatattgaagcagaaaacttgaacatgccaaagccaaaatcaaacaatctaaaaagcattgctaataacaaaaagcttcatattctccacaaaatgtgtgagctgggaacaaacctgtctcctcctttcatcaagtttcacactgccgtcaattcgacaaacagcaaaaccttgttcgctaaaataatattccattatatccaaaatcttagtccactgagagaagatcaagacctgaaataatataaaaaaaaaaatgagaagagatttcgcaacttcataactaataaatacaaataggtaaacaacaacgcaccttatgcttccgagcaaatagcttgaccaaaagtcgatccaacaaacgaaatttgccacactgctcaactatctgctcgacgggtggatataagtctgttaagagtacaccataacaaactcagtcaaattgaagagaatcgattgcaatatagcatagaataagtgccggagttacatgagccatcaaatgctccttgtaaaagatcaggatggttgcagttcttccgaagttgaataaccaagttgttaagctttccacgattacaatgagctaaaattttgagcagagaaacactctggttattgtccattataaaatgcatatgaccaagctatcgcacaaaataaataaataaataaataccatgtcccccctcttgagataaataattctctaatgtcttgttgaccagatgaccctgaaaattcttctgaaattctgtcatagtagcatatattatgatctctttctttcgaggaagcatcaactcaacatcagacttcattcttcgaagtataaaaggacgcaatattgaatgcagttttgctaccacctgcaaaatcaaaaccagacccgataccaaccattacataaacacaacaagtgtctaattcaaccaaaatacttgtgatgatagtaataggataattcatacttgagcccttcttttctcttcctgcccctcctcaccattgcattttccagacaaatcaaacctgaaaataggatttccataaactgtcaatgcagaaaaattgctaccaagcaattaaggtcttatcttaaaaaagcctacacatccttaacccatatctacaatacatacagatgttgcatggcaatcttctagtggctcagtaccatatgaaggccaaccataaaatcatcacagcagatggagttttcaaaacataatagactatcatttgcatagaattagaatgtggtcacatctggaattgagaagctgcaataaattaatctaaccatacatgaatgaaccatgggaaaatcatactaaccatgactcaaattcttcatgagacgaaaaaatatcaggcaaaataaagttcaacaatgaccacaactctgccaaattattctgcaaaggtgtcccagtcaatagaagcttgttctccataggcaacaatttcatttccttaaacaatttgcacttagaatttttcaacctgtgccccttcagaatataattaatagttcaaaaacagagtcagaatagcctacagtgcaattgtttcaatctgcacattaactaaaaagaagatggctcaaacaataggttcacccacctcatcaaccactacatatttccaattataatgcctcaacgtttttcttgcttcagccaatgctatttcataagaagtaataactatgggaaatttagggccaattgctttaggcatgtgcttcctacggatctcatctctttgcttcttatcaccatgaaagataatagcattcactgaaggtgtaaacctatttggacaccaaacaaaataaagtatcaaagaaaataaaagtaaaaatgatttgacaacagtggtaacacaaattgaaattaaccttgaaaattcattcatccaatttgaaagtgtagaaagtggtgcaatcactaaatagggcccatccaaacccttcccttttaaatgagccaagaaaccaatggtttgaatagtctttccgagtcccatttgatctgctagtataccattgagaccattttgccataatgagatcaaccacttcacacctttaatttgataagattttagttttccaccagtcaacaaaggaacaagttctgtttgctctttctccattctttcttctgcagtgagattcatatcatcagctgtctcatcgtcttttgacctagtaagcatagctgcaactgccctcttggcctttccctaacataaaaatatcaatacaagattaggggtaaaagaaagatttccaaaccaataatacattttgaatgtgatacactacaacatttacttgatatatattataccaacatagaacatgttcattacaatacaagatcttaccgtattgtaatttgtagcatttttccgtttcctaccacctctcttctttttttcagtggtttctggctcctgctcgatgccattctagtaatacaattcacatgaaaacatgagcagaaattaattagcatgtaatgcacaactacaaagaatcacaaatgggtgtatgaaagaatacatttgtgatgtcatctattttttcgagcaagaactcagagaacagttgggtttgtgtcagaagctcatccagtttggtaaattgactatcattcaagttcggtgtttctgactctttgttccttttctcttcctcttccttaacccgagcttccagcaacttttcttcctcctccaacatggctttggatacgagcaaggaatctccattttctgcatcagcaatgatctcttcctccaattttacctcagtctttatatcacatgcatccttcatcattcaaaaaaaaaaaaaagagcaacaacaacaaaagtatataaacaaaaaagatgagaaatcattccttacgtcaaaataaatcagatgaagctatgtaacaactaccaagtaaattgcagcagtgaaaaatagttaaagactctaaatcgtatctgcatagtggaaaacaaacaggtaatactaaatgtgaagctcataaatttcaagaagtccccatacatattttccccaactctatgcaccacaaagatcattttttaccgttttaaacctcaatacgacatggagaaagataacaaggctgaaatcttataaaatgaatggtaatataagaaaaccctattctctcactcctttagttgaaacaaacagctcttgattttaccacttattttcttcatctttcatataacaagacaaaacgaacaccatttaagaaaacacttgccataaccagataaaatgaacaccatagaacaaaaggcctagagaaaaagaagaaaaaaatattcaaacctcttcctcaagcaccgaagtcggagaatcagcggaggcttcgataatcactttctcctcaagttccatttccaaaaccctaagacaaaaaccaagtaagattgttgctccaacacttattacttttttttccaaaaaataaaaataaagactggcgatcctaacagtcagtagggttatggttttcgccattaatgattaaaatcaaagcttaaaatgagttacgcagtttgaaaataaaagacataaaggtaaaggaacacacgcagggcttaccggagatattctgtaatggaagttgtcggaaacgagagcggcagagaaatggatttgaagtgatgagagtggtgagacagtgtgtgtgctctgttcaaagatattaataataaatactaattttatttatttttattttttatttaagggttttattgtgtttgggcgggaaaatcgatttggaattgacctcgattatcgagttaattactactatacccctacgtttagaggtttttgctcttttttctatacaaaaaagcaaacaacatttttgcacgatttagctaatttattataaaaggagtctttgatgtgattgaaaatgttattaccgataatataatttgtctgaaattttgtaagttgtatttgaatgtgcttagaaatatttagttttattttaatcgttggtaaatttagaaatttaatatattattttgtatataaaaaaaatgaagattattatactatgtcaaaatagcttatgtaaattagtaatttattgctaaattatattattttgtaaaatgtttgctttaatagtatgagattggtctcgattgaatatacaatgcaaaatacaaggcataatatacaagtttagtacaagtggttaattagactaactaacccaataaatctgttataactaacttaactagcagtaaaactaattgtaataggtcttattaagataaagtgtatagattgatgacaccctcttatgtttatccaaattttgacgtaaataatgtggcaagtatgatgacacgt

SEQ ID NO: 42409 - DNA, 4250 bp, Cannabis sativa
agtacacttatatagaggtttcactgtagatggttttattgtagaggcaaatcaattatcagatcatgcttaaataaagtttgtttttgtttgcagatgtcctaaatgcatggagttgaagcttcctcgtgatggtgcttctttttggtttgtattatgctttattacttgtgtgctagaaaatataataaattttgttgggatgtaaactatcctaattgtgctttactcaaatgctagaactgtagaaaatgtattgatggaattgtgtatcttaatagcactcaagattgttttaaagcttcttggagctctcataaatcagtgcatttgaaagcaaagctatcctcgttaggggctggtgcaactggtgatcaaaagtctgatgcagctactgaaggttggcagtattgcataaagaaaggacaagctcgaactccaaaacttccttattttgattggacagggtatttatctaggaatttttctgccatgtattcaggtttataacatttaagtttttctttttgttaaagcaatgccaaatttaagtaaataatatcaactaggcttcattttcgcttggtgttttttgtttgataagtgctagagtttatagagaccttattatattttttccattgattttttttttttggttatcagggtgcagtttgataatcttaatcttattctctaatttttagtagatgtttcacatgttctctctcatatgtcgaaacctttcgctttcatgtaggtctctaaggccatatcctatatctagtaagagaactgtacctgctcatattgataaacctgattgggcaaatgatgtaagttgaaaaaactaatcttaatttgacttacatgcataaagttagtttaattgctaagcataaatgttttagatttgtggattttgtacggacatttagtggcctctgtcatgggctgattaatacaagttcagtggaacgttaaagctgaattctattatttcatttattactttttccaaatttctgtcccttacccattcttttcttaatttcttttgacatgttgtaacatagtctcttttttattcctaacttgtagggaattccgaaaattgagcctaacagtgatctgcagcatgtggttgaggtaagcttctgattgaaaccatttggacagagttcgaaccaatgtcaatacggctaacctttcttgtttgaatttttagtttcttttctacttcttcttttcaactattgggaattcattaactgactttttctcatttcgtagatcaaaactccagatcaaattaagagaatgcgagaaacatgtcgagtaagctctcaagtcccaactgtatattttatggattatgggaaagattgtatgctgcattctcattagcattatttttattgtctgatattaaaaacaaataatgttggaaaaaaaaagtatttcatttgataaagaaaatgaagtgaattgtgcgaatttctgctttggcaccaaacactatttatcgtacaggtttaactttcttttttcttattcttagattggaagggaggttttggatgcagctgcccgaataatacaacctggtatcaccactgatgaaattgacagagtggtccacgatgcaactattgctgctggtatttagcacaagcttttccttaaggagtatatcatttgtttaatggtccattttttggtttaattgttttggatttacctcactgcaggagggtatccatctccgctcaactatcatttcttcccaaagtcttgctgcacgtaggcactcttatttgtgtacattaattacaatgttgttggagtgtataggtactgaagtaaatgtacttgttttctctatttgttgcaggtctgttaatgaagtaatttgccacgggattcctgatgccaggtttatgttatactcattaattggtttatatatggcctttttctttttctttttttcatatgtttatgtgccctcgttcttttacccttctcctggattcttcatgcaacaaatcaaattcaacataaatcatagttacatctttcaaatactgtttctactacactttatgccctttttaaagtggcttagtggttagttttgtctattatatgaacactcgatgtctacattgagcctgcatgggattttactgattctctgctccataattacttcaggaaattggaggatggtgatattgttaatgtggatgtgacagtgtactataatggggttcacggttagactttgtttttagaatattcgttgccattataatttaaacgatgctccttaacaagttataaaaattcaattttcgctcaaaattaccaacccaaaattatttgattcataatacaggtgatctaaatgaaaccttctttgtgggaaatgttgatgaggagtctagaaaactagtccaggtcacatatgagtgcttggaaaaagcgatatctattggtatgtgatgaacaaaaatgtgatacttcaagttctttaagagaagctgctttttctctttttagagtcaactgaagtatggtttttattggagattttaatgaacttgtttcttcattcaacgcagttaaacctggaatgaggtttcgtgaaataggtgaagtcgttaatcgccatgcttctatgtcagggctctctgtggtaatattctatttcactgcaagtgtacagcaactttacttttagttttatgtaagatctgataatatttaatggcctttttacctggcttaatgaacattaggtgaagtcatattgtggtcatggcattggagaactctttcattgtgcgccaaatattcctcattatgctagtatcctttataagctggttttttttctatcatgttttggttaacagtttctttttttaaagacaaatatgtgtttgtgtgataaatattggtcccatcttgttctattgcattgcttgccttaacccaagtaggaaataaagcggttggtgttatgaaggctggacagacatttacaattgaacctatgatcaatgcaggtaagtactgcaatatttctttaattctttttcttatcatctgtccgtgtagccacccaaagcgaagttacttaatgaactttctaaataggagtttggcgtgatcggatgtggcctgatgggtggactgcagttacagctgatggtaaacgtagcgctcaatttgaacacactcttttggtaagctctgttgttttttgaacttgcatttggctcaagtcatccgctttgtatttattgtcattttccattttgtgggcaggttaccgagacgggagtcgaagttctcacagcacggttgccttcgtccccaaatgtgtacccttggctgaatgcgtagttgctgcttctttagtttttggtgaatactgaatataggcaggcatggtaagagaagctagggacctgaccgaacccattgggagtagtgacacagcaacaataaccagataaaatcttcctctcgtgaccattgcctgccatggtgggtgataatgttattgtaacctattagacaagcattcttcaattttggttttgagatgaaaatgtgatcgagacttaataaatttcattatttttgaaagaataatgttcctgtggttttgtcaaataaagtaaacgatttaatgggcgactgtataactcttatcattacacgtttcagcgattgatacatgagaacaatttttatagtattatgagcaatgccaatttagtgtttattattagaaaatggagattcttgtaatttagttatagttatcgaaatttcatattttaacacttcaagaaaaggtttgactgtatatgtttttaactcttgtttataaattcagcaaaaaatttggggtaagttgaaaaatatcacttttattaattaattaatcaaatttacctctaattttatatttaatttaaacatatctctttttatatgtattactcaaaataccctacataagagagtcacatgtaaagtatcttgaaatgataggggcaaaattattacaacatttaaaaaaaaaaaagtaaaaatgatagactttaaaaaaaagagtaaaaataaaaaataacaatataaaaagggcatagagtgtaattttctcaaaaaatttacaccatccatttggaaaagagcattactaatagagtaccaaaaaagtgatgtattgc

SEQ ID NO: 42410 - DNA, 9800 bp, Cannabis sativa
  modified_base (53)..(56): a, c, t, g, unknown or other
  modified_base (6388)..(6388): a, c, t, g, unknown or other
aatcacttcaaatttcttgtattggtaacttaatcagattgtaaagagttttnnnnagggcataaaacccaacagaatggaaggtatttgtctgttgattttgaaatgaacttatttaatgcagccattttctcgctcaatgattatacctcttttggtttctttggagaaggtatatcgagcaaatcctttattttttttcagcattggcttcaatttctcttgaattcactatgaaaccaaaaaactttccaaaagaaaccccaaaaaagcatttatttgggttgcgtttcatgctgtgtttccttaggattgagaaacactctgcaaggtcaaccacatgatcatagcttttaactgatttgactagtatgtcatctacatacacctcattgacactcaaaactataaatcaatattatgaaaagaatcaaaatatttcaatcaatatgaatacaacaacacatattacatatcacaattaagaacacgattgatcaaagtctatctattaataattccatgcaagatcatattccatggagctaagatcatgacacattaccccagagagattaaaattagactccataaacccaagatcaaagttggagtcatcatcatagtttctatctttatcgcccatttccatctcccaaaccttatcatgatcttgcccttgattctgataattcggtggttgtgtttgttgaagaatatcattttctgggagcattttcgacgcttgaatgagatcaaaactcgaaccacataacccgatatcatccaataatcccggtcttgagagacattgaatatttaaagatgaagatgaagaaatagtaggtgttgtaatactattatcatattgggagggattttggggcatgttaaaactcaaataattaggagtagtagttgttgaagtagtattagaagtaaaaatatcattattattatttgggttttgatgacactgatcataattgaaggtagtgaatatgggagtagtattattattactaggtagggttagcatattattacaattattttgtgttgtgatctcattattatgatcatgaagtgatgagttattactcacagtgaaaatatgagtttgttttggtattggtttggtgacattattattattttgtgagatgactacaaatgatgaactaaaatttttattattctgcgatttgttctgatgatgcgatgatgatgtcatcaaattgtgggtttgtgggtctaaaccttgagacataagttttttcttaatgcatgagttccaaaaattcttcacctcattgtctgtccttccaggaagatgctttgctatttgagcccatctattaacataaataatgtcatttacatttacaaaaaattttaaaacataaatgcctaattatatttttactcccagaattttgacatatatcaaatcatgtctcataaactattttaattgttaaaaatctcccttaaattattgagattattgtaaggacttttgtccaatttagtaagaaaagtctaacatgaatgaaagttggacatgatttgacacatgtcaaaattcgaaagacatgatttgatagatattaaagtctggggagcatgatttagtatataaacaattaccaaattaataaaattgaataaaattggacaaaagtgcttaaatccaataatgtgaatagttcaagaaaaatttttaatgataaaaaaaattcagagagcataatttagtacatatcaaaatgtaagggtcaaaaattctaattagccaacataaattattgttattaaaaagtgttgaaagtgatagaacatgttttttaattataaggaaaaatgtacctgtttcctaaaattctgtgaacatctataatgatttgttcttcttcttgtgtgaaggaacctttcctcaggtcaggtctcaaatagtttatccatcttaatctacaacttttcccacacctttgtaatcctgtgcccattagtactcattacttctattcatgtatatttaaagcttaacacaatatatattcagagatatatatatagatgtactaatcatgattacttaagtatataatgatttttacataatagtgaaagagtgagagagagagagagattataacctgcaagttttggaacagagctccaattgccatggccatgagtggtgatatgtgtaaggagcttctcatcttcttcaggtgaccaaaggcctctcttcactttcagtttgttgcagcaacgatgacccataataataataataatatttacaaatcttaatagctaataagtatacttgatcattttgcacaaggaaaatttattctagactaaccttccacaactcactctcaataattgttataatattcaataatagtaatcatatttatatatagtacactccttttatacctatattttataattttttgggtaggacctactttgaaatgggtatatagggatgagaaagttcttgtcaataaatgtttctatgttgaagcattattatagggtagggcacacgaaatattctgtgggagccattacatatatataggacaattgttgtgtttctctagacaattactataggactatgctaaggattacaaagaggtgtgttatataagattatgtattatatataaaaaaaaagttatttattattggcaagacaccaataactaataacaatactctcttacaatttatggtacaatgtacgagtgatatatattatgttaaaatgcctaaccctaactatgtatacaaatatatatttttttttattaatgaatttccattcaatattctactaaaatatacaaaaaaagagcagaggagaacatgaatattataaacgtttaataactaaaattattagatttctcaatgtatgaccaataataatacaaataataattcttagatttatcttaagtaaggtttaagaaactataacgtatccaaatctcatttgtctctcatttagctagcttaattttttcagttgaaattaaatgctttgattggagaatttgacaaaaataaaaaagtgtatacaaatcaatatattattttattcctatcttcttcttgtaaaacactacactgtgtttttcttttgtgcctaatactgaagattatatatattggttctacttaattatctactgtcttgtatgtttaatatttgatttcacacttgttttgatcattttgtatctataaatttattatttattttttataatgagacttgtaagatatagaaaaattttactacgtttttttaaaagagtgtactgatagacaccggcctatctattttggcattcaaaattctttttaacttaatttattttcataatcgtgtacgttataattatttaatatatataaaaaaattttaaaaaaatttaacacgctgaaaaaatatttaaaatgtcttcggtagaactcccattttttgtaatacgtacatgtttaaatttggatgaatatcatatattgatgctaaattctaagtacatcatttttgtctggttagaataaatttgaaaatatatatatatatatattttaattatcatttacaacatctaccttatatttttgggcacatgtcgcatcaaaaagttattgaagacgtgtggtaaatctggacctactgaataatttgagagaattagacaaactttatattatattatatatattatatatatatatataaatatatcttcatggggaaaaaagttttaagggaaggtggccattaatttaacgtgtggaattattactagtatatatttaaataagcataagtactgtttatcaatcaaagaaacaaattaataattatcatgatattctcatgttctcatcatgtgttggtagtacaatttaatttggaaaagtatatataaaaagtttttcattgaaagccaaaacccaaaaacacacgaaaattacaaaaatataaatctaaatgctagtatagatattatagcaagccacgcttggagcactcacaattgggtaatgtatgataattaaaaaaaaaaaaaaaatgtcaaaaaaagctaaatccaataaatgaggagaaaattaccactttacttaacttgttttaatttttatactttcatttcatatttttttagatatacccacttatatggatggtgtccctattagaccccttaggttatgtaaattatatgctagacttaagtaaaaaataagagtatattaggcaatttacttaaaaaaaaatagatatattttaataaaaaaaaatatgaagatatttttgattaatagatataaaagaatacatatttttcatttgttattttgttacaaggcacagaagatatcttaataaattctcatacaaataagttttatgttttaagacttgcaatgttgttttattttttgggaatgttatatgtgattgtaaaattctagaggatttaattgatgtttttgttctttgacactgtgaatagtgttgttcatttttagctagagcatcttattttattgttggtcgtgttatcagaaataatgatatttctcttcattttcacaatgtaatcttaaaggattgcatttaataaattgatgatttatttttttaaaaaaatattagaatattgatgcttcaccacatattcctcaatgatagatgacttgcattaattaaacaaaaagccggtcgaatatatagtacaattttaacaaacatttttctttagtaaacctaataacttatcataattaaacttaacttaatttcaatgcctgaattaataatgcaacgacttattgtttcatttaatttaatataattgcatatatatttgttttccaaacttttaggaaagcctaaacatgtaaatatatagatgtgtgggtgtgtgtatgtatgtatatgtctaaatgtctaggaagaaattaattaataactgcataagttttatattttgtattgtattaaggttttagggttgttttacggttatttgtttagttattctatggttgttttaattgtttgtttttccattttaaggttgttttataataagacaataattttataaaatttgtataacagtaaaattataaacttttgatttttgtttagaatctaatattttgtaaaaactccaaagatttttattttataacactaaacaaagaccttcaattcattggataatatatatgaacatgtgtacttttagtaatgagctgtattttaaaaataacttaaggtacactcatttatagtataaaatataaataacttattgtacttatctttgagggtcaatgaccacagtgtctctaattgagtgctttgtcgattctgtttttaccaaatatttatcaaacatattataccttcaaagttaaatcatatttttacactttattgattcacttttttctggaaagattaattcatgcataccattataagtaacttatatgacttgaagaagcaaaattcctttttcatgattattattacccttaatggagtaattaaattgtgagtttttttcggttaaactctctcaactactatttcaccattatatttaacattctaaagttaaattttggtggtaataattaaaatcctccaaactacaaaatcattaacattttgaaggtgtcatctgttatagtgcgaattttttacctagaaactcgagaccaaactcccataagagtgatgtgtggactcacattatttgaggattgttgagctgtcaagaagggactcctcaaaaataaatctcgcccgaactaaacttgtgagatgatgtgactgtgacagagtatagttgcattattacgccttgcgtaatataaaataaagcatgttagaatttaggataagatgaatgaggtttcatctcaaaaccaattgacaatgggaggagtagctcattcatcttatatatgacaatttattttcacacattagcaatgtgagacaaactctaatacgccctcctcacgtttgggcctagaatttgtgggtataataaacgacctttaagagaccacatgactgaacgtgacatttgaaagaatctcacaagaccaaatattgagaaatttgtgggtgtacacactgggaaatttatggattttgaaacaggtcaaagatcccaatactagaaattggcacacattggccgaaaggtcccaaatagaggttaaaggggagacagcggaagtatctttttagatcggcagcattttggctcacaacggatcacaaacgacttttaacggatcacaagtggctctgatnccatgttagaatttgggataagatgaatgatgttccatctcaaaactaattggcaatgggaggagtatctcattcatcttatatatgacattttatttccacacattagaaatgtgggacaaactctaataaagaaggaccaagaagggattatacaagtcacgcatataccgagatatatttaatgactaggtagccttctcctgtgacttagtaaagatcatttctttacataacgaattagtccaaatgaccgagcatactcgaggactcgatatgaaagtcgcatacgttgctgtacttagtgaaatagatttaaactgttttttatttattcttttacgtttattataatttaatgtaaaacggttctataaccgattgagttctgtgtaactaaaatgacatttgctttgtatataaatgagtgatccaacgtgaataagacaagacagaaatcttttgcaacagtgaactaagcagaccatgatctaactgaaccactatacatctttgtgttcaatgtttttactgttttactattgtctgggcagtctcgttcgaatactcaccgttgtaggttgagtactcgctgttgttcgttaaatactaattatttattttctatttgcggtgttgtctaaatttctccgacatcacattgcagcaagaagttattgtgaagaacttttgtggatgaaacaaatgattatgaattatgggtttgatcttgatactttaactatcttttgtgataatacaagttctatcaatatttcaaagaatttaatgcaacactcacgtactaaatatattgacattcatcattattttataaaagagttagctgaaaatagagttcttgtcctagagcatattgaaacacaaaaaaaaaaaaaatattaatattttttttttacaaaaactcttaattcgatcgactttggcaatggtaaaaaaattatatttctaaatcacaaaaaaatcacatgaaagaatattttattggtttaatttttatgtccaaataattattgatatggttggaaaaagtatttaattagaaaagaaaaaaaaaaagagagagagaagaatatacattataataatagtttgtttttatgtaaagaaaaaaattgataaaaaaaaggagaaataaacaaattaaagagaaaaattatagaattttgacctcaccaacaaaaatggtataattagggttcgttaggtatgctgtattacaccgtattgtattgtattatattaaattatattttatacaatatttttatgtaaaattatacgaggtattaatttttataaacacttaaatatataatattttaatataaactaaagatagcgttatataaaaatataatatataattcaatttaatataatacaatacgacataatatgatgttgaaaactaaattttactgaacattaaaccacacccatcccattcgatattgatgatatttaaaggctattgctgtaaatactttgacaatttaatcaatgtaattttctcttataaacttcaactaaaagccaagcccaattttaattattttattgatattcttgttatgacgtttcttacttgtagtgtataattagtcaagttttcaatgttattttaatattcaataagttatttattttagtctatgtgatttccaacaaacaatagcatgcatttgaaaatttgttattatccattattaatgttaattttccatttttatattagtccaaagattaccaatgattagcaaagccttcaagctaaccaaattaagagaagatagataaaataaatatattgtaatgttaattttatttattaagcaaattgtttatacacatggattctacacaattttctattgtgacaactaattcaattccttactcaatggaatgtagtagttacttggataaattttttcttaaaattgtgtaacaattaatatgtataatagtttggtagcttcctactgaagtaaaaacgataacaattaacaaagagtaatctataatatatatatatatatttatatatattatctaaataatgctatgaatattatactaccttatatataagaagaaaatggggccgtttcttcattatgcttctttgactcatcttttgaacttaagaaaaacagtcaatgaagtggcatggtgaataatcgcgcatgcaaagtttacactttgatttgaacaagtcaatgtacatttaattttcataaaagaacaaaaataaataatcattaataatctttacctcctaaattttaacgtatactaaatcataccctaaatttttttgagtgttaaaaaaaccttctgaactatgagattcttagatttaaatttttttgtctaattacattcaattttactatttcagtaattatttatgtaataaaccatgctcctcaaattttaatatctaccaaatcatactcctcaaactttgacacgtactaaattattcctgaatttttatccattttaaattttttttactaaaattggataaaagtccttaaattcaaccatctcaatatctcaatattttaacgaccttaaaaaattcaaagagtatgatttggtacatatcaaaattcgaggtaaaaattttaattaatcttaataatataataaaattaaaggacatttaccacaaaccatcttaacatttatatttattacacatatcactttataaaaaaaaaaaaaaaagtaatatagtatatataatttttacatcacccattaaaaatggtctaatgatattattaaatcctagctagatctgagtgtccaagtgtttagggaaggaggttggattggatgagtgagagggccaacaatggcaaacatatacgattacgagactttacaactaaattttttgaggattgactctttttttttttttttttatggtgtgttagaggttgattatttgttggcctgtgatcgaatttcattaaaggccattaaataattcaaataaaaatactatatttgtaatcataattctaaatattatactataacgagttgtctaacttttaaagtttttcttaaagtgagttttatatatatttttttaaacaaaaataatcatagattaatcaaattatatatgatgatattttgaatcaaatcacatatattttatattcataaatattaaataaaaatatataaaagaaattacggtccacctagaagagttttctaatttattttttttatgatcgcgaacgttgtaatattttaggaccacctataaatttttagaaaattttcaataatttataggataaataccattttggaccctgtgttttgcaaaagttaatgattgtaccctgtgttttgttaa

SEQ ID NO: 42411 - DNA, 1298 bp, Cannabis sativa
atatatatatatccgtgatatatatgtgtagcttttcgaatctcatatatttctctacacgttatcattacacacaaaacgctataattgctgttttgaagtacaactatccttctacggaaattttaattattttttttattatgaacaaaataaataaataaatgtaaaagtttctttatgaattggatctatgtaaaagattttctgggatgcagtagtagctattaattgtaaggttttaagtttatttatttttatatatatatttgtaatgtctttttcgtgaaaaatacttgggaacgatcgataaataataacgcggggttgggttggtcccccatatggccaaagatttagatgtggggacaataaaacccagttctttgattacacgtgtcaacatcacgttcactcatcttaatacaactaagatgcttttggatccacacgtttttggatccaacggttggtgtttgttcttattattatggcctttcaaagaaagcacatgcactttacgcggttttggtatattctaatctactccctcttgcttctaatacacgcccctctagatctttgccttttaaattatgatttattaatttttatttttattttttgttggttaaaaaaaagagctattcctctctagtctttactttttattttttctatccaatatataaatattttgtttcaaaaatattaaattaaattgttgataatttttttaaaaaattatatatcatgatgattaagttttttttttcttcaaaaaaaataaaataaataataataataataataaatctctgcaaatggcccattaggtttaatcaaaaaggcccattatgataaaaaggagggagatttattatggtcttgtcttgtctagtggcttgcttaaaagcttgatcttgatttaataaagggtttgcagtaaagttaatgaattatggaagaaagataattaagaagataattagagagagagagagagagagagaattgatcaaatcgatatagataggctaaatatactcttctttaattgggcaaaatgccattaatattgaccaaactaataataatattaattcataataaaacccttttgtcactcccaaagaagtataccactctctatctcatcaaaacttgggctaaattaatttctattttgttgatctttcttttctttttttcaaagaaaaaaaatgaaaagatggagttggtaatgtcatgatacatatagtataataaatatgtgtaccacttgtcaatatatatat

SEQ ID NO: 42412 - DNA, 2839 bp, Cannabis sativa
ctaattctatacacctaaatcgaatacccgttaaaacccacatgatgttcaccctagttataacttgtaagcagtaactttgctttaaattcttaaaataaaacaaataatatgcaaaggtaccaagcaagtacattaataaatattaagaaaaataaaaagcaaatcttaaaataataataataaaaaaaagggaaaataaaaaagaaaaaaagtcaaaatctagggtgttaaaagtaatttaaaataacatgtggggtgtatttagtggcatgattgtaattaaaattgaagttgaaggtcaaaaaataaagcagcaaaatttcgattatatgtgtgcactgagacccatagctctgtttttctctgctaagacaatggagcttattcatacacctcctccgaccaacaatggcgaaaaaaagtcaaacgcaacagaccccaaacaaaccttccaaaaccctaacaatggcgaaaacaacgatacccacgaatcccaatccttctttgaagactttgatagtgcttgttccactccttacgttagtgcaccatcgagcccaggccgtggaggaggacacgttagtgggttcttttacagttgcccagcaagtccaatgcacttcgttttagcttcttcaaactcagtttcttcttcttgttttaattccgccatggatgatagtgatactagctcagttcctatgggttacgagttcgagttctcagctcggttcggttcaactgggtctgttcaaactggatctatgagctcagcagatgagcttttcttgaacggtcagatcagacccatgaagctttcaactcacctagaaaaacctcaagttttggcgccattactggatctggagaacgagaacgaacaagaagaagatgataagatttcattggagcccattagaggtagagatctgaggtctaagaataaatccttgagaagaagaaccagatccatgtctccaatgagaaactctcagttcgattggtcagaagaagaagagaagaagatctcaactccaaaccctaatgggtcttctaataagaacaaaaatggcgaagatgacgaagaagaagaagaagaagaaaccctctcatctgaaactacaacagcttcttcttcaagatcatcttcagctggaagaaactcaaaaagatggctttttttgaaagaatttcttcgaagcaaaagcgaaggaagaagtaataacaagttttggtcaacaatttcattctctcccattaaagaaaaaaaacccatcaataatcccattactccttcttcttcttcgaaagatcagattaagaactcagaaacccagaaagcaaaaaaaaccagtactcatcaatctgtgaaaaaaacagtgataggaaaaccgactaatggagttggaaaaagacgagttccgccatctccacacgagcttcattacacaactaaaagagctcaagctgaagaaatgaggaagaagacttacttgccttacaggcaaggtttacttggttgtttgggattcagttcaaagggttatggagccatgaatggactcgctagagctctcaacccagtttcttccaggtagacacaaaaagacaaagacaaagaaacttaagcactgttaatggagtttccaaaataactgtatagaattttttttttcttcatgaacttttttttttaattttaatttgaagatcttcatgatatgatggtgatgatgatgatgatagtcttttgtgtacttatgattataactattattattattattattggggttcttgcttcactttttttgtttaaaagagaagttggtcccaaaaatggggtattattattattattattagttattatataaatatttttccccatttcttttgtggctttttgtataagtgtatactatgttgttagtagaagaaatgagtttgttatttattttatctcttcttttctttttgttcttctctatctatctatacccaggttgaagatctcttgatatttcatctttactttatttatttattatttgtttttgtgggtggggaatggtgatgttgttatatctttctttgtatttacatgaaaggagccaatttagttatttgttatatatgtggttttggatggattatatactagttctcatatatggaaaaagcctttgtggctttgttttgctttgaaaagaattaagctttaaacaaaagggaaagttttgtgcctttgtttaagggagagggagagatctaggagtgtgaaagtggtgtgttctattaatttttattgctattttttaagtgtgataaaatgaaatattataattatgtttatcaaatttagaacataaaaaatgatgttaaactttgctcaaaaaatatattttttcatttattctttgttattacaattgttaacttttttatttaatgatttgttacattttgactttttatattaatttgcatgaagtaggtattgcagatctaaaaatctttggccaaattctttttaattcctaaatctcattggtacacgtgattttctttaggataaatagagatattaagaattaaaattttaagtttgtaacttttataaatttaatatttatttttagcggcataagtatttaatttggaaaattataattttctttcagttttatcaaaaacatttgaaagtaattaatactatatgtttctgtatagatctaacgatctaaaatttagactttatatgtgacttgtagggctgtacagaaattttcgtaaaccgcccaacccgaataacccgactaaaccaaaccgacaa

SEQ ID NO: 42413 - DNA, 6369 bp, Cannabis sativa
taggaaggaaaagtatttatctatgatacctaagttattacttttatttggaataaaatttgactaataaatgaagagtgtcttgagtaaaaagttaccaagtaggaagggttagttgattaactgagacccacaaacctaccaaatccaaataattttgaggagaactatgtttaccctgtttaaataacaattaatactgctcttaatattcaataataataaataatgcccttgatactaggtaggtcctagcgtaaggcaccatcctactgattaatatcaatgttttttcttagataaattatttatatatgtaacagttttttcagttagttggtaaatttttttctatattaatatgcaaaaataacttgggacgtaaatcccttctactaggcttctactatatcattgattagcaaactaaataaaagcttaccaagttttgtgatctatataaattaaacattcttaaaattgacaactataaatgctctcaatatgttgttatttaatgatttatataaatttttgggttaagaggagcataatattattacctgcaagagctaccatatctttaacagagaggccttgatacataaatttgctaatgataggaataaggccctcatttgctgtgggaatatttgtgtctgcaagtgcataattagcagtgatggaatcctttcttccaactggaacatcccagtaaggtccaccaacctatgaaaaaatggcaagtgaaaaaaaaaagtgtcactagctaaatttttactatcataataataaacaaagaacaaactttacaccataataatattggcatagttaccagaatgacagcatctcttgctgcaatagtgagaatatccgcacatgagacaactccagggcactctgattcaaccatgttcttgatcccatcaatgagatcaaaacctttcaaagagtgtatgttaggagaagctgtcttctctccttttaaggtcactgtgtcatctaacaacactgaaccatcacatccctgctcggccaaaaaacacaacaacaaaaaaaaaatgttagtttttaaagtcttttggtacaaaaaatattaaacaaatctgcatgaaatgtaaatatgggacctgaacaaaacagtcatgaaaatgtaatcgaactatcaaggccgcgcttcggggatcagaaagcacagcacactcagtctcttttcttataatttcaaaaacagtgggacaagtagaagcatagtagtcaagtgttaaataagagtcactacttgcatgaataatactagtgttcccaatagagaataccaaaatcatgaagagtagagaaaagggtccaaaagaaagtgaaagttccattggttaagttggttggttttgctttctgaaggtttttcttgaatgagtggagattgttgaagatgcatatggctgagacagtgaaatgtgcacatatatatacatatacaagattaaagataagcgtaattctgcacattttaattttgaatttttcaagtcttttgagtaaattgaatgaggatttctggagtcaagagaagatgcaacaactatttggcccggttggtgggttcttcaaaactaaaagttttttgtgccagagtttagaagtaaacttgtgtttttgcctaaaccatagtcattactaccaaaccataaaattattggatcaaaattaaccccttttgggctaagtaacaagctactttagtcttctctctctctctcttgaatgttaatatgctcatttagtctaacatcttacccttgaagcaattcatttaatataccaaaagcaaattgtttttgtttttttggtgtgaatttacttggtttatttgaattattaggttaaactacatccctttcataaaatcttattaaacttttatgctagttgtcaaagaaaactagcaagaagtgcaattagagctgacaatcaagattcaaagtctcttttgtacgtcatcccttaaaaactcaatcgttacaagcaaagatttgcatacacgaatttatcacattcttgctttatattctctggagcaaattgcaaaccagcaattctagaatacatgagaaaataagttagtcgtgatctctaaagtgtaagaagagcaagtgtaagaagagcattagacagcctttttattattattattattattattttataagttacgcacttttttctacaagcttgtgataattaatttataaacgtggttagtttgtcaattaccaacatgagttattgtcgattttaaaaagcttgtcttttcctcattaaaaaaatggaagaatgagagaagttttgacataatctgcaagtggattgtgagtgaggtaatatatgattaatctggggatctacttttcacaaaaatatacaaagatgaatcaagatctctcagttcccacatgataaatcattttgtcattatctatctttaatttggagaacaatttacaaatatcgaatgataattttgattctattacatttttgtctcataaggaacctggaatgaatcgcggcaatgtctaattactctgttccttccaactttcatacacaccaaatcaaggatccattgttatctgagtgtacattggatgtttttttttaaggaagaaaaggcatacatggatttagtgtcaatcatctacctcgaagtagtttcagagatccaatttagggtggccccaaccagaaacaaccaactttttcaacattaggaaataagaacaaaaacatcatttcattgacagtacaacaatctagtaaccaaaatgataaaccaaaaattcacaactccactagaaaatgatgattaaaagaaggtgttttcactcaaaacctaattgttcaggtgtacatattagaattaaaatgatgatccctattctggctggaccatgaatctttatcgtcatgtatgtttatatctaagctaggcaatacacttttgagtagagacttaaccagggtaactgcaacaccaccaacttcaggccatccgacacaaagtgttcccttgatgctcttcatctggcatctagccaagagggctgcacccagcccatccactagacttcctgatggaagataatctaagcctttcagggcacggctatcactcggctctttcctttctagtgatgtcaccagcttgaaagcaagtggttcatcaggcaaaagcctgcctcgaaagttctggcgctgaatagaatcaaaaaccaataccctttcaggaataatctgttcactgatcaacaccttagcaacaaggtgagacctctcaacagcaacagggcactgaacagagacaacaagaactgagttgttcttgtcaccaatggcatagatgttgcaggacttgtctcgaagagaaggctcaatggaatttccagagaagggtatctcgggcagggtaagacttccaattagcaccttagaaggtagatggtggaaaacatagagcgaaggggaagacaaggcaatgatgagaagagttgggcgaagcggctcatttggcttaagattagaaaacaaaaggaatggagaaggaataggtggcaagggaggtgtaaagttatagagatcttcctcataaaaccttgagggtgggggaatatcagttaaaacatcttccatatctcctcacgttcacaaacaatatttgatgggtgactctgccaacttcaacaacaaaacattcatacgtttacatatcaatagagtgattattcaatacatgttatgaaaactccctctaaaatatacaaagcagcattcaacaacaaaaatcataaggcacatttgctaatcccaaatgggaaatgataagaatcaaaatttgagatatccctttacaattaaccaagaaaaaagggaaacttctcctaatcacacactatggccaaatacccatatcatacaattccccaaataagttaatgccaaagtgtagttaacaggtagttagctataaacccagtttattgtataacttcactatttgtattatttattgtatcgtagagtgcgataaaacaaaattctgggtccaaggatgtatataaatccagataatcgaagaaactgaactaaaaaaaatacgtaacgaagatactatttaatcttaaatctaaaatccaggttttgggttttcgctgaaacacaacagctgagctcatgtattcacttatgaaataataggttaaaggagacatatagcttacctcagacaattatcctttaaaggaggcagtgatggagaaagagagccagaggcggctacggaggtaggcagagagattgagttagcagcgatctgagagaaagacgggagagagagcgagtggttccttgcggggaattggggaaaagaaaaacaagacactcaaccaaatatttttttgccctaaactttactctctatggtgggaaaattaggacttaaaaaggctggtttggatcctcgtaggtagaagtgagcattttgactgggtttgacccggacctgacccgctcaacctgaaaattttaaaaattcgttctattcgggagggtcgagttcaacccagtataccatcggacgagttcgcaggttagtttttttagtcatcgagtttcgggttgaacccgaacctacccgccaatccagtcactttttattttttttacttttcattttttatttttattacatatataaaatgctctctcacgagaagagcctccctgaaatgctggaaaagcctgtgaatatggaatcatcggacatcaccatggacgatctacttgcccaaacaacaaacctatctgttctggatgaggaaggatgggaagttcttggggctggagggtcggaagttgtgactttgtgcgcgatgggacgatggtgctccaatcgaccgattagtcgatcgcttctgaagacaatcctgggacgagtgtgggggattgctgacaagaactggggcgtcgaaatcaaaagcaagacgacatctgcaagtttcttggtgttttcattcaaatctacccaagatttgactagaattctggccaaaaatccatggttcttgaataatggtatcttgataatggagaaatttgaaggaataccgtgcgattggaacaaagtcctcactagatttccattaagtgggcgtatcttgaaccttcctatacgctcgatcacaaaggggaacatggatcgactggctggatttgcaggaaaactgatttctgtccaaaatgcagatatacccaagattgcttcaaagggctacttcaccttcaaagtctggcatgacattactactcctctatgcccaggattccaattcccgtacgaggatcgaaaaatctatcttccttacaggtacgatcgtttaccttttatgtgttttaaatgtggttttgtgggacatgatactcgggtttgtgcagaaccaattcaattctttgacgatggatcagggaagctacaaccgagctatggttcttggctcaaggtgaatgaacgatacgagtttaacccttccttcattcaagacccgtgtggcaactcaactccgaataaaagtcctcctggttttcctgcaaagcagaatatttcttcaaggctactgccgactggaccaaatttgggagttcatggtgccagagttgactcttcacataccataatctcgaatccttctaaagtgccactggtgagttcttctccttcccttaatattaattctgaaatattggggaagggcaagaacattgagaaagatcaaaaggatgagaggttctgtattaatttagaaggtcctaattacacaaagaattatggtatcaacttgggttcgggagtgaagattactggatagggaagttcaaaaagggatggttcttggagggaagaaagctatcaagatatgggtgaaattctgcaacagcaacataataattatactactaagtgtcaaccgaatcctcttaatgatcacaccgaaccaatgccgaagttaatagatgttcccataagttatgatcataatcttgcctcgttgaaaaaaatggagggcccttcaaagagaagaaaggtgattcctaaacgaaccaagaataaagggggtaatgatactaaggaggtgatgatgaaggacgagcacagtgaaggtacgggttgtgatacaaaggccatttcgaagatttctgatttgacctttgggacagatttgcaagcggcgaactcagtgaaactgagtcgccgagagcaatgaacgccctattttggaatgtccaagggcttgggaacccttggacattaaa

SEQ ID NO: 42414 - DNA, 1824 bp, Cannabis sativa
atgtattctccgtttgcttatgcaattgcccaggtaatttttctgcacccatttagaattttgcaatagtttttagtgacagagaagctgatttctgttttccttttttgcaacagggcctagtagagatcccatatattgcggctcagaccatactttatggtgtcattacctatttcatgattaactatgaaaggacaattggtaacttttccttctattagacatgattttttgggtgttgggaataggagggtatagtgcttcaacttattttaaaccagcaacagaaatttctatcacattgtgtgagaatagatgaaaacttgttatttcttcttctactataagacatcaacaaattgggtagagttacaaaagaggaaaaaaaaaaaaaacaaattgggtagcgttataggtgcctttcccatttttacatttcttcatggtggttaatggtggtatgaaaattatgagttctaggaaattatttgttctttctcctagggtagattccaatctctacggactttatcacatatcatgatataattagtcttggatgacacaacatgacctttccttatgatatttgttgttgaatatgacagatttttatataataggaataattttaatacggttctcattctaatcaatgtttcctctctctatatatattgcaggaaaattctttctttaccttctgttcatgttcttgacattcacatactttacgttttatggcatgatggctgttggtcttacaccatctcagaacttagcagcagtgatatcatcagcattttactctctatggaatctcctttcaggctttctcgtcccacagccagtaagtatactccatctcagtatcaagttatttagtcttaaacaccgtgaggtctttcacatttgaaaatcataaaaattaaccaatatagtgtgtgtggtgatgttgttattatattacagaacatcccaggatggtggatttggttctactatatctgcccagtagcatggacactgaaaggaattatatcatctcagctaggagacgtggaaacaaggattgtaggacctggattcgatgggactgtaaaagagtatcttgaagttagtcttggctacggtcctggtatgattggagtttcagccattgttcttattggcttcagtattcttttttttactgtctttgctgtctcagtcaaggtcctcaactttcaaaagagatgattcaattactcttctatacttttcaataaccggaaaagataaaattagaggaagacacaattagttcgccaaatatactgatttttaggcatagtttacataattcttaggcttagtgaaaaaaaaaaaattgaatactgtgttaggattttttttataattgaaagcaattataaattttttgttaggattagttttcagtatctgtcatatactattaaggtgctgaatgtttaaaattttttaaattatatatatgaaataaattataagttttatttagtaaagttaagtaaattatatcaaatataaatttattaattttacatattgttgaaccctttttttttttgaaattttattatataaaatatatataataataaagataaaaagaatcggtcagcaaaaaaaactaaaaaaagctaaaatatatatatatatatatattattaattagtaatatatccctacttttctcttcactaactcataactacccaccactcacctctccactatcagatagcatatatcgtaaaattgagtttaaaaaagagagagaaagaaatgagacaaggg

SEQ ID NO: 42415 - DNA, 5859 bp, Cannabis sativa
aaattaaaaaaaattacatttaattttttaaaaaacaatatttttattagtatagccccacattaataaaagtgtgtccgtcgctgggtacaactgaatttttaaatgtcacattttgattccaaaaagttttatgacgatctcttgaaagagcataatagatgaacattacgttagaatatgtaactattggaaaataaggttattatgtcatatggaaatacacattattaatttggtacaaagattttagcaatataaagaaatttttcacactgttaaaaatcgcgcacattgtgaaaaccacaaaccgaattagttctatttccaaaatattaacaagttgtacatgtcaaccactataaatgaaaaaggaaaaggttggtcaacctttttttttgttttttttccttataactgcacggttggcatttataccaatttacagtctattattaatcggatggtggaggaacggccgcagcatttaagcttatgaatctattcattcatttaacgactcacgagtaatgttatatattaattaataattcaaaatagtcaaatgttcaataccgtatagatagtttatctagatagctcctcagtcaattaatatataaagtcatttcactaaactttaggacaattacctgcaccaataaatatatatgtagctttggcaatcaattgggaaatgacaaagacatatgaccataatatctgataaaaatataattttgataataacaatgattaaccaagcaacagcctaagatccttttagaatattttatataaatatatattatatatatacaagcacaaaacaggttgtttccacctgttatgctagcttatcatggttagtactgtattaacgcggttaatcattacgcttattattattaaacacgggaatgatattaatcatattatgatcgataacgttacgtaatattacttaacatgggacatgatataaatcttcatttcatgtgctccccaattttaagcaacaatgttttttattaactttgtttcttcagatcatcacatatgaatgttttccaaatgccatattattagatctcattccacaaatgaaaacaaattactacataattaacattaaaaaaaaatgatgactaaaattaattaagagaataagttacaaattctaaaaattacaaagaaaaaatgctctgtcgaggcaagaaacaacctcagaaatttcaggcctatcccttccttccaatttcacacaacgaacagcagtatcagccaaaatctcaacagcctcggcctcattgatccactcaggcgaccccaccctattatccaacaccccttccccaagcaacctccgccgttcccttgcatagtccacaacgctcgtcagtccttcctcaccatctttgaacacagctttcttccccgtcaaaagctccaacatcaccactccaagtccgtacacatcgctcttagcagtcaacacattcagaacgtaatattccggatcaatatacccaaccgttccgacagccttggccgaaacggcgtcgcgatggccacgtttcatcagcttagagagcccgaaatcggaaaccctggcggtccagtcagaatccaagagtatgttggaggattttatgtctctatgaataacgggtgggacagcgtagttgtggagatactcgattcctttggctgcgtccaaagcaattttgatcctcgctctccatgaattgataacggaaacgctgtcgtttctcttgtcgtggaggatattgtgaagggagccattttccatgtaatcgtaaactaaaatcctctcttcgttttcttgacagaatccaactaacgacaccaagtgcttgtggttaagccttgataaagaaactagttctgaatcgaaagcgctttccttctcttgaaattgctttatcatcatcctagtaatggtttgagatgaggaaatatgaccccttttaatggccacatctcgaccgtccgatagctttcccttatagacaacgccgaaactcccaccgccgattttgttttctaatgaaaagctgtgagtagctgttgcaagctctgaaagtgagaaaatctctggattcatagatcctaccctgttgagtacggtaacaatattattagctgtagtaggctcattatgatcagtagaaggagtagtaatagtactatttcttggctcgtcataattactagtggtgcgatgataagaacgaacaatcttattacgccataaacaataaacaatgctgctgaaaccaactgaagaaccgattgaaccaacgatcaaaaacgccaacaaaagcttcttgtcagcctttgatgagagagatgaatcacgaagctggtaattattatcagggtcattatcagacagtgatgaaggaggtagaatcggcgggagtggcacggctagtggaagattttcgacctggcatactctgcatataacatcccctgtataatgacagaggaaatccgagttcggataagtgccgcacttgctgcattgttcgggtttcacgcacggacctggaataatcattctcatcggaagaacaccgtaatgtcctgaatcagaccaacacatcagcgatagattactcgtcgttaacccgcatacgaaatcagaaccagaaacgatcagctcgaatgagatatttttaatcatgctgttaattagggattggcttagtttcccccaacatgcgacatgtccgttctgtcttttaataccacatgtgaaggttgaccctaatgctagatcagaaaactcataagctgaattgttattagaaactgaagaaggcacgtccaattggcctgaaccgttctctcccgtgcagaccaaaaatccggttgtagtcaatccacaagcgtgtgactctcccgctactaaacttgacattgagaaattctcgaaccccatttgaattacatctgcaatagccaaaccccaacaaacaactctgctgtcgtttctcaatatcccacatgtgaatccgctcccacacgtaatcgcttggaaccttaatgatttcccaggtgaggggaaaacaccattgtcgttccacactttttcattgtcgtttgaggaccctcctgttcctctccagcacctggctatacctgtggccagttcgagagcgcaaacttgagagtcaccaactgctatattggtcaacgcaacggtgcggctatgataaacgcgcttaggttgaagggtattagtgactgtgcagttagatgtatcccagcagtggaggctgaagccaccgtatctgaggccgcagaagaagctccggccgccggagatttcttgaaaggaaacattgggaaggactgaaacaaaaaggagttggtttttgggattataacattgtatgctctgatttggttggccagctacaatgccacaaacggtgctggtgccgtacacgaccgcagctgtcgatgctgagccaaggccatcgacgagtacaaaggtggtagtgaagattatgacagtgttaatgatgatgatgatgatgagcaggggaagtgtcatttaattagactaatgttttgaaaatttttcttcttcatttgggtgaaaagaaagatatcgtgcatggcagaactagttttgggaaacctattgaggaagttggtggtgagaatgtgagtgaagctagctctatctgatgatgagagttattattcagcagttaacaaaaccgttgtggtctgggtgaggagcgtacgtatagttgatcatgtcccgtgaaaattaatggtgatattacttgttgactcgaatgagaggaaattaaagagataggagtaatggtgttaatagtagtagtaaatagtaatagtctagttgattggagatttggaaattttatattgattcttgtacaactatttgttatgctgtcctcgctgtttcattattctggccctaatatgtgctatagaatgtgaccatgtttaagtccattcattaaaaaatatagaaaccccttctaagtactataaattatacgtataagaaatatgtatttttcgttaggtacgtataaaaatatttgtttacaaacaaatcattacgcttttattaaaaaaatttgatagtgtatacttttatatatatctatattatatatagacatatatatacatagagttgactctagagtttagaccactcacctacacccaacgaaagactgtttcgattcaagatagttgataaatattatcaataatattagatgacattttataataacttttaaattgtaggataatgtaggaatttaagctctgtaggaaggaattagcttttgtaattccagcttcatcacatttaaacaactaaaatagttaaatccaaacaaataaacaaatataagggttttttcaatattatacctaaaattgattttatttataaaaataccattagaacaattatttgcacaaataccgttgtgccacgtcagcatacataccaaaattcaaaacaattaccgaaaatggaaaaaattggaaaaatctcgttttcaaacattttcgctttttgggagttttgaaaaaagtaattatttagttgcttttgatgttaataagatatcaattggttacttttccattaaaaatttatttcagaattttatacatataaaaataataaaataatcaaaatttatttcagaattttatacatatataaataataaaataaaatatatgagaaacatatatttctctgtctccaataaaagacaactaataaaattttttttgtttctttcttatatttttaggttatattatgttattttattatttaatgagggttactttttttttttttaatgtaactcatgttacatataccatttaatttatttacaacttattttataaacttattaaaatagttttataaaaataagtttttttatttaattttgtaatgtctaaatataaaaataagaaaaatatatatatatatttagtaatttattaagttgtttgatacattaaattttatttaaatttaagtattgtttatttatatactaataaatatatataaaaaaatatttttttagtaacttatgaagttatttgatatatactgatttaaacatggtttattttctaaattaaaaaataaaataaaaagaaaaatctttaaaaattaattattttttaataaatattaaatattttatcatttatgtgtcgaaaaaagaaaaaattaaatgacatgacaaattaaaatagaggttttttctataataggcattttaggcccaaattttacatttttagcttggtaagaaaaattaaacaaaaataagaaatttaaaagtttttttttttcaaaaatacggacaacttatctcctgaagcacatgaatatcttttcaaggatgatatattatataaacaagacactacgtctaacactatgtattcacgtgaactcatgattgcttaattacactatatattgttctctctctctctcatttatattgacctttaaaacaacttaaaatgcacatatgagtacatatatataaatacacatacgaggaatttttatataaaaaatttttaatattattttttatctctcaatattgcataattttgtgtgattaagttattaaatcaatttttttttcttcaatttgccaatattatttatttcactgtaagatatttatttaatttttattgatgttgtatatggaattactatatttatatatttctcaccatatatataaatatacatatttacacacacattaatat

SEQ ID NO: 42416 - DNA, 5112 bp, Cannabis sativa
aaagagtagtgtctacctttactccatgctcatcttttgtcaatttcaaagtggtgctcattggagtacttacctatttagccgattcaaggacaacctttttgacaagattcttggcatacttactttgagatacgaatgttcctccttccatttgtctgacttgaagtcccaaaaagaaagtaagttcaccaaccatgctcatttcaaactcatttttcatttgactagaaaacaccaacacttcatggttagatgtagacctaaatactatatcatcaacataaatttgagcaatgataaaattagattttatatgtttgatgaaaagagttttgtctacactacctctttaataatcatgagaaattaaaaattgggttaacctttcatactaggcacgggaagcctatttcacaccatataaagctttttctaatttgtatacatggtctggaaattgaggatcttcaaatccctttggttgcttaacataaacttcctcattcaaaaaggccgacttcacatccatttgacatagtttgatatcaagaacacaagcaatacacaatagcaaacgaatagattctaatcttgctacaggagcaaaggtttcatcaaagtcaataccttctacctgtgtatagccttgtgccaccaatcgagccttgttcctcacaattgtaccaaattcatcgattttatttttaaagatccactttgttctaatcatattgataccttttggtcttcgaaccaaaatccaaaccttatgatgaataaactgaagaagttcttcttgcattgcattaagccattcttcataagccatggcttccttcacattttttggttcaaattgtgagacaaaacaaagaaacttgatcaaattaacatacatttttcttgttaccatggtttcttcaatatttccaagaatgagatcttttggatgattcagttttactttggtgcttggttccttctggatagaatcagtattgatgtttggatgaatcgagataggcttttctggttcacctgcttcagttgcagcgacagattcaacatttgctccattaggatttaagtctgctacatcagaacctatatttgctacttctggtggagtatctagaaaactatctttctcgattttcgtggaaaattctaaaaaatctttaaaatcatcaacaaccatattagcagatttcaaaacagtttgagttctcatgttgtaaacacgataggctcttctatttgtggaatacccaatgaacacaccaacatcacttttagcatcaaattttcgaatatgctcacgatctctaagaacatagcaatcatatccaaagacatgaaaatgacttacagttggacgcttacctttccagatttcataggatgttttggaagtacctagatgaataaacactctgtttattgtatagaaagctgtttaatgacctaagtttgacatagtcatattcttcatcatcttcataggtttcttcctcctttgaataatcaggatcattggtatcacctccttcaccatctactagagaggctactccctcttttgggcgtcttgggtcatcaggtggttgtggaggtcgttgattgtttcttgtcaacaccatttaagtacaatttttttttctttgtgaaagctttttacaactctcaatgaaagtaccaaaatattgactgagcttttcaacaaccattaatcagatattagtaataatgatttaaaagtgaatgatgattttttacgtggtttaggcattaatgagccttagtccacaagtcacttttgttgaaggttggaatgttgttttagtttcagagaatattcaatttataacatacagagttcgctgtgtttgtgaatccaaaaatccctgttatagtagaatttctcacctagaaactcgagaccagactcctatgaaaatgacacatggactcactctcctcgaggagggctgggatgttagtgagagacctcttgagtgcaaaccttgcctgaaccagactcagtgggatgatgtgaccttgacagtgtctagtcgcattcgagtagttcgcatggagtaggaccgaagatcgggctaagactcgcatataccaagatatatgcgaggactataagtcttcctgcaaagaggtaaagatcgcttatgtacttagcgagttggtccggatggccaaacaacctcgataacccgataaggactcacatgtcttaaagttatcgacctattacaggatgcccgtataagcgacttgaacaagacgcatacatcccagactcgattggtcttgtatgcatcttaagcctacgagcttatgcaagaatatgaacagacaactcgtactatagaagttgcatacgttgctgtattttgtgaattaggccaaaattgttcttcatttattgtatttacgtttctattgatttaattgttatattcaatgtacaaacagattgataatgaattcaatctctgtgtaatcaaaggtcacttactttgtacataaaggagtgatccacgtgaaatagaacaagacaaaaaacccttgcaacagtagactaaacagattgtgatctgactgaactactatatttccttgtgttctttaaatttccaatacatttgtgtgttcatagcttgaatactcgccattataggtcgagtactcacacattttttgtatatatctttattatattatttattttggtgttgtctaaattcctccaacaataatcctctatacatttactgcttcttaaatacgaggagaatgagattagaagagaaaatgacacatctcctttttatctctaggtactatgttgtctccgtagtctttagtctctctagtaagagtttggtgagacaagatttgtcccatatgcagctaatgtaaaagtacagaatataatcgccactttgtcaaaatagtatggtcttataatgatgttaatctagcgctgaattagttgtttagagtgatttactatgaaacttgtattatgtgaataattgaatcctgaatgacttataatttggaatctcgtggctcaaatggacaagatttcttttgaccactcttaaaaatgtccgtgattcttcccagatgcgtctcaaattaattggagaacttctataatgatgagtactaatctcttaggtgaacccttttatcacatggtgcctcaaacgcttgccactaattttactaaaaaatatgctcaacaaattaaaatttggaccaaaaaaaaaagagaaattcttaacaaaggaagctttgaagtttacactcccattttgaaaaaaaaaaaaaccttcaaaaaattatgaaaaaaattagataacgtgtattccatcaacttttttttcttttttatttgaaattaacaagagtagtccatattccaatttccatccctttaataataatgatcagagagcaacaaacaagaagaacataatccattttgtctccacgtctatgttcaattacgagaacaaatgggacccacgccacttgtcctgctataattcctggtttccttttttctttagcaagtgaagacacgcgcgggtcttctagttacagtcctggttttagtaatctcctcttcctgactcctgagcttatacatgtacggacattccttaatttcaaatattgctattgttatattattacattcgattcgacactcgctccccttcccttttatttattatttcttttttttttttctttcaaattttcaaaaatcaaaatatctcacgattcccactgtttgtttcacgagaaaaatacgaaagaaaattttaaaaactaaaactttacaagctaaaatcatcgtctttttcttctttgtcttcttttcttctaactaaccgtcatcatcaccaccggaaactcttactttcctctcccatttgtttttctttgtctatcatttccatatacatagctagccgattatagaattattttgagttctttctttttggattaacgacggtgaccgtctgagaaggaaacagactaatcggagaagatgaatgcggtggggaggcagctgtcgagatctaatccggcggtgcatcaccagcggcagtactcagataacttccttgactcttcctctaagtggttccagtcctcttccaataatctatcgcaggttctctctttttctcttgatatatatgtagatacattttccttaaaaaccctattgagttttatacttcccaggcgagatagtagctactacatggattggattgatgtgtttggatgacagaagctgattttttttttttttaattaaaaaaaaaaacaggattttgggctctatgggtccagacccagcagaattggtcggagcggcagcgatcgttctccgccggatgctgtggcgccttcactttccacgagatcttccagttggagaaggtacggtgaggatcaactctcaccgagtgagctcagctctggcttgctcgatctccattcctttgatactgagctattgcctgaggttagccttaccttaagcttgttatcattaaattttaattacttcaatgaagatgaaagtgtttcttttgaatttcagtagctcataggcctaaacaatagctagacgccggttacggttcatgaattatattttcttgtaatgatttatggcgcattgattgatatatgtgtctatatgtacatattatttaacttgcatttatcaggacataaaaactgcgtaaaatatgcatattaaatgggtgcaattttaggataaaccctgaatttacagatctccaatccaccatcagtacccgaagtttcgttatataaagcaattttgttcattaattgcatatttatactacttaattgtacaattttttgttttttttttatttgttgggtaagatatgggtgctaactgtttatatttgttggtttgaatggaactgctagatacccgtgagtaccagtctatataatggacatcaatctggtcgtggcaaaagctttgatgattccgagtcatttctctccaacaacaagctt

SEQ ID NO: 42417 - DNA, 3618 bp, Cannabis sativa
ggatgctcaaactcatatcacaacgtctaacgttgctggtacagtgggatatatagcaccagagtaccaccagacactcaagttcacagacaagtgtgatatttatagttttggtgtgttgcttggtgttcttgttataggaaagcttccatcggatgagtttttccagcaacagactgagattggtttggttaagtggatgagaagtgtaatgacttcggaaaatcctcagatagcaattgactcgaagctgatgggaaatggttacgaggagcaaatgctcttggttctgaagattgcttgcttttgcactttggataatccaaaggaaaggcccaacagcaaggatgtaaggtgtatgttgtctcagattaaacattaagttagtctttttaatgtcttaaagtgaaaagtccatgtaataatagtgagttttaatttcagcagcagctctaagaggtctaggttgtataattaatcgtccatattctgtggttgctctatattagagccagatgatatacaagtgtagaatgtttacaattaccagagctttcacttaaactcgacctaactaagcaaataactattggagtgaggtaattgtggtcgaataaatgaacataggataatatctcatagctttgaagaatggaccttaaaaggaatccaaaatacaatgcctccaactaaaaaaaaagtctaatttggctataatgagttttaaatgggccaatgaaatcctctccagtgtaatgatatcaagtagtgcaatctaaaaatcagaatagcattacaagatcactttgaaaaataaaaacagttattccaatttcctaaatattgcaaatagaaataaataataattcaccaaaatgctccaccaaaaaataagattcatcatttgagttggtgcttttttggttcttatctcaaaattcatgaaagcgttgtttctaaagcagccaattcgtttcaatgtaccttgcccctaccaataaagcactcttttagaaacaatctcaactcttagctttgttaacttagagactctactatcctctctttctctctattgaggaacctgcagaagcttgtgtactgatttaagctaatagctcgagctcatgttaaaaaggttactttagtatattaagtttgttatgctcaatgtaactaactacacaaagctctatttaaactcaatgatacactcagtcgtttaagttgacattcatccatcccaaagtcatgctctcactctttctccctctctctctgctttcatacactcagtgactgaaattaatgtttactgaatgagagaagggaaatacaacattcaatgcttcagactcagaaacgtgcttggcagcacaggagcaatctagtacattttgcttttgtaataagatacaattaggaggacttgaaacggtaccccacacctgtatgtactcacttgtccaaccatttgagctagccttaagtggtatctaatacagcgctctttctatcccagatgtagacacattgacctgaagacgaccaaaactgctaaattctaatttttgcatacattagagcaaatgaactaagtcacctaataaacaaagagctgattctcctaaagatatttaaacgcagttatagaattcatgagaaaatgaaaaatcttattgaggggatatgaacagaactgctcgtttttgtcttcatctatgaacatagtagaaatttttctaattagctacaatgcagatactttattattgatagtatttccttatatacctcagaaatccagaagtaactgaggaagaattctctccaaatgagttgcttcaattttattgacaccttctgcttcagcaatcgcagccgcacgctgcacagcctctgcctcaatttaacagttttctcataaattcacatcataaaatgcaaaatcattctacattacaagcatcatagtacatttcagatatgctaacctgctataaacattcggagaaactcacaactcagcttcagtgcatttccattagctgcatcagaaatgttgaatgaaagcataaaaatctaactaaacaaaacactctttaatcactcagcatatcagaaataaaaaaattaaaaactagaatcaaaaacaacaataaaaatggaaaacacaagaattgaaccaaagaatcaatgagggatgatcaaaccagtagttgaccgactcttcctcgtcgttccagctcctacctgcaagtgcttagaaattcaaattcattgaagactaaacatttttaatatagactaggaagagcttacaaaagtgcggcaatgaggctatgagctgataaactgatgaaatatcaaaacatcacacatacctttattttcataaaacctagagagatcaattatgtttttctctttttgacatagatacatagaagttattatttaatcgtagatacacattaactattaaaacaaaatagtgaaatgaaatttacaggcatattaagtattcaaagttgacttcaccttcattttcaactttatataaaagcagaacctgtgagcataacatatggcataaatcctaaaacaacttagggcattaatggacttaaacccgactctagtctagcccttgcttataatttgtcataaaaaatgttggttccaattcaaacaaatttagaaacagagtattccagcattacggaaagtatctttggttttgattcaaaacaaatagaacagaatatttaaatggtacctcgcagtccaaagcatcggcaccttcattcttctcgcgctctgagtgaaaaaaaattacagcacgaagaatggagaaagaaatgtaaataaggaaaaggttttaaacgatgaataggaatgtgaaattgaaaaagtgaaggatcaactaaccgagagatcttttgttccagacgagcttgaaaatggcgtgaatcagatcctgtagtcgtgatgaagatggtgaaaaacaaattttagcagaagaataataataaaatagaaatttaaaactgctaagaattgcacaggtgaagatgtagaggtattgttacaggatcgaaagagttggcttccatgggtgttgaatgcgaaggaagacgacaatggcggtaaactattcagtcttcttcatcttcagtttctccctttttgtttcaattttaaattagagttgtaaatttcatgtttggtacttttatatttgacaaatatattattaatttgttactagccaaaaggctaacaccattggctagttatacttaaggattttttttttttttttttttttttgttagttctttagttttttatttttagtaatgttaagttaatgatttgggttgtgttaaattagtatattaattttatttttaagattgtcattctaatataattgtgttttttaatttggtgttgtgatgttttttcagttttgttagctctagtgacaactattaataatgggaatgtaatttttaatatgatgggtgttgtttgaagacgttatagttttattgtctaaattttttagagcagttttgtcctatgtggctcgccattagatttatgtagctc

SEQ ID NO: 42418 - DNA, 8927 bp, Cannabis sativa
ttattcttatatttttatttctcacaaccaagcgctacccaagatcatctaaaataaaaatgttgtgatttgatgaaatttatttagttttattgaagtttttgacttttaaaattgtttagattgttgccccatgccaatctacacaattgggccacgtaacatccttgagaaaaatgaaatctccataagcacttttctccaaagaagcgatgagaagagtcattttccaaaaatatattaaaaataaaataaaataaagtaaataaaaccaaatatctcttctaatttcctgatatctgcaccctctctagaaaaaattcctctttctatttatttttttttttcaccaccaccgtcgtcgtcgttcaatccataatcacatcatcgatttcttttcgcccaaatcggtctcttaaacttcgctcactcagcgcatcttagcagccgccgccgccaatttttttgtcccaccccaaacaaccactccgtaaaactttcgccggcggtgggtttcaccggagattattcgcgtgaagcgcatgattgtcaggcttcacacttttattatgttcatttggtattgacccaattagtttggctcttactatccttctaggtgagcatctctttttcgtagtttcttccctcctctcgttgtttctcgctacctgctgctttggtcctccgattcgctaatttctgtgtgttttccttgggagttagggctttgtggtatcggatttgtcgttcgttttccattctagggtttgtttgttgaagtacatggagggttttagctttccatctttgcgtttcgattttagtaaattcttattatgatctattgcttgtttggattgatttgtacgtgtgattggatttcttggcattgattcgtgtttcgattaacgttcaccattttttgatgctatcgtcttagaatttggttgccgtagctggttccgctgtaagtgatttaggtggtcatacttccctgagtgttttacagtcaaaggttagtaatgaatttgaattttgttgttttactggtttcatattaagctggaatggaattttgctcaaggctaacttagacgcttttgctgttgagaaaatgtgtgtgaagaagaatacggcaaatttttacaagtcatagtaaggttctggaatatttgaagaaagaggaggaggtggatggatactggatatactttgatggataatgggcatgcttcatttacttatttttataagacattttcggataattgtgtcttttaatgcatgttttggcgttagttctacacttcttctaggtgttttgtgggtgtatattgttctttttgttaattttctggaaatggtatgtcgctgtacttaccagcattttctttgttgttatccagatcttctggtgagactttctgatagacggcaggactagtacgggtcaatcaattacgcctttcttgttgatgctttaaatgtttatggcatgagaaattaagtaaataatttagttataacttccatgtgagagatggcattttttagaaatttttccagtgaaacagtttcccctagtgacctggaagaaaaaaatcaggggacgagtgtaagcagaattcgcagttcagcaggtaatgaggatgtagatgtcacatcaagtgaaaaggaatttgatataaacatggatgcaccagatcaaagtgaaggtgaactggatgatgctattaggtcacaaaatgaggcaactgttaatgatggtgtaataagtttaacaaactcgcaaccatctgggaggagaagtgctgtggctggaaaatggggttcaaccttttggaaggattgccagcctatgcactcgcagaatggttctgattctgggcaagattctgacggtaaaaatgcagatggattggaatataattcgtctgatgacagggagcagagattagattcagaggatgatgatgggccaaaagacacaaccaagggtcatcaaggcccttcagatgtccctacagatgagatgctgtctgatgaatattacgaacaagatgggaaagagcagaatgatttgatgcattatagagggtttcctcattctatggggtctaattctaagcaacaattaaagccagctgcagggaataagaatactgctagatcttctagaatattgaatggcagtgaagattttggctatgacgatgacaacaataatgacgatgctgattatgaagaggatgaagatggtaattcactttattctcctttgtaattttaggatattgctgcattagtgctgctcactctagtccttgggtgcttgtgaggacatttggcatggaacttatgaactctaattatattattgttccactcatgaagatttaagactgaatttatcctgtgtgatggcagaagatgatcctgatgatgcagattttgaacctgattatggcattaccaacgaacgcacattgaacaaggtttgcgactactgcaatataccatattattttattaatgtgattcttttcctacttttgtactctttggatgaagctgtcaaatccttggcattcgttttcatgatatcaaaaccacattagaggggattactctacttctatgttggatagtactacacaaacaacaaattatgcttgagattcattagtttttgaatgggtattgagggttctcaaattatatggcaagaaatgaaactgttatattaataaagatgaaaaaaaaaaaataaagatgaaaaaattacaaataaattgaacgtacatgaggtcattaaaaatacatggcatcttgttagagcaaccagtcaaagtgtcaaacatgaactttggccataaagttagtgtaaatgtgcaatgaacaaattacaattcacactttatcaactttgtttttacgaagaacagtccaattgaaaaaaagataatgattaggattctcggtttgtctgtgggctatgatatgtagccttaacagctcgcctcgaatcccaaatcaactattatctcaatcttacatagccttaagtgccaaaccaacaacccaattatactcaaaactatctagtttactcatgataactttgtgccacagaatatttggttcgtttggaattcctcacaacaatttcataacaattgatttattctttgaattcaatatctgaaccaccttttaccctaagttgagaagcgctttctcacgcaataaatgaacattaaattttttgtattaatgtattcttattactggattgatcattacactgtaaactttctaaaggaaggctttgatttccttttactctgagccattattcagccttcgtgaagccattcatctagttgtagtatagcaggtatcttagctggcttgttgggtaataacttctttatctgcagtttgatttttttttttaatgaattaatctcaatgtagttttggtttcatatttttgtattagtcttgctccagtatattttctagtggaaggctctgatgaatcattgatgagtcaaccttgactttgtggtatactgtaatctttgatattacttttattatgtaattgctttttccttgttttgttagggtgattgtcacacattgccttgtataatttctgctgattaataatgcaagctttgatgttttattttctcgcaaaaggataaaacttttatgacttaattagagtagcgaaaataaaggcaaacactggacttttaggctgttgtctgcagcaattttagccattttttgggctgtatggttagaaaggaaagagaggatctttgaaattacagaaaataatgtagaggatgtgttgtgggagaatgtcaaattctgggttgcaacttgggtttataagaccaaaggttttgttggcctctcctttgtagatctcaacagagagtggagatgtatattgcgataagatacttcaaattggcttaggaactttgttgttagttgttacttgttagtttttttgatggacgtcctaggctttatttgttataggtcttgtttttgtgttacgtggggttttccttcgccacaagtgaggctcccatgtaaatttagttgttttgttttgatggaagtcctaggctttatttgttataggtcttgtttttattgttttgtttttgtgagttcctcccatttgtatgtttagatatggtattgtaattggttgctttgttccttcctcttcataatttcattgagagataagatttactgatctattatttggttgtgctactgtgaaaatttgttaatctgcatgttaatgatgtatttttagtgataccaggataaaaattggggaggtgaagaatctgaagaagaagaagatgacagtgataatgagctggatatgtcagatgaagatgattcctattttgcaaggaaatcaaaaagtaagcaacgtggtaaaagtgtacatattgttaaatctaccagagaacgtaaatcataccaagggtatgctcatcagcgaagaggtaaatcatcatttgaagatgacgagtctttgggggaggactctgaaagtgatagtgatgtgggttttaaaagcttgaggagaggttcacatcagcgaaaaactagcggtcgatctactttgtccataaattcaaccagacgaaacaatgaggtacgcacttctactaggtctgtgcggaaggtgtcatacgttgaaagtgatgaaagtgaggacgctgatgaaagcaagaagaaaaatctccaaaaggtacagtctagttttgtactagtaacattattgtttcttttgcttgtacctcttggttcttcacttgttaactacaaggcttatgattttgataatacacacgttttttccccttactttataaaatatgctatgaattgggcctttggtgggttattatttggaaaagtactttgcattgccaaatttgtaattcttttttttttttactggatgtaactcattgatgcaagtttcatttttaatgaaaaaatctattcaaatgcgcaaaccccttctgaataatttgtaaaccctgttactgaaatttgatagaggtaattgcatgtattgggttaaaagatattaaagggactaattaatagaaacaggtggagattttgggtttgtgtttctgatgctacataatcttgattgataagatttagtggataccctttttcgctggtgtatgacttgcttatcctataaagatataattggcaccttatcatctttttattttattttttatttcgtttaacagacttatcagcattttattaatatacaatctgtttctttttaaataaagacgaggggatatgggtgagatgagaccttagggtagtacagatttttccttgtcttaagaacaagaaatgatcataacgggaaccagaagaaatgtgaaacttcaaaagagaaggaaagacagttatatgacagaatagagaagaagacgtgagatgcgtgccaaattcttataaatgtcacatatttggtcacatgcttatgcatagtgtatcacttccctaccttttctatgaaaaaaatagaaaaagtggtagttccctaaagtttcaaaagcttagcctgctagaatttgatgtagacatattgttctgatgaagttgtttgatctggagattaattaaaatccttaatcaactgattttacttttgcaaattttattagttgctgcatgattttcttcatcaaaccaggctagtttgtatgaaattatacttttgtcttttgggctgtttgtgttgaatttttcttctgccattggatgactacaatcatattgtgtacttacattattgggtttaccttttcaggaggaacctgaagaggaagatagtgattgtattgagaaggtgctgtggcatcaaccaaagggcgtggctgaagaagctcttaggagtaaacggtcaactgatcctgttctactcagctacttgtttgattctgagccaaattggaatgaggtggagttcttgataaaatggaaaggccaatcccatttgcactgtcagtggaaatcattttctgagcttcaaaacgtatgttgtacatttcttgtgctgcttctgggtgtagttcttgtttaagccttcttgcactatcttgtcagttgtaacttttcattcttgatgtagcattgatgtttggctctttctcccccttcccccagatattgaagttactttatgtatttctggtttatgttgttttgcagcttagtggttttaagaaggttttgaattacactaaaaaggtaactgaggatgttaggttcaggaagacagtcacacgggaggaggtaatacttttttctttttcccttttttcctttttcttttctgaatgacagactttgtttcataaaggcagaatgttcagaagcaataaagatgtatgtttttgttggacctgtggcaattcccattctcctaatggatgtcaattatgaaagcagttttctgaatttccaattctttaataaatataagctggctatttattgcgaaaaaggataacaaaatcacttacatttagataaactgggtttaattgctatttgagggctacccaacttgttgggtggcggggctctcctttgccacccccacccccacccccaccccacacattatatatgttagtataatttattatttattctttatcctttaaacagtgacttttatatttcatattcatataaaggtatctatcatttgggaaatatgctctgttgatttgtttgtttgtctttcagtggtgcttctaatggtgtgtattgttatctactttttgtataatctatacatggtgggattggggtgtgattttgattttaaaaatctggccagctgcctagtagattggttattttctagctattaatattccaccacaatgctgtttggagtttttattgagagaaattcagctttcactgtcatggagtttgctgtaacctgaggggttttggttttgctcacgggatagatttaatttgattctttaagatgttgaaaattggatgccaatttaagctatatatggggggattggggtgtgattttgtttttagaaatctggccaactgcctagtagattggttattttctagctattaatattcctccacaatattgttctgagtttttattgagacaaattcagtcttctgtaacccgagggtttttggtttttctcactggatagacttactttgattctgtaagatgttgaaattggatgccagtttaaattgatatttaaagagatcagtaactttttaatggacttgattctgttcaaatgttttatttcatatcctaataatttatgggaactgagacgttttcatcaacagatgttgatgaagatgtatcttttgaattggattgtggcgtaggtttctgattagattgatgtgtaggtttcaaattaaacataaataataactacataaaaaaacaattagatgttagatgtaaaacaaaatagaagttttaaattagacaaacattaaatttattatcctagggtagtcttttagacctaagtcatagtctttaaaccttaaattaagtcttttaaattatataggttttttctttcaaaaaaaaaattatataggttttaatttaaagttacggttttaattttatttcatttagttgtaggcccaaaattattaaaggcccaacaacacatataagcccaattttatttgaaattgtatacatgaactgaatctaaaacgtaagcctcagaccattgaggcacatacgttttgtgcaaaacctgatagacataagccttaatactattttttgggagcctcagtttaaaaagggttctaaaagtgaagcactttttattaactattgttattcctttttgcttaatctcacatgatttgaagagctattacaatttatgttgactatgatgccctttttttctttaattgtatgttcaagattgaggttaatgatgtgagcaaggagatggacttggacctcatcaagcaaaatagtcaggtttgctttcaatttcttgttttggtttgtaaaccaaagtattcatttccttggtgtttccccttttatttagttctctataattggttcaattatctctcaggtagaaaggataattgcagaccgcgttagtaaagacagttccggagatgtagtaccagaatatctagtcaagtggcaagggttatcttatgctgaagcgacatggtatattaagctcatcagaaattttttcagctgatgtttctgctgattgtactattttgataactatttttcttcacacctataatagtctaattgttggtttgattttggaattaacatactaactttattgcatgctcagctgcttactaagaaagtttggtccatcagataaatctatcgtgtttgtttttcatattaccactgctttctttagtatctgggattgttttagttgtagtagtgccttggaagttggatggttcatactgatagaataaggggctgaacttctggttgtttaatgctgtatgcttgatttttaaatgattttgctaaactttgagccatcatatgacaattttcacccgctccacgaacccttagattcaaattctgatgcaatttttttttttctgtgatactttttgagttcctttttgcatattctgtctcgtagcttgaaagttggttcattttatctctttaatatctgcaattgttttagttgtagtagtgcctttgaagttggatggttcatactgatagaatgaggggttgaacttctggatgtttaatgctgtatgcttgattt

SEQ ID NO: 42419 - DNA, 3298 bp, Cannabis sativa
acaattaagactcattgtcattggttaaaagcgagattaacaagagccttacatttttttaagaaaaaaattattctgccatttttgtaatttaagactctaattaaatttatttttgtcaaaacatttttaacatgacaaaactaacttttagaattatgaaagtattaattatataaaataaataaaactaaattaagaataacaatattctgcacatgtggtctccaatgccaataccatattggaaatagttgattagtggttctctataataattatgagaaatgtaaaagcatcataagaggtgacatatattactattagtacaatttaatatcaagtctcataaattttaatttaataaataatataaataattcctaagcaattataaagtactaaatcattgttgttaggcaccttaagctttaaaaaaacaaagctctcattatattgatcttccaacaaactcaagataattgtttcctctatcgcttacttttacttttatttaggtaaaatcgttcaaactattgtatggttaatttgtgagtttatgtgttagaactaatttcttatcatagtttaatgaacaataaatgttcatataggctataaccattattttatttgatatataacaagacgaagtagaaagaaaggttgttttacaacaatacttaattgcatacacttttttattatatttaaacaagggtttgagtacgtatacctatatagggtgagcaactccatatgatatctaagataagtatttgtgataatacatgagatcatcatattttgatagataataaaacgatgatgatgctcattgctcaggttccggtgttgaaagtggcgacttgaatagagggtttgttgggattgacggtggtaggaggttggtagttggtgaagagcttgtaagaggaaatgagggaaagcaaagcataacaagcaacgaccacgaaacttatggccacagaagcggtggctttgtggcagaatcgaccgaaggaggagcaagctgagctccatgtgatggccacgttcccattgaaagccaggtatagaacctccgtcgaggctgcgccggccgccagtaccatgtacgtcatcacttgatcaaagaagaagaaagtccacgcttgagacatcttcggtggtcgacgtggcattgcagcgatcactgccgatagcagggaatagccagcacaaatcccattcacatgcactaagtacctaataaacttaacacatacatattattacactaactatatttctgctatatataggaattggtgcctaaaataatgctttttaataagagagtgtgaatgaattgaatttatcattacttaattagcttaatacaccacaaacacgaagatactaattataaaacataataatagattagcaaattaacagggatgatatgatgatgtcttattgtgatatagatgatttttgttttgtaattttgtacctgaaagctccgaggtgggagtaagaaacagatccaaaatcattggtctgagagttgtgaagcatgacgacaagggcagcaatgcatggagcaatggggaggaggcggagcaaggtctcagcagtgcgcatgcctccgttgctactattcaaggcggcttcttcttgactctgatgataatcatctcctcctgattgagatcttgggaatattggattcggagacctactttcatctccaggagtaatagtctcttttcctctcatcatgttcatctttcttttctttctttctctttctctttctcttgtgttttctttggtgtttgccgtttcatgaatagaagacataaaataataataattgaactttaaatgaatataggtgagcgcggttgttgtaacgcatttaatgtcattcatggctgcccacgcatttccatgtgcatctgtaaaattgcattggctgatcatatctctatgtacaatctcatatatacgttctacacacgcacctatagctatatctaaacttcgaactttgtgtgagttatatgtttcatatgtattattaatgctgctatagtacttttcccttaagagataaaagcatttatgttatagataaaacaaggaccgatcactacaccaccattaatgctgccatggcctataatacttctctgttatacaatcgacaatcgtctatacttgttttaaaaacttattttcgagaaaaatacatcaaaataagaaaaagttacccaaaataaaatggtttcataaatatggaaatttttttctataagtgtttcaccgctttttgttttttagtttacaattttatgagattcattttcacatatttttgtattttaaataataaatataatattatgaaaaaacaatatatatttattttattattttttaaaataatttaatgcataatgcataattatatatataaatccaatactttatgatatatataacatgttggatcatcttaatttataaatgctatgtgtaatgtttttgaggagaagaggctgcagaagaaaaacaacagaaaaaacaagcagccaagcgccaaagaggaagaagaaaaaacttcctctagctcacatctctgaatctgagagcttcacgggctaagttgtgggcgtccatattaaactgccgcgggatgtactgcaaagaagctccagggaagttcgagaagagcaaccgaatgcgcgaaactaatccggagagagccgagttgtcctgccaatctccattcacttttgagaccaggttgagacagtctgaaaaaaccacttgaggagtaaactgattctggaagcaccaatttagaccgtgaaatagtgcttggccttctgagaaaataggtgatacaacaccaggcaacctgttgccatttgaggccaatacaatttgatgaccccgttttagagcaaatccagcaccagtgaaatttctgagctggtcagtggctgcatcaacaaaaagagcagttgcttcaggcaataaaggaggaggcctttgctgatgcgccaactgagagatgggtgaaacttcagcaggctgcctatcagtttgttgggagagttgtgcttctttgtattcctgtaaataattcacagcaaagtcttccacattgttagtagtatgattcttcttaaaaagagtagaatttcttatattccaaatctgccaaatgaaagtaataaaaatttgaaagtcctttttgtttaacttttggagagcctgaaaaagaaaatccttaatgtcactt

SEQ ID NO: 42420 - DNA, 6178 bp, Cannabis sativa
gaaaatggtgaagtttgatcggttgaagatgtaagagataatgaagacgaaggagctaacgatgttgaaaacaagggagacattggagctgaaagcgataccgaggaggttggaggggatagaactttttcactaggttgagttttgcccagtgcagaatcaggctgtacaacttttttcggtatactctgtactcccgaaaaaggtgtaatagagaatggagaattctttgcactgtctgtcatccaactagatgtggtctctttactagaatttaattcttcgctagttttctttacaaacattggtgactgaccggagaacattgcaggcactgatggttttggattcagattggtatcagatttcggtacagttttgttctccttcactgaaactgcatcggacttctcaataatagttacgccactacctagtttttcggcagttttattgctagaatctctcatgaactgttggcctgctacaggaaccgactgagacgctggtgacatatggtttctttgcaatgtaggagactttgtcactgcaaattttaactgcggacgatcacttccaaatggactttcttgatcagcctgtttcatgggttcacctagatttccagctggtcatattcatgtgaaagaaataatcagctaaccatttttcaggcgaaaagaataattaaatttgataaatgtaaatgaaataactttttatggaaaagtttgtcatggttcacctctgttttgtgaaagagagaaagttgaagagacgcgttccctcgagcgagctagtgctgttctctccagtgtgtgagagttaactgtttgcttatctgtaggcacacttggcttgctctcttgcaaaagcagtctttttacagttgcttttggaggatcaaaactggcccaactctgatcaatatgaaagaaaaaaaagaaatgtttgtctaagcaaataagaaattaaaccctaattttttaactgactgaatcaagtcagagaccctagatcatattcatacattcgtagacatttaaattacttggacaattcaaaacagaacaaaagaaaaaatgcagaaacagttcgtagaaacattacccggtccagagagtctcttctcctccttgcagtttcctgtccataacttttcaagacgcttgattttccatttgtattgactttagcagcagtagaaccagaaagtaagactttactatttgaatggatactgcttctttttgtggaactcggagaactgaaggaggcatcataaggaatccctatggactcaaacaactcttttttgacattctttttctttgaagaaggtgattctatattcagagttgccatttgtttcgaaagacactcagaaagtttctcagcagcagctaattgtgagctcattgtgttatgtaaaatatggtaggattgaacctgcctgcaaagacataataaaagttgagaaaaatcaaaatgccaacaagtttcttctcaacgagtcaaagaaaattggtcgcaattggtctccgaaaagtatatatatcacaatgaattaaaaagaaaacaatgctaaagtgacatggaagtatttcaagggatagtacatctaagtctaacataccttgaaggtccatatctgctctgagtagatctcttgcccgcatgaagtccaccattttcgtcaaatttgtttagttcaatgttattaaaatgcttctcaagttcaatcaactgattagtcaattcctgaaatacaaagaataatgaataagaagagcaaaataataggttgaactaacacattgccggtaacacagatcttgaactacctcattcaattttagtatatgacgccgctttagctcaagttcagaactcaatttttgacgattccaaaggtcccaatattgactatcggatgcttgtttgacaatgccttccatatatgccttccttgccaacactaaaaatcagttgaatcatcaatatgtgcagttaacaagattaaaggagcccaaagggaacaactatgttttaagtttgtgccgtgttatgtttgctgatagagaaaatactaccttgtactgttttatcaagaagattctgcacctctccgactcgttcatccataatgctctacaaagccaaagacaacttcaatttaatagcaaatttctcaaaaataaacaattcagccataaaataacaagctgtgaatttagcacacggcatcaccttccacaaactacatttgtcagacaaagtctgtattccttgctccagtgcttcaactgaactcttatgtgaaactgtacaggcatctttgaaaccacctggttgctctatagattgtagaagcatatctaactctttggtcatatctttaatctgaatgggagagtaagaaacagtattaggcaaaaagaatagaaaagtttcaccctatataacaaagaagagaaagtgtgaaatgaaacaataacacgatcaatcttgatgtagtgtgaaacattttgtttacagtttcccaaactaaatctttcaaacaccgaaatttccaattcaaaaataaatcagatttgaaaagctataaggaagaaagaaaacattctaacagctgaagcaatgatagatatctttaaacccaataaatcctaccctaaacccaacatccatttttggtctgatctcatttattaaaagaaaaaaaaaacaaataaatagaagaaaaacagtatgatacaagtaactagaaacatatgagaggaaaattatcgcaagtcatgttccttacattgccaaattgttttgaaaaatttggttcagaattcagtattcccgactgctgaagatttctataattctcattggtctgatgttgcttatggttggcagagtcagaaagtatggcattttcttgtgatccacgaatagaaggtaatgactcaatattaccaggggtggctacaggtctctgtcctgaactctggaacagcttaccaaaagtaccgtgtgaagtagaattacccactggttccttcaaatggacttgttttccagaaatgttcatttcactgtttttagcattgaaaccagcaatttcagaaccaccgctgctgtcgttatagcttgaaggcacaactagagagctagcatcagtttccttaggaaaagtggatttagcacttgaaaatgattgagatgaagttcttgataaaccagtgaaaccaacatttacgggtgaccccttgactgtctcaacactagtatgtaattccttacgatttgactggacaacagagtcagctgacatttttccagagaatgaattaccgccaggtcccaaccctggaaatgcttgagttgatattggagcagcactagatccaaatgctgaaaatgcttgagttgatgtttgagcagcatgagacccgagccctgaaaatccctgagtagatgattgagcagcactagatccaagccctgcaaatccctgagtagacgattgagcagcactagatccaaaccctgcaaatccctgcgtagacgattgagcagcactagatccaaaccctgcaaatccctgtgtagatgattgagcagcactagatccaagccctgcaaatccctgagtagacgattgagcaacagtagatccaaaccctgcaaatccttgagtagatgattgagcagcactagatccaagccctgcaaatccttgagtagatgattgagcagcattagatccaaaccatgcgaatccctgagtagatgtttgagcagcactagatgaaaaccctgtaagcccctgagtaggagtctgagcagcattagaatcaagcctcgaaaatgctgctacccctgtcatgttgaaacccttgatcaaagaatggggtgttttctgggatatttcatttgttgcaatagtggttgacgattcagtaacattaggaggcttcaagtttgttttgttgaggacctccctatatttttctttatcaagttcatttttattaacatcattcgattgaagatttacgggaactttccctaactgttcttcttccagtctgacagaatgttttgatatttcaacctccacaagttctactccactagcatcctcttcttcatcggaaaggggaacctcaggttgagcttcattatcattggcactgtaggaaaagagaaatcattctctataagaacataaatatagacatgcaaaaaccaccaaaagtagaagggaaaacaagaaagtaccatgcaacatgatacataacaagttttccttctagtgtaagacacatcagaatgcaataaggcgacagttcttttggttcctcggctccaagttgaactttaacttttccatagcatgaaactttatcagtgcaaagtcccagtatcaaattatcatcaccattttctgaaacacagtccattaataagcatagattaaatactattaactgaattcagagcataacaagaaacaaagaacttcaagtgattaaataaataccttgaagctcgatccttgggagcaagttatctcgctggatatcaacactagcaacctcattcttttcctctccgagtgaccaaccaatatacactacatgttcatctgtattcttcttgttagcaactagtgcaaattccctgtgatcacaatggaaaaaggaaagtaatcagaaattacccttctatgcgtgacaagtgattaatcttaaattaatatactcaaaacaatatcgatactatttatcaaaacaatagacaaatctcatgatgtgtgcgggaaaaaatactgcaaaattgtccctttttggatcatacactcaaacttccactcagtttctacagaaagctaccgctcctactgaatgctttatctacgatttattttaaccaagaacctcttccgatttcaaagaggatgaagaaaagatctccttaaagacaacactctatgatctactaattattagaagtaggtcaaactaagtacaacaataaaagaatataacctatcatcaaagacaacacatagagtgaaaatgaaacaaatataatgacaaacaaaacaccgaaaataaagtacttttccatttaagaaccaacaaaatgtcaaacttttctttagtttctttcttgcattaatgtgcatgtcctggcctatcaactaacagcagaaaaaaattatcaatctaagctcttacaagtgcctaaggtacagataccacagaaatttgaaatgaaaagcacataccacttctccaaatagctcatcaataaataaggtccgcttccaaatggcagaataccatcaacaacacccgaaaacaaatcatagaaagatatggcaactgacttgttggaggcctgcaaaatgaagttccacaaaattaaattaaacatgacaacgagattcacttagtagttcagtgcaacttataagaacagtgggtacatatgtattggatattgccaaaatagattctccatggattctgagcccctatactttcaagccaacaggttttacgactttaaaaaaagaatttccatgattaaccactaggcaagcacatgatcaaaatttgaattgataaagtttacatacatcagaaattttccctcctttgcttttaataacttgtacaaggtaattttcttcacttccaccttcacccagttgaaagcatcctaatacgatgctatccggacgaacccacctgatagaatccactgatgattacagaaatatttcagtgtcataggcgccttcctctttatatcttgaaaacaatttaacaatcgtatgctatacatcaatagtgtaacaaatataacaactaactagagttatacagaaggaaaacataaaatatttgtcatttaaaatagacaggaaactaatgactgcatactaaaatttgacttaatatagcagtcttagtttaattgttgtatgtttagttacttttttattatgctaactgttgtgtcaaaaccttataatctgattggtcactaagtaagatcagtcaaagggttgttagtataaataaaccaataaatagctagctagattactctttagacacctggtttgtgcattggtgataaagtaaaattactttcatggagataacca

SEQ ID NO: 42421 - DNA, 4502 bp, Cannabis sativa
ccgcaggaccccccagccaattccttctttttagacggcgtcgttttcacgggtttggttccgtcgtcgacattattattaggcgtgacgaggtggaggaggcgagtggtccagtcgccgggtgcagcgcgtgaacgcttgcttctggctttgccaggcagaggagtttcttgctggaaaaacgatgcgtttcggctcgtttctgaggaggacgacgtttctgatgtcggcggcttggtgttgttaactgtggctgagcttgttgaaaggaattggagggtgtctagttctttttcagctgagaaagagtcctccacgaaattcgaaagccattccagctccgccaagtcctcatactgcgcaatttgttttaacaaaaaataagtcaatttcgaataattaaaataattccaacgtaaatttattcattttcgaataattaaaacaataatattaatgttttgggagctttaaaataattattaccggaacgcagaggtcaccggagaattgagagtcgccgaagctacggtttcccgggaattgatgttcaccgccagaaatggaggaattgcagctgtcgactgcggtgacagtcgaggattctgtggagttattacaggcgacattatcgaagaaaccatcagtaaccataggttcttcgtgagaaaagtcaagaaggtcatcaatggtgaaatgttcgctggatttctgttcagacagcctcttctcattcgaaaagtctacagctccggcaccaaagtatccgccgactaagtactccggcacttccatttgacgatagtaatgtaaaattgttttatgaaagtgtagacgttttagggattgaagagagggagagaagggaatgtgtctgggagagaagagtgggaatgggttggggttttgaggagtgaagggagggactaaaatgaaattttctaaaaaattcagagcatctttttacatgcagagagtgatgattttaataatgaggaagtgacttgcaagtcctgtaaacttataatattttaaaactactttttttttcctttttctttttctttttttggtataagtaaagaattaatttttaattatataaatttaacgtaaaacttaactcaatttaacctttttattttattattattagtattatgtttgaaagctagtttgtttaattgagccgttaagttgacaatattacccctttgaatccacctccatggttcaacccaacccggcctcgtaaactaaataaaaaaaaacgtttattaaatgttcttatattgtttactaaaattaagtttgctaaaatcgaaaaaaggggttaatttcaattgtttactaaaaatatatgtttttgttaatttttcaccgacttaatttctgtatacaattattactaacaaatcctaacaaataacgattaacaaaataaaaatatattcgaaagagagagactaagcaacaagtagcttttagactgtaaagcgttatataataaagatgcaaaaaaaatcaaagtgggtggagagaaaaaggaattgaaactagatttgaacaagaatgcaactagtctttttattgttggttctttcgaaaaaaattaatgtgttatctacaaaataaaatagaacaaaagatatattataatgtagtgtagtaacgagtttcaactcaactcactgagttgtggaccaacacccagtcacgtaaaatatcaagggtacaaaacagaaggctgtacaaaaataaaggactgtatcttatcactctaacattgtgtactttcatttcctcaataaggcactcaatttgatgtaattacccaattgagggggcaaaacagtcaaaacaacgaaattacataacatcgtgtaattattaatttaatcattaattaatcgaatattaagtaggagataattaaaaaaagtgatttacaaattaaaaactgcctatagaatcgatctcttgtgactcctccaatagtgtccaagtttacagccggattcctctgctcctaataatttttttgctcttgggaattgtgctcctttcattttttcttcttaatttatgttttttctctgaattttatctttattttatttattggttttttaaacatatgattagttgtagtttctagtttctaccccctatttccctatcataacaataacctcttattataatctcaacccacgtttaagcacgatggttacagctcaacgaagagaaagtgacggtcaagatctcatccacgtggcggatagaaaaattcactattaatattacctcccacgtcgatttatttatgtttccgacctattccaaaggcccaatgggttcaatgtaatgtaagataatgttatataaaacaattataatttccattaaaaaattacgtttattaaataaaattaataaaagaaatgtttttgtggagaaataaaatttagcaaaacttgtccaagtgagaaatataaatatatttctttattatataaaataatatatagttatttatattggccgacagagtaaagtaatattaataagtatttatttgaaattataacttcatccgagttattataaggacactaatcccaaaacatggtaatttggataaggaagggttgaatttattactatcaaatttcgtcaaccatattaattgtccccaattcatatattttagttttgaataaagttttcatggtttgtaaaacccgaagtaaattccttgtttgttaaatcagtataatgtttgtaatctctaaaataatttttgtactttatggttatttccatattaagggatggtgcgggtcctatgagcacgtgagaagatggaggtggtgtcagccaacatgtgaggggccagccaatggctatagttggctggtcaagtccacgtggctggaatctaatttaggaccttttatttccttcactttcctttggtgcttcccacacgtgcattacgcttactaacatggtagcacgtgtgtgtcgcacacctctcacgtgcctatcacctaaatgcttgtataaccatttttatttttcttctttttctttttagaatgggttagtggaagaacttgctgcatgcatgcatgctggtcttgttcaaagattggctaatttcaattattgatatatggataactactcgtatagtcgtatatatatatttatatgaacacgcacacacattaccataataagatgattccactatatataaaagcaattttcccttaatttcttttttttcaaaaaaaaaatgataccaatttttcaaagcttgccaatctgtcttaggaataataataatatcgcttcaatggtctctattattgcaccaaaaaaaattaatatattcccattgaattcaggtagtttgtaatattatggaccatttagatatgttacatatcatgacttattgtttactagccacgcgattaatcatccacgtaacatctcatataaatatcaaaaccctcaatggctcaatattctctctaaaaagaaaaaaaatatcaattttctgttttttttttaatgttcctgagctttagctaaaaatatataccaaatgtaaatcaataattaatactaaaattattccccggatcgatttctataattatgaaagtgatgaaataaaattaaaaacttttttagaaaatatccgtcactttgaataggtaataatttgatttccattcaaaagaaaatgaaggaataatttacttttaactatatatatttttcaagaaacttaaagtcaaaccataacgtgtaaaaataatgagtgtaaaaataatgagtgaatacggacagtacgtgtagatgatattgactaataacaacaatatctccatttttcccgaattcaatagtgaatacatggtccgtattccgtagtccgtaccctttcgccagataaatatggttttagtcccactttttaatgcaagcatgtcttatgttttactaaattactaaaagtcctttgaaaataatttattttgttttttttttggaaaaatatatagaaaaaaaaatgatgcaatttagcataatttcacgatttttatttgtgatatgtaaaaacattgttatatttcactttaaataaacgcttaacagcgtcttatttagttcatattcataataatatgaaagtgcagcagtttgtgtatctaagaggctcttagtgatcttattcaaaaatttataatattgtagattttgtactaatatgtaatttttaagctattttttctattctccaacttattttactaaacataatactaaattatgtaactttttacaaaaatgacgtttttttaaaatgaaaacaaaatgacgtgacacgtcattgtcttctccactataatcttcaaccagagaaacggctgaacctaaaaaaactggaatcacgcgcatgattcctaacctacaaacgaatt

SEQ ID NO: 42422 - DNA, 2786 bp, Cannabis sativa
taagagattaggaagaccacaactattagagtccaaaagagtgccttgggtatttacatgtttttttaaacccgtaaactaaaccaccttcttcatctctacaatgcttcttggtagttagtttttagttgttggcctatccaatctttccgaaacaccaacaacttctttaatatatatattctcctatctcaaaacccaatacacataaaataattaaataaaatcccttataataattttctccatgtatcatctaattaattattattacaattattaaataattaaatagcaccattaccaatgctttttatttagcccattcttcccactactaatataacggaatacttcttcattctcatttttcagaagagaaagctctgttttctgttttggttgaaaagagagctcaaaacagagtaaaaatggcggaaaccgtaaagatcatgaggaaatcagtctttacttttcttcaaaactacaaccatttcagttcaacagctgctctaatggctatgcctttctccgcttcaattctcctatcccaagctatacttccttcattttcttcttcatcttcttcatctctgcttttcaccatttacaatcgtatacaagctctctttgccgccgctggattcccagcctcgtcggaattctttgccattctcaacgagaaacttgctcagacaatctcctcttccgttatcactctccctttcaccctaactttctttcttatatgcaaatcttatgtaattgaatcacttagaaaccctaaattgaaatcgagaccttccttatccgccgttttcggcaatttcagtcgtatcttctcaacttacctctggaactcgatcctaatcctcgcggccaacgcaaccgtcttcgctctcctcttcctcgtcttcaattcgctcgaatcgtttggcctactcaaatcaaccaactcagttctctttctctccgcctccggagccgttttttactcgattgtgctcgccaacgccctaatcatctgcaatttgggcctggtctcgtccggcatggagaggtcctctaatggaggcggttacttgtcgactctgagagcttgtgttttgattaggggaagaacctcgacggcgttagctttgactctgcctctaaatctggccatggcagccatcgaggctctcttccaatacagaatcgtgagatcccttactgcagtattattatcatcatcatcaacaacatcttcgttttggatggttatggagtctctgttgatattctacttgtactcgattatggtggttcttgatacagtcgtgaattgtcttttctacaagaactgtaaagccatggaggaacaaggaagactattttgctatggtatcaaagatgatgatcacgacgatgatgcgtatggctattacgtttatgacagtttgaagactctggatttagaacaacttccttagatttttttttcttttatttttctcttcaagctttctgggaaaccaaacagagagctcatagattgtatgtacaacaaaaccaaattgttttttttttttttttgaaaaaagaaaaagagagaaaaaaagaaaagaaatacattaaaattcttgccatggagagtagaaagagtccaggcaaaatttacagcttaagctctttcaattgtggtaaaaaacaaaaagttataaaaaaagggggaaaattgtatactaaaatttaaattagtcccttttctgcaatctttattttgctcgatagttatttttttttttggtaaatagcggtaaaagtacccaaagtttaatatttataagtgtcataaacaaaatgtttatttttagcggcataagtatgaatatttgtaaaactgtaattttcttctagtttcgtcactataataactgaaattgatactattacattataccgctaaaaataaatattaagtttataaacataaaagtttggatacttatgttgttatttacttttttttatcattattatatatattaagataattggcagcataattatataaaaaaaattggataaaatctgccaaattttagttatgttgtcgttttcaagcggttgattctcatcaactaaataaaaggttggaaaacctaaattaatagtatgttaactcaaaatgtaatataagtttttttttttttttttgaataacaagagggaggctgagaagaaaaaaagcaacagaaaaaacagacagcctaaaaggacctaaaaacagtccctaatcttcatctcgcgacctgagagcttgctttgcaagagagtgcgctttatcgttgtgctggcgcgagatatgtagcaaagaagcttcagggaacctggagaggaaggtcctgatctggtgaacaagagacgacagaggggagtggtcatgccaattccctttaacaacctcctttgaggagacaaggttgttgagacaatcggagaaaatataatctggtttcaaattggaggatagacaccactgtattccttcagcaaggcttgagcttcagcaaaaataggagaagatgcccctgacttgttgatacttgcaaactgatgaatatgggacacaccttgcacaaagaccattcctagacctgtggctgaagcattttgactgagggcagcgtctacaaaaagagcagtggttgaaggagtcaaaatctgatctggagctgctggggaagggcttctagaggtagtagacacggtggagtgaatttgagcctcttgataatcctgca

SEQ ID NO: 42423 - DNA, 1409 bp, Cannabis sativa
ggtattattaaaggtgtttcttgttgaatgtataagtaatggccaagcattttccttcaaaaaatctgttcaatattgatcataaccagaagtgggtagaacatatcctatgatttctggtccataagcaagttcgggttcagtgccattgtcaactagttctaaaaaggttaagcacttctgaaatggatggctaagcctaccacattccatacactattctggaagtctttcgcgaaattcaacctagaatttatctttaatttgttgcaagtgtatatttctgcctctctttaatggctttgtgacattcagtttcactctaatgcccaagaaaggtccccatctttcatttagtgatagagctaaagctgtgtggaataaggtccagttccaaatgttcatccctaatattagtaatctgaatggctatgatatcttctctcatattgctgccaccaataatgatgttgatttagagaagatagtttgtcttatatggtgtatttggcatgaaagaaacaaggagctccatggtactaaactgaaaccagcagatatcatatgtatcttctctgcttctcatcttgatcaatatcataaggccactttatctactgtaattcaaaatagcaacacttcaaaaccacctgatccccatactgcatcgcacacgactccttaggctcctatttgttggacgcaatctgatgatggtttgtttaaaatgaattttgatgttgctttggatgttgttagcgcaattatagggataggagctattattcgcaaccattctagtgaagttgttgctggtttttccaaaccaattcgtggctgctattccccaaaggagatggaggttgttgctatgttctacaatatgcaatgggccctagcacaccaattgccaattcaaatcattgagacagactctcttttagttgccaatacagttaacagtttattttctactagatttgtaactcatttccatgatttagtagatgatatatcttatcttttattctattttcctagagcaaaagtatctcatgtcaaaagagatgcaaataaagtcgtcgatggtttagttaaatttactctttgattggatgaagattattcttagttggggaaaattccttctccaatctattatgttattgttatggattcttcattttcatgataacagaattttctaaaaaaaaaagtagaaactattaaaaataaaaatccataaaaatatttaaaaaaaaaaagtgcaatttcaaatatttgtgtaaaaatctgttattcatattagggattttttcaataatatacattattgttaaactatttacaaaaataaccttacacaaataattacttaatactaacgttccacatcagtaaataagtac

SEQ ID NO: 42424 - DNA, 11322 bp, Cannabis sativa
  modified_base (8789)..(8794): a, c, t, g, unknown or other
gaagggaagatacgcccaacgtactggtaccggtgctcccgtctacctagctgccgttcttgaatacctcgccgctgaggttttggaattggccggaaatgctgcccgggacaacaagaagactagaatcaaccctagacacgttcaattggctgtgaggaacgacgaggaattggggaaattgcttcacggtgttacaatcgccagcggtggtgttcttcccaacattaacccagttttgctaccgaagaagactaagtctgctgaatctgagaaacctgcaaccaaatcacccaaatctcccaaaaaagcctgaatttaggtctttaaagttcctttttctttttgggttttggttcttgtagaaatatgtaatttgtttaagaatgggatttgtactaataggttggatcttttcaatcctttttcttttgttcttggtaaaatattcaatgaaatttacctaattttatcatgataattacctgtacagtcaatttagatgcaaattattttatagatctacaaaatatgttctcacatcatgataatttttgttggaatgaatattctaagttatattaacctttttgtctgattacattaagatttaatcaaatgttattatatatcttaatttttttttatcaatctatacactaaaaacacaaaacaaaacaaacttgaacaacagatagactacttattctatacaactgaattgaagatagagcaagagaaaacaaaaccaatatcaaatggcattcaagtcaaacaatataaactaggctaattcatataaaccttatatctaatcatgaatgagtttaaatgtaacacattttttatttatgccattggagatagtgtaacaagagagtatgattagaagtggttctttcattgctttacatggatgaattcttttatatataaagacaaaagtgtcaactattttgtccaagaaacacttggtgtttaccagaaataattcaaaataggttgaacaaaggccaaagtgtacataatttagcttgaaatgaaataaaaatgcacttcttttgcacaatgttatattgctttgagttcattaacatacattttgcacttttttttttgattacttattttgtgttctttttatctattgcgtatctaattttttgacatggaatggaaactataacttcaaaagagaaaatcacaacttacaatatccatcgcacttccaaacatattttgcctctcaatagaattttacttattatatacatagaaacccactaattgtttctttaccaattttgcatgttctcctcttcataataatctaaatctaaaagtcagttacaattgggtcatatctcaaaaagggtccaaaaaaaaagtcataatattttccttggattcatatgacaaagattttgaattttccaagaatcagtgtacaagagtaacaaatagaatccagaaataaatttcttaaaaaaaagaaaagaaaaagacaatagtaagtcatcatccttacatgtagatgcaaatttctcttggttcaacaaaaacatagcgaaaatctcttgaaggggtgaggacttggctaagtgaggagggtttcattcaaaagagaggattagttatagagagattgaatatcacacttttattccaatgaattaattcctgtttgtataaacagagttattcaggatataaacaaagtcgagttaatgagaatctatacttaaagtgttgactcaatggctcttaatctaaccacactaacataacatgtagtcatgtaccttgtttattctcatgtttttctcctattcattttttttttggatctctctattacaatatgggatatccaaatcaatcttcaaatttgctaaagtaagaaaaacagtgacttcaaattgccaagaacccattgtaacaacataggcatagaaagtatcacaacatacacttttattggttttcctaagcagatatcagaatattccaagaacaaattttaaaggtcaagtttccttggcaaaaactgcagtgaaatatagaaacaaaatctacatttttcaagttcaagtattcaagctactcattcacaaccaaatataagaaaattaaatcccattctgatgcaaattcattagtcttaactacatacaaatctcaaaatgagtactattagaacggaaaacatatagaaggtagtcagtcacctataattaaattcaaagtttttaaaagatttccctttctctattgataatgtctttaaagaaggagaaatccactgcagggcatctcgcaagtctgaatgtctctctggttggcgttcagtaaaaactctaagatgctcccaattaagcaaatgagaacgacatatcttcttgaaattttctggcatgataagagcctacaagtataaaattaagaaaacaagttaaatataaaatacactaataaagtaatctgtttgaaacacccttatacttaaataagacaattaacaacatacctcaactgagtcaacatgcaggcttaccctattccatgaacaattaagattcaaaagaaaatttatcaaattgataaaccaatctccgtcatacttctcatgcctctcaagaattacgaatgttccattcaacaaattagacgacgccattgatactttcaatttgatattacctatataacaaagtgatgctaagtttggagctgattcaattataacagacacttcttcgtcaaaagggttatttaaattgaaacttttcacgctttgactcgagattttaatgtgtttcaatcctcctatgtctttcaaattgctcaaagtcaaattctcaaggagaggaagatttgagatgagatattctattgatgacctttccacacaccagtgacaagttaaagagagattcttaatagcattgcagacagagagatttattgcgccaaatgaaatttcacgtagttccaaagattcaagattcatggcttcaatttgctccactctatctgaaccattaattttcaagatcttgaggcttgaactatgtatgcgaaactgctgattataatcaatattccaactccaactacaagcattaaaccacaatttctcaagggaaggagaacccaacaaaagctcacttaccacattcttatctccaaactgaacaagagtcaatgtcaatgacttcaatgatggaaaactaaacgagtaactacaattcaactccaccaacatcaactccaaaatagtcaaaaactttgcattgaccaatagtgttttaggtaagaaatagtaatagtaatagtaattgccatcattatcataatagtacccttcccctaattcaagagtgatttccttgactctattctcaactgcataagctaaccatttatcaatgccatcagaatggctcaacttataggatttcatcctaagcttaaaactagtaatggccgaattggggataaattgcatacctctcttgcgttgttccaaacaattttcaacataattgcgtagcttttttcctccccctggcaattgaaaataagttctataggaaaaagagagagtgggaactgaataccatatgaatttccaacgctttgaaaggaggcaagtgggaacaacatccttagtaagaagaaatgacagtatgtgtaggattaacgcatcaggtagttttgaaattctgtcctcctcaaccatcaacactgatgttctatcactactttcagccatgattgacctgtaacaagtaaaaacaaaaacagagaaatcatcaattgattcatagaatgcaataaattttaaaactttcaaggatttatgttttatgagtagaaaataaataaattccatcaatacatttgtaataattataatcatattaaaaagctagaatggttcatacttgtgggtgctgtttaagaaatttccgtctgaatgaggagttcttggatttgtgaagaaagggtttcttcctaaagagaggattagggcatgtgatttagtgtaactgttaatataaacaacatctccaatctttcacgaatttggcgtagaatttttgagtttggtgttcacaccaaaaatcataataaataacgtattttacatcaattactcaaaaataaaatatttattaaattaattaaaaattacaattttttttttaaaataaaataaaatcatgcataatttaatatttttcaaggtttagatcaagtgatcatattaattttctattttattaatatatattatttatgttatttttttttatatttaattactgtttattttattttatttaatattaatattttgttattgttattttgtatttttcaagataatagtgttttgattaaattaattattattttgtgctaaatttttatttgaggattaaaatttaaaattattttttaaaataaattaaaaaaataaaaaaattcaaatccaaattggtgtaaattcaaaattcaataccattaataatatagaatttagtgcactaccaatttagtgtataattaaagtaaaataatgtaaagattctacactaatttagtgaaatagtacaccattgaaatcctcggttctttttttttcattatctttttgaaacaaaatttttaatgggttttgatcgaaaatttttcttttccgttttaattgaagatagtagcattagatattctgcaaatgaacttattttggaaatgtagccccattgttcagaggctttcagctgtgctttgcagttggttgtgtttgtcatttttctctagttgattatgcttttacaattaaggagcttcaaattcagatgaaaacagaaaacataaattcacaatgagagattggccattgaaggcttgaggcaaataaatagaccttttctttttgtgtcataatctcaaagttggttggaacttagaaaaaggaaaaaccagtcaagaaatgtcaccgaattccttcatttaatccgaccaacaattctcactataatcacaaccggtatggttcttcttcaaaatttgttactaacagactatcagtaaggtatataaattagacttaatcttaaccaagttggcaagcaaactctttagtcttaaactacctattcagaagctttggttcagcaaactgtgtcttccagttcattttaacatgattctaataaggccctcttcagctctttctctcttgatggaacttttaagtcacttgacaccattataaattttttaaggtctttacacaaaaaaataatatttatgataaccctgaaaaagtgttatcaaatgtattttataatacttaagcaaatgtgttaagtcagctcaagtaattggcaagcttgctaatagtgtttgtgatttttctctagtttttcatgttagtagttgattattttatacagctaagaagcatagaacatttcacagaccaaactcaaaccaattcttcatcacctttcctaaatgaacttgtaagatacacaataaagcatcatgaaaccatcatcaaaatctgttatctatctttctcttcactgttagaatttgtttgttttgatattattgtcttcgtagtttgacctttttgtttgtttttggctgatttagccaatttttatgcaaatcctacaaagtgttttctgtcttattacttcagcaaaattcatcataaattttaataatataccatatgattaaaagccattgatattaagcaaagtttctttataggatgcccctcttcaatcactaatactatcattatcaacaaaaaagagtcgaataacttcaaattggggtcagaagaaaaatagaatgaaataaagaaataacagaaaatcacttcagaatcttatttaccatacagttaagaaatatccatcatttgacaaaccgatttttcatcacctttcctaatgaggctgctgactatattgaaatttcagtctagaaaaatttaaaaagcgatttcgaaacatggcttttcattacagagaatgtaggagaaatccattgtagagcatctttcaagtctgattccctctcaggtttacattcagtaaaaaatcgaacaagtttacaattgaccaaaggagaacgaaataacctcttgaacatcgctggaaagataagatcctcctctgattcaacatgaatgtctatgcatttccaagaacacttgagactcataagaaacttcatcaaattgataaaccaataggtgccatagttatgttgtttcttaatcacaaatactccagacaacaaattggaagactctattgacacactaaatttgatcccaccaacataagcaaatttggttaagtttggagttgacttaattacaacactcatttcatcatcaaaagggttatctacatagagttgtttcagctgctgattcgagatttcaacttgttttaacttcataggcttaggcccgttgtaaaaagccaaattctcaaggagaggaaggctagaaatgagatattcaaatgatgatgactcttccataccccaacaacaagttaaggagagaaatctaattgccttacatgcatagagttttatcttgtgaaaggaaacacccactaggatcaaagactcaagatttatgagttcgattcgttctaccaaatccttagagagtataatttccaaaaacttgaggcttaaactatgttgtatgttgatgctgagctgaggatcactagacaaacaaaaaaaatgcaactgcaacctctcaagggaaggggaacccatcaatagattatctactacaccattatctccaagcctaacataagctaatgacaatgttttcaaagatggaaaactaaacaagtatctagaatccaactcaaccgaatccaagttcaatatagtcaaatatcttgagttgactgctagtgttttaggcaaggggtagtagtgaatatcaccatttatagttattgtactgttcacgcaaagatctatttccttgactttcttctcaactatgaaagctaaccatttatctagatggccagcatagattgatttataagaataattcatttgaagcttaaaactagttatgggtgaatgggggataaaatacatggcttcctttcggtgttccaaataattatcaacataactgtaaaacatttttgggtgaactttcaaattagaatccgaaaaagagagtttggggacacaataccacatgagcttccaacgttttgaaactaagcaagtggaaatggcatccttagttgaaagaaacgacagaatacgaatgatgagtgtatcgggtagtttcgaaattctgtctttcttttcaccaaacatcaatgtcgtcttagctcttttcttagccataactactaacaccacagagaaagaaaagaaaaagaacagagaacttgtgagttaagtttctttaaagagaaagaatcactcataaaatatgcaatgaagagtgaaagaaggcaaagaatgtgcaaatttcttgtgatattattggaatatgatgaatcctatttatacaagaatatatattaagacaaaatagaattagtaattattgaagaaatgaagaaaaattgtttgtattttgtacattaccggtattgatgaatgaatggattaaagaaatgcatttcatttgtaattaaaagaataataattaagaatgaaaaaggttagaatggtcgatacttacttgttaggaacaataatggaattaaaagcgaaagagtgagaatgattgaatgaggagttgtttgagtattgtgtaatgataataataatgtaaagaaagagatttatatataagtgggtttatgtttggcggcaaaattaaacccctttcagtttgtataggagttgtttggtgtgtttagtttacttctctaaaataacgaaatatcatttttaccattttgttgtgaaatttgcctcaaccaagaacacaatcaaaacaacacagtgacaaaatttaagaacacaatacaaaatgaatttccaacgctttgaaaggaggcaagtgggaacaacatccttagtaagaagaaatgacagtatgtgtcctcctcacccaacaacagtaatttctagcactactttcagccaagattgacctgttacaagtaataacaagttatacacttctgtttgaatgagaaaatgggtttagcttttgaaaatgagttagattagtcattaggtatttgtattagtttataccaaggtagtgttaaatttccaacccaattagtgttatggaatctaatgcattccaacaataacaactacaatactcatcaaataagtcaaagatctattttgggcatttaataataatgaacatacttctgatattgtatgtagattctttgatcatcttctttaatcaaaacttatccaaagaaacacaacatacaataaacaaataaaatgcaaaagaggaactaatgaagagcatacccttaccattaccatcataaccccatttttattttcttgtaccccatcataaatggatatttatgtttggcggcaaaacttaaataaatagataactataaaaggtaaataacggcggtacctaaaattttatgtttgtaaacgtcataaaccgaatgtttatttttagtggcataagtattcaatatttataaaattgtaatttttttttccagttttgtccgtacagactctattttgaatttatnnnnnnaacatttggaagtaactgatactatatatttctatctagacccgataataaaaaatttagtccttaaatgtacctgttgggtttataccgcttacaaacataaaattttgggtacttatgccactatttacccttatataaaaacagattcttgattttgcatgggttattttgcaaatttttagtgggactgaacattttggccgaatttaattagaatcaggtcaactcgcccggacctaacccgttgaacctgacaatgtgaaaaaaattcgtaggtccaacccgaacaacatcatcgaacaggttaggtttgtattattaacatctgcatttgacccgtacccagccaccaacctgaattattattattattataatttgagtaatttgtagcttaatacatctaagtaaggccataaagactacagtagaattatattttccattaaacttggaagataagatacacaataaaacattatgaaaccatcatcaaaatctgttttctatctttttcttcactgttagaatttgtttgttttgatattattgtcttggcagttaacctttttggttgttttctctgtcttatttcttcagcaaaattcatcattagaatcttatatatcacacacctaagaaatatccattatttgacaaaccaatttttcaccacctttcctaatgaggttgctgactatattgaatttccagtcagccaagagccaagtaaccaagcattgaaatttcagtgagatcaagttggtgtgttaatcaacacaacacaaatttcatcaagagaaattgacaaactaattcattcaatttggatgaattctattactaacaacaaaagcttgagaatgattcatcaatgtttcataccaaacactcaatatttcagaagaggccctttctttatagataatgtaggagaaatccattgcagagcatctttcaagtctgattccctcccaggtttacattcagtaaaaaatcgaagatgttcccaattgaccaaaggagaacgacataccctcctcaagttccatggaaagataagagccttaatgtcacatatacattaaaaatatattaataatatgaacttgaaataacaccaaaaaaatcaaataagaccaagtaataaacatacgattcaacatgaatgtctatgcatctccaagaacagttgagattcaaaagaaaattcatcaaattgataaaccaataggcgtcatagttctcaagcccctcaatcacaaaggctccaatcaataaatgggaagactccattgacacactaaatttgataccaccaaaataaacaaatgtgtttaattttggagttgatttaattataacactcatttcatcatcaaaagggttatgtacaaagagattctccaagtgttgattcgagatttcaatgcgctttaacttgttaggcttacgcccattgtacaaagtcaagttctcaaggagaggaaggctagaaatgaaatattcgaatgatgacgactcttccataccccaacaacaagttaagttgagaattctaattgccttgcatgcagagacttttatcttgtcaaaggaaacaccttttagcaacaaagattcaagatttatgagttcgatttgctccaccaaatccttagtgagtgtaatatccaaaaacttgaggcttaaactatgttgtatgttgatgcggagctgaggatcattagacaaacaacaaaaaagcaactgcaagctctcaagggaagaggaacccatcaatagcttatctactacatcattatctacaagcctaacataagctaatgacaatgttttcaaagatggaaagctaaacgagtatcgagaatccaactccactgaattcaagtttaatatagtcaaatatcttgcgctgactactagtgttttaggcaaggagtagtagtgaacatcagcattgttattctttgacttgttcacccaaagatgtatttccttgactttcatctcagctatcaaagctaaccacttatctaggtgacaagcagtgcttctttcataagtataatctatgcgaagcttaaaactagttatagccgaatcaggaagaaaatacatgcctctcttgcggtgttccaaataattatcaacataactgtaaaacttttttgggtcatttcccaaattagaatcttgataagagattttggggacacaataccacatgaatttccaacgcttcgaaattaggcaagtggaaacaacatcctcagtggaaagaaatgagagaatatgtaggatgagtgaatcatgtagtttggaaagtctgtcttcctcctcatccaccatcaatgtcgtcttagctcttttttcagccataataactaacagcaaagggagaaaaagaagaaagaaattgtgagttaagtttctttgaagagaaagaatcaatcataaaatatgcattgaagagtgaaagaaggcaaagaatgtgcaaatttcttgtgaaatcatttgaatac

SEQ ID NO: 42425 - DNA, 4426 bp, Cannabis sativa
  modified_base (58)..(76): a, c, t, g, unknown or other
  modified_base (151)..(153): a, c, t, g, unknown or other
atatgtattaaatcataccccttgaactttcatccatgttaaattttttttactaaannnnnnnnnnnnnnnnnnnatttaacaatctcaatagttcgagcgaaattcttaacgctcaaaaaagttcaaggggcacgatttagtacatgtnnnagttcgggggaaaaaattactaattagcctaattataaatgaaaattagaatagttttcaatattaattgtatgtatttaattatatttcaactatgaaattaatatattttcatttatagtttatcatcattaatttattgaataaaaataatagaccgtactgctttaatggtgttattatatcaaatttaatttatttttagtttttgttaattaaatcttataactaaatggatttgaatcatcaattagatatgatcaatgcataagtggaaagtcaatatttaacacctttacaattgattaattttggaatgtcatgtatatatgttgtatattttaatttaaataaaattatgagtttgagcattattattgtgtttttaaaattaaaaaaaataatacttttaaaaattcagattctcattataatgacaggtgaccacacaaaattaagcatgtgattcgactactgagaataattatatatatcttaataatttataatatttatggttaagtaaaggttaattaagaagctattatggataattaaattccccacgtgtatattaattttttaatatattattatatgatggtcaactttttctaatttagagattagaaagtgaaatggcactcaaattaaagctataagaatcttaccttattattattgttattattatttatactataaatattaatatatattttattaattttatttgtaacaaattaattaaaacatgaggtgataaattcgtagtcttatattttttatagtcaaataaactcatcatgatcaaattaattaaaatctagataattaattaataattaatggttgaaaatgacattagtgtgttctttcatgccgtttacctaacacaatatattccaaaaaccaattaattaattaagatcttatattatattatattaaattacttttcattgctaacttttttgtagttcaacaaggaatttgtgttaataaataaggcttttataaagctagcacacacacatatattaatatttttttctttcacgttttgaagattttatttaaaatatttaatatatatatatatgatattattatttaattaattaagggaattgtacataatattgattgattaaatcttcaatattagtaattttctaccccaaaaagaaaaacttcaatagtatattgagcatattttgcaggttatatatagtttctttattttaattttctttttattacattttttacattaaataaaaaaaaaggcacatatataccatttaaatttttatgtcttatatattttggttacatattaaccctctattttatcaaattaatggtacaaaataaacttcttaatattttttatattttgtaaaaaaaaaaaaaacaacaacaataataagatcgttatatatatataaataaaacatgaaatactttttttaaaaaaaataatactttccaattagaagaaaacaaaaaacaaactatttttttttaaataaaaatcattttatttttaaagaatctcaaaatttgttttgaaaaaaaaaaaattctaataaacatatatttataaaaatacataataattttaggtaaagaaaaaaggtaggatatgatcttatatattaaggttaattttaaccaaaaaaaaaagtttaattattaggttttttacattattaagtaaatataaaaataatttgatgtgaattaattagtccaccatttaaggatgataatatgtaattcaataggtacgagtaatctagttatactaaatatatatatatatatatatatatatatatttagacatgataattaatgtattacttttttctaatagtacttatatttatgagatcaatattttacaaagtactatattatatatatatatatagattatatcattactctatatagattatatcattatactcaattcgatcaatttatatatatatatataggctgcacattggatgatatttgagatattatttataagagaaagaatatatatttgaaatggaataccattgaaagaaaaaaaaaagaatgaattatttaattaatataatataatataatatttatgggaatgtctacagtacaccccaatcaaggggtgtttcgatagatctcctatctttttcaatacttaaaagaaaattagtctaattcttttttatgatcatttatgttataattattaggactatctataaatttttagaaaatttcaaataatttacaatgtcgaaaataaaatttatatattttattatttttttcttatacgcgtggttaataattgtttaaattttatattcagtattgtaaactatttagaattttttaaaaatttacaaatagtcctaaatagctacaatgtatgatcataaaaaaaaattagcttaaaaaaaattctagatgtggaaataaatatataataatatgaataacattatatatatttataaaaaaaaatagaaagataagataatttacaactatttgaattcacttgatatggtcaccattttatatatatgcaatattatagctagtatatagtgtaagtagattcataaaatcaataaatatagtctctcaatacaaaataatataataacttacataaaaatgatatcatgatcacgatattatttcgatgataaaaaaatatttaaaatggctatgtcaatgaaattttatttttttattttgtttctctattatttaaagattgagcactctaaaaatagcaagaatctcttaggaggaagaaggaaaaaaaaaagatatgtaagataataaagctagaggacaaccaataaatgtctaaaaatttgggaccatttatactatatggcctatataagtataggtatattagggttagcaaacaatgtcaactcttgtaacatcttatattaagtatacattaataataatacaataatattattcaaccacacgttatatatttttgaaagataaaataaattattagtgtctagtacttttgtccgtgtcttatctctattagtctaataagtgttaggtcctatataacttataaaaataacttttagaaaatattgtgttaatcaatcgtggagcgtcacctatagcaggtgttatacaccactactagtgcccaaatagaatgctcttttcaaaatgctaaaatgtatcagtagtgcttaatatattttgagatgttatattgttattggtgtaattactaagtatctggtctcatataatttaatttaacttttaaagacgagcattattgctattgtgtactagtggtatccaatacttttcataggtagtgtctcacgattggttagcgatattgcttaaaaactatttttttaagttatatgagacctgataattaattagattaatagtagtatgacaccaagaagggcgctagatagacaccaatagtgttttttagtaattctcaaagaatatcaataaccaatagtaagaatccaaccgtaaacccaatgaagaacaaggtggggctttgcccatgctcatttttttcttttttaatattgtacataaataaataaatattaagataaaaattaattatgtataataaaataagtgtgcgcccctcttacataaacatatatagttagatttagatattatattattttaataactattctgcctacgcttgattaaaattttaggtctgctaacttataagtaatgtgagacactactaatacacaataatatatatatattcattttaaaagaaagtgtcgcgttcaaaccctactaaatttgtttattttggtggtgataaaatataataataattattttttgcctcacatttaaaccgcaatctaaataatgacatggcaaaatgcgattggtcgaatttttttttgtaaagttattagtaaaaatgaaaaatactaagcattatttggtacgaaagaaaaaagaaaatctctaacaaaaagttaatgtactcttacctttaaattaattattaatttaatgacttttttggaaaattaattcaacaattttatacttttatgatatctttataatttcatagttaagtaaaaatttaaagatatacctacaccctccaatcaattacactatgtttggttagatggaaggaaattaagaagatggaagggattaaactttacataacatatttttattttctgttttt

SEQ ID NO: 42426 - DNA, 4434 bp, Cannabis sativa
  modified_base (80)..(80): a, c, t, g, unknown or other
  modified_base (1274)..(1278): a, c, t, g, unknown or other
  modified_base (1665)..(1676): a, c, t, g, unknown or other
tagattagggggttagttgcaaaaacctatccactttaagaggttttgccgcaaataaccctaataataataataataanaataataataataataatagttacacaaacacatttcgtgaaaaatgtgcaacaaaatcatctcaatattcatgtctttattgtcattattaagtttttcggaaaaaaaaaaaactatttaattacacttcccacaaattttgattttttttgtattttgtttattatatattgtaaagtatttttgaaaatattgatgaaaaataatctgtcttgatttcttatatcatttgatttttattttttttacattgtaaaaactttccttaattatcttttttttttcctaatatatatagataaattaatgcaataatatttagaagaaaattcgtaattaatttcttaaattaaaaagtttgtatattattacgtgcaatttttcataaacttatcattttatttttgaattctaaaggagtgctcttataaaaaaaatgagacgattgatttagaatattgctattaaaaaaagaggaattacttcatgtatatttttttaatttttattttaaaatttatggtttgagttatttcggtggtttttacgtgggttgctatacgaatattggttgtgatttaggttgctccgttagttgctataagagtttctgtgtggaattctgtaaaaaaaaaaataaaaaattaaagtaaaaataaaatataaaaaaaaaaaaaattctaaaaaaattagtatatgtttttaatatttttgatttgtcaaaagttatttatatagtcaccaaacactttatcattgcaagaaaaatgaaaagtgaaaaaacactttcatatttttctcttcctaaataattgcttaattttatttactcataatacattctatctctcaacacgtttttaataacaaaataaattaattaattaataaacctcgacccaattagctgaatatataataaagtgggtccttttaataatagggtaagaaaatatattttattttttaaaaggatctgaaaatattatttatttattattactgcatcaccatttttcatgttaatgtcaaccataatacaataaataaaacgtgcatattcatgcatatgacctaataaattacagagaattaatcttgaattatatgttttcgtcttagctatgggctttcgattgttgatgttgatttttcactagaattttttaagtaaatttatatatatatatatnnnnntatatatatatatatattatgttcgaagcttcgttgaataatgaataatttttaaaccctaattcaagtgactatatttttcattaattatttatatatttgactagctataattaatataattaatatacattacaaaaaataactgcttttagtgacaacattttagtcacaatttaaattttttgtgattaaatgtaacttttagtcacaacaaaaaattacttgtgactaaaatatagtatttagacacaagttgttactaatttatttttagtcacaacaagcattgtgactaaaactacatttagtcacaaaaaattgtaatttgttgtgactaatacatttagctccgaaccttttaatcacaacataggaatgataatnnnnnnnnnnnnacaatttttttatttttagtcacaaattttgttgtgaatatacacgtatgtataaaatgcatatataatcaggtctgtcttgattagctaattggagtttttggctaaaaattatgttctgttagtatatatagaatatagtggtagatctaaaatatagtattttgaaaatacaataaataatttttcataataaaatatggcattttaaaaattaaatttaagatctttttgttaaaagattttttgggcctaaatagggcaccctctttgagttcaaataggctttagaaaaaaaatttagacccttattataataataaattatattttaaaaaattattaaaaaagtatttatattttttaatatatattttttattagggcttttaagatgggtggactctaatcacgaacctaacttacctcaaccaaaaaccggccaattgtcttaattcttaagtgtgattggtttatgatttaaaaactgttttatgtttctgaaaattaaaatggtaggggtctacataagaattcttgattggttgattgttttcaaaaacaaaatttgaatattattttgagttttaggctaaaaaatgaaaacacaatttttatattttttatgttttcaaatcatggaatctaaaaactctccaattattcttttacttttttattttgagattctcaactaatcacatattcaattttttaaaactcaaaaatattaaatcacacactataatcaatcacatatttagaaacaatttttcacttataaaatttaaatttttgtttccaaaacacatttttaaaaaatacaatttttaaatcacaaaccaatcaaatatcgatttctataaattataaaagaagatttcatcttttaatatataaattatatgaaagaaaggtgtaactaattttccctataatagattgatcatgtttgaaatatatatggttatattaatcgtggtttttcaatctattgaatattaaaatatgtaaataatggtataatataatattaataataaaaaagtgatttttgcccacaaacatggccatcctctctaaataatcgttgactatttaaggaacctaacttaattattatacatatatactatatagctcactttttcaaacatataaatataaatatagatatatatatagctcactttttcaaacatataaatataaatatagatatatatatatagcttggggtacgttggtagtatttaagaatcaagatcctttaattatactaattatttttgttgacaagttaaaaattttaattatttaatacaaaattaattgacgtgttaaatttaaattggtttaacaaaatatgaaataccactttttaatagagaattttgatttaagatttaaagtgagggactacggttatgctttctatgtttggcaaaattataagtgattgtaaaaccttgttgcgtaatgtttcctttcattttgtaaaacgatcagcaaatgtagtgactcactcctttgcgagagcctctatatcctatcctgattgcctcttcaacttagacactgtttcagttgttttgttacctagtttggtaactgagttactcatttaataaaatgatgactttcatttcaaaaaaagatttaaaatgagggaatataatttttattgataagacatgagcaaaaataaacttaaaagaaaaagggatatatacgataaaattttcttaatatttaatttgtaattgttatacatatagttctaattaaaaaatggcagcaaaaataccttaatattttacgattttattgtagtacgttgtgtactttttttagctgttaagtatcaattaagctcattaattaagtgtcaactcaaaaatatttgttgacacattttttttagcttatttaatacgtagtctaataatatgttgtaacatatttttgagttgacatttgatagccaaaaaagagtacaactataacaaaatcgtaaaacaaattatttttggtactaattttttattaaaattatatatgtaataattgtgaggttaaaaaaatttagccgtaaatatctaaaaaaacttttggtgaaatttacacttttaacttttatactatatattatctaacttaaaagctaatattataatttatgacaataaaaattatattttattacaaatatatatatatcatatataattaattaaaatacacatataattttttttttcaagagtcgctctattttacttctatgtgggtgtgaatgtgcgtgttaatataaatataatataaatatataatagattattatatagataaccctagaggctagaggctaatacctattgtgaaaagaaggtcgaaagcatatttagtatatatatagctacttatataactaaatttaattacataaagaaattactctacacacaagaacaaaaaccttttgggataatttctttagtcatgatgatttgtctatgaatactcagataaaaatcatactagctacaactctatatctatccataaaaattaatatatatatatatatatgtatatattatgtcactagctactatagctagaaatatatactttcatttggtgttttttacgtacatgcatattgtttggatatatgaaaacataaataaaaaactactatagttattattcctttaagttttataaatattccaacttgaaaatgattttctac

SEQ ID NO: 42427 - DNA, 10909 bp, Cannabis sativa
  modified_base (2203)..(2216): a, c, t, g, unknown or other
tattgcactatcgaattgaagtaattgttatggatcaatcaggtacgcatacctaattattatatattattattgtattctatgttatatacaaattgatcttcaagtttatattaatttttttatcagtcataactttataaattaatttttaaaatttccaccattgcactttatagtaattaaataaaatagtaagtactcccattatctttttctgttttcttttttccattaaaagaatacaaataaaagcacttgcattaattattgcaaaatatgtaatttttcctaagaatttagtaactaataagagttatccatgtagtgatgcatgaacagaaaacccttttctcactgatatcttaaaaagcttgtaacctcaaaggacccgccagtttttctattcatctttttgtatagagaatccactttctcattcatcaattaaaaaaattcacatatatatgttatacatatagttattaatatatttattctaagtgatagaactacaatcattgttaaagctttttctccaaacgaaaaagtaccgcaccatgcaaaaaatattctaccaaccaattaatgtttatatgataatttctgaaccagttagggagcccactatccaatattataaagcaccaaataaagattaaaaagagatatttttcatatatttggaggatattaatttggacgactactataattatagaataactcttagctatttagtactctaatcttggtactcgatgccaatgtactcgaacatttaaaagggttgaataaaagaagcagagaaatctatagaatatgtagaacataagcaagaacctaagaatttttgtacaattatgctttaaatagtcatgaaaataagtctagatgtgcttcacataatttattttatatgatcctaatattaaaacattatagatactttgtcaaaaaaaaaaagtggctgtatacatataaactttcttcttcctgttacttttttattttctttttcttttcattttgattgtttattgtttccaataaatacattttagttatgctttgtattaatattatatagagtacgtaggtgggatttgggggagatcgattatcaaacagttgacataatcttacaaattttttttttttatatagagaagtacttatagtattatattatataagttagtaaaataagtgactatgtggtaaggtgcatgaagttctatttcaaatttaattgacaatgagttgagtagctcgttcctcttatatattttattatttttctacaaattagcgatgtgggactatctaatatccccttaaaatgatagctattttatttgctcactattttggacaactcgatcatatgcggctctttttttatggctcactatccctgatcacaagtggctctttttactctactttttagatcggtaattttttatgtggctcttttttattttttggctctacttcgattattttttattgggtcggatagtcgctagaggtatttttttatttgttttgctctgataccatattagaatttgggataaggtgaatctcaaaaccaattggcaatgagaggagtagctcattcctcttacatattctattatctttccacacattaacgatgtgagaccatctaacaattatacatatcaattagaaatgcaatataatctttgatttacatgtatccataattattcgatccaaatgcgtaggaataattattcaaataagaaaaataactagagcgaataatgaccactctacacatatgcaagtacggtacgggaccattcttaaaataataatgaaatatcttttattaattgtatatttaatttattccatttatgctatcatatcatatatttaaatgtattttttgaaacttcatcaaatttatggatacttggttgaattttctttaatgtcttggtatattttatttaatgttttcaataatatatatgattagattttaagtttgaaaatcattaaaattttgtttaattagattttaaattaaattaatattaattgttttaaaaaatggctacattaacaattatgcataactatgcctagtttttcttgattaatactcacaccatgatggataatcattgtagcgaatatagttaaataataataataataatannnnnnnnnnnnnnaataataataataatgtaaaaaaattctcaatccacacaattctcattccaaatatcaatttaaattaatcatataataatgttttcttttagaaataaaaataaataaataataataataataataataatataggacattgtggtccgctccaacaaattcaaagtttacttcaacattatagtatttataatttgtttattatttttagggaagtcagcggcttacattttaatcaatcaaaattaaaattttaccttttttttttatttatcaagctcttgattttttctgaatgaatttccgtttcaataataataataattaattaattttttatcttactaattttcttctttagtttttgtcttattttatatgatttgttcttaaaattttcaaatctaacttgacataactctggatccctactttcattgaaaaatgagaattaagtgaagctaaaacaaaaacaaaacacatttcgatttttcaactgatcttttcatcgttactgataaaaactttgtgaacatttcaatatccattaatttgtattcgtctctaaataaattggatatttataccaactaacaatgaattacaattttcatctctcttttgatttttgaaataaatattttaattgatatctgctaatcatatatataaccattaataccatactaagaaaatttatagttatacttataataagcaccaaatgactgttatatagaaaataattgcaaggcaacactcaattaaatgagtaattaatcactttataaataggtttttatataattattaattaattatatatatatatatttttatacacaagatttcatttattatcatcctgggcttttttaatttaagagggacataaatataaatattcgatgatgcagattaaaatattttgaatgttataaatgcagtttcgattgaagttaaaagtacaaatattctttcacaatcgaacccatttgattattttgggttaattaattcaagcttgaatgatgataaagtataggaactcattataacgttgagaattcaagcaagaactcggaaaaaatgaacacagattacaactctagctagggcatttaattcattcatgcatataacaattaatcatcttaaaatgccacgtcaatacttgaattaattggtttgacatggtatcaatttcactctcataataataataataactttacacaagaatatagcaaccaatcctttttcttatataaatatatatatgttattatatatatgttgttggcatattttcaatagaaggaaaaatataatatacattgggaaatatacggactctcccaccttttctttttctttaccttcttcttaaccatattatagtaaaggaaataatttccaaccaatctaagctagctagcttcttaaccatattttgcaactttgttagcaacaaatatttttacctgatagagctccaaaaattgcacattcttcttcttcttcagcctacaaaatcatgcaaaagttgccctcccatcacatgatgatgatctctaccgaaatgtcgattttgagtttcgaaagcacccattacgtatccctcgttgtttccctcaaggccaagaccaaatctttgagctgcgtttataggaaagggctcggataaaccaatggttccgccattattttggtgaagtccaagtgttaaggaaactccgttgctcccaataccggacatgttcatggcattggcagcaacgccaacttgatggtggtgatgatggtgattatgaagatgagtaggcaagttgtcgtaagacatgttcatctcttcgcttactccacctgcagtactatccatgacggttggtacatcgcttctagaacgcttcaacgtagtatcgtgaaccctatgcattgaggtggatggattttcagacgctagattgttcgctgatgaagctacatgttcttgtgcgttcggcctcattgtgtttcgatcttctctgtgtgaagctttctgagcttggcgtgtttctagcatgtgtatttcctccaccattggcttccatagcctcactcgagcattgataaaccaatttgaaacctgtggatttcacattgaaattttgtttgagaaaacatcactaaatatccaatgttaaataaaacacaatattctaatttgagattagttatggtaagcagacctggcttcttgatagaccagtttgtttagccaacattaacttgtccgtatccgtaggataactgtacacatcagccaacaatggacacaataaggattcttaagctttgacatccttgaaatactccattattaaacataaaattaatctattccaaaattttacttacgggtgaaggaaatgctcgaataaccaagcgcgaagaacagtaacagcacgctcgggaagccctctttggggtcgccacacgggttggtggtcgaggaatcctgagccttgaatcggtctttggctataaagattacctctattgctgtttcgaaaagtaggaacttcttctttgccatgatgattggtgtgacagttatccttgttggagaactgaagttgatccataattgcacttttcaagcacttgaaatgcttggtcatggctttcactgccaaattggcgtaaggagcagcgttgccaagcccggccacatactcgaacgatgttaccactgtctgcatctgttgatagtattgtttgtacctcctgtagacctaaatcaaatagataaaacatctttcaatcagcaagatgacaatcctagctattttcaccattagtgttactttgttagcaaagaaggcttcaaaaccccaattccatagtttaatccttttggctgttattatgaccaattcatataagaataatttaatacaaaaattaacattagaataaagggtgtggtaaacacattttaccaagagactccatactatgcataattaaacaatataaatgctgatttattacaagacaagttcacaacaaatacaatacatattaatcaatcaaccaagctagtgatatgagaaaattaaaaatagcaaagagagaaacatagatattctattctttaaatatatagtatattctcatcagcttctcaagtgattcattaacatatattgagttgggattaatgctagaagcttatatacattacaatctttaccataaatttatctcgtgaccatgaaaataaaaccccttcaaaactcaaacaactttacaataatgaccatgcatccatatatatatatagccttctcagtcaccccaaaaagcaatttctaggtacatacaatacataaattgtctacaaattaattattgaatacaaaactgtactctacatgataaacacactacactaaaagagaaaatcatatatagtgaagagctagttaatcttagatacatcccatataagaaagagaagatatagatatatgtgtgttatatgtatggccaaacaaatagggctatcatcatcatattatactttggaatccaattatgcttttctacactattttttggagtataaaccttttttcaaatggattacttttatgaagcacatatctattatctacacccgagaactacttattggacttgttactaatcacttatatagaactaattctagggtatgtcagaacacttttataacgcctatatctcactgcatatattcccccctcttatcaccttttccaaaaagatgtatttttgcgttcaccaacgccaatcttattatatacttctatataatatatatgtgtatgtatgtatgcctttaaaacaaagaatctaatgcacaaaagagcacagtcgtttgatttgaacagcttataaataatccaagaattagtactgtgcatacatatcactaatgaccacacaactcaaagaaaatcttctggctctatcttttataatacatagtcaggaataataataattatattataaatgttatcattaaacattaatcatattattatttttattattattattataatataccacgatgatcaacatactcagctgctacagtgacaaaattcctgggtttcataaaaaacccatctccaagaaagatctataggtagtagcccggacattaatcacatcgaacaactaaattatcaaaatgtataaccaattaaaataaatgagactgcaattagaccaaacgtaacccattattatatttcatcatagaataacccccaaaaaaaaaaaaactgaaatcatatatatgtacctcatcaagcatagaaataagcctggacttctttttccgactactctcgccaccatcggaaacaccactactaagctcaacatcatcaacattaactcctccactgccggagctcaacccctctaccggactctccataagagtaggatctgcggcaagttcatcaccgtaaacaaccctacttcctactccgacgttacaaaactcttcaagtaactgctgtgccggctttaaaaaccttgatcccttcagaatcgaagagtagcccgtaaatgggccaagaggaacggagctcctagacccgactccgtcgtcagcaaccgacccaccaccaacaacggccagcgtgacagtattagcattattattagtcgtagaccctccacctcctcctcctccgtaaaacgctgacccgaatctctgtaggttgagttccagaggaagctggtggtggttgttattattggtattgttttgaatccgggtcgggtcgtggtgagaagaaagggagagggaaagcggttcgggtttaaaaacggcattgttgttgaaaccctgttggttttcgaaatctctgaagctttggagtgcttgggaagagaagagaaaagggttagtgttgatatcttggatagaggtcatcggatccataaacggatttcgagaaccggaagaagaagacccgttgaccaaacccattaagttgaccacgccttcttctttagtacaagatagaaaatcggaggaggtgggatcgtatgaagtggctaacgggagcaagccaccaccggagccgtgaaagtttgcggtagcagcgtcgatgcaagccgaagccgggtttgtagaggagtgagttgctacgactctgagcttgtctcttcggctttgttgtgggacatggtatggctcgaaaccctccgccataactagatcagaatatatcaaatatagcttcttttttttctctttctctctctctctcttccttataaaaaaaataataataataatttaagagagagaaagagagattggggttttggttttggtgatgacgatgacgatggtggtggcgtaggttaacagatgaaagtagtgtgtacgtgaatattggagaggtgaagtaggactataggagggaggggatttggtgcgtcaacacagtaagtaggactaggagttaacactggatcacagtctctctatataaatctcagttacattattttttaacagaaaaaacttaataaatctttcgagtgagagtgagtgagtctctgaatcgctttctttctttagttaagtgtttgagattttgaggtttgagaaagagagagagagagagaagagaagatagcatagggtttcgagaaaccggaccaccaccggctacttccggtaataattgaactaactgttgctgtcagatatttctgacaggttttggcttttgtcgtttgattaataaccccttttattcaattaattttttttattattaatttgtgatgggaatttaatttaagttactttttttttattttctttttttctttatatggatggtgatgacgcacgtgagaaggaatagcgatgaatgaaaggctgagtttagccttctcaacactcaataactctcactcatctctcttaaaagtcctttttttctcttttgaattttcttctccatttacgaggctaattatataaatatacatattaaagtgaaagtgagacacatatacttctctttattaactttctaataatagcgtatcttcaaattaatacacttaaatatgtgtattatttactaataagagataataaagatattactacttaacaacaagtgtataaaatgcatttaccacaataatcaatgacaagaaagataaaatttaattaatggacttgtaattatacttgtacatatgatttttcttacgtggcaaatgcaatattgtaatatttgaatgattagctttaaaaattcacttatatatataggagatatatatctagtgttggatttggcttataattattaaaatctacttttactacgtgagacttttttctttcttgcctcgtgtgaaaaaaagttaaacttggatttaaattttaaagcaccatctatatcctccttttaccactttagggttagggaattgatcgattaaaaggggaaattaataaagaaagaaaaaaaaacaataatcataataatattgtaagtaatgtcctagaattaaaggtgataaaattaaaaagcaaaagtgtattagaaagaggggaattgatctagctaattaaaggccgaaagggtaattaagccaaataaaaaataaaggttaagttgtgcatgtcaatgtgattatgattacacgtaacaacctaattaagtagtacttttcaagctaattgtaaaacaatagagcgcctacttcatcattattaatccaattaatttcttttatttcctcttttaaaaaaaaattaagattgaaatttagacataagatctcgatgtttcaaattcataagccattgacttttactaataatgtcctatatttagcttcgtgagttagattcgatttctacaataataataagtactgtcattaatcagaaaaaatcaagatcaaaacgatggagaaaaaaaaaataataggattaagtataactgagtctaattgaaataattaactttcccttatgaaagtttgatgaaaatcagactcatttgagttatacttaatttttttttttttttttatcattatgaaacatggcaaagctgtcgtccattattaatcattttaggaagttgaaaactaattttcaaagaagataattttcacatttgactaaaaataaaatttaaaaatccagttagttagttaacttctcaaatagcacttgactaattaattgattagttgaatgtgtaaacattactttaaaatatataaaaaaaaaactttagtagctagctataaaactagcaagcagacactaacacacatatagtcttctggggctaaaaagaatatttgaaaagttatatatatttttaattaatttattaaattatgcactaaaattataaataagccccgccaatattttcattaaattaaatatatttactaagaataattataatttttattcaaagtagacaataaaattttcacgagataaaaattttgaattcatcactactagcaagtaatcatatagataaagttttttatctctaattatgatgaatatattaaaataaaattatttaatcgttttactggtcgttttgggtggtaactaatcaaacgaaccctctcttaataaatattataaacattattataatgtgatatataaattaaattaattaataataatatacatttatgatgattatggttaagtagttgcgtgttgaacgttagggtgacataaaacccattacctcagtgctgtgacattataccatccattgagagttgaatcgtatgtccccacttatgtatttatttcacacatgtacacaaataaataaattattaaggaaaaaaaaaaagattaaactaattaaggttgttgtcgtatcgtggagactatatatatataggtaataatcataatatgtatatgccaaattaaacaaagctacaagaacttttgcatgcattctaatacaattcgtgacactcatatttaacaatttacatattttattaattattttacaatatttattcatgattgattgattgcgtccacatacccataccatgatatcttttccttgttcttcttatttatcgtaccatagataccctctcatgaattttaaatatacaatgtccaccgatataaattttgcaccaataatgtagacattaataagtatagatattgaaattgaatagaaaaaaatattataattaaataaatgcatctgtggacattaattaatcagcataaatatataaagtaaaaatggtgtgataatacccatttaccgagtataattgattcattttgtctgcaatattgtgggaatctaatagttaattacatactgtattaatttattttttttaatgaaaatatggtaaattgtcaaactacataatacatatgagtttaggtgcagtcgaatttttaatctacagtagaatttctattcaagaatatacttggaaccaagtaaattatataagaaaattatacctaaaaacgaaattttgaaaaatatattaaacgttaatggttttaagtgttaaatatacctctagttttgcaattttttggcaggtatatacttaggtacgctgc

SEQ ID NO: 42428 - DNA, 4416 bp, Cannabis sativa
  modified_base (43)..(50): a, c, t, g, unknown or other
gaaaccgccatgtcatcacttttgtgcattcctttatatatannnnnnnntatatatatattgatattgataattttgacatttaataagttaaattgaaaaatatggtatttgtaaaagaaatatgtgacccacagcactacatgagccaaacaacctttaaattggtcagaaaattatggttgagtgttgtctcataaggccaaaaagacaacccccaatgataatattaatatacatggtgttgacttgcttacattatatggaatttcttgccctaattgaggtagatttagtttttaataagttcaatataaaatatgtccgactactatagtatatcccatcacatttttttgtgaaccatagctagtaagctttcaatttattgtgtcatatatcgggattggtgtgtaattatatatctaaatactatcttaaaaacttgtgtgttaatattgaatagatgcagaaactttggtgcgttctgtacccctctctgccgtcaaaaagtaatggacaacgacgaggaattcaaaaaagagttgcagcattttcgtgaaactgtcttgaaagacaacaagaactggggtggtatgtaatatcaatccagtaagtttcttatcttgctcttgggaataacagtgaaagtgaatggcactatcagattttttgtcttgttcatacatccatccaaggaggcctataaatagagctccatctttttttttgttcatgtcatcacaaccatcacaagctattctaaaagtgaagagtgaggctcttgagaaaaaaatagtaaaaatacctcttagtaagtgaaatcttacagagtgagaaaaagcgagttcttacaaaattgtgagaaatattttgtagagagatggtgagattacaataccagtgagtatgagagttttgagtgtattcctccagtatttgccaaaacttgagagtgtaattttatgtacccattattattgttatagtagaaagtttaccatggttttgtttagccacgagataatttcatagcgtgcatttggtgctttgattattattcgtaaagtactatttgcattggaagaaattcaaaaattttgaatatgccctgtgattgcagctgtgactgatcttttacatcagaaagaaatttcagagttctgattgtattttcacacaaatattggtcttgatgggaaattgagaaactgtccattattcccaacaaatctcactctttggttgacgcggacttatattatgtagattggagaaaaccaatggcagctatggccaatattgtgttgttgcaatgaggaaccaaattttacatgaacttttcaattataaactatggacttatattgctaaaggacgtacttatacaaatatgagcgcttcaatagctacatggaagtgggtgtactaccgtccgacgatcttggttatatcattttctatatccatctttcatacatttctagtcctaaattatagagaaatgaatgaaagataaaggaagtaaagtcacttcttaaattcagtgtaaatttgtaactaatgagaaaaaatattgcaatagtggaacatacctcttctagagtttggcatctttattaggactttgtattactttatcaagtttttacgatactcaaaactaagcaaaatgatccctttattgctatttgatacattaatcttattgtataggtttggggcgtttttatgcagtcgtaatgtaatcatagcattaaaacccaatcaatcatctgtgtcaacatctgcgtttttcatgaaaacccaagtagcgagctgcaagtccttctcatttttctctttcgtgtctcatttcatttgaagtcttaaataataaaataggattattcatacacatattatagtgaaagaaaaaaaaaatgaaaggtagttgcaatacatacattgtaatgtaattcaatgtagaaatgaaaagcatgcaattcattcttatcctatccttaattggcttctcttctcacaatgaaatttcacaagaaaaaccttacatgtgaaatcctcctgtccatcttctaaaccttttaatatcactgccttgagaaactgccattccaattcctattcttcctccatttccaacacctctataatacattctccactcatcttcttccccatccatctgaaccagacaaggcgatccaacttctttgctgtcccacccattagcaccggaagcctctaaaaccccatcatcttgaagccttgtccaatccttaagtccatctttagacaccgctaacccaatgctcttacctccattatcagaaactccttcatatgccatcaaataatccccatctttcttgttcctgacaacacaggcatttaaacctcccagctcatcaaaagcaccacttttccctccctcaattatctttcccagcttaacccacttaatcccatctcttgatctagcaatcccaatacaaaatttcccacgtcttacatcaaatgagtggtaatacattctgagatcaccacttccgtggaaaacaacctgtggtgaagcaataaataaagaatcccattcattctcagaaccaacatcaaaaagagctccactatggtgttcaccttcaattctagcccaatacctaccatcttggctaatagccaaaccgggcagagacttataaatcttcccagatctaccactttccttaaaaaccttttctgggttttcaataataagatcaaatgagttaccggcaatatcaacttcttcagaactgagcccagtgtagtataaccaataaacagcactcgatgctctgacctttgtactggacattatcactacctcagagggtctaatgctggaagtatcaaatgcccaccaatctttgctacaactcattactgttcctacatctacgctggtctggaccgatcccacacctcgctcccaatggacaccattgctcgaagtagctaaaccaattgaatcgaaacctgggtttgaattggacctgccgtagtaccacatgtaccacctttcttcttcatcactcagaaaccttttcacaaccggagacccaacgtcttcactgtcccaagaattcccagctcccaaatcgaacaccaagcccccagaggaagacgatgaagatggggaaataagacaaggttcgtcacttgaattgagctttgtgtcctcatgcgattctaactttgtgtcaagctcagaggtggagttttggtcctcagtattgatgttagactttgtggagcagcgagtaagagagagagaattgtttttggaatttgagaaaaaagagagtgcattttttgatttggtaacttcgtatgaatgccttgataaaattaaggtagttgggttggctgtcctttgagtggtggaagacggaaggaagttaacggctttcattgatgaagttgctatccaagctgcatccatggctgtggtggaggatgggatttgagttttgggcttgtgcaaaggagataaaattttgacacgtagcaattagtgggatttttattaagtattttgttgagtgataattaagttatatatagtgtttgaataaattataagacaagattatggtagaacttagcataagttttttattgatagggaagtttttttgaccattaattttagatcatgcggtcaatatgatataagatatatactcttacgatagaactgtttatatacaattaaaactttattcatattataataatatttaagaatatataacaaaaaatttgatcaattcgagttttatagatagtgacattaaaaaaagactcaaaagtaattttaatcttttatttttttggaaattcaaaagagtttattaagctcaacaacaacacttacaagaagttgtctagcatagatagaattgttcttaaaaataaaagagttgtaaatttttcttttaaagagaaattccttgtggatataattgtcttgaatatattaatagaaaatatctttctacataaaaaaataataataataaaatatttcaaataaaaatattactacataattttataaaatattaaagcaaaataatttaaaagataattatggaagaacagtgtatgtaaataaattagtgataaaagtatttaagtaatcaatataaaattaatatatgactcccatatatataattataactctcaaataataatcttatgctaattaatatattatgtatgttattatcaacatctcatgtgtaacatacagataatatattaattattatacagctatatatgttacatatctcacacatatataacatacatatctttatatattaaaagtgcctatctaacaacatttcttggtttaacagaata

SEQ ID NO: 42429 - DNA, 11692 bp, Cannabis sativa
  modified_base (31)..(31): a, c, t, g, unknown or other
  modified_base (88)..(101): a, c, t, g, unknown or other
  modified_base (3594)..(3594): a, c, t, g, unknown or other
  modified_base (3846)..(3848): a, c, t, g, unknown or other
ctgcagccactgtaaggtttctcataccttntatgtgtttattttcatcgtttaagaaattcatattaggatgttaaaaacatacttnnnnnnnnnnnnnnatcctggtaaaatatattccatcagaggttgtttaccttcctcaacaatactaactctccctctcatcacatcatagcgatgtgagggtcacaagggggtgccctacgacacgtctctttggtccttgccatggcaagtttagagtgcttggcaatagtaactgcaatcttcgcggtaggaagatctccaactcatagattagcccgatctgtgggcaacgtatcgggcacactaccctggacaatgtaagtctacaaactagggaggaactgcctccacccctagtttagctcccagatgaattggtcgtaaaattcactgcatatttgctctaaattgcggtgatactggacttcaagttttggggaaccactgctcacctcgtgatcactcgaggacctatttaaagaaccaactaaaggagttcgacgctggtcttcaaagagaagactgagcaaatcattgtctaattgattttcacctccctaaaagtcacgctagttcatctgtatacaaaagacaaggggaggtgagcaacttgacaaagtgaaaagacttagatgaaataatggtcaaccaaacctaacgatactagccagatagttctattgtacaaagcaaaaatcaacaaagtacgagctctaagtgcaagaacttggatggacttcgagtctttagttgttaagtgactaagatagactcaccctaagaaaggccatatagagttcctaagataatcaagtattagaaaagggttaaacaggcttgtaaggccataataaagtccttgttagagtcaaaagagggccaaaaattggccattaccttaggaccgaagccatgtgccagcgaaggtcctctaggcattagcataagccagatagggtccctgatcaaaacaagaatcgaacagggttccaagttgaagcccaaaattcgccaggtccctaaaatgccaccttgtgccggccagggtcacaaacagaccctataggccaacctatgtgttctacggatcgaaaaatatatttttcgaagactcgaacctattcttcgtgactcaaagagtcaagaatcaaaacgaggctcaaaatcgaatatttttcattaggaaatcatgcattatgcatcctaaagctattatgcagatcataatacgaaaaaagattacattctaacgtgagaatcaagaatgcaaaaagcttccaaaagcttgaactcaacaatggcagaatcaagaaaacaaatagataatgggatttgaaagcttacccactaataaagtccactaaagatgcttgtgaaaagtttagatcgtcaaaacaaagcaaaaatcccaagagatggagaccttggggctcaagttgtaagagaagatgaggagtcttcttttccttttttcttgaaggtaatatgaggagagaaagagagagtaagatgggagtggaagtgaatagctatgcaaatgaaccttatataggttctgatgagcatttccccttagaaacttagcgggtggttacactgcctacaaaatggccatgcagaatatcaatagttccctagtgggaacgtgtgcaggaaaaaaatcataatgattggcaaaaagccaatttatcatgaaggggtcatatcaaaggccaagtacctagccgacaataagttgcccgagtaaggctttaacagtcagagcagaagttggaaagtccctatctgtacaaacgtccacacagggacttgagagggcaaatgttatcccaattttcgcccacatgacatggcatgtcgacatagacaagattgatgccacgtggagtatagcttgccaataaatgaaccaagtcactatgcacaacttatcaattgacgaatggttagaatgctcaagcagaacgaagatacaataaaatggccaaccaggaggatctggcgaaccacccttggccgaccaaggaagtgtatgtgtcggccagccctagacaaagggcaggtcggccagcctctataatgacagtcagaaagaagctcgaacgattggtgtttctacagccttcaccttggacggaccatgattcattctcaattgcgaagacacttcaaaatcccacaaaaataggggttcaactccaaatatttacctattccttgggagcaattaattggttgtttttttgtatatttaaatatgtgaaaaaggggtaatatctccccattttaagggatattagcttattttgaattagatcttttgtaagctctatcctatataaagagcattaggccagatcaaaaacctaagtcctaagttcttatcttgaaaccctaggtttcactctcacacgccacttacataaacaagacactatctgtttctcatctcattcattcgagatctgtcttacattgttctcactattgtaacattcataaagagccacactagaaatcacaaggtaaaagcctataatctgtgtggtattatctctcgaatcaatacaactaaaatgagaataggtcattacccgctagtcaagggggtcgaacctctataaatcgttgtgtccattattattttcctacattgattacacatggtgattgtcgatataaataaggctccgctgtcagttgaccaaatctgaagtcaacatttaaagttcaaaaaaaaaatgtagctacattgcaattcaaatttactcattacgcatatttaaaaaaatatatttatatcatcatttattctatccaatctgcatattttttttaaaaaaaaatctttttattattgtttttttaaaataataaaataaaacaagtgtttatgtttattaaaaaattactattgtgatgttacttactgcaattaccaaaaaaatatcataaaaaatatatatatgtatatatagagatgatattttttttgaagaaattaaaagtactataaaactaaagtatcacgtttatgtaactagagctcgcttatggtttggttttaattttcccatttttctctaaaatttacttctaatatgtaaacggagggattgaaatctgagtttgatttgagttttagaatatctaatgtcgtatttctatgacttttggcgttggtattcatttgatttttcttttttttttttttggtctatttagcgcaaactaacgctatgtcatgcgctattaatacttttagcgttgattctatactaatactaaaataaaatttgattatgagaaatgaaaacataaaaaaaaaaataaaaaatgctaattaagatttttgccccctgaactttgacataaaccaaattaatacttttagcgttgattctatactaatactaaaataaaatctgattatgagaaatgaaaacataaaaataaaaataaaaaatgctaattaggatttttgcccctgaactttgacatataccaaattatgctctctgaacttttaaggtcgttaaaaatacccctgaactattgagattnttggatttaaggattttttttttaattttagtaaaaaagtctaacatgaataaaagttcatggggcataatttactacatgtgaaagttcgagggatatgatttggtagatatcaaagtctgaggagcatgttttagtacataaacaattactgaaataataaaattgaatgaaattagacaaaagcccttaaatccaacaatcttaataattcaggggtatttctaacaaccttaaaagttcagggggcannntttggtacatgtcaaagttcatgaggtaaaaatcctaattagccaataaaaaaagaaatagaataaaatttaaaataaataaaaatttgataaaaattattaaattttattataataaattaagtcttttcttccgttttaagatggaataattattttaccaaatagtaaaaaggccattaattaaaataacatttcaatacttaataaattattaaattttttctatcatgtattgaaatagtcttttcttctgtttcaaaatggaataattattctaccaaaatagtaaaaaagtcattacattaaaataacatttcaatattttaatatgcaaccaaacaaaagaatagaataaaaattattttatttccatttcattctattttattacccccaaccaaacgccacctaaaaggatacctttttgcgtcgccaaaattagctatagctttagtttacgaagctaaaaaacatttctcaagtggcccctaatcaaaataaagaagagaagaaaacttaaccgtagccccgggtaagaaaagatgaataccttacatcttaaagatctaattagaaaaaaaaaatggtttcaagttatgaagttctctctaggttcctttggaaacagtagtatagcaattagcaggtataggtgtagaatggatctcccttgtaaaaagctttagtccggctgagaggagaataaagttgaattcaacaatgttcagcaccaagaaaataccagggctgtctgaatttctattgttcatctattccagctgttgttgcaggcatccctgatgtaatggaagtggctgccgtgcctgtttttctgccaagacctgacgatacttttaccgttgctggtcttagaagacgatccccaagcagaaaaccacgtcgaaattcttgaattattattccttccttgaactgttcagattcttcacgtgcaatggcttcatgcaactgtaacagaaacaaaaggaggtcaaaaaatgtacatgggggaccgattatctaaaagttgcatctaaatttatgagctaaaatttctaacaattcaaagtcatgtttagacaaaacccttcacaaagtacgtcagaagttggcagaaaggcctcttcattactctctgtttgttgataatcttttggttcaagaatatcacttcaaagatgtaacagacaattatctgaaatctaatgtttaaatataaacgcattgttcatattgcgatacatgtatgagtatgcaattatagtcaaacaaacttaggttgaggggaatataataaattatgtaggcaagacagaacagtcatccaagttagcacacaaaatcagttacaaaaatagtatgatcgtatcaagaaattagttaactgttacctatgaaaaattattattttttataagtataacatgaaaacatgtacaatacactgacaggcatcttacaacattcatcaaagagataggattgccatgttgctgcaagccaatcccatcgtcaacagattctcataaatgcatttatctctattccaattcaaatcgtgccccaaagtactccactccatgaaaatccacgacatcagaaaatgaacttagaatagcaaaaatagaaagtagatgacactttgagaacaccacaaaattgcatggatataacagatttaggtctgatataatttttacattaaatactcaccgctggatcaaaaggcttccctactgttggaataacagttacatgcaagctcctcattatttccacaaattgtttgtaaataccctgataactagcatcaatctttttctccttctctgtttcaggtttaatttgttgtttggctctctcaaaattgtccaccatggccaagagactctcaattacctctcctcgagcatcagtgcttattgtatgtctgtctttctcagttcgttttctaaaattatcaaaatctgcttgtaaacgaataaatttttccttcccagactttatctcagctgtcaaagttgaaacttgctgaaccaatttgtccatgttattcccaatcatatctattctagcctcgatttcagatacagcttctacatctcctatgagtatagcttccttgtaaactttaattagggatatcaaactgaatttttgatggtctgcttcatctcctacagcctgattactctctgtctggattacaaagaacgaacaaataataataaataacatagtaaaataaacatataccaacactcaatgaaaacatctgggtgtttccactgcattaaaacataactacgggagccctacagaaagcactttctgactatcggtgagagggtactatgtcaaatcattatctagaaaatctaataatcaataacagaaatggataagtcacttcagggacatcccataaattggaacagtacagaaaagactaacatagcccctgagcaaggatgacatgcacaaaataagaacaaaaatggatatcttgaattggcttggcccaggtgtgtttcatatgcacgtgaaatttaatggtattattcgttgcgattatgtagattacccagattgggaagtgcctaaactgtttcattttgtcactaaatttcacagccaccggttccagcattattcctcctgatttcttaaatcatctgaacttggatcaattacatctgtccaggcagtcaatgttaaactttatctcaactgaaatatttttctaacctgtactttattaatctcttttatatttcttaacctgtggggatcaagaattaggggccctactaatcctgttggaactgtgcactgtgccctcagaggattccttaaataagttggattaagtcactatattatatatacgaggcatagttccaaatattcacaaataaataacataagcatctcaacagatcctaatccagtaaattttatagcattgaagtagctcttgcgcaaacatcaatactccaatgtttaatctttgaacaagaagtcatttcatcaagtatttcaatatattttaagcccattcacaagttctcagaaatctttcctacggatacccactttacaccttcgggcatcagcatttgttgtcctaaacagatacacgtactattttttaaagtgcacgcaaagttttattttatatccaaattaacgtactcccaacacttctctaaacaaagcaaattcatagctagaataagagtataagacatgatcatccgcaattaaaaaatcaaattaacgtatagaatatacgtacagaggaagcatggtcccgcgcagcaagaagaggttggaattgtgagtgcgtggtcttgtgggctgcagaagagccaaggatgcaagatggaattggattgcgtaggtgaagggaagaagcccgaaaacagagagtggtatgagtaaggggtaaggctttgaaaggcttgtggtttaaggaggtcaaagaggaagaagaaagaggagccaatagagagtggttcgaaagagaaatggccgccattaaaatggattcacaaaaatgcaaaacttgcccacttcctgcaaaatgatgcgtatagttgcacagaatcagacttacaatatcacattttgaatcaaaataaaaaaaaaaaaaaactacaaaacatttgtggtctagtaagaaatttccattttccacaaccaacattaattaaagagaaaaacagccgaaatttacataaagtcatctacgccatacattgcatgagtgttaattaactgtattcaattcccaatgtccaggcaaaccagccaattcgtccaggaactaataagccgtgtaagtacctagcaaacaaagtctttctttccaaaccctagaatatgatatgaatcgtttatgtcgttgccgcacacatgaaaatataaaagaatacatgtacgtatatatatagataaacaatacattataaatactcatcagcaaaatagaatcaattttccccttacagaaatgagtgttcaataaaatcaactggagggaaaaaaaaaacccaaaaaccatcaatctaaaataccaattacttatatccatatgaacccaaacatgcaaaacaaaaatccatggcggaaaccggtacttgagctccgattacaaaacatacatataaaaccaatcaaaaccctaaaccagtaaaaaacatagcaggcaagaagatagacaattttacctatgagagaagatggaaaatcgaagatggccgacgaaataagctaaactgaaactttacttgtggagtatgagaaacttgtgaagagaaactagttaggagaagggaatgaaagagagaaaggaggcgaccaagtttgttggagaagaagataaggtaagaagggagaaactctatgctgccaaattttggagcccaaccgagcagcaagcaaccaaccaaccacaacaactgttacaaattgttggtagaaaagcttataataagaacaagaaagtaataatcccaataaaacaatgtaaatattgatttcaaatttaaaaaaacaaatatatttattttttcttacattttccctaccttagagcactcccaacagcttctttattccattctttaaaatacatcaccaaaactccactttttctattttacctcaaatttttaccttacatcatacaacaacttctttatttttactctaactcatttaaatattaattttttaatatatttttattcaatttaaaatattttctttaaccatcaataataccattacatcttttaatatttacactatctacccatgtacaataccatgtaattatattataactttaattatcaaaattcataagctaaactaaaatataaattaatttaataaagaaatttcaaaattgtcaaagagtacattaagattatatattttcaaaataaaaatataaccatagcataaaggtatacaataaaatataaaattcaagtgcttaagattgactatatatttcccacaaatgttcgataagatccgactggagttgaaaatgaagtcatcgatctcgaatattatggtgtcgttgaacaaaatttaaaaattcattcgtatgctcatgtgacacaggctcttgggttatttcatcattttgttcataaacgaaatcttccactcgaagataagtatgacgctcgtcttctacgatcatattatgcgaaattatgcatgccgtcataatctcctttagcatttgttgatcataatatcgcgcaggtccgcgtacaatagcaaatcgagcttaaagcgctccaaaagctctttctatatcttttctccctgattcttgagctgctgcaaaatgtttctttttgtgaccatgtggagcatgaattgttttgacaaatgtcgaccatgaaggatatataccatcagcaagataatatcccatcgaatagtcatgtccatttattgaataattgacattcggagcacgtccttcagtaagctctctaaaaacagaagaatgttctaagacattaatatcgttatgggatcctggtaatccaaaaaaagcatgccatatccaaagatcgtatgaggctacaacttctagaattattgttggctcgtgaatgtgaccacaatacattcctttccatgcacttggacaatttttccacttccaatgcatgcagtcaatacttcctaacattccaggaaagccacgactttctccaaaagcaagcaatctagcaatatcatttttgtttggtgatcttaagtattcattggagaatatgccaatgacagccttaacgaatttcttcaaacactcggttgatgtattctctgcaatccttaagtattcatcaacaaaatcaccagatactccatatgctaatattctcatcgcagcagttattttggcaagaccagaatgaccaagtgttccagcaacatttcttctttggataaaatatggatcgtatgcttcaacttcagcttgaatgcgcaagaaaagatgacgctccattcgaaatctccttcgaaatatattaggtggatacgtaggtgattccgcaaaataatcttggaaaagacgtttgtggccctcaagagaatttcttcgaatggatatacgacgaggaatattagtacgacgcaatgttgaacttcttccattatccaaatgttgttgttcaatagtaagagctaaaagtaaatcagactcctcgtcagatgaagaagagtcaaataactcgaaaacgggatccatacaaactttaaagaaagaaaaagaaaaattattaggcaacactacaaaagaactaacatatatagagtaaatttaggttttagggaggttaatataatatgaattatgtagaaagaaaaaaaaatattgtgaactaatgtaactagtgcaccaaaacatttctaaagaaaaatgtgagacttgttagagccaaaggaaatagattgaaacttggtctaaaacatctctagcaagataaaataaataaataaaagtgtattgtattaagatattaattttgattgcattaacaaaaaaaaaaatgggctaaaagaatatgacaagctgagcatgaaagaaactattatatcaaaccatgcagtcaattccatccacaccttttagcaaacaaaaattaatatttcaatcaaattagcatccaagtattttatcaaataacttagggaccatatatcataaatatagttatagtagttaattaacctttagttcattttcatatgaagttaatgtaactacaaaaatataacaaatttttctctaacacattcctctctcagtttgtaatatcattattgtttaacagtgcgaatatgctagagaaagaagaaaaaatctcactacttaaaacattttgctgcaatataccaaatagaaaatacactaagcaagattctactatcaatgcaggctccaatttctcttctggtgaggttcttccttacaacagtgccaattgaatgttcacatcaatgaattcatctaaagatacttttacaattttaagaatcggataaaatcatgtctcatgtattcatttaaaatttaaaattagccatatcattgtcaatgataagaatcaagcaataaaatttaaaattttggccttaaatcaagtgtggtatgggcttattgcagccttcctaacccagcaaagaacaaactcacaatgacaaaattatgctaacaactagcatttaaagttctctaatggggtgcataacaacaagcttgatcatacaaatacttaatgaattagtatttgaccataaatttgagtagagcagagtaccttatatgcatatattatacagatatactactataacttgacttatatataggtattacaattgatatttttatgaaacctagccaaattcacgaattgagctttgaacaaaaaaagttctttactaatttgaaaaattccttataaaatcaacttagcataagaatatcaaatgtatctctaaacttgtatgtgttttaaatatttgatgaagatatagatcagttggaatattgttaaatgattatggtgaataaagttgaaattttttgcataaaatcaactaatcaaccaacctttgcctaaccttctatcaaagtacaaattaggataacataattattatatgtatatatatgtgcttaaatgatcacaattaattgacatgaaaagagtagaaattatctagctctctaaattgaaaatgaaactaaaaaacagagaaaattaagaccaaaatttattatgactttggaacaa

SEQ ID NO: 42430 - DNA, 3780 bp, Cannabis sativa
tagtgacatacataactaaaggcaaagagcatgactcggaatatcaaggtgtttcatgggttttaggtttgagttacgatgagttaccaatttatttgaagccttgttttctatacttgtctctgtaccctgaagactcaaagatacgagtaaatgaattatgtcttatgctcgtcgcggaaggtttcatatcatcaaccagaggaagtacaacatattctatggaggatgtggcatatgattggttaagtgagttagttcatagaagcatgattcaagtagaaaattggagtttaagaggaagaatgaaaacatttcgcatacatgatctaatgcgagacttgtgcctgtctagagctgaaaaggagagctttttacaatttattgacatgaggaataaatgggaggagccactacaacctatagcaactgatgtacgaagagtttccatctattccaataatagtcgagttcgtgatcatcttcgttctgcacacaacacaaattgctctcttaggtgtctaattctagatggaggatatacttataacaaaaaagtattcaaacaagtgtttaatcgctttcacatggttagagttttaaagctaagtttttataacgagggaaaagttttcaagttgcctaaagaaattggaaagcttattcacttgaggctgtttagtattagtgggaatgtttatttgaaaaagataccatcttccattggcaatttgagatgcttgcagactttaaagttaccttgcaatgatgttgaaatatcagtgccggatgtcttatggaagttggaacaacttagacatttaaacttctcaatttccttttgtgctgaacggttgagcacattgaggttacctaacattagaaatttacaaacactggtaggtatttcaaccaagtgctttagttgtaatgattttcgacagttaaggaatctcaggaaattaacaatttatgctgatacaaatttggggaaaatttacaacgaccccccaagtgtcacatttgactgtcttaggcatttacgagtacttccttataagggtggcagatgtgatattgttcctataatattatgctaccctcaaatttataagcttaaactatatttgcctatagtcaaattaccaaattatagtcaattctctccaaaccttgtcaagttagagtttctacttagttttcttaaggatgatccaatgcctattctagaaaagctatcgagtttaagagttcttttgttatgtaatgagagttttgttgggaatgagatggtgtgctcaaaagggggtttccctctattggaatctcttcaaattgaaggtctttctgacttggaagactggaaggtggaggaaggggccttgtctagtctttgctttttggggattacaggttgtcctaaattgaggagagttccggatggattaagatacattactacgcttaaggaaatgaagattataagaatgcctagagaattccaagaaagggcggaggaaggaggagaagatttcgacaaagtccaccacgtccagtcccttgtatttctccactgcattctttgaggtgagtactgagtaggtatatgtatccttacaagttcatttgaattgatttaccaattccaatttgatagttattttgtgtttatgttattagctttatagttggaatagcttagtccaaagaggataggcatgagttagcagctaggaggggatcacaagtaagtaattaataaatcatttctctcctgaatgcattgcttttatatctcattttactatccaattcatggtgaattatttagcttcattagtcatgtacatagtctcttatgtacataggctgagttgtcttagtgttttaattctgtacgtccaaatgtaatcttaggtggcctaatagagagtgagcaacctcatttagattagcttgaaattaaaaaaagagactagctcttattataactttgtcatgatttttcagaataaagatcacttgagaaattcattactggtagaatattactattttaagataattctatcattaagctcatgttggttatagtaaaattaccagaaaacagctacacttctctccaaatcttgtggagttaaagttgtctaaaactattctttatgatgatccaatgccaaccttagaaaagctatcaagtttaagagtgcttttcattgctattaattgctttaagggaaatgagatggtgtgctcgaaaagagattttccttgactggaatctattcagagttttgattgatggttctcctggcttagaacaatagaagtgaaggaaaaggccttggccattagcttttgctggagattgtaggaaaattctagaaggattatgtttatgtataggaaattcaaagaaagtcgaacgtgtcccatcacatattttgttcactagttttggactaatccattccattccactttggcactaatttctccacccatgttctctatgttgttactataaataaacgcagatgagctcgagtcagacgacgatgaactagcaggcagcatgggaccccatacccacccgttgacgaacacacgaggtttcttaggagaaactgagaaacatatggacatgacatggcacgagccagaaaggttatcatgagatagtcttatgtgtgtgttctactgtttttagtagatttaattttgggtaaaatgtttttatctgatatgagattgttttgtggagttaatattaacatcactagtgattaacattaatagtgctcgtattgtattatataataaataatgctttggataaaatattgtattgtattaattattacaatcaaaaattttaatacaatgtaagtcttattatttagtacataacaaatggtccgtattagcttgtattatgatatttacaaaagatctggactcggacccgagacctaaacccgggactggacacgtgacctggacccggacctaaaaccagattcaaatccggacccgaacctagacgcgggacccaaacttggagcgaacccgagagctgggacccaagacccgtatccagtcccagaacttgtacccgagacccggaccccgggacccaagactggacatgggactcgaacccgagaccgagacccggacacaactaattttatatggttaaagccaaattgggctcactggaaattgttcataaggtgaccactcttaaaaaattgcattatttcaaggtatcaaattgatacaagagaaaacaagaaagttgggacactccaacttgggattgtctaaaagctgcatttcctcaagacgaaaaccacagcaagattttaatcacgactcgaaataagaatgtagctcttcatgctgatcaaaatggtgttattcatgaacctcattgtctcgacgaggatgaaagttgggagctctttcgaaacaaatcttcatgttttggaaatgatccaacaagtaatacacttcacactcagttttttacattttcttcaataaagaatattatttagttgtagtaatatatatgagtttaatgttttgtgcatatgttatcagactccagagataaagaaagaaaagaagtactagggcgagagatgcttagatactgctcgggtttgccattagccatcatcgtgctgagcgggcttctatctatgaaacacacagttaatgagtgggaggagatgaaaggaaatatagtgacatacataactaaaggca

SEQ ID NO: 42431 - DNA, 7877 bp, Cannabis sativa
  modified_base (51)..(55): a, c, t, g, unknown or other
  modified_base (6828)..(6832): a, c, t, g, unknown or other
ttttgtcatttaacaaaacacatggtccaatttgtaacttttgcaaaacannnnntccaaaatggtatttaccccaaaactaattaaatattttaaaagtaattttaaaaaatatatttctcctctattttttcttcctttttgcctagccccttctcttctcattctttggataaccctcctcctttagatggtagtactatattttgggtaagtcataattttttgataatcatcttagggactgtatataagcctcaacttactccttagtattctttagaattgctaaaaggtgaaggatttagagataaaatgtgtatctcctaataaaatttgaatgtatattgataatgcttatttacagttgagatctacttctaaattttttaaataaaacataaatatgattaatgtttagatacacatgttatattattattactctaaataattataaatgagatgtgatgtcataactttgtgttgatcaaaagaaggtcaaggaggcttgaattgactaagattacacaacttggtgtgaataaatgctatccaatcctatccacaaaaagtagaattggcaactacccatttgaagaggtgattatggtactataaatatcaatagccaaagatatttttctttgtgtatatataagaaccattgcctaagctctaataacacacaaaatatcaacaatgcattcttcacccaatatatttctctcatttttattacttctttccctaattgccattcccattgtgcatggtcaagttcccaaaaatgccacttttcaactcgttaatgaaggagaattcggtccatacatcgtcgaatatgatggaaactatcgtcccttaagcatctcaaactcaccatttcaactttttttctacaacacaactccaagtgcctacactcttgcaatgcggatgggcactcgccgatctacatctagtcgtcgatttgtttgggaggccaatcgagacaatcctgttggcgaaaatgctacactaacatttggagtcgatggaaaccttgtcctagccaatgttgatggtagagtggcttggcaaaccaacacggccaataaaggtgttgttggccttgaattgcttcctaatggtaacatggttttgtatgactcaaatggtcatttcctgtggcaaagttttgattacccaactgatactattttagtgggccaagctttacgggccggggctcaatacaagcttgtaagtcgcttatcaacagcggagaataaagatgggccttatagcatggtattggagcccaaatcacttaaactctattacactagcaagaactctctaaagcctttgctttattatgacttctcatcatttcatggagggtcttttcaagactctccaatgaatttgacgttgcaagctgagccagagtatgataattctgcttatgatatgacgttttcttccataaatggaggttaccaaattggaagacctaactacaacagtacattatcatatttaagacttggaatagatggaaatgtcagactccacactttctatgacaaagtagattggggagcatgggaagcgactttcattctttttaataaaaatcttcgttggtatgagaagagcgagtgcaacttgcctgagcgatgtgggacttttggagtttgcgaagatgatcagtgtgtagcttgtccatcggaaaaaggacttttgggttggaccaagaattgtgcacccgaaaaagtgaagtcttgcaaaccaagtgattttcactactacaaaattgagggtgttgatcatttctcaagcaagtacaccaagggtagtgatgttaaagaaagtgattgtggcaaaaaatgcacttcagattgcaagtgtttgggttacttttatcaccaacaagcttcaaggtgttggattgcttatgatttgatgactttaaccaaagttgacaactccacccatgtgggttacatcaagacacctaacaagtaaaactagtttactagtttgaaacttgaactcaacttagttaagtgtaagtttttagtttgtagtaatgcttatttgggaataaagtgaatccaattcattgaatattttgggcattttgaatttaagattctaatttgaacttttatagtcaaactaataaaaagatgactagaaaacttgtttaaccaaactcaaattttagacaagtggccacaattcagacatgaattgtttgtttcaaaggaaaagatgtaaaaccatgttatttaaggtaatgaattatacaacacttctcatattttttttcccttcttttataatgtattgctcaatatctcaaaacacataaaagtttccccactacatcaaattcacaccccattgcaaaagctttcaaacctagaaaataagaagataatagaaatgaattgctagaagaaactatacaccaactaaaaaaaaaatgaaaagtgaataagaacatcaccgtaaacgaatttaccacactcctttttcgtttacaactaccaaaagcagccaccactactaccaccaccgtcgccattaacacagttaatttttttttttaccagcgacccaaaaaaattgctcgatagatcaagctcaccgggaaaatctactgaaaaacacgttcattcgatcgaactaaacaggtataacatcattcttggacgagtcttcacatctcaagacgattccctcgagattagaaggaaagatacattgcatatattggcatcctgttgtcaacggctcgggtggagggacaatcataagtacattatcgttcctttgtacaactcccatcacgctaaccgtgctaccttctttgatgtacctacaaaaagattaaaactttccccgtaaataatcatcagaaagcaacccaactcgggccatttaaggacatagatttttttacccttctttcaatcgcattgtgcgatcatcactcgaaagatttttctccctcaaccacttggcgaactcgggagacaagtgttcatttgttgggttcacatcaacaacgaaggagtcatcgacgtagggagtcactctcgctccataaccagtcttaaccaaagctctcaagccagactgaaagtctgagatgtagaagtctaccacatgcctctgacaaccaacataggaaagattttgataggctaaggcttgatatttgtcaagaatcaaggaaaccaaacataaatgtctcaaagtatcatcaagatcaaacattttatttttaacatttcctaaatttcgggtgaactctacaatttaacacctgtaccaactataaaacaagttttttgttttatggtatttcgatcggttaagtaattgcaaaattaatatctcatatactcacctctgaggatctaactccccaagtaaaacgacgatgtgttgagttggctggtttcgaaccccatcctcgatactcatacaaactcgttgatgtgtagacacacctaggaatttttcggaaggatgattcaagagggacattaccacaagtaaccacctgcaagtgttacaaaatcacaatgtcataaattcgaaacatacttctgcatatgatcgctctccaccatatactcgagagattttttgactattactatcatttcttcagagtggaacttattctgatgtatttaccaatttccacatgctaaaagcctcttatagaaatcctaaccgaaagagttaagacatattaccccaacaataagcaaaataattacaaaagattcctcccatttagagaatggaataggatttaactacagaaaccgctatgagttcacagctggtagtaactgctacattaaagttccattttttccactaaaatccaacttcgagtttctctcgaatacccccaactagattctctccaccatgagagattttctgactactcaaatgttggctagaagaacattactaaccattgttttgagagtagaaattgctatgatataattgtcaatttccaaatgcataaagtcttaagaaatacacagagaaaaatcaagtctttacctcaaaattaagcaaaagtaattacaattctcccatatagagagaaccttacactactttacttcataagattcattaaggtttttaactaaagaaaccaatttcagttcaacagtttatgtctctaacactaaaaatttcccaagttccaataaaatttcacttcaaaattcaaactttacgagtttccccgaaagcccatattaaactgtcattgttccatcccaatcctacccaactaacaaaataaagacaaggaattgcttactacaaacagcagagcattctactatcgtactagctctatcggtcccctagactaaaaaagtttcgatttagtcctcgaaaagtttaaggcaccaggcacatgcatacatataactaaagtgcttaaaagataggatgaaagaacgtaccccagaaactttcacgagctgaccatttttcgcacttctaagctcagcatcgggataactagaaatgaaattaacaacagatgttcttccccaacacgtattccaagtgaacaacgcaacaacaaaggcgaaaagaatcacaacaacaatgagaagaacagcattatgaaccgctccaaggataaaaccaccagcaatgaaacccatcacgaacaacagtatcacagaccaaagtaccggctttggaaagttcctcctaaaggaaaagtcatcatcttgactcaatgtagtgacagcctgattgtgaacgacagctgaaccaggtactttcatcgatcccatagattctaaattaccagagactctcttaggggcgccagataaattttgaggaccagaatgaatcggtccagatgttaaaagtcctgtagtgggaagattaggaacagggccagagttttggcgagtggctcctcccgattgagggccagatactttcttcataggttccccatgtttgttcaatggtcccgaattagtctttttcattgcagctgaaccagaacccgaagaaacaggacctgaagtataaacactacgccccggtgcattagatgtaataggtcccgaatgtgacacagcacctccaaacgatccagtcctcaaaggaggattgttcatttgtccagatttcctagatttcgaaccatcggggacatttaacatttttcccaactctcctgacttcttaatatcgccaccagtatatggcattgctgttgagctcattgtgggagtcctctcttttggctgctcgggccgacctgatacatacagcccattgctgagctgatgagatgggaatctggaagccatcgtggttctttaaggaacacaaaactacaagataactatgctgcaacgatcctcaaactcctacaacaaaacataaaacatcgatcattgttagaactttcaacccgaaaacaaaaaaccaaaaggagcaaaaaaactaagattcagtggtttgttgtagattctacaactactttagttcaaggtagtaaaagatctatgaaacaatatcaactaagttattttcctcttcttacaaatattagaaaaggtttccactttccaaataaaattaacaagaatctataaaatacttataaaaatcataaagtttcaagctttgaatcaagattttggactattaaactctccccaccttcataaacaaaggaaatatctattgctagtagaatttacacagtccccacttgaagaaacaaagattcatgaaaattgagctattacatgaactaactaaacaaaaaaaagacaaatatataagaacacccattacaattatttgatcaaaaaacttattttaaagaaaaactaggctccccaccatatttgggaactaggaactacagaaattgctatgaagatacccacatagaatagaacctcctcagaccttgtgtgaacacaatccacatgcctcaccaagataccatacttcattacacaaatttaaaacaactttagtttcaaaatcaagagttacttaacttccaaaatgttttgagaaactaccataatcctaaacatgaaagcataaagattcaacctttaacataacataagccacaaaaacctattacatagtttcttattctacttttagtaagcttccaattcagacaaccaaacatttagagaacacaataagagatctgaaaccatttttggatcttaaaaaaaaatgagcaaaaaatggggaaaaaatggtttcaactttcaaagagtcttaggaagattcccaagatccaaaatagagttaagcaacagagttagagtcaaaatttctcagctagaaaaagtcccaactaatttcttctgaaacccaataaagcttcaaactttaaactaaaaacaataaaaaaaaaaccataaagatcaaattttttcccctaaataaaaaaaaaaatacaaacccagataatcatttgtcaaaaaaatcacaatggagtaagatctaagcaaatgtaggcagagatttcaaaagggtctaatctaaagagttcaacaaaccataaaaagggcataactggaaaaatagtgaaatatatatacctgaaccagaagaaaatgaacaatgaagaagaagaagaagatgaagatgaagaagaagaagcaaagtttgtttcaatggatcaaaacacagtggttggaagtgataacagcagtgattgagctggtgagagactgagatcccatctccatagcagtcaccatctctttctctctctctctnnnnntctctctctctctctctccaaatagccgcaacaactggtgggttgtctgatccttcaaaatccaccaaactgaaaaagaaaacaaaacaaaataaatttaatttaatttaatttttacaaaattaatttatttttttattttaattatttgatgaaatttaacaattattaaaaataaaaagagacaaaatttggttacatttttacaaaaaaaaaaaaaaaagaaaaaaaaaattggaacaatgattaagattaagcttgaagattcagtaaataattatttatttttttctttatatatttatgttgaaattttgaataattaataattttttggccaaaaattagaaacaaatcttagttttgttgggttttatttgtggaaaataaaatagattttgttgggagttaaagtaaatactatttttgtaaaaattttatttaagggaattattgtaaatgtttttattgttatttttttttacaaaaaataaaatggtattattttaacatcaaattgacttgaaatatatatagaaagaaaaattgtaagacgtttggtccattactttcgtttactttcaaacaaaaaacataatatttacttcataagattaaataaaaagcaaattttgttagtttaattttgtttgtatgattgtattattgtatatcttctagtaatttaagttattttataaaattttgaaatattcgaaaaaatttaacagactaaaaaataagattaaaacagttaggtatacgtaattttttttattttatatgcccgtaaaatagatggtttaaattttatttttagtgtgttaaatttttttaaaaattttaaaaatttcgtaaaatatcttaaataactataatatagacgatcataaaaaaaattgactaaactttcttttacatgccgaaataaataaaagtgtattagtaaattctttttaaagagtactttgaattttattataatatatataatataaatttattgattttgttttttagtgttaaaaaaatatttatataaata

SEQ ID NO: 42432 - DNA, 7484 bp, Cannabis sativa
aacacgccaacaacaaaagcaatatcaggacatgtgcatacttaagcatacatcaggctacccacaagtgacgcataaggaactactttcatttcaactttctctttatcattttatggactttgaccctttgagaatttgtcacctttcactattagtgcccttccaggtgaacaagcgtgcatattgaatattttcaagatttgatcaatgtaagttttttgagacagccgaagaatacctttagctctatcctagaggatttgtatcctaagtgcatatgaagcctcacaaaggtctttcatatcaaaatgatcagataataattgctttgtcttagataacatatctttattatttttttttaatgaatagctttattgttagaaacaagcaagatatcatcaacatacaatactagaaaaataaagctactcctgctaaccttcatacatatacattgatcaactttgttctccatgaaaccattcgcaatgacaactgcatcaaacttgagatattactgtcttgatgcttgtttaagtctataaatagacttattgagcttgcaaatcatatatttcttgacatgctcctcaaaaacaacaggttgagttatgtagacatcttcatacatatctgcatttaagaaggcagtcttcacatacatttgttcaagtgccaaattaaaataatcaaccatatccataatgattcacaaagaatctttgatatgaaatcaataccttctctctggctatatcctttagcaacaagtctagctttatacctcactatttttccatttgagtcacgtttgatttttgtaaacccattcgcacccaatgggtctgcaaccttttagtaggacaactaaatcctaaactttgttttgcgacatgaaacttgactcaactgtcattgcattcaaccatagcttagattgaggactctttatggcttattaataagtaactagctaagaagtgtctcccacatcaaaatcatgctcttgaaaatagacactgtagtcatcatgaatagcaggtttgcgagctctctctatgcttctcaacacaacttcaccaccctcaatatcaggattttcatcttgtacatgatcttgagattcatcatgagcttctattggaacttgttcaatcacggggtcattagtaggagtagaagcaaaacaacaggttcggggacataaatacattcttctctgaatacaatttctcttgacccttgacttgaaccaaattcatcttcaaaataaacagctctatctaattctatcaccctggtggtgtgagaaggaccatagaacttggaacccctcgatccaatagtataacctacaaagtatacactaatagttttcagatcaagtttcttatattttggattatatggccttacttcagctttgcatccccaaatatgaaaatgatgcaaactcgatttcttacccgaccacaactcgtagggtgtcaataaataattattcttatgacgagcaagaaaatacaatgattgttgtcaataaataattagatttatgtacaaaagattatttaaaaaataaaattcatatattaattttgtgcataatagttcagaaatgatagagtagtaaaatttgagtggaaaaatggaaaaagggtctaaaaggacttatcactcgcccttagaatttttatttttttttggtctagtttacgacatgtcgttttaccaaaaatgatgggaccctaagagacgtgaacgacacgtcgcgcaggcgtgcaggtcatccctgaccttgaaaacgggtgtgcacgtcgacgaactgggtcgacaggacccaaaatcagacccgcctaaatcgatgcgtccagccagcgttttcgtcaaatattttgggattttcttccatttctaaccctctaccaatttccaacatccatttcatccatattttacaaaaaacattacccaaaagcataaactcgaaaatgggtttcctccattgatgaacacctctaaacttggtattctctaatgggaaaaaaaaagacaatccaaaaatcagatataaactcatctcaaacaataaaattaatatttattcatcatgaacacattaatctgaagaaaaaaaaaaatatatacgaaagtttgagattattgtttgggtaaaaaatggttttcatcaaaaaattaagccctaaaatcaaatatactagctctcgatatcaattattatttttatcacagattatgagcacttaaacatacatataatatatataactcatcaatactcataatcatcaatcaagatctatattttatttagagcacccaaaaacaagataaacacatacctctcactggtaatccaatctatccatttgagccatttgataccaagaatctccaatgttgattaacacaattgcacaaaattagagttatcttagagagaaacaaaatgtagagctagtgggaacggagaggagacaccattttaaagacagcaaatttattttgatccccttctatctttcttattaccattaataaaacccttttacacttaaacacgtatatatatctcacatccttctaactttaaggagttatatactaattgggctaaagtgattcattaatggtatactataatttaataggccaataataattataagggtgtgttctcatgtgtttttaacataataaataattattaaccacaccattatgattattaataaatattgcgcatattgttaatgattgtagttataaaattatgtctataattatatcaattcacaataataatttcaacacagcacacaacattcatttattcgggtttacaacatcactaggatacatgagttgaaaaaaataagtgaatatgaatgatattattgcgtcattcatgtgtgacagtgtgactaactaaagtaattgcaatacaaatatagaatgaggtgaagaaaaaaatggtagaaaaatattacagcaaacgccggtcaggcatatactaaaaatgctaaaaatgtacacattatctaaaaatataatattttattttatctctctttcacattatttttggcactcttacttctaaaaatattccaatgtataactctttaaaaatgttataattacgatctcacacactattattttatatatatatcttaatttttagctacaataacttttttaacttcaattttttattaaaaaataataaatagcatcaatgctataacatagcatccttacaaatttctagaatgacattcttttctctctaatggtatagcatctcaatattttaccacataatattttaaagttttaccattggagatgttgttaaatcctctggaatagattatttatcgaagtcggacgagatgaaacttctacaagcatatactctactgcctcatataaattctagattacaagcatagaattagactaatatactggtaaatttttattcccaacagcattgggtgaatgcagcagttgcaaatatcattaaataaaaatgttgcaaccacaaaaaaatctcaagattaatttcccagaatgccatgatatatacatttgatgtcacactcaaatccatgaatgtaacatcccacaataaaaagaaaacgaaaaggaataaaaggagagattgaaatgatggtaatgtagttagaactagaaatgataagaattaatgtagatgcctgacaatcttttgaggggtaaaattagattaccaaaaatggtttaagactgctcctttccatgttgctctgaaacgagatcctaccaaaattaagtgattaacatggtgtggatgctttattgaaagataaacaactattttgtgtgtaacctcatgatctctccatgagaaaatgtaccctgtatctgaaatagtgtgtaaaggagtattggcaagtgtgcctaccagtctaaaatttgagcatcatgttgaatctacatcctctgtaaaatcaggtaacctaataaactgtggcaatataattgtcacaaatcctcgtattcgaattgatgtttgccatgcctaagtgtcgcgtcattctcttctgatgaactttactatgatttttttttccacactttcattactaattgtactaacctataatttcaaaaaaaaaatgtactaacctatagatttatgcaacaaattaagtggtactgataatttcgtcaacactgtctatcagaacatttacaaatcttttctgagaaacaaatcaggagaaagattaacatttaaaatccaaatacaacgtagagaagcgtggataatgaaaatggcaatagtaatgcaaatccagagagctagctaactcgcaaaatataatacaggcaatgagtctgcacaaaatgttgctattagatagtgaaactaatttccaattctatatatatcctaccatcagcaattcagcacccaaactaaaaactttaacaaacaatttcatagaatttctaattacaccgcaaacaagatcttatagaacacttcactgagctttcttttttaaaggataacaagtagctctagatatacagcaatgatgaatatagcaaccagaaggaaatatttcttattcagctcttgactgacccgctcgagatgagaggatgataccaacaatgagaccatatagagcaagggcttcagcaaaaatgagaattagaatcataccaacgaaaagttttggctgttgtgcattagccctacacatcataaaagaagaaaaaggaaagcaaattgtgttaattgcttactttgtgacatgaatgatgcacacatccaaagaaaaagtaaagaaatcatgaattacacccacctacaattttgattaatgaaacattaaaacccaatacatgtgcttaaaacagttcagcttcagatgggcggacgaccattaatatcattcattgtatatcttacaaatgcaaatcgattttctttgccaacaatagtactaataaaatcttaggggccacatatcagcggtccttttaaacaaaatttatattgtattgccataaatatgtttagttgtataacagtaagaacagaagagcaacatattcatttgctaaaagccaaaacattttgtgactacaaagttgcaatagagcaccatataataaatcaacaagtgattcagggaattaactatgattctcacgtaagaatgtcaaaatctcaggataaacaccaaatatgaacttccaggatcatcaatcatttcagttcttgtagttgctcagtgtgtctaaaataaaaaataaataaagaaaacaatgctaatgatgttataaaccttccgtaacatcgaaatcctctttaaaatcgaagactagtccctatatgtatatactcttccatattaggatctaagcttaaagcccacttgcgtattaagtatcgacatcatattcatgtttaaggcatggaattaaattaaagtcaacccattgatataaaccacaaaccaaaaatgtatgatgtctaagctcgaaatttaggaggtagaatgaaggagaagagaatatatatacctaacgccagcatcaccgacaattccaatagccataccagcagagaggccagcaaggccacaagcgagaccagaagagagatgggcatagccatcaaagagataataggatttagccttgggattaataccagtactgataataactgctatgatgagaccgtaaatacccaaaactcccgccataaccactgggacgatcgacttcatgaccagctccggcctcataacccccatcgatgcaactccaacaccactcttggcggttccataggcagctcccatacctaaaatcacaaggcaatattaataagaaacatagatagatccaaacccaaatgaaccctcgatccatatacgagaaggagaaaaaaaaacctcaatcgcgcagaattcgataggtatgaaattaaaacaagtaacaaagcaaaacagaggtgatatgaagttgaattacaggagaaaacgagggcagcggcggcgccgaggaagccaaagaagggagctgtttcatcaccgctgaaggtggaggacattttcgttgagaagatatgctttttcttgtcagacttgatctcagtctcagccgatactccaaatttttgtgttgtgctttaattaacgtaccaatattaagagtaatcctattattattaggatatttaataataattattattatcaaattaagatataggagactcacattgttttttttatgagaaattttaaaattaaggtacccgtgccaagtaccctcttacgtgttaatattgcaattggtctaattaagtatcagatctcatgtaatttaatataatagttttaagaagtatcgatagacaatcgcaaagcgatacgtcttaagagtattaggcactactagtgcctaatagtaattttcttttattattctaaataatagtagaaaagagatacacaaaaattatgaataaagctatagagcatctccaatgaacttgcttatgtggtttaatttttaatgaagtattgctcaatataaataatgatcatatgatatatattttaaaaaaatttttattagaaaaaaattattttttacctaaaaaatcatcaattcaatgtgatgtgagaagattttaaattttatgtgaatatgagaatatatataaaaaaaagggtatatattattttaagagatgtgtatattttatcaattataaatgttgctagaaataagagggatgagaattccactaaatgatggaattataattcctattgaagggtataccacagttatacccaagattaaagattatcaaaatagatcggtgagtcacttctaatatcgtcataaaattttgagagtataaattcaagtaattgatggtgaaattttatttatgttttaatttttatatatttaaggtaaaattctattaaatttaatttttttataaatttaaaatgctaattaaatatgttaaatactaattaaataattattgtacacacatatgtatgttaaaatttcacacacttcaaatttacaaagaaaaatatgcataagaaaattttgctaaaaaaaaaaaaaaaagaaaattaagtgtaaaaaatcaaaataactataaattataatactaaattttattttttcttgtttttagttcccctacctaacttaatgagattattcgttaaattgcactaccgtttttaaaaataaacaaataaaaatatggagaattacttcatatactgtttttttaattttttttttaaacttacagtttgagtttctaaagtgattgcaataggagttcctatactattttttgttgcaatttaagttgcaacaccaattgcaataggggtttctatgta

SEQ ID NO: 42433 - DNA, 8551 bp, Cannabis sativa
tcatcaagcaagtcattgataatatcaaggtgtggaaattcatctgctgctgacaaaccttgcggctgtcgtccagacgtgcgaccagaaaagtcagacagatgatcacgagagctgctagttagagaattattgtacaaaccaaggttttgaacgtcattaagaagcatagagtgatcataattcatgcttttttcggcttccctttgagaactctccaaccactgtggtccgttatgtaatccttcccttcccaccatggcaaaaggatagcatgatttgatggtgctctggtccatcctttcagagctctgtggtaaatacattggagaagataccaaagtaggaggctgtgagtatgcagaagactggttccctcctgaacttggagagctagcattactaaaaccagctgagctcgaaggaacatggttacccataatggcatttctatatgactgaggaatataactgtgtgttgctggagaatgttcaggacccaaccggccagctgcactcattgaacgggctagtagaggtgatgatgtttgtaccatggaaacagcaggggcagttggcctttgaccaggaattaaaggagcactggagggccttgacatcacaggcagctgttgcgccacggctttttcagtcactttttgagctgcagccttctgagtctcgggtttagccgtaagagtcacttgagatgcagtcaaaggtgatgatcctctatctatcattggttgaggaccatttaatggtactttcctaacttgaacagaatccacacttgcactagtctgacactcaggcctaaatttaacagttgagggtggacttttaggcgggcttccaggggtggttgttggagctgttctcttctctttgaaggatccttctatttcaacctggtctttgacactcttcttttgcagtgaaacaaattcttcttcctattacagaagtaataaccgtcacatcaatacggaacaaaatattgatcaaacaagattcagattataacaaaaatgggcatgcacaaagtataacaaggactatcttctgtccatatagtagattcacatgacatcattaattatgtatggtttaaaattatagtatgatattacataaagaaagagaataaatcttgagcttgttatgtttgtgagcataaaataatgaaaaggtttgatgaggcagcaaaacaacggtttaaaataaggctagaacatagaataacacaggtaatctaccaagagaggtaatggacctgcgtggcatcattgctatgtatggtgaaacacaaagtaacgactttaaataaatttcaaatcaaacgcataaagagatcaaagaattcagcatccaatcataccagttaagatttgcaaggttgatgataacaaagaaaaaagtcgggcaacaaaagaagcaggtgagattttcaaagataaaatactaaatcactgcaccaaaaaattgaaaaaaatacacaagaagaaagactgtaagggaacaaaatcaacacaaactaatgctcaaaccttcctcactgcatgccgctcaaggcatttagcacgatcttgcaaggtaagaaccacctcagtctctgagtcaccattcttcccactaccagaaacctcatttgtgtcccttgcatctgttgtgggaccagatacttgaccatccacctcatttgtccaactattcccatcagatgctattttccctcggtttttacctctgcaagtttgaaatgccatatcactaatgtaccaaacagtcatcccgagagccaaaaataaatgcaaggaaaaacttctacctgctagatgatttttggtttttaaaactagtaaacgagtttcccatgtaagggctattcattacaacagatgggacggaatctgtagaacaggttgaggaactgtcatccattaaagattggctcttcttatcagatattccattttgtacagttagcatgcaactgctactggcttcaatggagggctgaacctctgatgtgtctgtatcccaattgatcggactagcatctctatcttctgaatccggctggacttcagtaccaccatctactgaatcagatatgtcagatacatcttccagtgtatccaacttttcaagtgcaggttgtgcctcctcactcggtgagtttttgcattcatcactaggattatcttgttggtattgaacctgtatggcaacaccaggcctttcctcccgcactttatccttccctttccgattgttgcgtttctgtttaccctgtacaaaaagcagcaagaggaatcagtaaaatatcaaagggcaaggaaatatattggttagcaagaaagcattcagtgcatgtgtaacctaaggaattcatgagaggctaactctgccctctaaacaaataagcgctaaacaaggtgccataactgatttgcaagagacaaaaaacaaataactcaaatctgcacctacaggcaggctgacttcaacaattcaaaaattactgaactacttgcacaaatttcaatcgaaggttaaaacttaaaactatatgttttcataacttttatcctgatctaccttgatctgtaaacatcacagaaaaataataataaataaaaaagaagacgaagaagaagaaaaagatgtgtgagggagaagtaaaacctgttttttcttagattttttctccttttcactgcgctttgctttctgctcactttcagcctgccatgcagcttcttcttcacggataagctcctcctgcctcttgagtgcaacagcttcctggtaggcaacttcaattttgttgctgcatgaataaaaaaacagttggcttctctaaccgaaaaccagtagcattatacaactactgttaattaaatatcacttataaataatgaagtactacaaactggtagattttaatctctttagcaaaaactcatttgtcaaagatgatacctaaagatatgagcaagaacaaatatctccacagtcctacgaccgagttctgtaagacgcctttcatctcgctcaatagaatctttgttgaagtcctcccctgagttcccatcctgatataacaaaatgattggtaaacattagtgatcaaataaacacaggataccatgtgttgcttgtaaatgatgttaggttcctttaaatgtgaaccttacaccccaaaccaagattatccttgtgaaacaaattacacaaaattgttgatcaaaaatcagtgatcaccctgcaactgctgatttgtagagctagtaatgtttaaaaataggttaatgtggctaacagataaaacaagtttgtagcatcattaaactcatgataaatataagctgcacgatgcacaacatacataacagaattaagcaatcccaactaccaaaacaaaaagatctgacaaaataccaaaacaaaaaggtttgacaaaataaaaataactattacattgtcaagtactaacaaaaccaaccttggtccgattttgaggacccttttcatctttaggaggcaatggttccatggcagctctctcaagtaacgataaaacatcatccaccaaaacaaatgtatctttctcaatacggacaataggtgctggcatttcttcagcttcaaacaatttcaccctaccctttttactcttagtctggccttcaagagccttcagtccactatataatgagtccattaccaatgttgacgtgacttctttctcaataaaaaattgcttaacaacaactttcagtattgaatctgtcttctcccgagacatgcgacgcctagcaatttggtcaatgccagaccagaaaacagaaaagctgcaacatcattgcaaatagactgtaaattaaataaaaacctaccagtgtgaaccaaatataaaataacatacgtatgtatttccatcaacaaaataaaaatcctaaatgttgatatttaaggtgataaaaaccaaccatcagtgttttagatgcagaaacgtattcagtacaaaagtaggtaaaaagagcaaagaaacataccttgaccaccttgctttatcttcaattaactttcctagcttggttcttttctcctccacaaaacggcggcaaatttgctctacatttgtgagatatactctaacaagttctctcctatattgacaatcaaggcaacggaatggccggtctgctctctctctacaaaaccaaaatcaatagggaatactaaaattaccagtgtaggttacaaaaaatctgcttaacaaaatgcaaaatggaagtttcataaggtcgtaataacaaacagaaacttcaatatgaatttgaatatgcaatgtaataaagataagagcttatgaaataacagtaatagaacacctgatgacttgaacttgagctttaattataagtgtgtcagagtcaagaaaaccatccattacttttgatagctccataaattttttccatccccaatcatgttctttcttccagaatcgatgtaatgtatctgcataatttccatcctgtcaatcttcttagtacaatatgttgaaaacactgcaagcaacttagtgatcaatcaaccaaccagaatattttgattttttggtgtctttgttcaccacagctatagtaaactgtgcaaaatgactccaccctgttttacatcaaaagtttttacagtcacataactgcttcgacaaaattccatcattgaatagttagcaattgaacttcttctaaaatcaaacctggaagaagtttgtcatgattagccacgcaaagaaacaaagagagatgattgcaaacatcacagccttggggatagatcaagatgtacctgcagtccaacataaatgcttaggtcacaataacaagcatgacaatgtttctacttgacttaggtttgtgtttgttcatcgtgaaaaagatagcatacaacaaaactagtcaccaattatttgttgtccaaataaagatgagaatttttgcacttttaacattttatttttattttttgccagaattccattataacatcttacaattacttttttaatgcatgaaaaaaaaaacaaaaaagtaatatgagtgaattcatctagaatcctaaataagtacaaatattgctctacgaaaatatacaaaaacttggaggaaagaaagacaaaaaaagaggcatcagatacgcttcaataagatacacttcaataagatatcaattacatgtaaaacatttcatacacgtgctacaagtgcctcctactttccatgaaatatcattacattgacttacatataagaggctaatatttacatgtaatatagattaaccacgaataatccatgacaagattacaaattatagccccataccatttatagccgccaacttcaaatgcattactacgaagctcccttttgttaatctgagaaaatttctctatcttccacgtattttttccatacaactcagacggcttaggccctataaaaaagtcaactaatgtgtaagtaattggccttctaatacagcaataaatataaaaaatagagaagtaaaagacgaagtcacaaaatcaccaatactaacatggtataaaaagcattgagaaaatatttaaaaacaaatactacacactgtgatgacatgatctatagttggttcaaatgattaatgagaaagcataagtgcgtgcaattaaaaatatatagaggttacatcgtcaaaatatttttaacttactatgttgaaaaactggatactcttactttaaaaagagcataaaacagaatggaagtaaaggtgcttctatagataaatcttcagataaaaagtatcaactgactgccgagaagaataaaaagctactaactaaagtagatctatgccttgaaagccatctgaaaatcagatttcaccacatgtaatgaggctatttaaaacctaaaactcagtagggttaatgggagtaaaggtgcttctatagataaatcttcagacaaaaagtatcaactgactgcagagaagaataaaaagctactaactgaagtagatctatgccttgaaagccatctgaaaattagatttcaccatatgtaaatgaggctatttaaaacctaaaactcggtagggttagggtggaagttccatgtttactaatgaaggaaagtggagggattaattgtggattgtgagtactgtggttgtttggaacgaaagattttaggagaaatggaatgactttctaactacattatttttgacttatttacaatctcacctccatattagccattgtctcaagaataaataaacaaatccctccataattggacacagtttatctccttcctttcataccgtacaaaacaaaagaagaggtcttccctacttctccactttctttccctagcttatgcacctctatgtaagtcctatctaatcgccctgctaccaaacatagtctaaggacgcagattgcacatataaagtcttaaccaataacttaaattgtcctttctttcgattcttagttcaaatattgaatataacttcacatacgaaatgcaatttgattctgaatgtaaccacgaaaatataataaagaatgatcttttaagacgaccaaaacattatgaaattattataataatcaaatcagctccattgtaaagcacaaaccaccaacagccaagtgactcaacatccaaaactaacttcaaaatttgcagttaaacagcatgccaataacaaggaatgaaggaatcaccgtccgtgcacatcttatattggacaaatcatcttctattttctcagcactgaccacaatgattaacacacctcaacagtccagagtactactaaaaacgactatattaacgactatattagcatactgtcaaatatttagctgctccacacctcatttcttcacaatttttgatagccccaaaacaggcacttgatagaattaagaagcacacagctactgaatcccccaaaacaaaaccaaataatgcaaatatacaccaaaaaaaataaaatcataccaccatcatcatcatcatctgtatcccaataaggaggtgaagttgatggaatcccattctccacctgctcagaagaccgccattcagccaattctccagattggcaacgctgcccacttgaatttccgtcgatagagcttcccactccagactcctcaccagcagtccccgccatttcccactccaaaacttcttccctagctcttccactcagttcgccaacaaaaggaacttaacctagaaaatgatataattagaccaagttgttaagtttcaatttacaacattacaaaaagaaaggtaacaaaacaaaatttgaacatttttctatttgagtgtacagtaacgagggctgatcatgtgttgggttggttgggttaagggtactttaatgggcctggccaattaaatcggtttggaaaattataacccattcattcatattatatttttatgtacaacacaacccaacccaacacactatgggaaatctgaatgtgatctcaagttcatacctaaacagaaaataaaaaatttaaacataggcagagtaattcaaagcacacattaaaaactaatcattacagtcatccaattaaagtcctaccagctaccaactagatagaaattacaaatttgcacgaaataaaatctagtatttacatagtcatcaattatgaatttcatatgtcttctcctcctttggtatttccttgtcctcaagtttattgcataaaattcaaaacagaaaatgtttcaaattattaaaaataaataagcataaaacaagaagattactataattacaaatataaattgacaataatcaaagaaattttttataagcaccaaaaggataaacaacaacagtcccagagaccaaagagacaccaataaactgaaaagactacaaagttagcataaatcacacacacacacaaaccaaagagtagataaaatacatttcatctaattgctcaatcaagcaaaaaaaaaagtatatatatcatatatcataaatattagattaactaaaagaatatgatagagaactcaaaaccctacactattatgatttgaaagaaaaaaaaattgtggaaagaataataccatttaatcagatcagtggtgatgaatagatcgttaacatcaaggagttcaacatcatcctactgaatcttccaaatcctaaaagatatattcaaaataaaaatatcagatctgcaaatgaatacatcaagacttctgtaaataaatcaataaacccatacagaaatgaaaattaccgttgattccgatattgattttccctgtaaacaatcataagaagaagaaaaaacacaacaacaacaacacgaacaaaaatcagaaaacaaaattaaaataaacaaataaaatggatatatgataagcagccgtatataacatggggtggggtggggtgggttgcggtgggaaggtaggtggggtgg

SEQ ID NO: 42434 - DNA, 7474 bp, Cannabis sativa
tttcttcttcgtactgtttctagggttttacgccaatctatgccatgagtatgaacaacaccacaggttcgtttaggccgtcaaggccaccggagaatcaccgtagaattcgtcctccctcgaccttttcttcgttaccgaacagaacccatcatttaccggtgaatcaacgccattatctacctgtgaggctgagacccactgttacccctcctccaccagtggttcgttataattttgttatcgacatccttcgtgatcaaaccaccaacgtttcggttaccgaagtccaggccctggttgatcagtgtctgccaaagccggataagattaatgtaagccagtctggaatgttcttggcatctctgtcctttcataaatgggttgatgcgctcgaagttgtggtctttttgtggaaatcgcgtcttcgcggggatcaccggctgacgcacaaactcaatactggtcgaatagcgccgaatgatcgacaggaacttgaaaaccggctccgggccgtgttcgcagagagcattggcgagttaattgatggcgaaaaggtgaaacattggagtgaaaagcatgatcatctgtcgaaagagcttcagaaggtgacagggttgcttcgaaagccgaaggctgtaattgtacataaggagctagttgaaaagaaaaaaaggcttgcgcttgagatggaactggtggataagagattgaaacaattcaagtctgctatgagaagtctgctttcttattttgaagggaagggtttgaaggagtatggcgaggatggcatacaagcgcttaggcttgatggggggtttaattggagtcatattcatagcttgatgtcacgagagtgcaggcgcctcgaagatggtttgcccatttacgcctataggcaggaaatactccaccaaattcatacccaacaggtaactatcaattttcaattattttgaatatggtattgctggctttacatgaatttgttgaatattattttatttatttattttttcctaaagatattggttgttactcaattgcactgcgttcttgaccttggttctcttcgtttgtggcctttgtttttcaacttcgttatgaattattttttgggttgaagaatatgttttggttatatccttttcactaccctttatgtttttatcatggtagatttagcctaagcatgcagttttttactctgttcaactttttttttatccgtgtcccattttgtctgacaattatttttacaggcaatggtcttgattggggaaactggttctggaaaaagtacacagctggtgcaatttcttgctgattcaggtattgctgctgatgaggccattgtttgtacacagccccgtaaaattgctgccatgtcgctggcccgtagggttcgggaggaaagtggtggctgttatggagatcgttcaatcacttgttacccatccttttcatctgatcagcagtttaactctaaggtaatcttcaccacggaccactgtctactgcagcactacatgctagataacaacttgtctaagatttcttgcctcatcgttgatgaggctcatgaaaggagtttgaacactgatctacttctggcattggtaaaaagtctactttgtaggaggcgtgatctgagacttgttataatgtctgcaacagttgatgctcaccagctctcagaatacttttttggctgcagaatttttcatgtggtggggagaaattttccagttgatataacatatataccttgtatcacagatgcatatctgtctgatgtagtgagaatggcaacagagatacacaaaacagagaaagaaggggccattcttgcctttttgacttctcagagtgaagtagagctggcatgtgagaagtttgtagctcctgctgcagtggccttaccattacatggaaaactgtcttttgaggagcagtttaatgttttccagaactatcctgggaaaagaaaaattattttctctacaaatcttgctgagacatcactgacaattcccggggtaaagtatgtaattgactgcgggatggtcaaagaaagtaagtttgaacctgggagtggcatgaatgttcttagagtaggcagaatcagtcagagctctgctaatcaacgagctggccgagctggaagaacggagcctggaaagtgttatagactttactcagaatctgaattcaagtcaatgcctccttgtcaggaacctgagattcggagagttcatcttggtgttgctgttttgagaatatttgctttgggcattaagaatgtacaagattttgattttgttgatgcacctagcgctgaagcaattgacatggccataaggaatcttgttcagttaagtgctgttaaacgaagcaatgacaattttgaattaacgaatgagggtcgatgcttagtgaaaatgggaattgaacctcggcttggtaaactgatacttgggtgcttcaataataatttgggtaaagaggggattgtacttgccgccgtgatggcaaattctagtagcatattttgcagagttggttctgatgatgcaaaaatgaagtctgattgcatcaaggtaaaattttgtcatcaggatggtgacctctttacgctactctctgtgtacaaggagtgggaggctgtagcgagagacaagcaaaaccagtggtgttgggagaacagcatcaatgccaagaccatgcgaagatgccacgacactgttgtggaattggaaagctgccttgaacgcgaactagctaaaatcattcctacttattggcgttggagtcctcagaagtcaacagattctgatatgtatttgaaaaaggttatactctcttctctgtcggaaaatgttgctatgtacactggaaatgatcaacttggttatgaagtggccttaactggacaaaatgttcagctgcatccttcatgttcgttgcttgtatatggtcacaagcctcattgggtagttttcaatgagattctgtcaaataattgccaatatttagtctgtgtcacatcctttgattttgatgctttgtccactcttcacccccctcccttgtttgatgcatctaatttaaagaatcggaagttgcaagtgaaggtattgaatggttttgggcggactttgctgaaaaaattttgtgggaagggaaacagtaatatgctttctcttgtagcacgtattcgtgaaatatggatggatgaacgtattggcattaacgtcaatgttgaccaaaatgaaatttcaatttttgctagtgcacaagacatggaaacggttctcaactttgtaaagggtttcctggaatgtgaacagaaatggatgcattatgaatgtctggagaaatgcttgtatcgtggatctggtgtaccatctgtagcattgtttggagccggtgctgagattaagcatttagaacttcaaaaaaggtgtttagatgttgatatatatcattcaaatttgagttccttaaatccaacaaaggagaaggaacttttgatgtttattgaaaagtttacctccagtaccatatgtgcttttcacaagtacgcccattcagggcaggaaggtgatgacaaagaaaagttgggacagataacatttctttcacctgatgcagctctaaaagctactgaactgaatcaatttaaatttgatgactcgttgctcaaggtgattccatcaaagccaacttttggagaccataactattttcctttctctgctgttagagctaaagtatcttggcctcgtagacccagtaaggggtttggaattcttaaatgtgatccacatgatgtcaattctatgatggatgatttttctaatcttgaagttggaggaaagttagtgcatagtggtgctagtacaaaggcggcagattctttatatattaccgggcttgacaaaaatttatctgaaactgaaattcttgctgatttacgccttcatacaagaaggagaatccttgattttttcctcataagaggagaggcagtagaaaatccagcttctgatgtttgtggagaagcactcctaaaacaaattactccatttatgccaaaaaacaacaaccacagtgcttgttgccgggtgcaagtcttcccccccaacccgaaagacacttttatgagagcacttattagctttgatggaagattacatttggaggcagctaaagctttggaacaaataaatggtgaagtattgcctggatgtctcccgtggcaaaagataatatgccagcagttatttcatacttctttatcatgttcagagcgtgtctattcggtaattaagaagcagttagattcattgattcgaaatcgccttagtagtataaaaggtactatttcatggtaaattatatctttttattgcttattatattggtgcaagttcattttattttcacatttgttattttgatagtctgttatggttttattggcatttttcaagtttaagtatctttgattcttgaaataaaaatattgcattgttctgtagttttacctcctctcttcctttgagaacggcttgcattattcttctttaaaagggtctctaactcactttttgtgtagttagattgttgtggtatcaattattatgttggttttcttccatattttaaagaagaaaaacaatgagataaaggcttttctttttggttgctacttgacataagtaaaaataaataatggccacaaactaacatttgagtgaacattgctgtttgctgtaataaataagttattgattgtcatggttttcttgtttgtaggcgtagaatgcagtctagagcaaaatcctaacgggtcgtatcgagtaaagatatctgccaatgctacaaaaactgttgctgaggtgaggaggcttgtggaagagatgctgaaagggaaaatcatagatcacaaggctcttactccaactgttttgcagcttctgttctccagagatggaaaaaatcttatttacactctgcaaagggagacaggaacctacattttctttgataggtatagccttaatgtacgcattttcggttctcacaacaatgttgctgtggcagaggaaaaaatgatcaactcccttgttgctctcagtgatagcaagcaacttcagatcaatcttcgtggaaaagacttacctccaaatttgttgaaagaattggtgaacaactttggaccagatctccatgggcttaaaaaaaaggtacctggggcagattttactctaaatacttttaggcataccttaactattcacggtgacaaagacttgaagccaacagtggaagagataatttataagattgcacaaatgagttgtggttctgttgggagatttgataatgacgtaacttgccccatttgcttgtgtgatattgaggatgcttaccagcttgaaggctgtgggcataaattttgctcgctctgcttggtagaacagtttgattcttctataaagaaccaagatggtttcccaatatgctgtgcacacgagggttgtgggtcacccattctgctgacagatttaaggtctccacttttatcgggcgagaagctggatgaactctttagatcttctttgggtgcatttgttgcatcaagtgggggtgcttacaagttctgcccatctcctgactgccctgcaatctatcaggtggctgatcccagaactgatgggaaaccatttgtctgtggttcttgttatgccgagacatgtactagctgccatatggagtatcatccctacttgtcctgtgagaaataccgggagttcaaagacgacccagattcatccttgaaggagtggcagagcggaaaagacaacgtgaagagctgccccaactgtgggcacatgatcgaaaagtgggaaggctgcaaccatatagagtgcaggtgtggaagacacatttgctggaactgcatggaacatttcaatagcagtgatgactgctataaccatctcaggaatgtccacctggctattatatgaggatgtcagatcactatttttaacagatgaataatttatgtaaattccaagtaattgtgtctatatttaagatgtctttcatataatatctgtgtatatagttgagtccatattaagtgttctgctaatagagtctgtaaattttagtgatttgcgacatttttaatcttcaacccacttgctgcttgtatatattattatagtatccacatagtgctgggcttcctaaacaaaaggtcgttgtgaatcaattatctcgtgttttatgtcacaaagttttcttttcttaggcttttggggatcacaagaaaaattagataataatgcctactctctttgatataatgatgattatgtatggaccactttaactatatcattataatacaatacaatctgctttacagcagccatttttctctgtaatacgcttgctgtctttacaaaaaaaaaaaaaaaagcttccttgagactctgtacattgcctttttttttccttttcaaaacatgtaagtgcatccgattgcagcaatgcccaaacaaaacgcaaaagccaacacccaactgatacaactcccattttgatgaggatcacgattatgatcactgaccttggatttagagcacaaggtagaagcttgaagctcaagcaatctaacccactggcgatgagcaaacagtatcttagcctcatcaaccaaagcctttgaaagaatatccttttccttagccataactttgatcttcttctctgcctctctggccctggtttgggacagccgcaaggccttcaaaagctccaacttgtcgtaattccctgctcctacaacggcgtcgtcatcatcatcatcaaactcgttcttgtctcctttttctggattattattaagacccatattcatgggattgaacagtctgttgtactgtttcattgaggggggcacaatggtcttttcaggtcccaaatagactttcatcggcggaggaagatcacagttctgcataagatccaatccacccatcttctgagaaacgccgagtcccatcattagcatttcatttccatactctactgctttataattcatcagcttttcccccatatatcaaccaaatttctcaacaactctattttaatgctcttcttctatctcaaaagaatagaaaaagtctatttggttgctgtggtggtaggtgggtggtttcttttcttttttaatttttttaataaaaactaaaaacatagaatggcaagagagagagaacagaaaaggaagaatacgtgtggcgcaagaaaaagggaaagttgtaatgagagggtggaatttaaatggctctagtctgtgttgtatagagggatcctttaaatatggtaaacaattcttaatttgtttgcgtgtttggacgacaaacaaatgttaaaaagttggtgcaat

SEQ ID NO: 42435 - DNA, 7368 bp, Cannabis sativa
  modified_base (5739)..(5742): a, c, t, g, unknown or other
aaaaaaaaaaaaaaacaggtataaaaaaacaataaagtaattggttaccttataataagataattagttaccctaattaggaattaccttaaagtacttatgtatattcaaaataatttatttaaagaaaacatattttcataaaattttctaaaaaatataattctaaaaaatgaaaattcttcttaaaaataataaaaacttacttgtgaagacatgtcttcttgcatccacagcctacaacaattgcttctccatttctatttttgtcactgttatttgtcaaaaaaaaaataacattaataaatataaagtagtcaaaaatcaaaaattaaaaatcaaaatcatatatataacataaaggaaaaaaaaatattttctttctcttaatattctaagccttagatataataaatacatatttgattagaggtaataaaatagaatattattctaattgaataattttcttattatttcagtacactgaccattctattttaaaattggaagaaaattcattccaatacaaaatcaagaaaatttaatagtttttatttcataatttttgtatacggttaaatttgattttattccatttctattattatattttattctttctaaccaaatgtgacttaagtctttctctgctcctaaaataaaaaataaaaaatcacaaaagagagatttcaagaaatttgaaattgaaattcacatgattgtgaaaggaaaatgaaaaaaaaaattaaacatttctaaattagtaaataagagtcacaaactttcaccttaattctaatagtgatgtttttgtgtctagctagtactttgtatttattagtttataattatgagttctattgaatatgttgatctggtttatgtattattttacttatagtatatttaattcgcattaagtatagattttatattttgaatcaaatttaatttacataatatcttaaatctgatcggttaatttttatttaataagtaattaaaatatttttgggcccctgaatttggtgggtcctaggcgcagacctagtccgccttaaaccatgtccaatcctacatattgatatcatcttttcattaattttttttataatattatatatatatgaaaaaaatatatatttgatcaattactttatttagatataattattcaagtacgaattttagattgaattagatcgaatattttctgaacattaatcaagtttttaaatattaatttcttaggtcattaatctaaaaaatatatagaaaacatattaaaatttctttataggctaccctgtatacaatttaatatatattgtaataacttcatatatttatatataaatatatataatcatatttcaagatatgctataacatggagatgaacaagtttatttccatttaatttgtaccatagtatataattaactatgaactacttttaattaccatatggatcaaaatgaagaaataagatgacaagatccctaataaaggaatattaattcaagaactaaagaaaataatgaaaattattattaattaattataattaattacctcttattatcatgaggagggttataatcaccttcagcttcaagaattacaatattcatttcaagttaaattagaagatgaaagaagaagaagaatgatgatgatgatgatgatgatcaaaagagctagaacttgcatgagaagagtacgtatatatgtatttatatatacacaatatacatcttcataatcaagcttaatattcatggatccactgtaatattgggcttaatttaaagatttattattgggctccaaacacttgggcccactccataactagaaaatgttgagagcccaattcatctgaatattcttgaagaggtctactcagtttattgtgttcataaaatactcaatttaattcaattcggataatttaattcaatcaatttacaaagtgtggatattcgtacttgaacggattagattagattggaaaatttaaaatctattatacttgtacggattaaacgtttattgatatgtaaaaaagtaattgatccaatctaattcacatattcatataccatttataacgctccttacatggacttatttttatcatttataatgtacataaatgatataaaatcaagtgagagtgatttggaatgttttggagaataaaaaaaactgataactagtaaccagttactatattttttagctttgtgtgttcgtttttgaatgctatggatgctttctaacctatgaatcacccatttgagactatttacacttaattaagagatgataacaactatgaggtgtacgttatttgaattttaaagtgtgtaatcctaaacactataaataagtgtctgaagtgctcattttgtgacattggttttctatcaactaagaacttgctagaaaacacaagacttgatggttttcaaatctatttccaagagaattctattatggagtgtttattatgtgagtttgagttggaaggagtaaactttgagcgagcttagattaatggaatatgaaactctattgatggaagggattaacattaccatcaatttaatttaaaagtgagacctaactagaaacacaaactccttggtcattaaaatttaatttaccaaacatgacttaacactcataccaaatgccctattagggcaactctaactctaatgccaaaatccaaatttagtattagatcaacactaatatgatactattttagcactaattttatttttaattccaactacaacaataaaaattatattcgttattatattattattttattaatataataaaaaatttacttgataaatgaattatttaattattaaatataaaaaaagggaatgtcgtgatctacaatgtttactattattagtggaacactgtagactctcatcaaaataagatgagttttactcctcacttggagcattatgtgggaaatactacattatgtatagtatgggtgtttaaagtgtcattagagatgaccttagtgcttagagataaggaaaataagattttaaataaaggtgatacaccttactcaaattatgatgattctcattaatctacactaaaagttgattgagcatttatattcttcttcttgttcttacatacatcatatattgtgtaatattcaaaatatatacagatatatataagatatatatatgaatgaagttttaatagttatatgacttacatcaaatatgtaattaaatatatagttatgatggttacaattactttaaatcattagatcattattacatggtttataattaattaaaaattaataaattacataataacctacttttattttatttccttataaataaaaaataaaatatatatttataattattaattgtaattttttaaaaaaaaaaattaattaaaaactttatttattttaattatataattaattttttaaaaaaatacaaattttacatgttagtaatttattataataggtcatagaaaaatataattgctataatataaccattaaatagtgacttattatatactaatttttctaattatttcaattattcttgtcctttctattgatatataatatgtttggtgaacttaaaccaacttgcatataatgtcccaaagaacacatgagttgatcaatttcatatttgaacttggagtgtttgttgttattttttgcaatctttatataaagtcaacttttttttgctgtaaagtcagcatttttagttactttggcaatttagttggagtagtaaagtcaaattaagtcaccaaaatggtaaaaattcaatattgattccttaaatatgttgttcccattaacatatgaaactaatttaagtaaatgaaattttagaggagtacacaatgtaatcctttatataaaaaacaaacaattgatggtttgtaaaagttgttcaacagtcaattttaaagtttgaatcattttaactctgatgtacatttttttaagaaattaccccgcaataaatagacaggaattctctgtctaaatgagaaatgagagaaaaattattttttatccctaaatattaaacaaagcgacaggaccgaccctaaaatataatagatcataagaaaaaaaaaataggcatttatttagaaaaaaaaaaaatatagtactttttaaaatcaataaaaaaaatatgtaactttaaaaggggaaatttttttgtgggtcctaagcacatgcctagcacgtatatgcccagggccagatctgcgggatagggacggggatgacactcctcgtccatcgggggactcgcttaatattataagtattagtttattaatattttatattttacaatatgtgtttgtattttttagtatattagtgctttttttttaatttttaagttgtattttgtataataattaatatattgaataacaaataatgtgtaatattttaatttttatgtaatttaatattcttatacatgtaaaattttaaaataaattttatttttacattaaagacttcctcaccctgtctccaccccattaggggattccttgcctcatcttcgataagaaataaacggggataggaattaaaattcttaacaggaatgggaacgggaagcatttccaaccaatttctcaccccgtgtgcatccctatcctctataatagagattcttcaaaaatttgaagaacaaatgagcaaatggtcatccaaatagatatatctccattttagagtaattttattttctctaaatacgtattattcctcctttaaacatattttaataatatttaaattatactttatttatttttattatcatgtattatatattaaaaaaatacaaaaaaaatctacaatgcacttcctaaacaaggtctattgatacatcgcttatctgtttcgacatctgagagaatattttagtctaattttttatggtcgtctacgttgtacttatttagaatttcttgaaaaattttgagaaattaaaaaaaaaattaaaatggtaaaaatagggttcaaagagtctatttcacacgcgtataaaataaaagagtctcatgtgcaacagatcgtttgaaccttattttcggcgtgttaaattttttccgaatctctcaaatgtcgaaataagtgcattgatggacttcttttaaggatatgcattccttatagaaaccgatagatggtgtgctgtaagagtgagatgtaaactaaaaataaataatattttggtcatgtattttaaagatagggtaaagaaattgttggatgtgatttgaaaatttcctaagaattaaagttgttaataatatatttaatgtattagaaataaaaagattttatgacatttctttaggtgaaattgaagagattcaaggtgtttgcatataaaaagacctaataaataagaaaatttacactaaaaactatattctaaataaaataacaataatatggtcggccgaaacattttttattttttatttaaaaagaaaaagaaaattttctttaatttttatttatttttcgtaatatatgcatgtgtaattatcattactggtttttttttaaaaaaaaagaaaaaatttaaaattaatgcattttttagttagcatttgggttagttattattttttttttttaaaaannnnaaaaaagaaaaaaaaagagagatttttctttaatttttacttattcatattttcatctaattattatcaatctttttttttagaaaaatatattaaattaatgttatgactttttttttcatttagcaactacttcatgagagtcatagaatatgactagtcattaggtacaaatttaaaagtctaatcatttataaatatttatatggatgaggttttaattattatattaaatatgtagtgatgattatatttatatttagtggttggatccgtattaaataattttgattaatttaaaatgtatttaaataattaataaattatttttaacttgatactaatctatttttattttgtagtactttataggttaaaaataaaaaatatttaaaaatattattgataaaaaggttttattaaatttttaattaaaaattttaacttattttaagtaaatagttgattataattaattcagatttttttttttagaaaatagaaatatttattagtaggcaaattgaacatataactcaaaaagtaaaatcatcaacaataggtcaacaaagccgtttacaataaactagaagaaaatcctaacaacaacctcaactaaggatctaataagtcatcagtgatcaagcatcaaagaagtgtaaagtatactaggtattcaaactagatgaacatctcacagaactcacatatcaataactaccagtcaatgatcttccaatgaaaattgagtcataacaacctcactgtttaaatcataaataagaaaaataacacgaccaatcatattgtgaagcttatttgtaaaagattagagcacataacaaatggctaatagaaattcgaaaatcacccaaatcttctgacgaacaaagagtgagactgagatatcctcgccgaagggatttggattcatcgatgaaacaccaataaaccaataagtgacaaaacttacatcaccaaaatcaatccctactaatgtaatagggtgatgaaaatttttccaaattaaaaaataaagaaaatccttaacttaaaaattccaacccaggcccaacccattttaatccagttgactctttttcgttttgggtctagagcccaattcaatttaagctcaaatttgtaattgatactttcaacacattaatttcataaggcaagttcactttgcaaaaaaaatcataaggcaagttcactttgcaaaaaaagtcataaggcaagtttcaatacatgaaatcaattcaaattattatcataaaatttaaaaaaaaaaaaaaatcaaattattggttgtactttttttctgatacagattagtggtttgtactttaagattgcgtttggttagaagttgtatgggttgaactttttgacacaacacgaaaccagcaagacctaaagatacgagcacgactaggcaaaaaacatacgggcttgggtaagacacaacacgaaaaatatatccttaagcacgacacaacacaagaaacacaaaaagcacgactcgtaaacacaaatagactagcctgaaggacacgacacacgataagcttaaaaaacatgacacgacatgttaaaaagctttataatttattattaacactg

SEQ ID NO: 42436 - DNA, 5590 bp, Cannabis sativa
  modified_base (751)..(773): a, c, t, g, unknown or other
  modified_base (1273)..(1281): a, c, t, g, unknown or other
  modified_base (5561)..(5564): a, c, t, g, unknown or other
agatagttagggtgttacaaatactccaggaaattagacatcaaactagctaaatcctctaacaaggaaccaaattcattgaggaaagaagtgcgtttagaaagcacaattacaactgctaaactatcagattcaacaaattgtaaagaaagttccacagtaagagcccaatccaatgctacaagtaaagccaaatattctccctgaacaactgaaaacaacctgcaaaaaaatactaacaaaaataacatcaattctcaaaaaactaagaaaagataaattaacaacattcattctatataaaaagaaaaaacttatcttatcaaatgtagattatgtcggcattagaacttggacactacagactactttaaacaatttaataacttaataactcaataactttacaactctactaataactaagaaataaaattctttaataactaataccactaatagtcataataaaatttacctcatatataattaataattattataatttagtatgagaatttaaaaactaacataataaactattacaataaaaactaacacttttaataataataataataataataaattatttttgacaaaaatcataaaaataacaacataactctcattatacgataatcatactttcaaaacaacaataatgaaagtcaaatacttaaaaaaaaataataaaaggaaaataactgctcaaaaaatcaattgcagtttaattaaaaataataataannnnnnnnnnnnnnnnnnnnnnnataataataataataattaagaactaatgtcactaaccacctcttcaataaataaaaataaaaataaaaataaataataattaaaatttgttacataattgtcactaatttttatcggaggcctcaataaatggtcatctgagagccgatcccgcacccagcgtcgtccctgtccaacttaacaacaacaaggatcactttccttcaagaaaaattccaatcagggacattgcggcaagaggaagcatgacaaagaatggagcaacccaattcagacaaattgaaaagaacctcaacggcgaatagcaagaccaaacccataactagaggcataaaaaagaaaccaatcacaaatgtcatggatctgaatagcatcagaaccaatgaaatccctagaagcagagaagtgaaagctgttgggctagagacttgcaaaaaaatcgatgcttgtcttgatgaggatgtcaaagccacccgcgatgatgatgatgatgatgatnnnnnnnnngatgatgatgatgatgatgaaggagaagacaacgtcgttctgattcttagcaacaataacttcaaaaactgatagagaactttgtttggtttgtttcgataaaatttttagcaacaaaaacttcaaaaactaatagagaactttgatttgatagagtttgagaagatttttgatggtttgatctctgaagaaacccagaacagggcaagaaggaaagaaaggatagagagaaagagtgaaagtgaactgaatggaagattgagaaaattgttgactgctcattctaaactattgaggcagcacttgtatttatattgatcattatacaaaagaggacatgagtgagtagaccaactgactcaatagaattaactcactgaccaattttatccaacagtaaagaaaaacaaacttaactaactgtcagtttcaatatcattacaatcatcctctaatattccaatatcccccctcaagttacacgagtgaacaccaagtgttaacttggatctaaaataggtaaaggaggatgttggaagtggtttggtgaaaatgtctgccacttggtttgttgagtcgacaaatcgcacatctaatttgtctgcaagcactcggtctctgatgaagtgtagatcaacttcaacatgcttagtgcgagcatggaatactggattagatgtaagagatccagctcccatgctgtcacaccagagaatgggaatttgaaacactttgacagagatttcatcaagcaaggactggagccatataacttcagatgtggctaaggccaagcccctatactcagattcagtgttggatctagaaacaacatcttgctttttggaacaccagctaataaggtttccaccaagaaatctgttgtagcccgaagtagattttttgtcaattgggcaacctgcccagtctgcatcagtaaatccctacaagtcaagcacctgagctggtttaaatgtgaggccaaggtgtttagttccaacaagatatcttaggactcctttgcaggctcccaatgttcagttcttggttgattcatgaattgactgagcctgctaactgcatatgcaatatcgggtctggtttgacataggtattgtaatgctccaatgatgctcctgtactctgtcgggtttgcaaaattgttccagattcatgactaagtttagagtttgagcacataggggtggattggggtttagcatccagaattttggttctagtaagtagatctttgatgtacttttgttgtgtgagaaagatagtgtcagaatgtttttgcacttcaaacccaagaaaatagttgacagttctcagttgtttcaaagcaaatttttgatgtaaggcttgaatcacatgctggacttgatgaatatctgccctgttagtaagatatcatcaacatagaccaataaaagtataagcttgccttgtttgttgctgtagaataaactagtgtcagattggactgttggaagtctaatgacagtaggaagttcttgagtttgtcataccaggccctatgggcttgtttaaggccataaattgccttgtttaatttggaaacatggtttggaaactgtggatcaataaacccttgtggctgagacatgtagacattttcttgaagctcaccatttaagaaagcattattgatatcgatttgctgtatttcccagttgtagatggcagcaagagtaaatatgactctgattgtgcaaggtttcacaacagggctgtatgtcacaaaagaatctatcgcaggtgtctgttgaaacccttttgccacaggtctggttttgtaggtggaaattgaactgtctgcattatatttaattctgaatatccatttgttgctgataatttgagcatcatttggtttgtgaacaagaatccatgtattgttccttattaaagcattattttcaatatccatggcatgtttccacttaggattagcaagggcatctttgactgttgttggttctatgtcaggatcaatggtgttaaataaagttttggcttgaatatttccattttggctcgggtaagcatagggtggacattttgagttggttgagtaggggaggtactagagtttgggcaacctgtagcagatgttgaagaggaggtttgttgggagctagggacagtggaattgctattagtgactgatgtaggataactcacttggaggatggtgtgggggaggaggtggtggttgaggagctcgagtttgaggaaccctgtaggtgttattgtcaatattggcgggggactcattagcggtagaagtggatctattgaacatattttgatatggaaattcaagttcattgaaggtgacacttctagcaatataaattcgaccactagggtgtaaacacctataccctttagagtttagacagtacccaataaaaaagacattttgctgatctgaaggatactttgtgagtctcatagagcttaacataggaaaacaagagcacccaaatactttaaacatgttgtagtctagtttttgtttaaaaaaattttcatagggtgaaagaaaatcaatggtctggtttggaagtctgttaatgatgtaggcagctaaggtataggcttcccaccagaaatgtaaaggcatttgggcttagacaagaagtgtgaggcctatatctacaacatgtctatgttttctttcaaccctaccttgttgttggtgtgtgtgtggacaagaatttcttttgacaatgcctaaagtttggaacagtttgtacaggggttcaaattctttacctaagtctgtttgtacacttttaatctttgtttgaaagaacctctccacataagaattaaactgtaaaaacaatttgttaacttcagacttggtttgcatagggaataaccaaacatactttgtgaaatcattaacaaaactgagatagtatttatagccacattagaagtatgaaaagaaggtccccatacatcagacaagattaattcgaatggcatagtagttttatttcttgtgcttttaaaattgaaatggtgttgcttgccactttgacatgcatcatataaataattcttggtacattttgcttgaggagcaacattagaaagaactttagctaaaatatttaaagaggggtggcctagtctataatgccaaacatcatagattttattcttgtcataaacgggattgctggatgtggtgaagttgtaagcagctggtcttaaagaaattgtttctggtgtgggagaaggtagaataggtgactttggattgatgacatgaagttgataaaggccttcatgaactttaccccgaagaagaacttgcttggtgttcttgtccttgataagcaacacacatcatcaaattcaagggtaacattgttatctttggtaaattgagaaatacttagatttttagtgacattgggaacatttaggacatcttgaagaattaaatgattaaaatattgagtaagaatagattgtgagccaattttaagtatagggagactagaaccattaccaacaatcactttggctttgcccttgtagtttgcagaggtggtgagattgtttgaattgtttgccatgtgatgcgtggcaccactatcaatgtactaggtagttgatagatctggaatggtggtggttcgagagatgtgagcttgggggttctcagatggggtggtggaagttgaagctccattctcagttggtggtcttgtgaaattgatatcaaaccagtgacaacatttcacaatagtgtggcctgttctaccacaaagttgacatataggtcgatttgttcctctacctctgccaccatagttggtgttgcctgttcttccacctcgatttgatccacgataaccacagccaccataactgtgagaaccacgagtgttgttgtctaaagatatgttggcaagattagcttggacattggtaagaaaatctgtagtttgctggttgattctcatttcttggctttggagtatgaattgtacttcttggagacatcttgaagtgagattgacaatgacaacctcatatttagcacctaatcctccaagaatgtacaaaattagatcatcatcggagagagattgaaagcagcagcaagagtatcactaagttgcttcattttaaggatatatttgtcaatggacagggaacctttttgttgggaatattttaccaagatctagatttactaacaaggatgttgaattaacatcctaaatatnnnntctctaaaacaataaaaataaacaca

SEQ ID NO: 42437 - DNA, 3135 bp, Cannabis sativa
tttgagattctaattgtgtgtatagtacatttatgcctctgagaagtttttataattgctgcctttgggttacaatgtaatattgtattgttgatggttaataaatagttcttcataaccgtctgctgtgttgtctatctaacttattaatcaaggttgtccaggctaagcttcacataatacatggtcctcttattgggtctcatttctttctctctttttgtgatctgaggtgttattctctgttttttttttggtttgattaaacttagtgaaaagctctttatgaagagcgaagaagttatctgagattttgttgataacttttgatgtaaaagatcatccatacagcattcctaatttagaacctagctttttgtgtcacttgtgacttatggcttccctggatagctcgttaacttcatttattgacagtattgatgcagtgtcagacagagatttcatcttggagtttctttctgctaattccatcatagccattcatttgtcccgacttggggaagaatgggtattgtgggcgtcagaagagtttggatttattactccaagtgatgctgtttcaactggaagtagtatcatgcctcagaagaaaaacccagatcccatggaactggttcgtggaaagtctgctagagtagttggagacctagttactcttctcacactgtgcaaaggacttcctctcgcttacaatcgtgatttacaggtaataatgtcaacacttaacttatttagtgatggttttcacttttgagaatgataatattacgagacaatctactatgattgtttaagggattacaaaaataacagtcggttctaagcaattatggcatatgtactctatttgcaagagaaggccgaaatttatcccaggcatatgtcctttctttgcaagagacggccgaaaagtgtatctcatttatgctattgaacctggcgccaattatatcttgggtttgagctttgcacttgcttccttgcttctccatatgttcatacaactacacacacaaaattctgtttcgcttccatttgcatagttcatacaggtgtataggaaacatgtgtagtaacctggattcttttcacaacatttgtgcttgactaacaatatcttctttttgtttttttgtttcgtgacaggaggataaggaaccttcatttgacagtgtcaagacaattttggggatgcttgaagtgtcagcagagtttgcgcagaacattactttcaatgaggaaagaataaaaaaggccttaccagcaggtcatcttgatgctacaaccttggctgattatcttgtgaagaaggtaagatcactaacctttgctctccaaccggcatagctaaaatttgattagcttttagaatgccatcatcattagcagttccaaattcattaaaacttcacgctactggagaaactgatctcaagtcacagcgacagattgatgcacctctttggggttgcataaatctcgccatatcatttaacagcccacctttccttattgctgaaggaacttaccttacctgtatgaagtgtctttttggctacttatgaaatcatatttttttattccttggatgtaaatatattggaaagaattatatgatgtgaagattaagataggaatatatattcccaagatcttaaaatgttatcaagaaagacaagcattaacggagttaaataatttctgacgttagaatctgaatctttttgtactttacatatatgtcttgatggagaaagcgattgttaattttcaagtgatgttttatattcgggaaaaatctagttagttggatagatgtttattggattctcatctgatttctgcagggagttccgttccgaacttctcatgacatagttggaagggcagttgcactgtgtgtctcaaagaactgccagctgaaggaattgagtcttgatgagctgagaagtttaaatccagtgttcgacaaggatgtatacgagtatcttggagttgaaaatgcagttgagaaatttagctcatatggttcaacggggtcatcatcggttgcttatcaagttgattactgggtcactaaacttggaatcacaaaagagacctaactaatgctcggttctggaaatctcattaatatcgggatctggcgtcgaagctagtgtttctcatccagagccttaggaggagctttatagaactcctcatcaagtttttgctttgtctgaggttcctagtaagggtagactttaggatattacttgtatttgtcctccatttgctggaaaaggttctgatttgtgaaaggatttggggcaataaaattaagcacaagaaagaaatataatattttttttttaataatatatatataagtatatgtatgctatcttgaaataaatttgtttatgtaaaagtagaaggtaactaaagaaacaaagttgaaggcagaagaaatagagtagtattcttcaagccatggagtcaagaagattaccgagcttagacacgagcatctccaatatgctatacaaattggtgatgcattgctaaaatataaccactttgtaaaaaatatgcttggatggtgtgccaaatttgtcacataatcacaatgcattatgattagagataaaaatttatgcagcggggatgggtattcatgaggacccgttcctaatggggtgggaattttccgtcttggtggttaatggagcagtggtggaatacaatttcaatacttgaagcggggtgggggtggggataatactatctgcaccatatttgatccctatatagatatatatatataatttcttttttattcttaacatatatataatatatatatcattgataatcaaaattattttgattatcatccataatcaaaattatatatcatatacttaaattatgaagatctaatgacgatagtgaactgatgatcattgtggattacatgtgtaaagatattttcttcacaattcttaatttcatctttctttcctatttaatttgttgggaggcttgagaggtatgagactatgatcctatacttgggttatgattttttgttttttctttctttcaaactttaagacatatttagttttt

SEQ ID NO: 42438 - DNA, 7896 bp, Cannabis sativa
cataaccatagctgatatatatatatacagtttgtttaagcattttttattttaggattgttgcttatgttttgattattatagaatataaataaatagtttaacaacaattacaattttttccaatttgatttatctttgcctgtaatactaagcaactatctcccctgtggatcctatttcctccaaagaaaaaaaaaaaacactaggtggcttggttggaggaataaatagaatatttttattttattttttttatttggttgcatatttaagtattgatatttttattattttggtagaataaattatttcatattgaaatggaaagatagaaaaaaaagactattccaattaagattagaaaaaaattaataatttttgtatgcattttaaattttatctatatttattaatcatgagattaataaatataatttatttgtttagttctttatataaataaaagaaataaacggtgtattgacaaaaaatatatatatttacatatatggaagaggtttcaatggttacatcaaatatgtaaccatgatagttacatttatttttacccatttgttatatgaagaatagttgttttgaaagtaaagatctaggattaattggcttaagaatggggataagaataccaaatattttcataataaaacttctactacgaacaaaaataatttaattaggtccatcaccctggataatagttttactatccataatttgcaggatatttgtgataatgttgttggtttttactcaagtcttttctcttcttagaatgttgatgtcgattgtgttaatgttattctctcgggtatttctaagagtgttagtgatcaacatttctatttttcaactaagccgtttgatcaaatcgaagtcaagcgagctttgtttcagctttcaggagacaaagcccacgaccctgatggttaaaactcttatttttaccaaaaaaattagattgttattggatctgacctccgtaaggctactttagatgttttaagcaatgatgctgacctgttgtccattaatgagatatttcttgtgtttatttttaagaataacaatgcttctaaaattagagactataggcctataagtttatgctctactataaggttatagctaaggctgttgctaatagcctcaaacctgtccttaacgacctcatctctcataatcagggtgcttttttgtgtgatagagttatctttgataatatcctgttagctaatgaagtcattaatgccattaataataggagaagtgacaaagttggttgggctgctcttaagttggatatggagaaggcttttgacaaggttgagtggacttttattatgcattttcctagccatcttatttcccttattttatgatgtatttctactatttcttttaagctttgcattaataactatttgtcttctgtgatcctccctattagagggattaggcaaggggatcccttgtcaccttacctctttcttctcgcggctaagggtcactctgctgctattcgtactgaagtgcgtactaataattttaagggtatctctgtttgtcgctctgctttctctatgtctcatcttttatttgctgatgatagtcttccgttcactactgttacctctcataattgtaataccataaaagatgttcttcacatttataataaggccactggctagtctgtcaatttctctaagtcctcagtgcttttctcgccaaacagtagtgttcaagacataacttttttccttgatttcctggtcttgatggcaaacattttattaataaataccttggtgtgccccagtgtttttcttattcaaaaaaatcttccttccactattttcttcaaaaagccagtagtaaactttctgtttggaatactaagctattttctaaagttggtaagtaaatccttcttaaagcgattatccaagctatcctttctcatgccatgtcctgctttagacttcctttatctacttgtaggcagtttgagaagcttatggctaatttttggtggggctctttggggaacaatcataggaaaattctttggaaaaatggtcctttctttgtaaatccaaattttctaggggtcttggtttctgtactattgttcaccacaatcaagccatgcttgctaagcaggcgtggcagatcttcattaaccttgattcccttctggccaccttccttaaagctaaatatttcaaaaataatgattttctccatgcttcccttggtcactacccttcttttacttggagaagcttgctttggggaagggaactcctctataagggcttagtctggaaggtgggaaatggcaaatctattcaaatcactagtcctaattggatcccggacttgagagttgtatcttatataaaaataattttttttcatcctgaggatacaatttcttttttcattaaaggggagggattctaggatattgacaaacttaattcttatttctcagagaatgtggttacttctattcttagaatccctctgatcttgctagaaagggctgtctcatttgggggcatcatccttctggaaattttactacaaactcggcctatcatcatgctaaccctactctctcttttccttcttattctaatcatggttttcttaaatgctagtggaaaactgtttgatttactaatatgcctcctaaaatgaagcactttgtatggaaagctttcaatcatttgcttccatttggttttaatctctttatgaggaaggtgcttgataacccttattgctccatttgctctcttcatgtcgacactaattctcactctctcctaaggtgttccagagctgctaaaggttggttaactacaagatttgctcatttttttttatactaacaaagattgtgatataaaggaatttctcttgagagggtttgaggttcttaataaagttgacttgcctttattttttggtatcttgtggaatgtctggaataatcgtaacaaattcattttcatagcttacaagccttcttttgcggatataaaattctgggttaactcttacttgcagaagttttatgtagcacaagacaagcttataatctcatcagataacaacaatgaagaagcttccaacactttattaaattgttctaatgatagtcttgctcaagacaatgttcctcctccattaggaacttataaactaagtgtggatgcttcagttagagataaagattgtaaaattggctttggtgttgttgttcagggctgtaagggagaagttgttgtaggttgtttctcttcagtttccagtagactttcccctctttttgtagaggcggaagctctctccaagactctcaactggtgttcagtagttcgattctctatcaacattatatcttcagattgtcatgttcaagtagagggatagatcattactttcagatttaatttaaaaaattgattcttctctatctcattttcctaatatttcattagatatattccgagaagtttaaatgttcttgctcaaagggcgttcataactgatttagaggttgttagaacagttgtatttcaaactttaatctttgatcattgtaactttttttttttttctttgtgtattgctatattttaatgttacatatctcatttttgtttgtttttttttttttttttaaaaaaaaactattgaatggttataaaagacaatctcttatttgattcatgtgtctcaatctcaatttggttcgaactcaaataatttagtctcaattaattgtatgttcattcttttgctttcttccacgtgtcatcttcatcctttaattttacctttgtcacactaaacaatgccatagcatattagattctctgaatcttatgttgtctcttgattattgtatatatctaggggaaataatgttatgtaatacaattttcaatttttaaaaatcgaacacttgtgtcctgtataaattatttcttattgtcttctatagatgtacaaaaggtttcacattcaaatctggtgcttgtgaattttttttcttacatcttatttttgaatcattaatttttgtatagaacttgcaagtaagttttccaaaaaacaaaagttcaaaaaagaaaaggttaaataagtaataataatacaaacattgcatagaaatgtaaataacaagacaagagttgaccaaaaaaaaaaaaaggaaaaaaaaacactccatgcattacatattgtcccataacttgaaataaaattccaaaacattttttgtttgatacacacaaaatccaaactttgaattcaattaatttggtgcttctaatttatggaaaaagaaccaacatcctaaaggggtccccaatattgttatgcaaagtgacaaataatttggaaattgaatggtaataatataactttcaaaacaatatcgatattatactataattataataattatatataaattgcctttaatcacgcggacataaaaaggatttttacctttcaatattggaaatataaaagtttgtccgaagttggagggtccaatcataatgattataaatatacatgatttattttcttaaatcaagttgtatgtgacgtacccattaggctaattctatggaaattattaaactttgtattctctattaattcttgtgagagtgatatgttataatttggttacaattgccattaatgactttgaactaggcatttgagttattatgcctcattattgaatgaagatacatattaaattttaaaacgccgcaaactgaaaagaaaacaacatacgtagtggcattattgtaattaaatagatttcagaggtcgaaaacataaataataaactgatagaataatttcaaacgagtggccgttggaaaagttttaaaaacagagagagaattattttaatattattattattttttttttaattttcgaatgcaattaaagagaactgaaagaaccattcaaaccaaagctcaatttcaacagctatcttctttctctctctatagttctctctttctagagagagaaactctcgtgtagtttacagatacagagataatgacggggctgattatggtgaccaggggtggtgggtgtgctggtggtgatgatggtggtagcggtggtaatggtggaagtggaaagggttcattgaaaagctcagaagaagaccaaaaccaactctcattggtgacgtttctcttggctgctctgaagaaatctatggtggcttgtcgtgtcgagagaggtgaagatgtaatctccagtaccgttcatcagatggagattggatggcccactaatgttcgtcacataacccatgtgaccttcgatcgcttcaatggctttctgggtcttcctgttgagttcgaggttgagatccctggtcgagttcccagtgctaggtaagtgttctcaaatttaataaggaattgtttttgttcgaagtatactactagttgagctgcggtagattagatttttgagctgagatttagctcttgtggctcttgagagttgaaatttatgtcagtttggagctgaagtacggatctattggttggtttgaggttaaaagggtttgagatttagcatttaaccataaatttgtctgatgagaaagattagcagatgtagatgaaacgataaactgaactaagcagaagagttatgttcatatattcgttacagttactattgctagagattcatgcatacaagattcttatgaacatttctacgattctatagcaatgaaagtgatactagcactattataatatctgctttagttaaataatactgttcatatatttgcttgcacgattcttatgatttgaatattcttccaatttacagtgcaagcgtctttggggtctccgccgaatcaatgcaatgcggttatgattcaaaagggaacagtgtccctactattctcttgctaatgcaggagcgcctttactcgcaaggaggtttaaaggttgtaataaatttcatcatatctatggaataattaaacccctaattttcatgtgtcacgagtttacttgggtgcccataaattcgtatatttattgaaaaggttcttattggtatttgaatgatttattattcggtgcaggcagaaggaatatttagaataaacccagaaaatagtaaagaggaacatgtgagggaccaactgaacagggggaatgtgccagatgacattgatgtacattgtttggctggattaatcaaagcttggtttagagagcttccttcaggtgtactagatggactttcacctgaacaagttctccaatgcaacagcgaagaagagtgcgcagagcttgtgaagcaactaaagcctacagagacagcattgctcaactgggcagttgatctcatggctgatgttgttgaggaagaagagtacaacaaaatgaacgccagaaatattgctatggttttttctccaaacatgactcaagtatgataaaaacagctatcccaaatgatgtttactttgttttcctattaactagtaatattattaatgaacctcagattgaccaactctttttcttgatcaccagatgtctgatccattgacggctctgatgcatgcggttcaggtgatgaacttgctcaagactctcatcactaaaacactaagagagcgcgaagagactgcaacttctggaggatattcacccatgtcatcatgctcttctgatcatcatagcgatgaagattttgatagtcagcaagagctggactctagcagtgaaaccagagggcgtgcaccagattatgatgaagatgacaattacagccatggcagtgaagaagaagatgaagatgatgatgatggcggagctcattcactcggtgagacagaagaatgttttttgaggcagctggatcacaacaaagctgttaccataaccagctccgctgatcaattggtcggtgatttgcaacaaaactatgctgccaatcatgctaaatcttgcactccctggagccacatggaggactctggtgtatctttcagtgaaagcaaagaggaaaattcaggcttgactacatgtgagggggaagaagtagaagactctggcaaaagcttggtatgttttgaaaagaggattaatgataaagagggatcatcaatagacagcagcttcttcaaacatgaacaaaatcaaaacattgagactagtaggagacaatgacaaacgaccatagtttgcatttggtgagaatctttgatctgacccaatgctgttgacgtctgaagaatggtagaagaattaattaatttgcttagctctctacttttggtttgtttctgtaaattaagaaatgtgtgctgttgttcagcaaagaggggttgactgaactaagcatgcatttccattaagcttgtgattggtctgtgactcgtgagaaattgaaaagggtttcagctttgggctgaacccttactttaccaccttaaggttcatgatgtgtgtactaattaggaaggaattttctagccatcgacattattttgattggaatgaattagtgttaagtcagtttctctaatgtatgtagtatgtaccatattagaatgtggtaaccgtttatatagttaccttgtgttgaaaaaaaaatgtggttgttgttgggcttgacttttttagtataagtaagatatcatgacattcaatttggtactccattctcatgctcaattctcatgttcataattggtagtggtgcctgaccttactcaattgtcaactatgtataatataatcattttcatttaccattttttagaaagaaaaa

SEQ ID NO: 42439 - DNA, 13245 bp, Cannabis sativa
aattgataagaaaatcattaaattctttatcatgttacaatagaatggtctttcattctattttaaaatggaatagtcattttactaaaatattgtaaagaacattttattggaatgatattccaatattttaaaatacaattaaacaaaggaatgtaatgaaaattatttcttttccattctattctattttattaccttcaattaataccacctaaattatatgtatttttttttatagtttcaattattttcatataatactttacacattatcaaataaaaaattaattagaatttaaatattttttaataaatacatatgaattattattattattaaattataaaaaattttaacgtgttgtgttattttttttagtttattcgtgtttacatgctgttcctttaagtttatcgtgtcgtattaaagtattttttttcgtgttttatcatgtccaaattcatatttttttgtgtcgagttgtactttttaccttgtcaaaaaaaccctatccatatttacaacactaatttaagtgaaccataaaaaatgaattattttctcttgacatttatttatttttctctccacacatttagaaatattattattctactttcattgtcattatcaaattcgaaacaaaataaataaataaaatcaaagctattgccgacattagagctcagatggtggggaactcatctgcctttttgttttcatttgtgtaatataataatatgcttgtccttccctttttacaacgttacaaagcatttaaaaactactataactagaaattaaaatgtttaacttaaacgactttcaaataaaacactaattaatcacccattaatccaaatctttaattgagtttaactaagttaattaattaattaattaattaattttcatttctttctttcgaagaatgaataatattatgcttaaaccaaatacagagatattcatctttgtgtagaatcttcttaaaggagagagagaaagagagagagacactcactcactctatccccaattcgattcgatttttctgaaaatggaggaggagacatcgccgtcgccgtcgccgtcgcaactgcaaccggagcatcaaaagaaagaagtgattcgattagagcgggagtccgttataccgattctgaagcctaaattgatcatgaccttggctaacctcataggttttatttttattttctctctgttttcttttgaatgtttgaatcggtatgcattgtgaatggttggattgattgattgaatttttgaatatggcattgtgtagaacatagtaatgaccgggctgagtttttgaagctgtctaagagaattgagtacaccattcgtgcgtggtaccttcttcaattcgaggatttgatggtatataatgcccttcttcttctttttttctttgattcagaaatagtaatgaaaaatcgaactctgtgtgtgttgctttttaattttcagtctttttttattattattattgcaatattttgaggggtttttggtttgcattacagcaattgtatgcactctttgatcctgtacatggagctcagaaattgcagcaacaaaatctctctgaagatgaaattgatcttcttgaacaaaatttcctttcatatctatttcaggttattcctccatttcatcatcatcatcatcattgttatctacattgttatctgatgctttgacagagttgttaaaactttaaactttggatgtaggtgatggagaagagtaatttcaagattgctactgatgatgagattgaagtggcactttctggtcaatatcttctcaatcttcctatcactgttgacgattctaaagtatgttttgtggttttgcacgttaattcctacttttaattaaatagagttgggtggtggattcaaattcagttcatgatgtattgctgactatattgctttttctgaatttagcttgacaagaagcttctaaagaaatattttcaggaccatcctcaggaagaccttcctgatttttctgataaggtactataactttgtaaggagtcatagttatcttttacttgatttggatagtgtatgtgtgtatgtgtgtgtgtgtctctgtgtgttttcccttcttgggttcggaaggagaagggggatgaagaagattttgatagctatgtgctgtccacttgaacaggcatctctctggctgttcattttatcgttataccaaacaaagaaagataatattgcaaaatcttatatattatgttttcatttcagtatgtaatctttagacgtggcattggaattgatcaaacatctgattactttttcatggagaaagtggatatgattattgggagattttggtcatatcttttacgaataacaaggtaaatattgtctatatttccaaattcatatagtaactgcattaatttcaatgtagtccagttcatctggtcatgactttgtgcaactgactttgcattggataggataagtcgtaaacaatttccagtatgttttaattcttgataacgttttatacagtatctagtacatatgagaacattagttgtatacaatgccctagtacatttgacttcttgatataaggggtaaaaatgctgttgacataatcggagggatgtagccacctttttcttttatcgggggctaaaatgctaatttatcataaatttgggctattaaaaaataatataactgaatttaaaagtatattttaataagagaaacaagctaaattggactattggtctgaatttcagagtaaatgaggtatacttggttttgtaacatacttttttaaacccctcttttaatctcctcctggtttattcttcttcttgcaggctaaataaaattttctcaagaaagccaggtgggaaacataagagggatccaaagaaggatgacgagataatcccagacgcagatcaagaagacctctttgttgaaaggaagaggcttgaaaatatggaattaaggttttacattcttatcttataccatagttatattaatggacggtgttagtctgttgctgttctaagcagttgaattattctttctttactcttgattctttggatatgatataagttgattgtgttgtacttctgataactgtgttatgactttctttgtgctgtatcctctagtgtaggcaaattgctgagcaagacaacaatccaagaaccaaccttcgataggataattgttgtttacaggtactgcctgctttgtgattaaacctatgcatggttgagaactgatattagataatttttctcgggttcctaaaaaatgtgactgtaaaaccagttggaaagttaatggataatacctttgtgagtgttggacttttatacctttgttctgggtttatttatagattgctgcattttacagtcggaaactagtttacaagaattataccatgatagttttttgataagaatgatgactctctaggcgatcaagtcccaagggaaaaacagaacgaggaatatttgtgaagcattttaaaaacattccaatggctgatttggagatagttcttgtgagtcacctccctcctttaattagcctctaatcagaacccattaagggccccaaattcctttctagttgtctttctttctcaatcttgtcttaaccatatgaaatggtgttggtactttttttctttttgcagccagagaagaaaaatccaggcttaactccgatggactgggtcaagttcctaatatctgctgtggttggactggtcagcttttattttagatggcactgaagtttgtatcaagcattcctcttcttcttcttgtttcttctattcatctgacttatttaaaccatttatttcttaccaggttgcccttgttagctcaatcgaaacgcctaatgctgatctcttcgtcatgtttgctgttatttctggtgtgattggttacattgccaagacatacttcacgtaagcgttctcttcagaatttttttagtaattggatgcatgtgacgttcgtactactttaaccaatgtgcgtaggtattatgcgtgattatgggtcatcatttgggcggatcccctcggaaattgtttctttgaacagtttaactaatcaattctgttgtgtgtatgactatttagtgtcaattcggctttttttttttgtttttgtttagctgggcattgacatatttgattttgtatccaaaaatgtatttgtaattgattgagcattacaaagtgtggattttgtttcaaaatttatatgataataaagtcaaagttgatcgaatgccaagcttttggctccagatgtgcattgggtgggagatggatttttgtgctctatgttgatttactgttcaaacgaagcatctctattacgatattcctctcagttggattcacttgtgtgatgatcatgagggacccttaagctgtgattgcatgatggatctgtctctctgataatgtaattcttcagtgaacccataggttactgattcagctatttctcttaatctttttctgtagttttcaggcaaatatggctgcttatcagaacttaattactcagtcgatgtatgacaaacaactagatagcgggaagggtacacttcttcacctatgcgatgatgtcattcaacaggaagtaagctacaagctttgctattagcttatgtttaacttcaacccaattgatccttttgttggcgatccttgcttattcaccgcgttgttgtttcaactttctacctcctgattgttaatttgattacttttttatttaactacacactgtgaaatgctgagagcagcttgtctcaatcttcaatttacaggtcaaggaagtaattatttcattcttcatattgatggaacaaggaaaagcaaccagacaggtaaagagctcttactttatttggaactttcgagtatcttgtctttcatcaaagtgttaaattttgagctcattttttttatcaataggatctggatcggtggtgtgaggaactaatcaaagaagagtttggtgaaagctgtaattttgatgtggatgatgctgttcaaaagttagaaaagttgggaatcgttgctcgggtgagtctacccacatatcatattgagataacagtacaccctttaatagtaaaaatactatcaatttagacctgtgtttccctgaaatctgatatgagaaaggttttgagttcttcaggattctgttggaagattttactgtgttgggttgaaacgcgctaacgagatcatcggaacaaccaccgaggagctcgtcttgaagttcaaacatggcagtgctacatgaatcggagctgcttacggaactgaaaatgactaaaaattagttgagagatgttatgaagaaacaaaatcataattggttcaacgtggattattacaattgtgttatgttgtgtgtgttgtaaatgtttttagctttagtaattgtaattttaaacaatgaatttagtatttttttttcaatctcttctatatgcatatatattgtttttcagtcaaattaagctaccactccgtttgtgtttaatggcaatgttattatattgtatatacagagttacaaatgtctcactaatgaattttaactggtggaaatatttcttttttattatttttggtaaaagaaatgacatcaataaaaaatttagaaattagaaaccatgggagtgttaaatagcacaaaatgtttggttgtattttcagtttttagaattgtgtttttaaaagtgagaataaaaaatagttttttgtcattttaaaaatttaatagtgtttgaaacaaattttttaaaattatttttagtttttttcttactaaaaaaattaatattttaatactataccatgacatgaacctatttgggttccggtagtatgtgagcaaaaatgtaaaatataatatactagacaaagaaaattgtttttgaaaattgaaaacaacattttgatgttttctattttctaattttttaaaattcagtttttaaaaatttttgctaaacaactcctattagtttttaaaaactattttcaattttactgaaaacagtttttaagttataagtgttttttctcaaattggttaaagccatagctctcctaggttggacttaattggcctcattcaagtgttttttctcagatttgttcattggttttttggcaaggttaataagacatgttttatttatttattttatttttattataaataagtgtacacgacacaagttatcttgtgttgttgtgtcaacatgtttataggaattgaatttaatttttttaacatattatttaacgcgtttcataattttgtttaatgaattgacacagcaaaagtcaagggattagtaattataataaattatttgtttaagtaaatggattagtatgtgtatgttttctcttcctttttttatttctaaaaataaagaaatggagagaatgtttcgtgcaaagaagtaagttgtgccgaagtgagcggtaatgcagtaatggtagatagagaagacaccatattcattccttaattcattcaccattattattattattaacaaaacaaaacaaatacaaagaagaaagaagaagaagaataagtttaaggtaattgcaaaaaataataataataataataatgtattggaagaagaagaagaagaaagatatcattcgattggaacgagagtctgtggtgcctatcctcaagtccaagctcctcgaaaccttgtcatacaattttggtacgtatataatccactactaacttattacatgtatggaagtagatattccattctggtttttatgaaaatgggacaaatccattattctctacatgcaatatatatgtatgaatattatgatgaatgatgaatgatgaatgattattgtgatgatgatgtttgcagaggatgtttcagagagagatgagtttgttaaattttgccagagagttgaatgcacaattcgagcttggtatcttttgcaatttgaagatctcatggtacttaatatatttacttatatatttataacattattaaactagtgtagaaataacattgcattaatgataatctatattgctccgtaatagaatggaacctctcaggatcagtccggttttattgtagagtaatttaccgcatgatctatattactccattatagaacaggactgatcctgattagtgtcctgggacttatccattcaggatcagtcccattctattgtagagcaatttgcagctctataataaaacatgattgatcttgatgtagtcctgagattaatctagatggagtcagtctcattctatttgtagagcaatttgtagctccataatagaacgagactgatcgtgatatagtcatgattcaagatgagtcccgttttattgtagagcaatttgcagcttcataataaaatgagactgatcttggattcttggtgtagtctcgcgactaatccaattgtagtcccgttctagagcaatttgcagcattgtattgatcaatacaatggtatttttaatcactttaacagtgctataaattactagggaaatgttacaaaatcactaaattagtcaagaatgaaatgtgtctataaatatcaatagtaagattatgagtttttgtttacatttatatttatgtgtttggcagcaactatatgcactttttgatcctgtatatggggctaggaaattggaacaacacaacttgactccagagcaagttgattcttttgagctgagttttctaaaccatttgtttaaggtaataaagaattaattaacatacatgaattgtattgctgcaattattaatgtttgaactcaaatttatttgattttgatgatgatgatgaaggtgatggataagagcaacttcaagataacaactgatgatgaaatagaggttgcactttctgcccaatatcgtcttaatcttcctatcattgttgatgaatccaaggtaaatatatatatatatataactatatatacccacatacaaatatatacacatcaaactcatctcactttattggtatcatttctttagctagataagaggcttctcacaaggtattttacaaagtatcccaaagacaatcttccacagtttgctgataaggtatatatatatatatatatatatgagatcattcatcattaatacacctttctctcatttgattatatatatatatatatatattgtgttatataacaactttctttctgcttatttgtagtacataatcttcagacgtggcattgggattgatcacaacactgctttcttttaccaagccaaactcaataccatcattctcaaaacatggagattcttcctcaaagtcactgggtaattaagttggttgttaatgatatacataataccaaacacaacacaaagtaaattaaacttaaaactaagctcgaagcacataattacattttttcggagatattaattagagatatttgcagcataattagttaaagtttagtctttgtaaccggcaaagatccaataattttttctagtggcaaaactacctaatgttactaaagctgtaattctgtcactctgaaccgttaacttccattaaatggtgattaagaaatcacatgtcaccacctaattagatcaaaacataaaattttaggtagttatactgcgaacatctttattaattattatgtttaacacaatctctttgtttgtgtgtgtgtgataggctaaagagacttctctatggaaaatctaggaaacactgtcaaaatgattcatctcaaccagtagagattagcattgaagatgagcaggacagtttatatgttgagagaattcgaattgagaaaataaatctcaggtttaagtagcttgatataataacacttgtttagactctaatcataatatggtttttgtcaataatgttaatcaccttcccttttctatgttaaattcttgtttttttttctttttcaaatcttcagtatagctaaactactgggcaaagtcactatccaagagcctacatttgatagaataattgttgtgtacaggtaatgattgattttggtgttattttgacataaatacattctttaaaaaataaacatttattttgagacattaaaacgagtcagacacaataacattattcgaaatctacccaaaataaatgggtttcagttttctttaaattgattcaagtcatttttgaattaacatgtccaactcgaaaatgacatacaaatttatttttattatataaagttataaactatgttaagttagttaaataagtcataaatatattaaatacatgttaaatggctaataaaagagttaaacttgtctaatataatacaggagaaagaaaaccagacatcaaaatgaaaggggtatacatgtgaagcatttcaagaacattccaatggctgatttggaaatagtacttgtaagtttgtttgttaatttctctctataaaacaccatgaaaatggcttatcttgtttcaaataatggaatttttccctttccctttttgacagccagaaaagaaaaatcctagtttaactccaatggactgggtcaaattccttatttctgctgctataggattggttagtaatgtagttactctatcaatgtattattatacatatttcttttggtttaacttattcattgtcaattctcatgattggcaaaagtagttcttgaatatttttttttccagcaattaacaccattgatatcatatattaatagttaagagaaaaattcaaggattactttactaattttgataaatttacggggcaacaaggcgaaaaagccgaattcttttctagattgaacacaatttttagtgttttcttttttcttttgcaccaggtaactgttgttagttctcttagcatgcctacagctgatatccgggttatctatgctgttctttctgcagtgattggttactgcatcaaaacatatttctcgtaatgcgtaaccgtcttcttcttctttgatggcatatgtatgatgacattgttgctcctgacatgactaatgttttttcaagttcataggtttcagagtaacttggttgcatatcagagcttaattacacaatcagtctatgagaaacaattggatagtggaagaggcactcttcttcacttgtgtgatgaggtcattcaacaagaagtaagtatttaccacaaaagttttagcagttattacagttagtcatttgaaattggcaagcttaagcaatcaagaaagaaaagaatataccaagtttacacatgtagtgacaaaaaaaaagacccctcaaaaagactcaaacttcattttttggaataatctatagtacaccctctaaaaggaccgcttacacgatcatgagaaagaaaaaaagactaagaaactcttttgaatgtcgaaacagataaagggtgtaccataacaactcttttagaatgttcccctaacattttttcatactaattgtcaggtaaaggaggtgatcatttccttcttcatattaagggagtgcaaaaaatctactagacaggtatgcaaatgcaatttcggtgttcggaatacttgttttttttttcgtttctcttcttctgctgctgaagatggtaatggtatgaaataggatcttgacttgcggtgtgagcaacttatcaaagaagaatttggtgagagctgcaatttcgatgtggatgatgcggttcgtaagttagagaagttgagaattatttctaaggtaagatttgataatctttctttgagtttgaggttgttgtttaagcaaatgtattattcattgactcatatatgcctttgatctcaggatagtactggaatgtattcatgtgttgatttgaaacaagctaatgagataattggcattactacagaggagtttgtccttaaggctacaaaggaagacagttgttgagtttagtacaagattatattcacactagttgttatgtcatataataatgataaaatctacttgctatattatacatgtaaggtgagattaaatacaaagcagatgaatatttttcttactctgcttacagtgagtgactttgtatgttgtaaactaaattcagtgctgttggggattttccgatttgttttcgaaatctcagtttcatacaagttgataacaaattctgcaaatgaaaagaaataagtgaaaacatgaaaacaagtatcaatgaatggaaatccttactaaagaggcaaaaaaatttgaaagcaaaccttagtggcttggaagagttcacctgaaaatcatcaaatgagacattattattatcatcataaattgtttgataattctatgctagtgtactattaatgaaactcactttgatttcttcatttagccagtactgtagtagagatgtgagcaaatgagtttgttgtgtagttttcatttgtgcaagaccagtcattagctctcttaagttctcaactgtttcaacttgtcaagaacttgcttcatcgatggcctaacagaaagcgattcaaccgtgcagattgatgcaagccgtagcaattctaacaacttctccttctcttcaggctcagtgtctacttcccacaactgtggacagaaaagctctgagcaacggccttcctttattagcaacttggcccacgcaacgatattgaagccatttccataatctgaaaacgaaggatcaagtgatctttttcctgacatgagttctaacaaaactacaccaaagctatagacatcagccttgtctgataccctgcaagtggtagcatactccggggctacatacccgaatgttccagccacatctgtagtggcatgagtttcagaaacttctaaaagcctagctaacccgaaatcagagaggtatccattgagttcatggtctagtaagatgttgctaggcttgatgtccctatgcactatgcgaggaacacacgaatagtgcagataggctagagcctgagcaatgtcaatggctattttgtgaatgactccccagttaacatttttggttgatctctcatgtatgaagctttcaaggttcccaccagagagataattgtatatcaacaacatctcagcctcaccaacatagtatccaataagtgttacaaggttcttgtgtcgaattcggcctaatgttcttatctctgcttcgaattgttgcacaccttggaatctacctatggaaagtctcttcacagctaccagaaaaccaggcaccaattcagctttgtatgtcgaaccaaaaccacccgttccaatcagattctggatactgaaattcccagttgctctaaccacattgtcataattcagctcacttggagagtcagcaaaagtcactactactttccttctcaggctgctgagtctagtcaacttttttcttccaaaagcaaagaacaaaactatcactgcaagcaaacacagaacaacagatgcacaagttactgcagcaattatcaaagtctttatcttttttcggctgcgccatttgtgtacatcgagtggcacaggaagattggctggtgaagctgagtgaggatcaggacaagactggagatattcgtttcctttgaaggcatcacaaccgttgattcgttgaagatgaggaatattaccagaaaggttgttaaaggacacatcaagttgagtgagactaacaagggttgagaaagatgatggtatcttcccataaagcttgttgtgatcaagcaaaacagtttcaagaccagaagcttttgtcaaacttggaggaatgaatcctgttagagcattttgtgaaagatctaaaaccactagagaagtcaagtgaccaatttgagaagggatttctcctgtcatgttgttccttcccaaaagcacccatttgaggcttttcacgttcaccaactcatgaggtagagggccagatagtgcattgcatcttaaatcaaggcgttggagcataaccaaatgactaatagcaagaccagaaaatgaccctccaagctgattgtaagctgcttcaaaatctgttagccttagacaattaactggcaatgcatgagaaatttcacctgat

SEQ ID NO: 42440 - DNA, 2444 bp, Cannabis sativa
  modified_base (26)..(33): a, c, t, g, unknown or other
tttccaaatttcttaaaattttgcannnnnnnntaaataactataacatacatgaccgcgagaaaaaatttaactaaaaaattatttcaagtactaaaatagacaagggtgcattaatgtatctattttaaggaggtgcatggtaaaatttcccaataatattttagtaaaaaaaataaaataaattattatattaagataatagatagatatttaatcccaaaaacaagtgtcattggatgctgttgtagaaaagataacaataaatgttaataatattgattaaaagtaaagtaaaagtaataatagtaataatttttgcatctaaagtttgggtttttatatataacataggttgcccagtccccacccacatatatctacataaaagcttaacactaaatattacagtgaattgaagtgtgtgtgattcaattacgtctgttattttgtgtgacacatcacatctatctccgggtacaaccgtactactgtacaatacattatttatgttttatttcattgcaaaatatatacataatttaagcattatatttactagccgcgcagagctggtagatctgctgagtcaaactagtaatgataattattgactcatatttaatgtttttttgaagtttattcagatttaattatatatttgagcttaaattttatcattcaattcaattaattttaatcatttaatcgatttaatatttattacatattgaattagatcagttttattaattaaatgtattatatatatatttattgatttaatttaagtttatttaatattttaaatttagtatttttttatatcgaatctatccatttaatattttaagtccagtatgtattgattagatctaatcttaaaatttaaatattaatttttatatatacatatatattttacgtataataatataaaatataattcaaactaaatgaaaatactaattaattcgattgaatgttgcatatattaaatttttagataccctatctaacatctaatttgatccaattgaatattcaaaagtaacatctacacaattaaatatttaatatttaatgctcaattataaataaatccatcgattagatttagatcaatttatacacaccccgtacatgcgggtaaagttatataatatggggattttcattttggtatgtgaactgaaaagaaaaaggaataattaatagagagaaaacaaagaagacacagaaaccatatatatcgggaattgtgaggtggagcgagaggaatggaggggtgaggtgaggacagagaactcagaagattagaaaccagaatccaaaagtaatattactacaactaacccttttctctgctatatcacatataaatatatatatatatcatacatggccattatgggcactttttgatttgagcatcttcaccacctccttacttttgttttcttctaccttttcaatcccaagttcccaacacattaattaaacaaatacaactcttctctctctctctctctctttattctctctcaaaatcctttctttccttctttctcttctaaaacagggatctctgtctgtctctctggctctgctctcatatttgctgcaacaaaagggtgaagggtccataatcatattatttagttttgttgaagccatgccaaggatgcaaggctaggcagagatatatatatacactcactacttcctttccttgttttgtttctctgttttggctcttttttcttattttcccattatattgcaaagatgaacatagaggttgaataccaagaagtaagttattcaattaaatctttttcttctctaaattatattagctctcctacacaatatatatgaccatgttgttttttttttcttttatttttttttaatggggagaaggattacattaggaacagaagaggagtacaactcttcacttgcagatggttacctttttcttctccaaaagctcttgtttttctctgtcacggttcgattctctctttctctctctctctctgttttgtgtgtgtgtgtgtcttaggtgaggttgttgagcaagcattcatggtggttttgttcttttcaggttatggaatggagtgcagtgggttcatgagaggtaatattacaccttatttaacaactttgtttactaaaactatgtccaagcatttctacctaatcaattttactaaatgctcttacaccatattcattcccccaccaagttgcactttcttgttttggatagcctagtaccacatgatatataatttgtttttatattacaatgataagaatacaatcatcaccatcatgaagaaaattataaaggtggacctaaaataataagttatattattaactttttttcatatgtgatttatgcataatgtctcttccattataacata

SEQ ID NO: 42441 - DNA, 5363 bp, Cannabis sativa
catagacacttcatttatactaactgatctaagctaactagagttagctaaactctaaccgaaccaacagaatcaagagattgattctaaataacttaactaacataaccaacacctaaatctgttaccatgtatggagcttgtggatggtattctttttactgtcaaatgatattaatgaaaatgcgttataagaagttttcattggaaggttaacctcatcaatttcttagttgttttgtgacttggtgatgagtctatcataataaaaaataatttgaaagaaaagaatatataactttcttttcttatgtgcaaaatcggaataattaattaattaattaataatgttaatgctaaaatgcttattctttctggtattggtaaacttgtcacataactaagccttcctacatcaattttctaatattccattcgatatgtgtatgttattacttggacaaaacaaaaatgactcaactctattttcagattaaccaaactcaattgtcaatcacagaacataacagaatttcacaattttccattgcttctaaacgatgtcgtttttcaccggtttgatcattggcctagccatcggccttgtcttagtcatcgcctacgctcgagcccataatgctagatccatgcgtcgttctgatctggtactctaatttatttatatttttcctttgaatatttgaccataaaaaaaaaacaaaaaaacaatgcaggcaaaaacggtggctgcttttgcaagaatgaccgtgaaagactcaaaggcaatccttggacctgagttttaccctccatgggtcgtttttacgcagcgtcaaaagttgagtttctatccttttttttacacacttatataaagtatttggcatattaatattgttcaattttttttttcttttttattacagttgaattggctgaatcaacaccttaaaaaactttggccgtacataaatgaggtgataataattaatattaattatgatcattgtaaatgtaattcaattcatttatttgttattaattggggtatataggctacatctgatctcataaggagcaatgtggaaccagtgcttgaacaatatagacctgttattttatcttcactcaagttctccaaattgacccttggtacagtggctccccagtttacaggtttgtgtttaattattaataatgacctgataataagattagagtaatatcttattgtaattggctatatgagattcattttatataattgaagcaaactttgaaactttttagttgatactcacaaaaggggtcaatattgtttaggagtttctatagttgaaggtgagagtgaatgtagaggagtgactctggaattggagattcagtgggatggtaatccaaatatagtactcgatgttaagaccagagttggtgttaaactacctatacaggtactaactaagttgtttggtactataattaaaagatgtatatattgacaacattttacttgggttattacttattttttttaatctcatttgtcttaggtgaaaaatattggattcactggtgttttcaggttaatcttcaaacctcttgttgatgatttcccttgttttggagctgtttctttttccttaagagaaaaggtgacattataattcatcttattgtccttttatggacatgtccataatgtggttggagtgaactttttaatgagacaagaaagaaatggagaatcaaatgtatgtacttaatgctcctattctacagaaaaatctggactttacacttaaagttattggtggtgatttatcaacacttccgggaatttctgatgctattgaggtttgatgaacataattgtttatgtttcaaaaagtcttaaaaaagaaatacataataaaataacttacttacgttcatggtttcgtttaggaaaccatacgagatgctattgaagattctgtagcatggccagtgcgtaaaattgtaccaattatacctggggattacaggtatgcaaaatttacatatttgtattcaagtcatattcagtcattttctttatggtatggttttgttgtgtgacagtgatctagagttgaaacctgttggaagattagaggtgaagcttgtacaagccaaggatctgtcaaataaagacatggttgggaagtctgatccttttgctgtgttattcatacgtccacttcgcgaaaaaacaaaaagaagcaaaacaattgtgagaaacatcttcaaggccttgttttgtttttgttttgaaagcaaattgggaactttgttaatttgctaattcagctattaaataagactataactcagtaggaacatctctaagactcgttctgaaaaagaacaagacgctataacaaagctatgagtaaccgtgttagcagatcgtttaattaagaataaggaaacaaaagaggacgccactactcctgaatctcaaccatcgtttagtcataataccaattgcttcagcaatcattaggccctttgtttctagtttttcccttgtactaaattgtgctcttcataattgtacatttgacagaataaccaactgaatccaatttggaatgagcatttcgagttcatagttgaggattcatctactcagcacttgacaataaggatattcgatgatgaaggtattcagacctctgaactcattgggtgttctcaaactcctttgaaggacctcgagccgggtaaagtgaagaatatttggttaaaattggtgaaggatttagaggtccagagagatacaaagtacaggggtgaggtaagattaagaatgttaatattatgagtaaaaattcattctttctttcaatgaaataacaatgttttcttcaggtgcaattggaactcttgtactgtccttttggcacagagagtaacattaaaaatcctttcaatcctgactatgcattgactagtctagagaaagcctttaagagtggaatagctactcagaatcagaagaaggatgtgattgtaagaggtgtactttctgtgactgtgatatcagctgaagatttacccataatggatttgttgggaaaagccgatccttatgttattctcacaatgaaaaagtccggtacaaaagtcaaaactagggtgagattttttcagtgttggtttgtatatacaaagctcatctgtaataaattgtatgtttttctcatttttcttttttctttctttcattaggttcttaatgaaaatttgaatccaatatggaatcaaacatttgactttgtggttgaggatgcattgcatgaaatgttgattttggaagtttgggaccatgacacttttgtaaaggtatcattattcttccctttgtgtttcatttattcatatcaacaaattacttctttatatattccaaaacttttaattggttttaaattaactttattttaaaatgatgccaaaaaatgacacttaatttcatttgtctccacctgaaaatattgtgctatcccactcgaaaatctaaggcagtcatcttggcctaaacataatggcaaaagtataatttgatttgcagatttgattatctaccaattaacctttatatttaataatgtttgtgagttcttatacaactttcgttcaagaaaaatatatttttcatcatatcttgtttatttcatattgtaagcatttaatgggttttttttttattattccaatccaagttactttccatcacatgtgttaacttttcagaataatttttgcaaaaaaaaaacaggaaaaaataggaagagtgatcatgacacttacgagggctctattggaaggagaatttcaggacagttttccgttagagaatgcgaaatctggaagactcaatttgcactttaagtggactcctcagccaatattccgagacaaataattgaggaaattaaaacaatgtgtatatatatgataatataaaacaatatcattaaaaataaattattagttttctgaaaaaatgtaaataaattattagttttaaatttaaaagaaaaaatgaaagaagagcatgtatcattactaagtgccaaccaatttggtacaaagagaatgcgcttttccttagaagttggaacccttttttctattcttcgtaccttctaaatggtaaaatgaacggatattaatttgtggtaaaattcttttaatatttacaactgtcacatataaaaactctctttcgttaccattttattgcactcaactcctattccgttgttaatgccacctaaatccgttaaatgcaactaagaaacaactagcaacattttattaagctacatgtaatcaaattactaaattaatcaaaaaaaaaaataaattgggaataatatagttacttttatatataaaaaaaagtatgatttaacaaaataattaaacaaattacaaaattgaaaaaaaaaaatctaaatcttaaaaattttccaactgattttcatcgattcaaatctctatcatattcttgtctcgtgttttcaagaacaggaaggtctttactcggatctgcaaccaagtttgattaatgctcgacgagtacttgtccacacaaagtcttgcaatcaccactataaaattgagctttagaggtagtttttaagagttttcagcatcaattttggtaaaattcgttgtcgacgttgttccaggcgaagatataagggtaaaaacaatcgacgacataggggtcttatggcgtcagttattatgaaataactgacgctacaaggctcctatgacgtccattattgtataataaccgacgccataaggcccaatggagtcagttattatgaaataaccgagccataagatctttctatgttttttttttcagctttacaattttgtgttttagtataatttttttatgtatattattttattattaatataattaaatcaagtataaagtatatataataagcataaataaaaattaaattaaaaagttaaataaatacacattaacgttgggtattgatttgagatggtgcaaattttacttcgagtatgtgatggagtgcagaaagtaaggtgagtgaagagcacttagtagtttttgaatggcataattttctcatttgttaactaatttagcaatgtaatcacttattttttatataatttttcaagattaataaaatgaaacaataatttagggacccgaataaatggaaaaaatcaaaggaagggctaaactttacatgatttttttttaaaactttgaacattaatagcttttgatccggttgcccgcttgaggtgattttttttttaacttgggtatt

SEQ ID NO: 42442 - DNA, 3109 bp, Cannabis sativa
aaaatagcatttccaatcgggcattggaatgcatgaaaaatctccttaaattcatccataaaataattatcgatattgttccggccagagatctaatgaatttcgtcctgagaatcgaataaatgaaatttctctttttgcgaataactatggagggttggaataatttaatgtttcgatctccctcgctgagctaagtctcgcgcaatttctgcctccaaatagttttctgacgagccaaaatctcgtccatttccaggagaatatccaccttaagttgggcattctcaggggaaggaggcctgagctggatatcaagaaggaatttatccaatagcctcagcttctcattgcacaacccaaactattgtttattccaaatagctagctgctttatgatatttgagagcctcaaaatcagttggaagctcttggcgccattcaccacaagttgccacgcacttctgaccacctccatacaatttggatcacgagtccaagcatccaggaacctaaatggtttgagacaacgatcctgctccaagagaagatcaagaatcaggggagcaagttcagaatccttaatagtgagagctttcactcccgctttagggtacatcaaaatccaattaggatcagtaataactctatcgaggcattctttaatcaaatccaaattacttctctttttagaccaagtaaagaagttacccacactacccaagtccacccccagtggcatcgatgaaatcggtgaacaccaaagtctcttgagagtaagctttacggcccccaagtttttcggtctgacttgatatacagtttaaatcacccaagagcacccatggatgttggaaagcactaacctccaaagccattttctcccagaactccttacaatcaccacgagaaggagtagcatacacaaagacaccaaaccaaaccttctcgtgaagaacattcgtgaatttgaccacgatcataaaaaaatctaaactaatgatttccacctcaagcccagccttccaacacaagcatagccccctgcacacccaatagcctcaactatttcagcataaaaaacccaatctctgccaagtgctcctcatacgattataattcaatttaatttccataagaaaaagcatgtcaagatcgaccgaacgaaccaaaccccgaagggccttaacatcacgtgattgacccaaaccccaacagttccaggatagagccttcatgaggtattggggagcatgatacggcttgcctccttggccatcaaaaaaatcctcagttataaggatttcattttgcacaattttcccattcctcattttgccatcagataacagagacatggaagcattatgatccaaaataaaccctctagaagggcgagaatctttggattgtggatcatgatcatcagcatttgtttccacttcctccatgagaccatcgtcttgttctagagcaagaaggctctctggcttatccaatttacgtttcttgttataatttcttgccaattcctggaattcacattcatccaccattggggtcccctcgttagggccagtctcccctctctccacggtagggaagtgttgagggcaaaccacttcctccacggtattgagcctttcaagaaatggagctttttctttagggatctgagaatcatgcttgagctctatcatggagttggtactcatttttgcaaagacttcttcgacatgaacgacatcaaaaaatgcacattaaggagcaaggctttaaccctagaacacaaagctctaaacattacgatttagttttttcctcttaaatccagaagtcgtaaattcaagatccgttaagcttccgaaaatgggtcttataggaattcctcttggcttagtcatcttgcaggctccataaaaaattttcttgttggccttgaacttagatccaccaagggtaaatgaacccctgccaccactattatcaacctctaattgggccttagtcgaatggggcttctcaacagacgaaatggagatttgcctaaatggatgagggcattggtcctcctgatccaaagatggaataactttggagggatgagcccgtctctcgtcaacgatagagaaggaataatctcctccttggaaaatgcaaccaactaacttcaccgtcgccattggagcttgtgtacccgaaactgagttttcgtagggaatagcatcagagacaaactcattttccatgtggattctatccttgtagtcttcgaccgcaagcaccgcaaacccattttcaagtcttgacacatgcttaagccacagaccgtaaagagggatgctgcgtccatcatcaagtatcataatttactttttggctaaataagcttcttccagatgcctgatcataccacatttgtagtagaataaaggaagtcattcatacttgaaataactacacactttccattctcatcgtccaagcccgcacccactagcagtatgttcgagaaattcaaattgacttgaaatctaaggaagttattcctgatgactccattaatacgaatcttgttggcagtaatgaaggtgccaaccctgttggccaacttcttgatgttctcattagagtaaaatctatagggcacccctaggacctttacccatattctcacatggttcagatcagcagatgcccatttaccatgaaatggcatcatggtcaggaggagaaaaccaccacaaggggaccacggtcccatctcgaagatcttcaaagcattattttctttagtgaaatggaagatttaggttttagggtgaacctcctatcaacgccatcctcggttgacgttccatatccctacaagaatgaatatcagacgaccattactaactttccttttcacgaagaacttacccaccaccgatctacgaataagagccttagccgcgtcatcatcaagggtgaggtcaagagagaagtcattgacatccacattcttcaccaagttaactacctcatccaaggcagcatccggagtagcattcacaagattaggctccatgtaagaaaactccacaccccgcaactcttggatttgata

SEQ ID NO: 42443 - DNA, 4630 bp, Cannabis sativa
  modified_base (33)..(45): a, c, t, g, unknown or other
acttaacatagtatactgcagtatgaaacttannnnnnnnnnnnntaaaaaagtaaaaaataccgcctcgcagtatttttgtaaaaaaattataaaagttggtatactatataaatttccctatcttaatgaccacataatctaaaatcaataatggtagaaaagctatgctaagttctagtatagttttactcttaaaatgttatatgtgagattataatagacaatatttttagagttgtttatcgttagagtactattttaaaaatatcacgacaaatcttacgtggacgagataaaaaattaaaaattaatattttaaaatgatgtgtacattttaacaagtactgtataatttattgaatatgttttcaaaaggttggccccagtaagaagtggcttcatgtaattggccttggaagctaagccctattctaagtcttggtctttctcttctattctcttttcttttcttttcttttcttcgcatcatcggcctcgcgtacctgaaacgcaccaccaccagccatttttgctttctcttctctaaaccctttctcatggtaatctattttttgggtcatttttaggatatggtattaattaactaagatatctttttatcgctcccaatttaattttgatcccctttgctcactttctctgactccttttctttttagaaattagggttttattttttctttgaattattataaaatgaatgaacattagtacagttacagtgttttccatagattttttttgttatgtagtcatccacttatatatatatttacatgtttcactaaagttatcaattttattatgtaggctaacaggcatactatcattttgatgcaaacttctcagaacagagcaacaaggacttttatggattatgattcgatcagtcaagcaatagatggtatgtttttagtcaaagtagtctttgttttggaaaattgttacaagattttcaagggtaaacactcctttgttttgtcttgaaaatcttgaaaatcttgaaaacacttgtaaggggatcaaatcttgaaaacagttgtattgtatcagctttttttttttattgattcctttgtcatcactgtcctcttattggatcacaacaaaatgaatctcatcatcaatatctgaatttatggtactgtactgggtttaaactaccaagtaaaagtggtttttgctgttggattttgtataggtgtatgtggactatatgaaaggaagcttaaggaattaaatccagcaattaggaacatatcttatgacattgcagatctatacaatttcattgatgggcttgcagatatgagcgctctagtgtatctttctatccctctctttgcatcacagcattcaaaacctcaattctattcactatgcaatgaattttgagaaacgttttcatcctattgattacctatcagcaagcttattcgtaatcgttccttagatatgtgtatttttcatatttttttttttgcagttatgatcactcagttcaagcatacttgccatatgatagacagtggataaaacagcgaacatttcaacatctaaaaaagttggcccactaaatgacaaggtttcattgagctggagctctgaattgatgctatcatctgctgatgatttgaatagcagataaacaaaaaggattgtataatgtatgatttgtgtgagatttgcttctgatagttgtgcgttaataatgaaacttgcatattatctttctctgtgcagcgcacatgtaaaaatagtataaggatttctggtttagtttctgttgtgctatttagattttagagtcgaatatgcacttctttgactcgtgtaagccttcattgttgatgatggtcgtttggttacatgactgaaaatcaacagcttatataaaaaaaaaacatttcatcctgttagattattatagcttcaagtcataatttaggaataatattactgattttgttgtacattgtaacattactctataacagaatggtattgtgttggagtggaactacattcctgtttacaacctgatcccatgtctatacgttgtaaccagagtgtttgcttggggaggagattttataaaagggcaattttctgttatagcccaagggcaattttgatgaggagtgatgttggggttgcttgtcagatgtggggtttaggagtgatgttgatcgcgctttagcaacagtgaaacaattctggcgacccaaattcatcattaattctatcaaattgacctgagaaagatgatatctcaaagcagtcgacttgaaacgtgaaatccaaatgtgaaaattaattcaaaatttgaaaaactaattattgtaaactaaatttacaaattattaagatgtagacttgtaataagtgatctcgagttttttgatcaatctaaatcaggtatcatctaaaatacttataaaaacaatctctcaattttgattgttgcattaatgttgattttttttgaaaaaacaacgttagaattattcaatttaaatttttaatattgcgacaaaaaataaatataaaataacatgtaacaaacaaaagtgtatgtgagagaatgctaattttaagattcacgtccaacattacgagaactcttccatcttaaaattcttggagacaattgttaacccaataatttcaaccaaatggagtaatctcaaacttgacattactctatgagggttttaaaaggcccatcatgtgtttgtaatcatttgaggtattttaaatggaggtcgatgggcacgagtaaatttaataaggccaacttaccaagcaaaaattgttggtgaatttagataatgatacgtttagaattgaatttggtcataaatgtgaaagttgtagatctctttcttatctttgtaaagcatcttgaatcgtctgattccgagtcatactgaaaaagttatagccaaaatactaagtccactgagggcgcatcaacctcctacgaggtgacctgcaagttgtagatctctttcttatctttccaaaaaattttgaatcattcgattccaagccttattaagagagttatggccaaaatacaaaatccaccgagagtgcgtcaacccagtgcgaagaccccctgttggaaggtgacctgtgaagactccttgtttgggaggtgacctgcgtagacccctacgaggacctctttggtagcgactcgttgttggctcttcgagggtttggccacctgaagacttctcattgtctcatttgtctcgacaatgctcaaacgattcaactactagagatatagttagctttggatctaaacacttagtctatgacaattgaatacatgcgacaatgtattaaacttgaataagagtggcgttataatgatcactataatcattaatcataaaagtctatctacaaaacagcagtaatacaatcaaagtaactagacgtaatcattcaaattactcttacttaaaatatcttatttgggtgtaatttcttcaattttgattagtaatagttaattatcaaaaaaaaaaaaaatagtaatagttatcggagggctttttttttcaatgtagaagggtatttttgtcagagattttgaaataaatcttgtaggctaactcttagcccgatgattctcgagtctcgatctctgaaaactgaaatcgcgaagcaaccatgtcagggaaaggtgccaaaggtttgataacgggtaaaaccccagccaacaaggacaaggacaaggacaagaagaagcccgtttctcgttcctctcgtgctggtcttcaggttttttattctctttaattatctacattttaagcttcaacttgtggattctttttcagttttggttctgagcagggttcatgtgtttgtttttctttcatagcttcattctttcaactgtgtctgaatttgagccatgttatttgataaaaaaccacttctgatctgtgtttgagtatgggttttttttttttatttatgaatatctttccttaatttttataaatatataaatctaggagatttagatttcggaaggatagtttagggtgagttaatacaataaaagagaagagagagaggatggtagtgatcaatagtgaagagtgtgagtttcaacgttgaatgggtaagcgttgttagatctaattgtttttcctgttttatcttcttaaacatttctgacccaaactttgttatctttgtttcaaagtcttatcttaagttggaaattgttgaacactacaactgttgattagatttctgatcattgtttgtgtcttttgcatattgcttgatgtaccatgccaaaatgtagttgctttaattttctcattgtttttaggaacttaatcttggttgtctactaatgctaagaaatcttgtagacacaaacactagttacttgaaattcggagcacgagagaattacagtcttcacaagtggtttagttttactaccctagtaaagatacaagttggtttgatttaacatttagattgatcggaagaaagaaatcttgggtagctctctttgtttgattgtgcagtagatatttcatttctttcttctataattcagttcctg

SEQ ID NO: 42444 - DNA, 4291 bp, Cannabis sativa
taatttttttgttgtttttatatttttgtgaaataatccctaattaattgataaaaaaaaaaaggcatttttcatcatatcccttattatttgatatccaaaaaaatttagaaagtgtaattagcctatagtgatggaagagtgtgttttagactagtgcgtaacgtaacccaatccccaactactggtttggatgactataaaagaaaagttggcaattggataagaatgtttaagtgtcgccacgtttcaaaagcccctcaaagtttcattaattatatattatgcaccttattaataaaacattgcttggacatcctaagtaaatgctaacaagcgggaagtggagagagagagatggtcttgccaatcctctgtaagtaaattatcgactgtttgatttctgtttcgttacagttcttgaatatacatacaaaatgatttttcagtttttgattaatgatcacttcgttcaaatattgtgaaccttattatcattatataggctcaaaagctcggtggatcagtccatctttggccgctctactaccttcatcagtttgtagagacccttttcacgtgttgacaagtaactctctgggtcttcccagaaaacgctccgattcagactcagtttgttcttaacattgttttatgttttattttttaattgtataaaattctctgttttgtaatatcttcttcttcttctttttttaaaaaaaaattaccagaggatcgagcaaacaaatttagtacaagtatcttctgtcaagtaagtatttattattactgttttgattgatattcaaaagactttctttactcttcaagcaacatgttcttaatatgtctgcaacactcttttttttccctaaaaaataaaaccaggaactcaattatgaggctggaggtttcaagtagtgcaaagtttatagtgaaaaatgtaccaaaacctaagaatgaagtggaggtgtttgatgatattaaacagaggtttctgagttttaagaagcgtgtatatatgtaagtacataggaaagctaacaagtatgtttgttttgagaaatttagttctgactttactttattgggcacaagttatatatgttgtactttgtattaacagggaaaaattggagcattatcgtagacttgctgaagtacaagtgcctaaggtatgttattcataaacttgaattctcgatctttctcttaatgctccaattgggtattgttactcttttattttgtatgaaccttctttctaagttcatcttaatctttcttataaatcaatgcctgattctatgtacaaacttacaagttcaagaacagttcatggtgattgcttgtgcagactcaagggtatgcccttccaacattcttggatttcaacctggagaagccttcatgattcgaaatgtggcaaatcttgttcctccacttgaggtatccgatcttttgtactagctgctttagtaacctatacttgaattgttgaactatacatttatgaaatttcatgttcatcctttttttttttcttttttgacagaatggaccatcagaaactaatgccgcccttgagtttgcagtaaacactttagaagtatgtcaatataccttattaactctggcttgcaatcagtactatattttaagcctttttgttttttgttgataaaatgtgaagttttgttgctgagttttaggttgaaaatatattagtcattgggcatagtagatgtggaggaattgaaaccctcatgagtatgcaagatgagttaaattcaaggtctgtttatataaatagagaacccctagcattcttcattttacatatttcttactcgctttctatatatacttaaataatataactatggcttagatagtagttctttttctcatacagctttatccacaaatggattaccaaagcgaaatttgccaagtttaaaacgaaaagtgttgctcagagccatagttttgatgagcaatgcaggcattgtgagaaggtaatcaaattaagctctttctcgtactatagaaagtttcttaagtcttataattttgatttttgttttaggagtctgtcaaccgttcattgttgaatttgcttacttacccttggatagaagaccgggtaaagaataacctcctttcaatccatggagggtattataatttcttaaattgtacgtttgagaaatggattcttgatgtcaatattgattgcaacactgatggggctaaatatctgttcaaagaccatgaaatttggtcatgaattgaacctatccatttaataggacagtgctttctgccccccattgtaatgtattactaattatgtatatgctatatcttaattaatgataaatcatatcttcattccaaattagtctttgttataaatacaattttatcttacataaatagttctcttctgaaatctatcaaattgtgttgacattattacaacttataaaaacatattatttatttgaaggagtttataagattataataatttgaatttgtagctggactaatttaattattttgtttgtacatgaatcatcatgcgtctaatttaattattttgtttgtgcatgaatcatcatgcgtcagtttctcaatccaactttggtagaaattttaggccattaggacgttgtttggtatggtggccgtttattggcttggaaatgggaataaaaatgtaaaatgtaattcatatttttttttttaaaaaaaataattgtaattcatgtattagaggaaatacattctcatatatgttttttaagaaagaaaataatatttgtttttggtaagactcgggaaataatgatatcaactggattaatttttcatcaaattttatcgcaaatcatcgctaatcattacaaaattatcgttttgcattgatttgacattttttttgttgttataagcacgttttaaaggactatcgttaagcatcgctaacattatctattgtctcaaaatcaatttttcatagaaccatcattaagcaataataaagcattatttttgcctcaaaaattatattttatgggattatccttaatcatttatttatatacagagagagaaggcttgtgagggaagatagaaatagagtcagatgagactatgggagggacaattttgtgaaaattctaaggttcgcatttcatttttaagaaaaaattgtatcattaaattattgaaatggaagtgtttacaaatggtggaggatcttttccatccaaaattacttattgtgtagcctaaaaaaatattaagctaatttatgtgctgtttgtaaatagttatcaatatgtactcctgaaaattagacaaatgaacagaaataaaaatataaaaagtaatggaactctcaatttgatttgagtaacctaaaaattaatgtgaaaatgtctcgtttagtatacatgatttgattattaattaagattagattaagttgagttggattattttaatattatactatatttgttgtcgtataggacaaaatcggtataaataattttttaatataaatattttaataattaaaataataatgttattccaaattttgtctacctaatgtagcatgtccacataagtcaagattgaggaacgtggaatacagctttatcaatagcaggacaaagtttccttaccatggcaaaaccgtcaagcaacaagtgaaaggagttaagcaaatcgtcaagaagtttgtacaaccatgtctagccggccaaggggagttcatagaccggccagaggaaagttataggtcggccagggtttgagcacaagctggttggccaataaggctatcacaccaagaaaggcttgttcgaccaaggaagcctgacttttacaaggaaagttgtacaataaagttattaaggttggccaacacatactaaggctagccaacacatactaagactggccaacacgtaccaaagctcgcaggcacatggaaaagctggcaggcacagaaagctggcagacacatcctaaggctgcaggagcaatacctagccgaccatggtacagcataggccggccagcctccaacaaatggtaggtcggccagcttctcttctggcagacacttttggtgtctttgcagctttcaacttggacagatactctcagctacgagttggcttcaacaacccacaaaaataggggttcaacttcagatatttatctattctttaggaataattaataggttattttcttatatatttaa

SEQ ID NO: 42445 - DNA, 12035 bp, Cannabis sativa
aaggaactgacaacttttaataacatatttagtacaaatttgcaagaacttacataattttcttggcttgaaattttcttatattgtttgcttgactttggtaagttgtgacagagatggtatcttgaactcttggtgtagttttttttattcatctcttcaacttaacgcatctatgaaatttctatttaatagagttaataaatggaagtaactttgccttattagtatccgaaacgaaagttctatggttatgattcctggaattcgattgcaggggagcaataggacagccaaggctattggttcctgttgtattggtcatgctcttcaaccggtggaacgggttagtatcttcgatttacatgcttttcgttggctgttggttcatggtttataaccattatttggccaattggttccatacattttgttgtgatatcaaaatggagcaagttattactcttgttttttctcttcaacaatttgtgtttgttgtgtaggattcttgttccggaatatggcttcatgcacttggaattgatacccatgttggttgggtttttcacttataagattgctactttcatccaagctatagaagaagcaattacggtggttcaaaatgacacaagtacataaatgtgggcaaagtttccatttttacacaatgtatcatagtactatttgtatttcgaactggcatgaatacaaaatatttataggataaacttctgctgtgaaatttatttgatgtttttataccatattcgcaatctgcaattacgagggatgaatttttttttacctactaatcggtttaagaagtggatatgaaatgggtgagaatctcaaatattttataaaaactggaagtaatatgttattatttcttccatattttctttgcaagttggtattagagaagaaaagaggagacaacttgatgatttttaggaatattagcagtaaacttccatcttttgaatatgttacacatgatttcaatcaaaaaaattggaaggaataatataatactttctattacttggggctttgttggcttgcctctaggctccgacaaagcttcggccgggagggtctattctcctatggcatctcctactcggaaatggcgggcttcttctatttcatacacgtggcttctttggtatgtgatcttagtctgtgtgaggattttcttgcaaatgctgtggatcaatggtgatgcactatgctttgaatgagactgttagaatattttatgtggactaatataattaagtgttattaattcaggttagtatataataataattatataatcggtaattaccatatgaaataaatagttaaaggttactctctaccctcaacaatcattcttaattttctaataataaatgtaatttttgatttctaatcaaactattaatcatgcaaataatgttgaaacagtcaattatcacaatcttcctattgcattaatcaaggcgaagcgctcaatagttaactcttctacctgagaaataaatccatcaagcatacaatttatttaagttagataaaattttaaattcagtggagatatattaatttaagtaataaattaatgaaacatataattcatttaacaagtttctattcttcatcacaattacaaatatctttgacaatattagaaaattacaatttatcacaaacacttagaatcctagactatatgtgaatagtaattctaagatgacaatagcttaaagtaaaatctaatttaatgatcatctaaacaagattaaaaaaataatcatgacattaaatatagaagaataaaagcaattcgatataataaaaactagaaataaatattcaatcatagaaattaaagattcacgtctcgagttttgaaataactcttaagaaactactcagaactagacattataataaaaatcataataaatagtaagagtttaaggagtagaaaaaaaaaaactataatttagaacaaacgatgtcacaatctttgtcctctctctctctcagagatgaaataatcctaattttttcaaacaatggtctaactttttttgtattttcgaagacccaaacaatgtcaagctgctacatcaaacatattaagtctttaaatatttttaatcaaacaatcaataaattggattgtaagcttaaaatatacattaaacgatcgtgaaagcttgaaagacaaaccacaaaatgtcagtaaaatgagatgctgtcttgttataatcaaatatattttttacacagtaaaagaacttgtctacatagtacttccactattttatatctaacatctttagtatttttctcctgttcttcctctgaactcaccatcccagaaaagattattttggtggaataaccataaaatttgtcgacttcaagtcagatgaatagctcttctctaattagtcatattcccaattatttaactgaagaacagccgtttttgtagtaacttcataacaatgaactgtcatttcttgcttatcacacgcacttggattagtagcccaatctatcatttaaggaagttcgtccatcaccagattgtcctgcataaattataaatgcaaatgactccactaaccaaatcaaagatttttatattttttaagaggatcaaataccaatgcttctaaaatcactaaccttcaggaggaacccatgtgtcacagtctgaatttgagttaaggaatgaaggtttctctggaccaagtactcgcttaggctttttatgctcctttgaagtttcttggctctctgtagtattctcttcatctgatgcataacgccccttctggtgttttagcagtaatgccacagcatctagtgccataacttcacctgaggatgtggaagtagtagtctgctgacaagcaccattgttaccctcaagttctttaatttgcttccttttcctgatgatcagaccgggagctgcattttcgatcttgggttcctccacttctatctgggactcatcagcattgatcaacaccttgtttcggtctttatagtcaacaaactcatcagagtcctccaaatttagaggcgctaatcgtcgattctcctcatcttctttgttgttaacagctccgagccattggggcttgggggcaacataaacagcagtttcaacctctcctgcatcctgtacaatttcatcgggcttcttgccagatctccctgattcatctgcagcttccactttttgatcaatgacattcgctggtttttcaagctcagtgcttttcttcggttttacaggaggttgcttcttcacagcaagagcaggagtttgagattttacaggctttggttcttgtgatttcagaacccttttcttagcagcttctccggttgggtctgcaatcttcagaaggtacaatatcctatccagatcggcttggagagctgttaattcctcctggagttgcgtggttgtatcaatcactgacaaggaaatcaccaagaaaagtgagttgactatcaggttaaagggaatttacagaacaaaaaaaaatacataaaaaactgctctttcgttcttatctgtcagtgtcaaccaaaaaaaattgtgaacatgtatttgatctattttcatcgtagcttgaatacaaatatgaattaaccccaccgcgtatatatcataaaatttattttaacttctgcaatatcttttcttaaaaaaacaaaagaactataaaaatcaatcattcacacttttagaatctaaaaaattataaaaggctaagcttgaaagctttttgaaaataataagggcaaataagaaaaagactgaatatttctttttcccagtttcacaaactataggggtaaacaaaagtgtttcattttttcttactattaagtgaatacgttaatgaatgagaaagagaaatacttctcgtaatctgtttctcattaaggattattaagcttatctaggtactaggttttgaaataagaatcctcaccaagctgagatgaaatccctgacataaaagcatcaagtgcatctccagtttcagtttcttctgttttttcagatgctattttgtttttctctgccaaaatcatctctttcttgtcttcaatttctttcatgatcacatctctcttatcgagaagggtatctgcagtttcaaccgatgggttttcggcatcctttttaccagaagatttcttctttgtccggtcataaaattcatcttcgtcactaaacaaaaatgaatagttataccaactaattagtcatttagcaatttcagtaagagaaaaatatatcagccattatatatttcatttaaatttaaaccatgatgatattagtcaaacaagcaatccagaccacaaatcccaaatcttaggtttaaaatttacaaccttctatcgcagtaacaagtgattgtcattgacaatgtacctcaaaaattcttcttcttcttctgttactcctttctttccatgagaaagtttccctgtgcgtgcaccaatactttcttggatactctcattcagtgtatcttccagattttcaagttcttccatgatctactaatgaaaagaataatatgtcagaaaaagttatttaaacaaaagccaataaatcatatttccattgtttgacaaccacatcaacaatgaaaatcaaaggaccatgcaatttttacctgagatattctttgttcatttcgagcaatctgagtttgctgcccctgtgataatccaccttgagatatgtctttagcacgaattgcgtctatttctttcttcatatgagaaatctacataaatatgaaaaaagagtagaattatcaggaaaaatcgccataaactaaaaatcttgaattgtatatatgaacgagaaattcctctcaagaagtttcagtctttaaatgtaaatcataagaacattccacagatgctaaaaaaaatgttacttgattgttcagttgtactgaatcttccgcaatcaaccaaaggtttttcatgaaatttagctttatttacatactgaaagttagattaagtaaaccatggatacactgacagatataaataattttttgaaaagaaacaaaatttgaaatgcatatatgaaaaaggataagatatcttcaataacgaaaatgcaaaacaaaacagctatactgatcatattactaatagagccataaactgtagagagtgatctagtatacaagggaggaacattcatcttaacgttagaaaggaaacactattgctgtcacattaggcgtttcaggccacaacagatcaaacaactaaccttctccattcttttgataactttttcgcgggttttcgcttgtttctctgttagttgtcctttgtaagtctgccaagttacctcatcactatcatcctaaatgtaccaaatgaactaattagtatggccatcaagaaattaaaagcaaataatagccatagtaactcaatgagctatgatatgtaaaatcatattctaaagcttataaacctcagcctcttcaatagcatcctctcccatgccccatgagacgccatcagcaagagatgcttcacgccttgctcgttgaagtgaagcttcccgatctagaacctgttctcgaatcttaatatttcttagtctctccaagtcagcttcctacaataggatcacagtgttaataaaagataaaaaaaatggtactgcagtaatcttgaaagtagacaagatggcaaataaagcagaacctggtagataaagtttttattgatattcactttgaatttaaaaaataaaataaacaagaaacataaaaataaaaataaaaataattcaacaagacattgaaaaggaaactatacaacataaaaatagtcttactggtggcatcaaatctgttggtccttggaaaatgtacaaacgagatgacctgtacacaataaacagtgagattaactttaacaagtgtccagcaacaagcatcaggtcaaagaagcatgatataaatgtaacttaaaacttctacattaactcttcaattaaatgtttaagatgggtcattgatataacaatgcattgcatacattggtcagcttgaaaaaataagaaataaattcataaaatatgaagataattaatccaatatctcttccaagattgactatccaaaaattagactagcaatctaacctgaatattagccttctaatacttgtcaaaataattatatatggcagagcctccggtgaagatgttcctatggagagcttaactaataggacattgatggtagcattttataaaggaactaatggacaatatctgccaacattttagtacccaatgcatttcagaaacataacacaactctacatgatcacacaacagtttaacaccatgttttaggaaggacggaggaggttgagggtcagatagatgggctgagctcatactagtcatcttagcataaacaaattaagagagaaaagaagaaattaaaacataaatcagtgtctaaaatttaaggaaaacatagtttaatgacaatccaaataaccaaattgagagttttgtgtggggaaaggggaagataacatactgtccaaatcgaacgacatcaccaacatgtaaatccacatagctctttttcttcacctgaactcaaagcaatagaagagaaaatttgtattacacactacagggcttccgtaacaaaaatagactgcaaaaaagacattaaataaaactataataagcaattttttttatgtacatacagaataaactcgaagaacatatgatggtaatgaatggtgatatagcttccttcttttgattgataaaataaaacctaaaccacaaaatataacttccttcctctaattgaaatgtatatcacatttcttagtcacaatcaaataacacgacacttcaaattttaccctcgaaaaaagatcttttctgaaagaaacaatattaagatatctaacttgatgcagtgtaacaatgcatcagtaagaggaattggttgtcagcatacctgattcttgttgatgaaagttccatgtgtactaccaagatcataaatataagcttctccactttttttgaactgaagaactgacatgtagaaaacaaattagcatgatcgtgagaaagcaaaacatgtataaatataaatttatgtatgtacaggtactgacaaagaaatcatatgtacagatgcagaaaatgtacatatgaaatagaaatacaccactcgtgcactacataacgagaccataaaaaatatatatttagatagatcatggtacacgcagaagagatctatcaaaatcttatacagctttgcctacaagaattccacggttaatgtaagaacactaacaatgatgtgggaggtgaacgatggtaagaaagagcggaaataatttacagagataggaaatgtggggaagtagctattccaagaagtgaaaagcttagttcacaaaactggagaaaatgataaacactgaactaataggtttactaagccaaagttaatagctttcaaatgagaacttcaatttcatgtcatagtgcataattgatacatcttataatagagaaagttgagcatttgagctcagtcttgagttccttctaaacacaaagcaataactatattccaattatcccaaaacgaatgaatgaaaagaaattggcatcttaaaaagggaatgaatgaaagtctacctgcgtgaaagcgagaaatggtggggtgatcaagtacaaaatcacagaggtccacacgcccaaacatgtaagcacctttatcgtatctgaatcaaaactcaaaaatcagctacacaccatttgcaaggtccaattctttgaagacaaaagaaaaaaggaacttacacatcgaattggtctattatagaaccttctttcagaacttcaaagtagaaattatgaccgggagcttcactccacgagggaatcgtgtacggaacgacatgtcgttgggactcatcagagctctgcttaggaccgggttcgctagttttcgcaacttcgacgtttgcggaaaccgattcggattcttcgaggggagcttcattttggggttctggtggctttggctctgaagaagtgggctgtttgggcggaggaggacacatgggggccttcattgtagtttctgaatcaactggagacgaagaggaggttgtgggttcgtctagggttttgggttcggaagttggcgtagggttagaggttctgggaggaggaggacccatggcggtcgtcatggtcaggcacacactaagcgcacttggacgagccgcaacacgagaagacgagtctcgaatccgatcactgattcaattggactgtttaactaataaattcttcaaaatctcacttaagtatttcagctaaaaataaaatgaaacaggactccttcattcaaattattacgttttgaaactatttaaccgttttatcaaagtcatagattcacattctaagtgtaattctcaagttattgtggttaaaattcttcacaaggagttactaaaataagttacgcgtaactcggagtgacacctaccgaaaactaaaaattggcctttaccactagaagttaatttttactgttagactattattatcgatagaaaacactttatttgtatttttttcctatttttgtaggtctccttcacttataaaaaaagagcttcattatctcatttttcacattcataaaactacttataagtcagagattctctctctaaacttgttctttctagagtttggagtttctgatacttagtctgttgttgtaattagcatcttgtaaaatataaaaactcgaattagacttagccacataactattgcgacataggagtgaactattataaattttgtgtgtctctctaaattatttacttaaacttaataatcatctcgctaatctagcgagttgttagccatttttcagcgtcaatattttagtgttttaattgagagtcacaatttgagttccccatctagagtttactttctttgctcgaagctttgttccaaaaggaattcataagttcaagcaagcaatcaaccatgaacatgcaaagcaacactaccactcctgtagtcacgccactactcagcaagcaacaggcactgagattccccacaagaaagaagactacgagcgagtgtccaaaaggtcttaaactcggaaacatggatatatgggatcttcgcctgatacagagcaatcacctgttaggaaaactagctacgagcgagcatctgaaaggactcaaattcaagatcgtaggcctacaggtccaccacacacagctgataggaccaactgcaattccattcgaagcaattcgaacaatgcgggaaaccaatctcctccatgggattctcttcacaagtctaatgactctagaccacactgtgactctgcaaaggaaaagggacctgtagtcagactaattggaagaccccggaggctctaccataaatgtgaagaatatgagattcagagggtgaaggtccgtgaactactccacacttggaaatacttccgtgatgaacaaggtgcttagtgtaggtacttcgcccgaggtcctaaaggtcagtagtatgaatacgttcgcaagctttatcgtttagatggttcctgagatcattcccatgtggcctcgcctctcccttagatttttcgtacttggagttgagatgccttcgaaggtctatagtggaccagctgtcgtcagaatactgtcccccagtcccactatcctggtttatagaatcactggggtgatttttccttcccctgggccttggtactttcgaaccagtcccatttgcacaataagacgtttcagagcagaagagcgtccaagcccagaggcatcagtggccttctgcgcctacacaggtcagttggttagattcacgcttttcctaagaggtacaggagttgtcgggttttgagggtcacctaccttcgcctcccccttgtcctttgcaggagctaaggtttcagtgttggtagggttttcctcgttgtttctgccaacaagttccactgagggttcttctttagaatcctcttctagatctccatatttttcttggaggcgggccatcattctctccatcttttgagaaagtttctcttagcaggccaacttttcttgggtctcatgtagctctttggacactcaaaccacttcgaggtcctgctcataataataaccttccttataatagtccttcttgatgtactctccatcgtcatcttcgtcctctttctcaacatgtcagtcttttcaacatatttacgatgcttgcttaggtcaccctctcagttgtcagcttctgatgcatccccttctctcacattgcccagctgggcgtgctctggaaagagagagtttacatattccatgacaacgtcaaggccaccttaaggaatcttttttgtaattgttttttgggtaaccaccatggtttcagcaataccgtggcttagatctttcttcaactctcaatgaaagcacaaaaatatttatcgagatttttgaaaactaattatataagagcttaagaaatattaaatgcagtaatgaagaagataaatatttttacgtggttcaggcattaatgattcctagtccatgagtcagtctattggccttaagaggcttgtataatatattttacaatagtgtttacaagaaaaacctaattttgcctcttagtttctcttggagaagaagaaagcttaaaagaaatttggcagagcttcgactctctccctttcgatcccccttcctatgaaaataaacgggtatttataggctaaattgcgggtatggacacgcctatgacccgcctagaatttctgcaaaaagcccactattggagtaaaatacatgttaattgttgggctcccaagaaggtatttgctcatgtgaagaaacagctagacaatgagggattgctcaaaggtttcaccttgaaaaggagatgcttaaataaaccgtcaggcaaaaaggtatgtttagaggtggggtgcgcgcactaccatggtctgacataggggacaagatttgatcctggttagaaaaagaaataaccatcgttagggtgatctgggtctctcttcatggttgacgtccaacttcctttgtaatatcctgataagcctaatagttaataattaaggtttaatatatattatgggctaattaggtaatgagtgggattatgatcctactaatctatttcaacataaatcgtaattttttcataagtggataaataaccgtaatttattaattatgaagatttatttagcatgtatgaatgtgatatgaactgtttgtggaataaaaatattcttaagtttggcgatctttgagactcgatcggggacaaaaaatgtcataacgggtttaattagtggttttgatgagaatattacgataagttgatagtatgcttattaaagtaattagaagtatttaggatttgacctagtactctagaagtagagattttttagtggctaaaaaatggtagaattattttaataataaaattttattattactattattattattattaactgataagtttaaaacttatgagtttaattatatataatatgttttaaaaacataagaaacatacaaaactttctcctattctcttcggtgcgacaaaactctcacccccactatctattttttttttattttcaatttgaaacctagtaattcaagcttcggtagtaattggataggtaaaccattgaagaaggagagcttaaggtaagggtttgttttgttttaagttaaaaagtttagaggacaatcttctatgtagaggacacatcctcaactcactctcggataggctttatgacctatacaccgacactaaggatgccaaagaaatttgggatcac

SEQ ID NO: 42446 - DNA, 5386 bp, Cannabis sativa
ttacaagtgtcatttttttcacgggtagtgctcaccacactctcttgtctgtacaaaaacaatcacaaagcaaagcaaagcaatttttttccaatccaaccttactttataattttgttattaattaattgcatatatctaactaaagaaaacatagtttctttctttaaataatatccaaagaaagttgtactgttataggatctgattctctagtattttagtaataactcatctcaaaggcataatagataaaactgttcgctaactataataaaatataaaaagtattaatgattaggaaatgaaaaagtctcagagctataccttagtttatcatataagctaaaagccttgacgaaaaatcttaggagaagtatggtaatatcttgaatttttctatcaaatagatcgcatagggagtagagaataaataaagatgaaaacctatagctctggacatggcaagaactccaaatactctagcaccgttccagttaatgactttccctccctctctttcgattctcaagagctcgtcttctctatccggctgtataaatagcaatgacaaacaatatgttcttaatattgtcaaaaaataatattaatgacatttagagaacagctcttctatttagcaacaagaataattgtccaactgagtttatcttctcaagctctatacatggtttagtacaagaagatatgtctaaaaagtgcttgcctgacaaagcggcaaggcacttccaacatacgattaaaacttactattgtctaactataatactacaaataatgtcacattctagtaaatcttgacaaacagaaagaattccttaagggtcaaaaagattcaagagtttctataatgatcaccttctgatcaacagtcaatgggattgtttgggtcccacggcaaagaactgccctggaatcaccacaattcgatgtaataatctggcatccagagagaacagcaacaactgcagtcgatcccaccatctctggtgccacattctctgtcaggagctcattgtcagccctctccagaccagtggaaaacgccgtttcccactttctctgccattcattgtatccaatagtgtcccgagaccactcttctgctatcacttcatgcagcctttcggcgcaaaatttagctacctattattaatcaatgcaagccaaagtgttcaaaaaaataaacagttattctcaaatccttattggatggtaattgacatgatgaatgacacattagttattaaactcaaatttgctgaaatatcatttttccacacttttaagctgagtaaaccaatctcagatgtgtattatataatttatcctcaaagtagaaaatactcatctgaattgggtatattagtatctaaacatcaaagaatctaatctaatccaactcaaacacaaagttgtaggtagccacctagacaaaggacatatatgtcaaaaccaatattctcatatcttgcttcacagcaatatacatccacatatatcagaatctagagacagaacaccatattctaaatataagcatatcttctattcttagaataaaatgaaatgcttatttatactcctataaaaagatgactcactagcatacctacaaaaatggcagtaaagcgacttgtcatgaatacccaatattgggaatgtctataaatataaaaatcaaacagctgtatccaaatgttaagcctcataattagcattggacaggttataacgacaagattacctaccgtttgggcattattgtacatgaaacataaaacaactccttgtcaaccacatcacccctaaaaaaaaaaaaaagaaaaatgatgctttcctagttcctacctagtgtgccaggtggaatccagggtgaccaccataaaagcttctttgtaggtgacacgattatgagtagcagaagaaatcaacttctccaagaaaataatttaacaaatggacccaacttggtatgcacacctcactgtatggtgtatatagacacacggaggcgcaccattaggagcagtggtccccacacatttcctttcttttattttgtattgttcctccaacataagtggaacctcttgatccaattccaaaccacacccaaaccaacccagaaaactatatattaaacaattcttcatttccttcacttattctaatttattagtgagaaaattatgatatgaagaaccatataaaaataatattttattcatatttttttaatatttattatatattaaagagtgtataatttctctataaaaaaaaaaagagtatataattgaaataatatacatacaagaaaagaaatttagaaacaaatattagatttttcaatttagagtggaatgtaatgtaatttaaaaacataaggtagacaaaggacgtttctatttttagaatttagaaagaaaaaaaactgagtaaataattacactgtaaatttagaaattattatcatttattcaccaaaaacatatactagcaagtaaaaaaaaatgaaaatatctactgttggccgtacgacctcatcaattatcagatatgtataatgaaaagaaaataacaaaaagtcagtcatgttgtctgtgacgcatcgtcagtccagacaccatgtgatccacataattacagagtgggtcccactagtgttcatcatcgaatggtagtggtccgatgatgcgtctgtgacgatgttattacacaagagtgtgacggtagcaagtacccgaattcccctagaaccaaactagacacagcgaaaacaggggaaaggagggaaatgtaaaacatgggatttaagcgacacgtgtccgtctacaaatggaaacccgccatagattgattaaattctcatcgggggaaaatactaagaaagcatggacacaattgtttattctcatccgttggatgaggtttgggaacatatcacgacaacgtatctgagattcgtttcatctgacggttcagacaacgtactcgtctaatagccactcaatcaccataccccaaaaactcacctccaacctccaaacatttcagtttttttatttttcaccaaaataaaaaacattatttcagttttcagaactcgggaaccaataacaacgaaactattgattatatatttcaaaaaattaaaacacaaaatatgaaacgataattcggtggacgtttatctgtcacagaaataataatgattttaataatctctttaatttaacaattctcggatttttttttattattatgtggaagaagacaccgcctttatttttgtaaacatagtttaatttgtccactcacctaaccaaatattatttctgatttaaaaattgaaaggaaaaaaacaaaaagtaaaaatcaaattctttctattactttaatactaataattgaaatggagtacctgagagccaccatgaccatcgtacactccaaaaaaatgaacgggagagatctcagaggaagttgtagaacccggagccgtacaaccaccgacgtgatcgcacgtgcgggagatgaatcccggaacaactgccacagcgtcctccatctctttccgcctcccaatcaccgaagtgaaaccccaactcactccattgtttttcctacccacgcacttcaccggcctagccggcgcggtcaacgtcgctgcggcggttccatcgtttgaagcagcggcggcggcctggtcaggaatgataggtactaccaccgtttccgatacaagcatcgcccgaatctcgccggaattgctgctcgtcatggatatgtcgccggagctggtggtacttctagaatcttcggcggtaagtacagaggacaagcccgagctcgtcgacagtaattccaagtctgttactcctactgagtcgtctcgctcgagttgctcgtcttctaagatgtccatgtacaagagactagagagtgcactcacattcacctagagagagaaagagagtagaggagagagaaagaaagaaacgaagagagtagagagaagagttgagatgggataaaataagagagaaggagaagacaactgtgatgttgacacgtgtgaacagatatatatagtcggatggcacacgcatccgcagtgaatgaaaggaaagaaaagaaagcattgattgcaatcgtactcttttcacttttcgctcaccgccacgtgtccttctcgccctctgcccttcgacaaggtggtctccggtcgagctctcttaaaccactgttttatattaattataaatttgagaaaaaatagttctctgtggcacgtattttcgtcgttctgtgtacccgtgaataaagaatgctctgttaacgctagcgtggcggattctaattgggtgttgttgtttctttcggtggacttggttgtagacaatcaagatgggtctatttatgaggaatctagcggacgcatatagtgggccaagctagggtacaccatcactattatagctaggtgtcacgctggcagaggatgggacccaagtattaggtagaatattgacgtttttacagaaaagtgctaaaagaatgggtttttccgaaatataaacttggaaagtctaaaaacactgaaggaagcctactgaatcgccacgtggtatagttgtcaaatctctcttttatggatctgttggaaaagcgatatcggacggtcattattgcgccaagatcattcagtttagagcgcataggtggcgatttacggcatcctaaaactaaggttgggcccactctaaggtgggttgtggggcccgaatagggtttaccccgatcagtatcaaaatgacgtgtcccaaaaccgactaaagtctaaaaccttatcaaagcgcttaacggcagaaaacggggtgatcaagtcatccggaagagggctttggtgggcccactgcagggaccgggacacgtaactccctattacgaagtggttcctccacaagtgttggatagtcgtctcatgagggtcattctagtaagtctcttttttttctatcacttcaacaaataatgttttttttttattattatcttaatactataaatatatatttttaaaaaatttgataatgaattctcttaaaaaaatatataaatgtatccgtttatttttatttattttttcatttagtagaattttttagtttaattttttctataatttgtaattatttaagatatcttgtaaaattttgagaattttaaaaaaattaacacgctaaaaataagattcaaataatatgttgcacgcgtgattttttttattttatacgatgtaaaatagactctttgaatactactctttatatcataaaatattctaaattttttaaaa

SEQ ID NO: 42447 - DNA, 5297 bp, Cannabis sativa
ctaaataaataggctctacttaacaaagagaaagaacaacatgtaaaaccaatccagcactatcattaagactgaagcttcagcttgaatgactaagaaataaccaatgagttcagatcttctgcgcatatgtaaacttttcgcattttgaagtatagataagcaacctacaaaataccaaaaaaaaaataaaaataaatgaggtaaggaatttacttatagaaaataaatcaaatttaagaaccaaattttcaatatatatatatatacttatatagcaattaaaatatgaagaaaatcttatctatgataatcattgatcctccaataatctgtaatgtcttcaaaaatctatacacttaataaataacacaacaaaacacataacataacaaaaatacactaacaaaatgagaaaatatgagaacatgtaatatcactttcctttatgtacaaataaaataaaatgaaatatggtgaaaaataaagttttgaaaaaaatttgttaagaagtaatattataagaaaaataaaacaattcaaaatataattcaatagttatgatattaaaattaacatgagtagaaattaatacaatatttcttatactattgaagtaataaagtttttttttaaaaaaaaaagaaaaaaaacatcgttacaaaaataatgtacataaataatattttattttggaaaaaaaattaatttaaaaaaatttgaagaaaatagaaaaataattatattaggatcatttaaaatataaggaagacatttagttaactactattactaataataataataataataaaacaattacagaaaaaggaagcgccaaagtcgtccatcacgcatgaaaaacggactaccacttcagccactattcatatgcgcaaccaccgatggcaaccgacgacgaacctaatgccgcatggaaaagaatcacgatcggaatcttactagccgttcatctaggcttggtcggagttctgaaacgggagggtatatgctgatattgcgagagaggtttatgatgtccatcgagatatgtgctgacttcatgtttccttcagctttggattcgtctctgagtccatttgtattgtaccagtacgacggtttggtaggtggcgaattagatatggctttggattcgtatgacagcgtggtggacgggtttttgggttgtatccgtcggttaatttagtaagcaatatcacatattcttaattgataagtagtacgtacgtagactttcagagaatttttctccattttccacttcaaattttcttagtaaccaaacaacacatgttgatattgatggagtaattaagctgctacccagcgacgaatcggagagtattgaacaccagaagaaacggaagaggtcgaagaagaggaagaagctctggcgaaaggtgaggattgaaagctgcctgagttgccgccgggaaggtggatgtaggcaatatcacaaaaaatctatgttataacaggcaaactttctattactttacgcttatcttatgatcttatgatcttccagtataatttagtaccatttatatgaaatataattagagcaactaatttcatgtccaagtctacattgactatatcaaccaaattaataggaaaatggtacatctattccttaaagttaaggaggaccatataattaatcaataatcttgtaagaaatggtcagtataccttgtttatagaactgatcttattcccactttttttttcatgcacgtgcaccccaaacgccaatacattttcttttctaatctttgatgtattcctttcacaaatgtcccatatagacaatagcatcaaatttcattacttttttctttttttcttttcctttacatgatcatttggattgaactaagcccattatgattccttttactgaacaaatggatgagttttttggtggaatggcgggtagattcagagtctccataacagattcaaccatgatgagaattgttcaccgcgcaatgaacaaagctcataagagagttaagtcgaaagaaggtgtgatagaacggttgaatgagatatccaagttctatgaattggctgtgatgcaattagaagggtgcatcaagtttgtacaagaagagccagacatttttatcctcgagagcaacagtgaagaagatgtgcttgctggtttggctgagattagggaccgactcagaggtcgtctaagcgaatcagagatggcgattcgggagaaagatagagagctcactgagagattagatagtgagttgaagctaaggcaggccttggaggtaaaagaaaaggagttggtctctttgcgcgcgaaactcaagcttgaaaagactaagtcagagggagttgaagatagagaaggcgagttttgtgagttaaagaattctgttgatcagcaggtttggaatatcagacaaaaacttgagcctgaccaatgcaacgagcttgatgaatctattgacaatgagaaggttgagcagatgggttctgacatagacatgttgaaggagactttagatttggctttcggaaagatgaggaatgctattaccttatctgaggttccaatagagcaacaatggagatggggtattgaaaaagacactgtttttatcttacttaaaggtatcatgcaggattttcaggagacctctgatttggcattgttgagtcaagagaatcagctccccaataaattcaatttcggaggtgaacattggtctgttatgttgattgaagttacacgtttgagaaatgaacttgagtctttcttggttcaacatggaaagccttccaagtcctccatttttgaaaattttgacacagtggagagcgagaattttcgagaggctattgaggaggatggaaatcactatgttgctaagatgataaagaatcacgagtccatcatacgaaaaaagagtgcagaggcagaagaattgaatctattgaagagagaacttatgagagaaaaagcatattcatcttgcaagaagggcaccgaaccagttaccctcaacaaaagagtccaagaaatcattgagaagctagaaaattttatagaatggagtgctgacatgggaaaatatttcaatgatcatagagacataaatggggaaaagagtctttcaagaaagaggtttttaaactttaatacaaatgatattgataaactaccaaatcagatggggagaagagagttacaactagaggaattgagcttgaaaaccaacataattgaagagacatatattattcttcttaaaggcttgttgaaggagttcaacacaaagttatatatctatgactttcagagcctgatatgggaggatttatctaaagatcttgttgcagaaatgacaaattattggaatgtgaaaatcgaaaccaacaacgtcgattctcaaatcagagaagaaatgcatttcatcatctttaacaaagtgattgaggattgtatttcttccttcaacttaaagttagttgaattaaacaatgtgaggtctgaaaacatctgtttgaaagaatcagcatttattgaaaagttggatcgtgatatacagacactcatcttcagagaaatgttaaaggaaatgaacaaaaccatagaatgctatgactctgaaatccttgttagagaagagatatatgatattgtctttgatgagaccaccaaaagtatttttgatagtgtcaattcagctttacataaatttgaacaggtaaaacttgttgaaagttctatacaggaagatgtttgtatggattttattagagaaacaatcaagcaatggaagatggaattagactcacacaacacacaaagtctccttagggaagaaatacatcagtttgtcattatagaagcaatgaaagatgctttttctctttcaaaacaagttgattcttgtaatgaggacaaactctccaaatgcatattctgtgaggacaagttaagaaagtgtaaacaacttacttcacatgaaaatatatctagtaaggtggatttgttattacattgtcttgaagaggaagagaatttgacgcgaagtatacattctgaaataaagaaaaacaacccagacattggtttggagagtgaaatttttggaagaaaaaacaagttcagttcagtgaatagaaagctagtgaagagtttacatcagttagccaaaaataaggaaacactaggtaagatggtttctagtttaagcttactttctgttagtttagaaggctctaatcatctacaagacaatgaatccgctattgatcaagaagaagaagacccatttgagaaatttgcagtcttacctatccttggattcttccaagacatgatggaggagtttcaaaacagaataaggaaaaagtttgaggtaaacattttaaggtgggtacttgtatatgttttctaatgctttgctatcaaacttcagttaaataatataagatttactaactatgaacaaataagaatagtttattgattaagaactctacacagattggaacagattaatcatcatctggatccacttgttgatacagtttcatccctaagagagaaagaatcactttacaagaaggctttcactacaagatgtcaaaatctccataaggctgaaattgaggttactaactcttttatagatgaaaatcttcaattttatttggctttagttatatttattactgcagtctccacatgaattcaatttaacatatcttgctatttttataggtagatcttttaggagatcaagtagacatgcttttaggtctacttcaaaagacatacaagacattgaatcattattcatctgttttgcagtgctatcccgaggtaagaaattttcaacattgttcttctttggttttacacattaatatgaagtgttcagcttaataattattaatttttagggaatgttcagtttgatcttttcatagtcttatataacattcaaacattaaatagaaaattaaattttttttatattcattttgaatttagttttgcaacatctttttcttctttgatcataaattttcttgcaggttttggagctcatgcagatgataaggaaggaaatatatggagttattcatgcacctaaatattgacaaaaatatgtcataatatgatgtattaaattatattggattattaattaatgtattaagatgctacatacatttgtctttatgcaagaactcatggtagctgattcgaaacttgttgtatgaaaaatgaa

SEQ ID NO: 42448 - DNA, 3313 bp, Cannabis sativa
  modified_base (39)..(60): a, c, t, g, unknown or other
tatttttgaaaaaaaattcgtgtgacagtatttttgtannnnnnnnnnnnnnnnnnnnnntttttgtaaatttccctatattttgttgggaaattagtatatattccttagtaattgagttgaaaaataacactttttcattcttaatgtaaaaactacaaactttttatatttttaatcaactttcattgaagttcaacaaaaaagcaatgacaaacacgacaatgagtcaaatacatcaattcctcattttattcaatgaccaaatttgctcaatactagtctaacctttgcctaggctttaagcattgcaagaactttagcccaagctggccttgcagttatatcaaccacccaagctttgacatggggacgagactcaatgtgattcttcatatttgttcccaacaagccttgcaagttaggaaggtgatgaagatcagctaaggtgaagcaatcgccacccaaatactttgatttggagagccgattctcatacacatccagaaccttcaccaatttagcctcatactcatccaccacagtctgatctgtggttaatccaaacataggcttgaaaagtaattcccaccccaatttcgatgtgactggatcaaattgatgagcttcaacctccatccaaactgatgcaatcgctttcttcttcgagtcagttggtatcaattgtgttcccttttgtgcgtactcctctgctatgtactttgaaattgccctcgattctgaatatcaaatacatttatttaatgaaattagcaagatgtgtttttctttttttatggcaaaatttacagaaaatatttgtatttttatcaattcttttatagattatatatgagtgagtatttaattattacactaaaacttctatttttataataaaaattattttatatactgatttttaatttttttctttaatttaccgtttgaatttttaaagtgttgcattgctagttgcaatagagatttctataaaaaaatttgttacaattaggttgcagagcaataaaagtttttatatagaattctgtaaaaatataaaaaaataaaattgttaagggtaaaaatgaaaaaattctttaaattaattatatatttagaataattaattttataattaaaatatttttttacaactaatatttataaatattttttatttacaaaaaatttaatttacaagtaatttattaattattttaatttaatttttaaattaatcataataatttaacattgatctgacgtttaaaaataaatataattaaacttcttatatatacttttgttttttcaattttttagttatatttttccgaaaaactacgttataataatgtagaagcaacataaatataatttttttaaaaggaaaaaaaaacaaccattttttaaagaaaaaacaatcatttttttataacaaccttaatccatattttgcaattaaaaaaaaaaaaaagtgacgtaaatccgttaaaaaataaagttttggtgtatttttgaagtataatatgtagggtgaaaaaacaaataaagaattcataccaaagagctgtaaatctccatgttcaagagctggaacttgaccaaatggctgaaatattgaacaaaagagagaatgttaacacttaacataattgtgatttgtgaggtctagtagttttgattttgaagtaacttacgttgagagaaatgaaaggttgttgtttatgtgctccagctctcatgtcgacggggactaattcgtagtcgacctctttctcatggaggcaaaccacagctcgttggaaggcggtggagagtggggtgccatgaactttgattgttgtgcccataattattattgctttgctttcttcaataattttgattgtaccgttgcaagggaattataccccgatatatatatagatgaaagtgtgtggtggtggtggtccaaagaagtgattttctaggcgtttctaatgttaactggtgagaaatgaaataaagaaagaaggggtggaagcggaaaaagtggaattgaatgctttctttttcatagaagacttttattattaaagccattactctgcattataggtcatatatgaccacaacgtgggaaatactatcctatcttctagaagctagaggagtatggcaggtttggacattcaattatattaaaaagatgtcccatatcataagtttataattaaccacataatttttgttggacgtaagtttagccacataattgtttttagaaataattggcaaaatatacttaaatgctagttggcattagggcgtcttagtatttttgaagccctattctaatcttaaaatttgggccggccttaaaaaaatacaataaaaaattaataatatattcaaatattattatattaggattatataatttacaaaattttacaccaaaaaatttaaactattttattaaatttttatttattccattacaattttaagctaacattaacattctacttaaaattcataatatttttctataaatttttaacttttgatggaatgttgaaagttaattgtaaagaattatatagaaataaaaaaaaaaatatatccttggaatgtatagaatatgcattttaaaaaaatgaataaatgaatagaataaaaaaagtttgataaaatagttatagattaccattaaatgtgggatttagaacaaccttttcaatgaaaagtaataattgtttttttttcatactattttatttcatttaatgtttcatttcataaaaaaacaaaaaataaaataaaaagccaacctgaaaagaaggcaagaaattgggctcttatttagtaggctgttccgatgactttaatgccggctaccatgcttagttatagtaattgcattcgtaatttttgattagataaggagagaaattatagaactgttggtgaggtttgatgagcatgtaagtgttatcattataataaatttctaacggtgaattacgtatttgatgacttaatatgttattttctttagataaaatatgtttgtcagtcaaaacttggactaggatgagagtagttgaagaatatttctcgttctctctccaactccaactacaacaagtgaaatggaaataaattccttgatcaacacgcccccaacggccaacatcactataccaaaatcattaaattttgtagaaatagccacttttgggctttgagatttgggctaggcccaattaattacatagtgagaagtcttggcttagtaattgattagggctattttcaaaaatat

SEQ ID NO: 42449 - DNA, 1298 bp, Cannabis sativa
gaggaaaggaatcaaaccgttcatcttgaacaggtaacccgattgctgatgaggaatcaaaacccacattgccatttatcctcaccatattagcattggacggctgagtaaatgttctctgctccaatgacccaggaatgtggggattaagccccctaccatccatgtaattgggcctttgatttggaaagtcagaagcatgaggaattgttctagccatcgtcccaccatgtaaatcaaaagggcgatgcggcaatacaccagatgttggagctccaataggttcaccttgagatgtcttgtaagaaccagtattggagaggtgaggccctcttatactacttggtggccggagttcaggtgcatgtctaggtctttgaggcctaaaataagtttgaggggggcctagccctggaggtacttgtaataaagaaggaccgccaggcctatgtggaatagaagggccaaaatgtgatggtaacagctgatgctttccctggtcaggaaaagaatgagaaggttctacaaaaccaccaggtagcacctgactagattgcctgttttcatcaactccaacttgtggacgacttaaagtaacattttgagttgattctccttgcaagttacttggcttgtttggagagccatccacagtcatcttatcttctacaattgagtgattcaatttcccaggccctaccttattaccatcttttgtgtcctcagcaaccacttcactttgatcgcctttattcaaatgccctgtagtgttttctaggctaccttctttcattattggcttagatttaggctctccattctctgattccagcagctttgtagactctgaaaattccgtagaagttgtacccacttgattagcgtccaatgacttaatatcagtttcaggcttttcaatcgccgtctcgctgactctagctgctatatcattcccaccaatttctacacttacttgcaaggaaacttcagcttcattctgggtcgttcctttttcagatgtgtgatccacttttttttcagccattgttaattttgagttcacagcggaatgttgttccgaagggggttgcatctggttatttgctataagcatactattatgacttgcggattgttgatttactccaggatacacaggcctaacaagaccaccagcatgctgtgaatacaattgagattgtactccctgattaggcatggaaggccttacaactgagtttgacggtttagcatgttgcataccatgtgatagggcaacattttgtgatagctgtgaa

SEQ ID NO: 42450 - DNA, 5343 bp, Cannabis sativa
  modified_base (75)..(77): a, c, t, g, unknown or other
atgttctgcaatgtaactgaccgtctgtcaatcgaaaacaaatgaagcactgtaagacacgaaagataaaccaannnatcgaattatctacccttcatagtagttttttacaaacctgcctagattgcccatttcgaccaccaatagttgttcgtatctcatgtccagtttcaacacccacatcgtttacaacttcatgttcactatcctacattgtagaaagataataagagccatcaaaatctgtacaaaacattgttaaactaagaaattctattatataggcacttttaacatataaagaaagatatatatatataaaaaaagaagaagataattccgaaaaatgataattatgtatgactgatgaaatcattagaaaaaaaaatcaagctattactaaaaaaagttagaaacctgtaaaatatcttccaatccccttaatgactcccaacattaagacagattttcacaatcttaaagtaaatatcaaaggtaaagaatccaatcacaaattaaatttggatagtgggtatacaatccatagcatttaaaaaaaactgcacaatcgagagaattagagagaagaagggaaagaaaaattaagacgtattgattcgaaggtggagatatcggtagccagacgttaatatgatcttttccaaaaatcaatgggtgaagaacattttcggtggagtcatctccaatcgcaaagttatattaaacgctatgtatttctatcgatgggtcaaaaatagacgggtgaagcaaatgataaagcaaggagaagagtcaatcaaaatgccaaaattagctcacctgttgcttactccggcaagcccaaattatcagcttcaaccccaattgcaaagcttaaatatgcccaaatcggctcacctgtttcttattctggcatgcccaaattatcagcttcacacccaatcgcaaagcttccatatgcccaaatcggctcacttgttgcttactccggtaggcccaaattatcaactccaccaccaatcgcaaagcttccatatgcccaaattgactcactttttgcttactccggcagttgtaaatgttgttatattaaatattctaagtcgtaagattaggagagaatatatcttcaaatcgttaaattttattatataatttattttaaattttattttaattggttatttttgggaatgtgtgtttttttttaataaaataatgttatgttaaccgaatgtgtgattttttgaataaatttttgttaaaaaaataatataaatcaattgggaatattctgttaaagttaacgcaggaaacaaaccaacatcgttaatccaagaattgccgttagataggcacttttaatatataaagatatgaattggaagaaaaaagttaaaaaaaacttagtataattaaggatataaattttatataaaataaaaattattaaaatggatatttttaaaaatttttagagtgtaaataaaattttccttaaacataattatctgaaatggcgaaactagcccccacaaccattgctaaaaggtgggtacaatcgtaaattagaaccgcgggaagaggtcagattcggtgggtagtcaccgttacgacacgtggccagtgcttgcggttccaaaaccaaagaaagaagctcacacacagtgtctctgtcttggctcttgggcacacggtgaacagtatcacttcgttcgacttcgaccgccattgcaagaccaccacaaaatttcaaaccctagtataactttcgggagcttcaacgagaatcactcgccccttctactttcttctttgttgcccaatttcacctatcgttcaatttctgaattattctccttctaagagtattttgaattcgaacctgaatttggtgtttgtctgtggggaaaatttcaggataatggaaaggaaaagaaaggcaggaagtataattttgaagtctcctcctaatgcctctctttaacttactttacttggcgtgttacctcattctctctatattcccaattttgttttcttctaccgtcttcattgattttcttggggaccgaacacagtgaagttaaagttcctttctttgggtggagttgggggttttaagaaatgggttctgctcaaggttttaccccgttgactgaattttgtgtatcgtcttcttcgtgtatctctcttcaacttcaacggagccgaattttctttcatcaaaatcataagaatttctggggaagaaggacttccgcccgagtttgtcccataatttgttgcaaacagcaaaacccgggtaagtttcgagagtttaggttattcaaatccgttgagttggaccagttcctgaccagcgacgacgaagatgaaatgggggaaggtttctttgaggcaattgaggaattggagcgaatgacgagagaaccaagtgatgtgcttgaggaaatgaatgataggttatcggcgagggagttgcagcttgtgcttgtgtacttttctcaggagggtagagactcatggtgtgcgttagaggtgttcgagtggcttagaaaggagaatcgagttgataaggagaccatggagcttatggttacattaatgtgcagttggattaagaagctaatcgaagcggagcatgatgttgcggatgtggttgaccttcttgtggacatggattgtgttggtttgaggccgagttttagcatgatggagaaggtcatatctttgtactgggaaatgggtgagaaggagagagccattttgtttgtgaaagaagttttacaacgtgggattgcttactctgagggtaatggaaacaaacacaaggaagggcctactggatatcttgcttggaagatgatggtaatgacgtttaaaatagttcttaattttgatgctattcaaactcacttatttctttccaagttatagattgctttatgttcttgtttatgttattttatcaagtgggatggagggaagaggtctttactttctgttttatgctaacttgatgtttaagaccatatgcctaatgaactgccgtagtggttcatttccaatattgtgcattgctctagcgtttcattcaatgtagaattctgtctcgccattgcgcaatacgggttggctcgcttttcaaagttacttaggtgattttaattattgattttgagtcttcaactgatttttcacttatttcaaagttgaaatagtgcttatttcctttcttggtggaacatgtcgtcctttcagttatgggatttttcaaaaattggggtgttctagattactcttacagcctattgtttaataccagtagggtctttttcttgtgattatctattattggataaagtgaagtaaaaaagaaaattgctcgtccttggtattggtgaattttcaggagtgggcacaagaaaaaatatgtataactttctgttgagtatttcaatagtttattatatattgggaaaacatttttcttttgtattgtttagcttgttcagcttcctttaataaaagactgatgtatttcatcaggttgagggtaagtatatggatgcagtcaagttggtggttgatctacgagaatctgggttgaaaccagaggtctatagctatctcattgcaatgacagctgctgttaaagaactcaatgaatttgcaaaagctttgcgcaagttgaaaggtttcgcgagaggtggattgataactgaacttgacacagaaagtaccgagcttgtagagaaatatcagtcagatcttctagctgatggagtgcgcttatccaattgggcaattcaagaaggaaattcttcattccatggggtggttcatgaaagactccttgctatgtttattgttgcaggccgtggaatagaggcggaaagacaattatgggaaatgaagcttgttggtaaggaggctgatggggacctccacgacattgttctagccattttggcctctcaaaaagagactagtgctatagcaagaatgcttactaaggtggaggtttctggctcactgcgtaagaagaaaagcctatcatggttgttaagaggttacatcaagggggggcactttgataaagctgcagaaacagtattcaaaatgcttgatttgggtttgtgtcctgagtatttggatagggctgctgtgctgcaggggctgcggaagagaatccaaggacctggtacagtggaaagttacctgaaactatgcaagcgccttgctgacaatggtttgattgggccttgtcttatatatttgtatataaagaaatataagctttggattataaaaaagctctgaaggacatcggtttggctaaaccatctttctaaagtatagataggtaacactataatagtgactcaaatacctttaattctccccgctcttcatacgtaaattttgtatagtgtatgtcactatgtaaatcaagtaatgcagttggtaggcagatcaactgcattgctgaaaaaatgttgtttacttgaatctctgatgactactttaaaatatgtaattaagctgtgattagttgataatttagattattatgtgtgatacatgcaaatcttacgcttcagaattagtttcaatttcttgaaacagggtgagaatcttggtttgtcgtgttcacttgaaatttcacgtgtacactttgatcctttgttatgtagaacttgctttcagaatttatatgtttcgttctgctatttcagtatggattatgacatctaaagacagaggaaaggtacatctttgttatgtatatatgtatatactcttttattgattgtatgatttataaatgtgaatcttactatctttccttttgtgcttggatcttcctcattcatgttcttcttttatgatcctgttcacactagtgtcatttccttctgttctatcagctatgaaattaaatgcttaattggggacaatggaattgatcagaaccaagaacatgtaattgggtcaccctatagtattcagggcttttatttattcattattataatgttacaaatttgcccacatggatatatgatctgggttttcttttccattattggacttggagtttgtacccatctttattttttaactttcactttgcagtgacttaaatggtaaatgatttggcaggcagtataatgaagtggaccaaggaatcttatttaagtgggttccatctatcttcatgaattatattatttgatgtgctgtatttttgttaataattgtttggttatacacactctgtactaatgtgggtttgttacaaaaaaatagatcagtagctgacattaattagtattt

SEQ ID NO: 42451 - DNA, 4274 bp, Cannabis sativa
ggtccgagagcgacgttaaatgtcaagtcattattaggtattatttttttattggtatattttaataaaaataatatatgatctggaccaatcagtgattgccacgtgacaatttacttaatacttaacaaaaaagtaattacagaattctaaaaatatatttatatttatttgtaatcgagattaaatttaatattaatatttttacaattatacaaaataatattaatattttttttttttgagtcaaataatattaatatttttgttgaaataaaacttattagaaattagaaattggcttaaacccacggaagagttaactctgaggcttccaccaccaccgtgaccctcgtgtctcttcggcggcgaccgtccctggctcactgagtgggttccagtcctccctcggcggcagctttactctcacacagtgtctaccgtctcagcacagttaaccaaacaaaccaatgatagaaactctccgagttgatgagcatccgattccgacctctctcggaaaccttctccagctctatctccttccaccaccatcgaaaactctcttcttctcttcagagctcggcccatgctgccacgcccgaaccattttatatcaatctctcgcgagcctgtgtagaacagtgtaaacggattagagcacgcaatgtgttcgacgaattgcctgagttattaattcaaacgttaaaaaatgggaagattatccatggttacagcttgaaacttggggtggaatccaaagggtttctgggaaactccattgttgatctttatgccaagtgtggtaacgtgggttatgccgagaaggcgtttgatcagcttgagaacagagatgtatttgcttggaattcggttctttcaatgtactcaaagttgggttttttggaacatgttcatgactcatttgtttcattggttagttctggggtttcgccaaatgggttcactttggccatggttttgtcttcttctgctagatgtgtggatgttgacattggtagacaagttcattgttgtgttgttaagatgggttttgagtcaaattcattttgtgaaggtgcacttattgatatgtattccaaatgcaatctcgtgagtgatgctcgccgggtttttgatggctctactgagctggatacagttggttggacagcattggtgacagggtacgttcaagctggtttgcccgaagaggcgcttaaagtcttcgtagagatgaggaaagttggcctcattcctgatcaagttgcttatatcactgtaattaatgcttgtgttggtataggaaagctaagtgaggcttgtgatttgtttgccgagatgccaaacccgaatgttgtggcttggaacgtgatgatttcgggacatgctaaggcgggttatgaggtagaggctctaatgtttttcttgagaatgagaaaagctaatgtaaaaccaacaagatctacactaggaagtattttaagtacaattgctagtttaggagcattagattatggcttgataattcattcttatgccgttaaacagggcttggattccaatttttatgtgggaagttctctgatcaatatgtatgccaagtgtgagaaagtaaatgcttcaaagaaagtatttgatggtttggatgctaagaaccatgtgttgtggaatgctatgttaggaggttatgtacataatggttatgcattggaggtcattgaattattctcccatatgaaagaatgtggctttaagcctgatgaatttacctacactagcattttgagtgcatgtgcttgcttggagtttctagaactaggtcgccaattgcattcgattattatcaagaacaaagttgcattcaatttgtttgttggaaatgcattgacagatatgtatgctaaatcaggggctctggaagatgctaggaaacaattcgagctcattaggaatagagataaggtttcttggaatgcaatcattgttgggtatgttcaggatgagaatgaggttgaggctttcaacatgttccaaagaatgaattcggacggtgtgatgcctgatgaggtttccttggccagtatactgagtgcttgtgcaaatgtacaagcgcttaatcaagggcaacaagtccattgttccgcaattaaatctggtctcgaaactagtctttatgctggcagctctcttattgacatgtatgccaagtgtggagcccttgaagttgcacatgaagttttctctggtatgcctcactggggtgtggtctccataaatgttcttattgccgggtattgtcaaatcgatttagacaaagctataactttatatcaagagatgcagtctgctggattgagccctactgatatcacttatgcaagtcttttggatgcctgcaatgaacctactatgctaatattgggaaggggaattcattgtgtggtactgaaaaggaaccttttgtatggtggttgtgatttcctaagagtctctcttttgggcatgtatttgaaatcccaatgcaaagtggaagctgaaattctgttctctgagtttccgaatccaaaaagcacagtactatggactgccattatctcaggactcacacaaaatgattgcagtgaggaggctttgcagctataccaaaaaatgcatagtgacaatgctctaccagaccaagccacatttgctagtgtccttcgagcatctgctgtctcgtcttctttgatagatggcagagagatccactcccttgtttttcacaccggttatgatcaagatgaaccaacatgtagtgcccttgtcgacatgtatgctaaatgtggggatgtcaaaagctctgtgcaagttttccaagagatgagaactaagaaagatgtcatttcttggaactccatggtagttgggcttgctaaaaacggctacgcagatgatgcactaagtgtctttgatgagatgaagcaaaaacatatcatgccagatgatgtgacactccttggtgttctcactgcttgcagccattcaggaaaagtaattgaaggccgagaaatatttaacagtatggtaaataattatggagttcagccgagggtggatcacgttgcgtgcatggttgatcttcttggccggtggggttttcttaaagaggcagaagaacttatcaacaaactaaacttcgagtcagatgttatgatttcggctacattacttgctgcctgcaaactgcacggagacgagttgagagggcggcgtgtggctgagaaactcatcgagttagatcctcaaaactcgtcgccttatgtgttgcttgctaacatatatgctgcatcaggaaactggaatgaggtcaattctttgaggttgaaaatgagagaaaaaggggttgtgaagttgcctggttgtagttggattctagttggacagaagacacatctgtttatggctggggataaatctcatcccaattttggtgaaattaatgcagttttggagtacttgataaaagttatgaaagaagatggttatgttgtggacatggatagtatttttcatgatgaagagtgagaatgtccacactgaaagatgtatatgttggtagaaactaacaaccatttttcttgtcttcaagcatttggatctcttgtaacaaatcctcaagacaatacatgttcaaacaaattcatttttttttagttttgactcttaaaataacaaacaaaaatatcctcaagactattttttaattattttatcacaaacaagtatattgatgtgataaaataattgaaaaatagtagaaatcctttccgttgattatgaaaagagccaatgaagtgaagaatgaaaagatgaagtatttagagagaaacaccacagaaggtacaatgtacaagtgaggaaagaagaagctaatataatagatagagtttccaaacaaaacaagaagaagaagtaataacacatatgaaaacctatgaacaccaaagtaattatttgaattgaaaaacaattttgatgtgatagagacaatatcacatgtaagttcataactaattttgaaaaaaatcacaatattgtcactagctttcaaaaactcattcgcaagaccacattttaattttcttgagttatgggaaaaaagaaaaaaagacatttaatatagagctaggtaaaatgtcactcaatttcttaattagagatgaaaaaaaaagagttcaacactttaatttgattaagactgtggagaattttttgtaagatatttgaatatc

SEQ ID NO: 42452 - DNA, 5270 bp, Cannabis sativa
tatttaatagtgatatctagctgaaacacaaacttacaaaaataaataaataaacacaaaaggcagttttgcccaaaaaaaaaaaaaaaataaataaataaataaaagaaggtttcggcgcaaagcctcaaatatatacatgacgtggcatctttatgcctttatgaatgaaaggaaatcttggctctttgttctgaattctatccactaaagattcaatcaaaatttgttatatgccaatcaaaattttgatatcactaacattttggacatataacttacggaacttaacacaccagaattaggaactctttctttctttcctttttttttaaaaataaaaaaataattgtgcaacccagtagtctggtggaggtgggtttccccactgtaacaattcaatggtgggtgtagtctcaaaaccagtgccaacgactgtcgctttgtataacccatctctttcttcctctaaaacagccttctcatcttctcttttatctttattcaaggtatgccttacagttcattttacttgtcgtagaatagcagaaataagatgtattgatacgtgttaaagagtttgatttccgcatttttcatgtttttattatttgggcagaaccccatttcggattccagtggattttcttcaaaaaatacttgttttctcagaggtcaattttttactagacagctcattgggattcattctccaagaagaaagcaaacaggtattgcctgtgaactaacttactactgtgaacttttaacttttcacactgataattaaatttgcatttcataatgttacgctctgttttcttttcaactctagaaataatagtgatattggtagtctcatgccaatggttaacaatattgtgtaacagtttttaaattaaaaataaaatatgtagaaccgatttgtatcaataatagtgtgatgattactagtattgtataatcgctattaaattaaaatatgtggaaggagatatcttcacatgtcttttagcatttctccccagttcaaggcaactggtgaccattccagctgcttttcctgtagaaaaaaacctcaacggtggttcaagtatttgtctgtctcctatcttcctctttgggagtgttacatttaggttaattttagtatgtggagaataataaaaatacaacaaaatgttgagactttatcatgattcatgacccttacagtttcttttgttgtagcatcatccacagtgctattatcatgattcatgactatgttgagactttatctcagtgatcttagttcatattaaagcattaacatggttcatagattctcattcttcttttaatagacatttgaacttgacactcaaatcacaaagtaaagaaaattataatcagaacctttttcgttaacgttttgttttgaataatgaaggatttgtagtatcaccaaggtgtgtccttccattgacagaagaaaatgtggaaaaggttttggatgaggttcgtccagggttgatggctgatgggggtaatgtggccttgcacgaaattgatggccttgttgtgatactcaagttacaaggagcctgtggctcatgtccgagttcaactatgacgttgaagatgggaattgaaactcgccttcgagataagattccagaaataatggcagtggaacagattctggacactgagactggtcttgagctaaatgaggacaatgtagagaaggtgagccaactcaccattgaattattaattgtttggaagtgagtcaacatccataaacaaatgtgtctcctgctatgaaatgattggctatgtcattataaatgccaattaagctttcactggattaaatttgtagaaatcagtctcagaaagttagtagctacactagttagtcactgtctatcaaatacatggttatgttcatatggtcatttaaacatttcttttaaagcaattttttttatacgtgtctatttgacttgagtgtacaaacgttgatagcatgtttagccctctttgtattatactaacatatggctattttttgccataattttttcttcaggttcttgcagagattagaccttatcttgcagggacaggaggagggatacttgaacttgtacaaattgatgactatgtagtcaaagttcggttaagtggccctgcagctggggttatgacagttcgggttgctctaactcaaaaattaagggaaaaaattccggccattgctgctgtccagcttacggaatgatataccaaatcacttactttatctaccacaagcataggaaaccatttagaggtccgatttcttatgaagaaaaaagtgtaattaaacatgtattcaatttgttatggcccttaatatctgtttccgctctacctatctgggagagtaagttttgggaatgagaatagcgatgaaaatgataataaccatgtgtattactttgtctcacccactaaatatctctctttctccaagatgagcgataagatgataattgtcggtacttcttgatgtaattaataagagttgagaattttgtgaggtgaaatggagaggctgagaagttattggcttttccaagttttaatccagcacattctcatcttcactttctgcttttttttattgttgacattcctttttacaaaggctgtcatggtttgttgaatcaagaagaagaattcatgttagtcatatttactaccctaacaagtaagacttgattgttgctcacaaagagcaggtccaagttcgaatttcccacttcaaatatcaaaggaaaaaaattaaaagccagccttgattgattggcaacagctttctctggtattgggacttaattacgtgcaagctgtccataagccctgagcagtgtcaagattaaaattttaaggcaaaaactattgctgctctcaatctcaagtagcaagtttagcaatggaaaagaaagagcaaagatggaagatcgtaaataatataattacaatacatcataaaattgtggcaaaatattcatagaatacaaaagagggctagttcacacgttttgcagcctttgagttgactaactatttacgttgttttacactggtatcaaaaggtttttaagttaattagtaatcctcatcttcgtctcttgatctagcgaatctccgaacaacagctgcaaccgcgccaagcaacatgaacagaactaacgtatcaaaaccacccccaatgccaacggccacactaggacctggagcaaagaaagaaaatggagaccatccccaacctccaaagaagggcacaccataaccatagccgtatccaccaactaatggtggggctacgggaggatttatgtatatgtttgtcctgcgaaacaagcatctcggattaacatgcatatatatgttgtttgtaaaatcatacataagcagattatcaaagcaacgaacttctagaaatgacatgctgcttatcaatcatagtgtaaccggttattagaaaataaacaaataaatggttatcaaaaaatgttgggagttgaaactttattgagttgtgagaacaataaagccatatcagtaaatcccataacagacttctactaaaatccagttatgaaatagactaatgatgtgtgcacccaaatcatgactaggattcttaaaatagtggatattttagataaatggctgaaaagtgaaatgtttgggtgtatattttggatgcactgtaacaagaacaaagtttccgttcttgatatgtcttgtttagatagaaactaccaagtatcaatagtaactacaaaagtaaaacatattccattacacatcaaaataaaccccaaaatgctaatggaccaaattgaagtccttgatgatccaacaacctagtgtagccattttgtaactagtgcatcctacacccacttactattatgttttaaggagagttctaagtgagtaggatatggcttagcctaatattaaaatagatatggaatgactatcaataatgtcttcaaaacatcattcaaaacaataataataatctcttcaaaacaactttaacaagtccaaacaatttcaaaattttcatcgatagtataccataacgaattcctttattcatacaacctaaattatagttattactcaaaagctctatgtaccaagaaaaaataaaaaaaaaaaccttgaattattgttgattctaggaggcgaccgaggggcggaccgtggagctgaccgaaaagcttgaccaccgactctaccggcagacttcgcagctgaagcatcagaaactgaacccagagtcaaaaccccagctgtcaaagcaaccatagccaacttcgccaattggttctcatttttcctatatgaatcaaaccatgacaccctccatatcaatttcactatggacaacaatttaaacaaaatatatacgaagagatattacaaatcggacaaaagcaaagaaaccccatcatttgtttcaaatgctatacaatacacaaatatattacctgagagaatccttgtgatcatcttggtggtatctgcatgagatggtggagtgagcacaagtgggaatcttggtttgcagcttgtgagttgatgaaagcagagcgttggccagaaaactctgttgaggtgatgataaaaacgacatagacatgttttcaattcttctactaatttttattcagtgaaattttttgtggtgccgaaatggtgggattttctatcggagaacactaatcttcaacttctttttctctatactgatgtagttctacaaacattaacggggaattcagaatgtaattaagcagcatctcttttcttatgttagcttctcacttcagcagtagtctgtacggagccacacagtcatattttttcctgatactgaagttgccaagtggcgtaataataatggaggagaggaagattcatgaataacgtgtatgtaaaaaattccatccacatggctcgggactaatagcatttctcaaatgttaaagggaaaaaaaaaattaaaatttcaaaaacgttaaaatattactatgggccgacccaatttacatttatacagcttacattaacaaaattaaaaaaataccacctgccctatactttcagccgcacgtcacgaacagagatgataaagaaacctttattgatccaatctgctatgcaaccacaatgaaaccagatccagcgtagaacaaccataaattccggcgaaattt

SEQ ID NO: 42453 - DNA, 6655 bp, Cannabis sativa
cttcggccaactacctagcaaccatcgtctgattcgtctgatgcaaccaccgtgtaaccacgcagcaatcatcgtctgattgtgtaagtggtattttggtaattaaaatcacatataaggtatacatgttgtctttaccttatagaggtatttttgtaaataaaatatcaatttatattttctatataataattccattaattaatgtcttacattcaagttttttttaataataaaaaaatataataatcctgaattcgaacttattcatcttttttacttactataaaatccaaatcaaaccataggatatttgactataaatatacataaatataaatatgaaattttttaaagaaatatacgtaaaatataaaataattataaaaataatttaaaaaacttcaattataataatatcttatcatattattaaaaaatatttaccttttataatttcccttattatctcactcatatgttttttttttttgggtttggttatatgattaaagtgttcaagtggtgacaaattatgtgtcaaccgactttcgttgatgaccatttactttgactctcctatatagctagtcttcccttcccttccctcttgtactacaacgacttcaaatatataattatatacaccaaagacttcaacttaattattatttctattatatatttacttactttctccatatttttaaaacctaataatataataatagttattactttttaaaaggtgagggtttgttaaattgaaatagagtaaatagttgtgatttattttaggtaatatagttttgtaagtatttagtgactagtatagtataatattaataatagtatggtgataacttgattgttgattatttatatagtagagaatgcgactcaatgtgtaggagaagttaatagattttattgattttttattgtttttggttactctcattgtcgaactctgaatttcatttaaaataaaatattaaaacaatataatatataaatataattatttgtttatttaggaagggcagacaatgttttattctacataattaatttttattttaatttttttgtatacattaagaaaaaagataaatgaggataggcaagagtctcactttgtctttcattaggtccgccacttacactagcatctcaaatggccctataaacttagggtttagtttgctcatcttttcgaagcgcttaatactcttcactagtgagactcgtagaaaaatatattctcttacttgaaactctatgtttctgccagcattactagtctacttgttttacgaaacaagcattcgagccttgattttctccattgcctcaccagttcgctgaactaactcaggacccatacatttcctttctccagtctcatcccaatgaatcagtttgggagtgtagtacctagtcgatcgcatcagttgtagtcggcccaaatgtcaaatttcttgtctgtcaagggtggagcaaattaggatttatgagctctggttcgaaaaatgcagagggatttctgagggttgaaggtgataaagaaagagaaaaaggctcttgagacttatttatacgccacttaaaatctttgcaatttgaaataaattgcccagatcccttttgccaaaaagcatttttgatctgacgggcggggagttgaaaagattgcattcaatgatcagctccaatgtttaacattcatcattacatgtctcgtgtgatgtgcttattaaaggaaggttcatctaaatcaacatgtcgtcatgaaaatcctcccaagaaatacgcccccacgcgcgcgtactgctaacaattgcattaaagtgctgcctatgtgccatgccaataataactgtagttaatgacccattaattgatgccgactcgtgggatacatctacgatcctagccaacaccacgtgtcaggggttttgtcacacaaagaagcgggggagtattgcaagctcccagaccgcagagcatcccagaagtttagggggtaaatattttctgtgtgaagcatgacatgtgacatttaatgagggaaaccaatttaatccttcctcaattaaagtcctttgatactactctatcacagaaagccatcctagaactgaggagtatacaggaaagaatattatatgaaggcctattcatgtttgcctcgacttttgagatgtggaaagcgaaatacctctcccgaacccggaagggtctacagggaagctcgcttagtgtatatcctaacaggcattcgaaggacctaaagcggatgtcggccattaggaagtatcgcggacgtcgatcatcaggtggtattgcaaacgtcgaccttttgtgtacacgctgaatcaccaagtgacagttacactttttctgagaagataaaatcctgtctcctacatcccagcatagatggtgcacacctccactaccttttcaccaggcagttattacggaccatcccttttaaaggttaaacctttgaaggacacgtgtccatgctgtatgtattatctcaaattacctagctgccaggtacacgagcgtgattttgcttaaggattcaacactcagatttattttgtgtgtaattcaccccaacagtggaattttagcagaaatcctaggcgggtcatgggtctgtccatacccgccaattagcctataaatatccctccattctcatactaaggggcatatcagaatttacctaggtaaaactctattaatattgctctagatcttcttctttttctccaatagaaacttagagtacataactagggtttcttataaaaatattgtaaacacatcaatactgtctttagaggctaacagactgactcgtggactaaggtttattaacacccgaatcacgtaaaaaatcatcatctctccatttttgcaaagttattatttctttagcttctaaatatttagtttccaaaaacctaagtaaataattattataaaatatatttaattataaatatatgttctaactaactaaaatacatatgtattttttttttttgtgatttttttttttttcaaaagaggcaactgctccctcttttggctctatgtggatctaccattataaattatgttgaagatatagtatcactggtaaattactgtccggttatatactctagcttaattaatcatggatatttttatatactatcaaatttaagttgtataatcattgtgtaacacacataccatatatttttaattaataaaactaaattaaatccatcaaataagcaaataattttgatgtttgtttattttattttatttagttttaatggattttgatgtttgtttattgtattgagatttgaacatgaataaaaactgagtagtgactactgttgcaactgttatgttaaaagaaagcattggttaaagtaattatacatatatatatagcttgcaggcatttgtggcttctgcaataagtccaaatcccatatttctaaagtgaaaacgactttggctagggcagataccataccatatataatatttatatatatatatatttttttatttttatttatttttggtgtgtgtggactggaggaacttacacggtaattttataatttagtccaaattaaaccaatatataatcaacgaaagtgggtaatagtaaggttatatatactaatttaaattggtcttcttcaacttgctcaaagacaagtatggctttttctacatttcattaattatataactttcaaaaaaaccaacaacatatatattgtttgatttttctaaatttcctagcttttacctctgttttttcctttctttcttctaaataaataaatgaattccaagctcttacctttgactttctttatttcaattaattaacttatcagaaacattctattccaatacgaacatctgaagaagcttcaaacagtactttacaacatttataattagtaattaatttgttttatcctctttttcgtcccatgcattttcaactctaccacaatgaggtttttttttttttttttttaagcgtttatatattacacaatgcataacttgagactcgaactcaagacctccaacacacacatcctcttatggccacttaatctaggctcaattggttacacaatgagcttttatatctgcatagaaataatccttttgtgtgtgtaaaacttagattttttttctctcttatttgatatatcaaagggaaaattatgagtataatgattagacaagaaaaaagcaagagattattttataatattgataattattcttaaatatatatatacatattatataatgttagacattcatatctatgatatgaaacatgtataagatggctaaatttttgagcttcaatcccatgtaagttttgatctacaaaggaaattaattaacatgagtattaattgggctttcaagctctgtctactttctttagataaatttagtatatttacagaataagtagtaagtttgagaaccgagaccttccattaaggtttctaccataattaattgtcaaaatattttgaaaattaataaaaaatataattttaacaactaaatcaaattaaattggtaactaaataatattgatcatatttaaaatattttaccaattaaactaaatattgattttaaataaaatcaattagaattaatataattaacaattctaagattaaaatatacttacatataatacttaatttgttgtttcaataaccacttgaggctagctcaagtggccatagaagagtgcgtgtgtgttggaggtcctgagttcgagttccaagttatgcagcgttgtaatatataaacgcttaaataaaaaaaaaaaaaaatttattgttcgaattcaatcatagaggaaattaaatcttaaagaagttgtgcgcgagttataacttaaaatacattttttaaaggattagtcttaatgaacatataacatcatcatcatgacaatattatttattattttacttaaattggaaatagtatgagttgttaattaatagtatatctcagtcctgaataatataacaatcaatcatttttgtttttaaaaaaatgatgatgatcataatattattcctatccaatgagcaaaaagtatcatatctagacttcagaaataagataagggcgaatgttgactattacatacaatatacaacacacatatcaatatatatatatatataactaacaattagagtagattaaacaggaattattcaaataaatgggctaattactttttactgtttttaatatatagaaattggaaagaagaaaaaaacatgtttcatatattgatgagcagagcctcaatagaccaaacttaaattcaattttcttttaagtcattcttatatttggtaacatggggtcacaggtttagatcgaaccattaatttatacatgtatataaatataatatgtaaatatttgtcattttgagtggtggtggtgttggtttggttctgtgcaagttatagtagtttagtggttctgtctcccttcataagtaattaagagcttccacacttaatctttaaatgaacattgatgagttgtatattaatgtgaagatgattattgtatcaattaattgttagaatatccggtacaataaattatattataattgatttaatattataatttcgggaagattctaatttaggagctaaaaatgtagaactactaaactatgtctatgacttttgatttaatattataattaatatttgattaattgattaaatattgtaattatagttagtattattttaatcatttaattttttttatattttaaataactataatatacattattcttaaaaaaagaaaaaaattagatgccaaaagaaaagaataatactaacaaattagttgggtgatagtcgttgttactaaccaaagggtaatacgtttggctagatatttttaagttttttcattaatttatgttttagtaaaaatttagtattttattgatgtatgtttttctttgtagatagatattttaatacaattaattttcaggtttttgtttaatttaagacattttaggtagtttttcagtgttgtaatttgaagagttttattggctgtttgaggatattataactttatttaataaatttttggggacagtttttgtctcatgttactcatttactttagcgcaatttatggcttttggttaaataatagactatcctagtttaagaaaattcttgtgatattcaaaaatatctacattataaattcataagtaactctaggtagtggtcactacataaaaaaacactttcttcacaccgaaacaaataaaaaattaaccataactaccatattttagagtgtgtaatttgtggcagtaaaactaaaattgaaaggataaaaaataaattaaatattaaaaataaatatatttttactaaaatttgaactattaacctctataatatatatatgataatttaaccatatcaaaattaatattaggttaattagtaattttttcccctaaattatgacatatactaaatcgtgcctcttgaattttttt

SEQ ID NO: 42454 - DNA, 13728 bp, Cannabis sativa
atcaaatggctcaaccaagttcacttgaggtgttgatgatggagttcatggcaaaaaatgatgccttaattcaaagccaagcttcatccttgagaaaatcggagagtcaatttgagcttttggtcaatgagttgtgtgataaaccccatgaaactttgggcattgatatgaaaaatttaaaggaggaagaagaaagtgaaaatgtcattttgagaagtggtgatgagttggagatgcttgggaaaagttttgagaaattacaagaacccacctcaatccaaagtagtgaagaaaatgatgaggaagcaagcatttcaagtttgtcaatatttgttgctgatcataatgctgcagcattttcacagcaaaatcacccaaattttgacaaaattcagcaacaaaatgtttacattcctcaacctagtgagtcattagtcatggaagcctaagcctatatagattctttttggccactacctcatcctccaccattggcatggtacattggcatccatcatgtccatcatgtgcattcattgaatggatgaaacttgtctaaatgacatgtaataatttgagaaaaggcatttcacacacacacttggagtaatcaaaattagaatgaaacttgttcttgaatttttcacaattattggacaatctttatatttttctctaagatatgttcattaatcaatctttaagggaaatttgaagatcacgaactttagtgtcatattgcccattgttttactttgattttaatttctttaggacaagcaaagttttaagtttggggtgtaataactctatgaaaataaagttatttagctctttttatacattaattagttttattctcaagcatttttaatttattattgtagtctttttatttagttttgaataaatattaattttcataattttgaattatattatttagtttcctattttattgtcaaaattgagagaaatgatgttaaagtccataaactcactaaagtccaaatattttacacttaattcactaattgatttgttatgtttattgggtcttactttactagttaaaaagtcaaaacaaaataaaaaaaaaataaaggaaaagacaaatgaaaagaatgggctcatcatcatttttctttggcataattgaagggcttattggcgtttgatataggctttgatatatatatatggaacacttcttaatgggtattacccatatatatatatatataaatcttagtaacaccagcttttattatcctaaaattatcgatgcaatctatgtttttgctatttttcacgcaaagtgtttcaaattattgtgatgacttgcactacttgccaagtgatgaattgcattaatattgaaaaaaacatatttcatagcataaattttaacaaagaataatagagtaaagcaccaaaatcaagcaaacattgtttggtgctcataaaatgaggattataaaaagaatttttataaaaaactttgatcaaacttaccatatttttaagtagaaaaaaaaaaggacaaagaattcaattaagaaagaaaataagagattgtttggatgtattttcagttttcagttttaaaattgtgtttttaaaagtgagagtagaaaataattttttgtcattttaaaattttaatagtatttgactcaggttttttaaaactatttttaggttttcattttactaagaaaaactaaatattctacaccataccatatcatgaacccatgttaccccagacctaatcacagacctagactcgaacccgaaccccagactcaacacaagacctcggacccagactctgaatccagcacaagacctcaaacctagccccgggttcagggtctgggttcgagtccaggtttggggtccgagttcgggtcgggtaggggttcaagttctggtcgaggtccgagtccaggtctaggtcgggtaggggtctggggtgagggtccaggtctaggtccggggttcggggttggggtcaggtcaagttagggtccagagtctgaggttagggtccaggtcagatcagggtttggatcaagaattatgttacataaccatattttatataaaatagatatatttttttcttaaaacaaacaaaaaaaattatgtaggaaataaatggtctcaatcatttgtccagttatcatctgccatgtacaaaaattcctttttgttattcattatcaattgaataaacagctaaataaagtctcttcaaaaataaatatgttcaaaaaaaaaaaaagtaaataaataaatggtgactaatgacttactcattgattggggttgagttgatgaaagaatacccaaataaataaatcaaaggcacagaagaagaattgaagtgaagtgaaacatgagtgtagctcctcaatctgctgggcttgggaatgggaaccttcacaatgtgttcgtctatggcagtctcatggccgacgacgtcgttcgtcttctccttaaccgtgtccctctttcatccatcgctcttctcaacggcttgtatgaatctccttctctaataacaaattttatccttggcttttctattcatgtcttagatttttcttttttagtcaaacccaattttgatttggggtaaaagatttgatctttgggtaaataaataattttaatttatttgggttgtgattattgaatcgaactttcgttttcagtcatcggtatagtatcaaaggacgtgtttatccggctatactaccagtggagaacaagaaagtctctggaatggtttgttgatttctttaatggctgcccagtgactgtttatcactagtgtttatatagctgtattttattttcttaaacattcaggcctattgactggtgttactcccttttcttagttttagtgaaaaatagtgttttattcttgtattgttccttcatgccattcagtgatccaaacagtggtcatgctagtgtaagatcatgttcattttggggtacctatcaatactatataagttgtggaaatttgcgttttcatgagaaaatttgtatgcaggttttgaagggtatcacagaacctgagctatatatcttagatgcatttgaggatgatgagtatgaaagacaaactgttgaggtttcattagaggtaagtgtgttatcaaagtagtccctatttgtttcttttaagttgtgtacatggtacatgtacatacatacattcatacttcttttttgcttgattgaattttgataagaagctgcctcaattaataacaaaccagcagtcaacactagaaaacccagcaatagaacagtagctagtgaaaggaaacaagactcaagtttcattcaaattatcggagcccttaggcccctgtgatgcagagaaataaccacttaattatactcacctatttatactttcctattcccactcaaaagctatctcttcaccaacaagcttctaataatgataatgcatttttatagattttgtccacaaattgagttgagacttgaaagaagcactccaattttttgcaggatagttctgaaaagttgcaagtttacacttacgtttggagcaacatagacgatcccaacttatatggagaatggaattttgaggtaaaattctgtgtgatcactgttttccacgaccaatgaaattttgagttttgttaatttataattattattgtggtttgttaaaaactaggagtggaaacaactacacatgaaggaatttgttgggatgaccaagggttttgtggaagagctggacctgcctgagtcgaagacaagagtttctacatatgaatctttctataagcagcaggaaggtgacgacaaccatcctgcctactcctaaatctatttatcttttctatttcagatgtaaacctactattactatatatgaattgatcccctgccaaacaacatttaagcttctaagaaataaatgatccttcatcaatttgtaatttaaaaggattatgtgaaaagttaggacttctaaaaaggaaatgataatgatggtacggtttggtaaagcttaaaataagctgatttgagcttaattaaaataggggaaaaaaaagacaagtgtttgggcaaattataaaaagacacattttaggattcgtaacttataaaaagatgaactacagataaaggaagaacaaaaagaatgaattactctctctctttacatacctttaactgtattaatgaagaagcaatgagtaatttctcaaaaatcaaaagcaaagagaatttaataaatagaactacagaagcatacctaatttttattaatcaataatgcatctttcttattggaaagagtttaaactaataaaagtaaataaatcaatgcactatagtaatgttcctctttcaattaattttggttggcagaattgcgacggcgtaatttgagatacccaaacttgccagcacctggggatgaaccctcaaaaataaagggcaagtagccagttgcagctttgtatctctgctgaacctgaacgttatcatcacaacaaattaacacctcagtaatctaataagacaaacatttcataaaaagatgtataaaacttgagacaagaatcatttggtttggttgttcttcttctaacaaaagtatcatttgtcttcatcaatatattgttcaaaaaatgaatatcaagtaaatgcaaagttcaaatataacttatcgtaacagtctttgtttagtgctaaaatgttacctcaagaatttgttggctgctctgtaagcagttccttccaatcacacaaactgttcctcctgagccgcctcctgttatcttggctccaaacaatgtcccttcatcagattgagagactttactgtgttgcaattcctgtaccaactgtacaagcctatctgttccgtccgagccaagcccacaagcgctgtagctataatggcactacacacaaaaaaaaaaacaaaccaaaatggtcaagaaatgttataatgtagttacctgcaagatgtttttatttaagttcagctaggaaaattaaatgcaggtttctttttgtatacgaactggttctgcacttttggtccttgattttctatcaacatctcatgttacataatccattaaatccaagtactgtctttcaaaccagatttccatttataaacagttttaactcagataagtcacaactaaatctatgaggtaagttcatatttgttaggtaactgtgaacaatagttgctacttggatggacaagtccgtcaccatttatcaaatgattgcatctggatcgaaccagcagtaacaagaaagggaaaagagaaatagttctaccaagtaaaagtgaagatataattaaccgattcattcacagtttaaaataaatgaataaagagattccccccaaattgtttcttatgaggcaatatttcaattgtgctatgatcttacatcttaaatgtctgctattactattgtttgtaaacatataggcaaccacaaaaattttaaacaaatacctgatataataattctccaagcgctgtaagttgctcgtgtgacgttgctgatgtcagcagtgctttgaatgcctggaatcaaacaattgggagagacatgtcaaattaaatacataataataaatacaaagactacaaatttattaaaagaaacaaaagaatgtgttgtgacttggcagagtatacattaatgccgccctagttataacaaaaatgttgcgtatgtaacatgaaacatcaaatcaggtggaagtaaactgcctgtaatatatgacctgagaaggatagtaacatctagtgtcgttacgagtgagtaactaacttgagaagacatcaattaactattaacacaccctttgatgaaagcatattcaagctttgatatgcttttccacatgcaattcattgatgcataacaattaactagcaattaaattctaaccttaacccggaaattttcatatataggatgtctagcaggtgctatcactccataattacgctttggatcaattactgtgactggatcgttgtggttagcatatttttcctcaaatgtctcaccaagcatgaactcgggaagcatcttaacataaacggcctcatatctgtacaccaaaaattttatgaaataagacaaattcattctgagtatgataattgataaccaaattaattgcattgcatgactcagcagtttggatgtttgttaatttgcctttcacaaaagaaaaagaaaaagctatatataaaagtttacctatgaggtgacaggttgcataaataatctaacgatgcttctgcttttagcagttcaataccatcatcacccaactcatcgaggttgaatccggttgcatcaggcagtgatcgagacagaatagaagatgctatggacttaattatttttcgacccataaaggtgcctatcctgacggatccatagtcagcacctccaacgctacaaaggagaaaaataaacataaaaccctctttatttgtgagttcaggaagcatacactattttgataagaataagaatagtgcactgtgcaccaataaaaagagataaagtaattcaactgttcaaattcatatgaatttatttaattgctttcttgacccagtaaagtcgttagttcagaaaacccatccacgacataaagcaacaatcatagatgacacaccaacatacacaagctacaatgcaccaacatatagcaaaacgagaataacgaagcctttctacctgtgtcttattcctgaatcaactccccaaaatcgtatgtggccaggaatttcaacaagcccaattacctcagcaggctgaaaatgacaagtaaatttaacaattatcatctaatctaggtaacaatagcagcaacgcaaagttgttctcatcaatgagtacctggcacaccattgcaagaagtttattggcttcaccacaagctgaagtcatctggtccataacaccacatggagctccaacaatatgattctccacctaatcaccaatttgaaaataattgtcaaactgataagtagataagagactgaaattcgatacatctcaatagaaatcggggaataagtattggagataacatcttttaaagtcataccttttggcaaagcaaagcaagatctcttggcttaatagttaatcctgcaacgtagagcagtcggcttaaataatttgtctacgcaaaatagtctatttcgacaattagtagtttatgccgaaaatgaggaaaaagcattctactccaatttctacaataatacgaagctctaagaacacaaaagaaagcagcattatgttacttatactcaagcattcttcgtgatccatggtttcaatgaaatttacagtgaatagagttaaatgtgacagctaatattcatttgataacttggaggtacaatggaaactgacatttgtcaaaatagtaaatacgaattttactaatttttagaatttctaccaagcaagaaaaaaatcagaatctccagactaacatgccacctcacctacgttcctccatcctgatctttttttggtttcagttaatcatctgattaaacagagcaccaatgcgagttaaagatagtgctttcaatacctaactatatagactagagaagtatgtctcactgtaaaagcagcacatttccaatgcactaatttttaaataaagtagttcaaacctttacatttttaatatcactgacacccatgacctttttgaataagataaagttttttactataaaattggttttaattccttatagtagaactcatcaaagactgactactgtcattttcataagaaacaagcataaactaagaatacattctgtatagctaacaactgatataatacaacaacactatgaagttggaaaatgcaaaataacaaagttaccatgagaagcagctatggcagacatagtcgcgacctcaatagaagcagaagaagatactccttttccttcagggacagtagaagctacctgtacacaaaatttaaatattcgaactggctttagaaaaatgcagttcaaataaccagttgcatagaaccctgggtactaaaaacctacaacaatgaactccaatgaatgagaacgttgatttaccacaataatgaaaaattaaaagtgatgataagaaacacataccagaatacttaaaccatcctcaaaacgaacacctaattctgtcattaaaaccagaatagcacctgcaacataagctgcccacctaagagcacacagaccatgtaagtaggatattcaggaaaagatacagacaggcatattcaacaaagaagattggtatacttttgggaaggatccttagcaaagaatttatttgccttctcatatgatatcggcttttctccatccataaaatcagatagatccatgtcaaaggttgggccacgattgctcagttctgaaccatatgacacctaccaaaataacaaaaaaaaattgttaattaaaaaaatgaaatattgatgcatctaatacaacttttctgttttgatctctaaatacacgattcatttcaatatactctaaccacagtataacaagcttacattataaatttaatatattcaatccattctactatgtctattatttttacagaaaaaaaaaatagaagagaaaaccaacttgaacttacaatttgcaagacaggtgtcaaatgtccttcagcttgttgtcgggcctgtgcatgtttccaaagtctatgtttacttggatgaaccctttggatagcaacatgacaggcttctctaattggcatctgttgacagaaatgaggtacaaattcagaaaaagcaggagcataatgaccactggagggagatcagggtattaaggttgttcgctaagaaatatagtgagagatgcagcacctgtaatacaaggcttcccgaatagtcagcaatccctcccattacatctaatctcccaggtgctctggtcacaaaaatttcttcctgtaatccaaatattatttgtaatataaagttagtaacggaaaaacttgtacattagaagctaaagaatcctaattggatttatatttgttccaacccagtctgcccagtagcaccgaagatgaaatttagaatcaatattgaaacatgcacacattttagaagtttcaatactgattctagaaaattatatacatgactttctattcataaaagtgcaaacaaacatgttcaagcactatagcacatgatatcttatcatagtaaagtttttcatctgttcaatttttgtggataagtaatatgtgtctgctgtaactaatccaaatttgtctgatagttgagaataaaatgaaaaccattcctaaggcataattcccatgtgaagttctaaaaacaatgttgccatgaaaaacatcaaaatctaattaagtcatatgcatatcaatgccattgtgtaccaaaaactttaagaaataaccagtcaattgttcattgcaattataagatgtgatggtatggaactattatgcatactttcatgtaataaacaagaacataatcttatttattgaaaagcacaatgcaaagactagaaagaaataacttatgaaattttagtttagatagttagacctcccaattaaaaagtccagcagcagccttacgctcccggatctggcgcttctcagaatttttccccaaatcataaacagcatccaattctgccaagctctttaaaaaagttaatgtgtctggaagaccttgcgtatctccatggagaatctcgaagtcctctgtgaatctgaaaacagaagttgaatgatgtaaagcaaaacaaattgcaatagcacttgttttcttacaagaataaaagtgcaataaaaatttaaatctcacgagttcattaaggagctttgctcgctcatttggaaagagggtgatccacttccaagaccaagctcactttcagcatttgaataccaatctggaatgcagatatctcgcccaacgaccctttgtagttgatacccaagaatgatggcatcacgcaaccttctagctccactaagctacatttcaattgagcagaacaaaagtttcgatgtaaatcgtccttcctcattagcagaacttttactttcataatatgggtttcacgaaaaatgtaagctttgttttgtacccgatttcttctcattacatattcagtctgcatagtttcctttcaaatacaaatcctctatttgttttggcataatttataccattttagtttcttgagattttaaactgtaatactgagcacatctagtgacctgagttgctccaacagagattttttctgtttaagttaattgtaagagggaaaaaaatcatcgtttaccttatccgacgcatagtttttaccaaaagctgtctcctgcaatatgtgagctgccacctgtgatttaaaaacttctttagacaagtaataagggcacataatgcaacaataaatatcttttccctgaacttaatgcactgccaatgacattgtagataaaatatgattttttttttctgttaataataataataagataatctgttaagaaatggacatatatctagcaagcttcacacaacctttaggcctacccaataatcatgaacctatagtatgccttgcaagaaaccagagttaccaagactctcaacaaaccaccaatttagacaggagtacacattttgaaaaaaaaacttagacaatcagattctaatattcaaaccaacacgcatttcataattattaaaaagtgacatactttacaatcatttgacaatttcaacaattcagggatttgagctttgaaattacaaatctgctttcaaaatggaagttttctcaaatcccttcctcctaaacattaaagttaatccatgaagaatcatcataccattggcgctaattactaagtgatcaaataccaaactaaaattgttagacctgttgtattttccctaaagtatatatgattaccgtgatgacacataatttaaacataaggaatcagagaagtccaaaagtgaagaggatacctcaccaccattgatgcctgcttcatagcatggtctcaaagtaattgcacgttcaagataaggtgcccaatggccagtaagtaaatcccttctaatcatctcgacacctccttgatgatactgttcaaataattattgcaccaaaactcatcaaattcttggcaagaatttttaagaaaaaagagaaaaagatgagagtaaaccagaaggagcactgaaaacatcaggttctcttaattacaggtttaaaatgataaggagcaaaagtaattaataaattaaatatacctcaagcataattcttaagaaaggctcttcgttgaaataatctcggcgaacaaaaacaaaaggtagcttgtatgccagggcctcgctcacagtaccatagccaattttccctacaaatgatatattcaattcattctgtatcaacaaaatccagcttgcattgacaagtttaatacataccaatcatacagtcagatgctgccataagatcaggtgtatacgcatcttttgctagctttataaaatttggaggaagctcctgagtgtcagatgcaccacagacctaatacaccaaaataacttaataaaagcaacaacaaaaagtgtacgaaaggggtttgtttatgtggtgcatacttttaaggaaaaattttatagaataagatagaagaattaccaggcacagccaaccagaaggtaaaaattcctccttcaacttccagcctgctggctgcaaaatagaaaagacacaacgtgtgatcagaataaactggatgcgatcacttttgatatgcaatctcaggaaaagcctaatgattgattacaataaatatgtaactcattatcctcagctgcctgggaagtcaaatttccaataaatataagaaaattaagctaacctgcccaccaaagttcagaatagctagcttcacatcctcctcaatccctagttccttcctcacctgaagaagaaactataatgagatcatgaattaattaagaaactaatgttgtttacagaaaactatgagccgcaaacctccttgcgggatttgtgcaatcttctaacaacaaggggaacatcaataacatcccgaaaagcaggcactgtagttataagtagaaagtcaaagaaaaataagttaataatttgggaaacatacatataaaaacaaaacacagtgtaacaagtgatgccacaatctagcaaatatgtcatataaacctacttgggcagtatccaggcaggcggatcaaaaattcacagtgagaataatcttctgctatctgtatcacattttaagagagacaagtttatcaagtgctggaggacaccaacaaataacactcaaaaacccaaatgagtgaaggcaacactaattaagaggataatcgccaattaagaggaaaaaactactgtatttagatatagcaagtaaaacttacctgccaaacaattgaccgatgatgatgtccagcagccatgacatactctgcatagatgaagtcccaactgtgatagtgcaaattaagaaattagataaatgaaaacacttataattattaataaatgccatctctttcatataagagaagaagtacttttcataagccaataatgacttgaaagaaatatagcttttagattcattgatgttaaattaaaaatcaagaaggctaacaaagtcgcagtgagatcatactaagtaaaaattgcatacataaccagggaaccttaaaaaagaaaatgactttccattaccccaagaacaaggaagaaaatcaatatgctatatagtgaaattattgctacaaacgataaaaagaaatcatatacctaaagttggtgacacaaacagagcgaattccggcatcagctgctgcacgacatgcaactggaacaacatcggagacctacaaatacatatacatgtatcagcacaattaaattaattatcactattttgtaatgtgtgagaatttgagaaaaggaatgaaaagaaaagtaggtattaccactaagtcagctttaatagaattaagccactccacttctgttgctaaaatggaagcccgaggtgccacagctgtttgtgaatactgaaaaaaaaaaatcacccaaattgaaaaacaatgacaaatgggttttcacaattcaaaagcttttcattaattttacaattgacaaaaagaaaaaagaaaaaccttttccaaggaagcaagacgatccacagtcaatgcatctgcctgaaccgctccacaatctaacagcacctaatttaattttacaaaactataatcaaatataactggaatcattagagatatagaagagaagacacattgaattgaaagtgaggagtttaaaccttgcgaaggaataggcgaggtgattgaacttcagaagtaaaaacaaattcaggagcaccagttaccacatgcacgtcatgcccagccataatcagatgtcgaaccacctgtccatccgccatgatccatgatcagtcacaccatccataatcaaccaccaaatctcaaaaaaaaaaagaaaaaaa

SEQ ID NO: 42455 - DNA, 671 bp, Cannabis sativa
ttaggaaatccatgcattttttgttttatcgaaataaacaatacattatgataatattattatacctaccgctgatcatatatttaatttgattattataaaatataatatccacattttcaatgattaaatttaagttgattacaaaaatatacatcgatttgattagattcccaaaccaacatattataataattaatttatggtggtattaattatataacataataataaaatagaattattaattggaccaaaatgagaatgagacagaattacatcaaaactagaaattatatgacacaagaaatatcgtatccaaactatgacaactgctacagagtttttgcttatatataaaactatgtccttattatacttggtgtctttcatatatataatccaattaattgcatctcatttttttcttcatatatatatataaatatatatatatttcttaactataaatcagttgagatatatataaataatgaacataaaaaaatttatgttgggtcatcattttcgtctctattttaggagtataattaacttgtttttatgtatatgatgaattattttatagttataattggtaggaatctattgtcaattagcttttggaaaatattttatggtgttgaaattaagatttaaatatcttaatt

SEQ ID NO: 42456 - DNA, 3011 bp, Cannabis sativa
gacgggaaatccccgccccattagagccgggtccccgcggggcccatccccgtaggggaaatgtgcattcctatttgtgatacacaaatttaaattaactaaacttggctagacaagtacatgtaattttaatactgaacatggaaattacgcatttaatttttcatatatctttctattcataaaaaacgaaaattataaacctttcttcttttttttttttttttggacgaaataaatctttctattaataaatgaagaaaagattttctattttaggggaacaaaaatggtttacaaataaatatttaaaataaaattgacattaatttcataatgtgtttttagcaattttcaataataagagaaaaatattaatagactttagcaatttccaatctgtcgttggtttctctgcgacttttttcttctaaatccttcttccaccgctggatatattttttcccaggtttctttgtcaatacgaagatctaaaacccttccctctttaggaattaggatcaaagtgaacaaaatgatgaacccacgaacagacaagctagtgaggaggacaactatggtggctaccgtcactgcctcttattttctcctaaccgccgactatggctccgaaccaaatgctctcgatcctgtaagcttgtcttcttcgatgaatccgttcgctatgctgttattttattgcaattaagatgaaatatttagaaactttaagatgttttatgaaatgggtttgcaatctttgctcttcgctacttaaaataatggtcaactcagctgtgagtagcgttttggagatcttttttgatgtttttgtatgtgggttgtctgtaaattttcgtatatgtattgttttggggggttttctaggtttgagttactgtgggaatgtctcctgttttggttgtcgtttttcattgatggccttttcattattctatggaagcaaaggttggacggactagactattacactattgacatcaaattgataaaagcaacttattatccattgttcttcttcatcctttcgaatgaaaccactgagttgagttggtaggattttgtccttgaaatctgttccttgtcacactgatagaactggctgccatttatgaattatgatttacaagcacctatttagcgagcataagttttaagcgaattgagacctgtaaaattgcaatgacaaatagccccttattttagaatgtagaatatttgcactttgtgtaaattgtcactttcagttattttgggcagtgtttgttgctggatgatagaatatctttgctttctaggaataaataagtcaattctttgcaagtcaattcatttgctctatccatttcatctcgtgtagcttgtatatgttaatttgcacttcgtggataataaaaatctctacttagtcaagaattttatgtcttgaaattggcagtttctgttttatggttgcctcaaaaaattgatttcaaatttgagtgtcatttatgaagttgcagtctataatgtttatttagttttatcttgaggagttatccaaactttatcatctaagataaagattaaggtacattttacctaaagctcaaaccttctatggcaggttaagaaggccataaaatcggcagaaaattcagtgaaaggatacatctttggaccaaacactcaatctgaagaaaatcaagtagagaagctgggctctgacaacaacaccaagaaacaaccatagtttaataaacagctaactctgtatagtaacacctccagtttgagtaaattttccagttttttttcaaaatgagatgctgtattgggatctattggtttcttgtaaaagcttacaccttaacaccaattatgactcgtgaaccttgatgttttttttttaaacatacaggcaataaataattctttgcaagttcaaactatttttttaaagataatactttgttatcataaattaaaattgtaagtcatttacaataacaaaataaataagaagaggtatagtcccaactaagagcaatttttatccaattctaaaacatactgagccaacctgagaactgctatattagcattgcgtttgacatgagcaatgacatttttaggaaaaatgtataaaagatttaaaatgtctacaatcagatcatgaaaagataaaatcccaatttgtggtttattcaagtatttgaaaccatcaaagcataaaaaatggtttttacctctatttcatgcgattttaaattttgtataatcggtttagaaattgcaaccataacatgaccgtgagcatctcgaatagttgcaccaacaccaatgatatgatactcctgctagctagcattcaaggcagcatctacaactactttatagtctcctaaacccgggagtagccacggaggtgaagcagtcgatagttgagttgttgcaaagggggtgttgtcttgagttgcaggaatagccggataatatttgaggctggcagatttgaagttgtcgagataaattgcagcaaactcagcgagttatgcagccggccttgcctttcctccatgaacaacaaggttcctttcagtccaaatgcaccacaaagtacaaataataaattctatttcggcctcggtatagagtgtagagagaagaacaagcctaaactataccaaacagattgagcatacttacagctaaacaagacatgtcctatagactcccaagcccgactacacaccaaacaagtagtatcagttattaccttccttttaacaaggttagccacttaataaaccacacccaagcaaagattttgatttttttttttttgcgataatttaagagaccaaatatagtcccataatgacgaagcatgtgcatcatcaattgaatttgccaaatgaaagtttgatttaacaatgtagtggccgaagtggtgatgatgccaaataagcatatttgaatttggaaagaaattcaatggtaaagtaaga

SEQ ID NO: 42457 - DNA, 2133 bp, Cannabis sativa
  modified_base (38)..(40): a, c, t, g, unknown or other
agcaaagaactatccaatcaacccaagttttaataaannnaataaaatttaatgtaagctcaaataaaagtctaacatggagctcattacttagcaagatctacttatcaatggtccctcaaagtaatacgtccttagtgttcatttatgtattaatgaacaatttaaatctctaaagaagttttctcttcttttgtcaaaaaataaaatataaaacatcattgaaaatatataccgagacaaaaataattatgagagtaaaaatataatcaaaatatttttttatatataaataaatataaatatttttaaatatatatgaaatgtaattaaattagatcaatttttaatttgattttgagattaaaatgcaacaacatattcaatcgattagatttgattggatcttgtagtaccatcgggtctaaagctacaatactacgaggtgtttttcaactccagctggctgcctctacagtgaacactgttaactaaactacaaaacatatctctcccttgtcttcaaaatatatattaataataaaatcgccatgtatgactaattaaaaatttcgtacgtctacttggtacagctagttgtaacgaaataaataaatatatatttatgtataataagttaaatagagaaagagattgattaaataatattggttatttctttctcaatcacaacctcgcctatatatatagacacacacagcctacacataaattatatagaaggaagaaagcaataataataataaaaatgggagaagaaataaataataaagatgagtatagccatagggagaggttattgattcctaaagaggaggagaaggagaaggagtacttctaccacccaaactgccctggttgcaaggtccaacaatataaagatttgcagcaaggtttccctgttcgagacctatttcgcatttgggctattgtcctcgccagtggtacgtatcaattcaataataatcttattagtattctctctctgtttttttttttttttatgattttacctggggatttattcattcttttcaaaaacaatccaatcctatacgtttctcagctttcgatgattgttgtttttcttttttttttccaaatctcatatgtattaatcctctgtcccaatcttatcaccattgcaaaatatgttaattatttgagaatttatgatattatttgaactaataaataaggtgatttgtaggagaaaacttatttgatgagaatttaaaatgaatattcggttcatgttgttgatgatgatgatgaagtttgagtttacaaaagtaacacgtccaattttcccaaatcactcacatatttggtaaaatgggaaaagtaactcctactttcaaaattgggctggggcattgggtgggcccataagtggactcaatcatatgggctagaattactttgctttttacacattaggtaataggtggaagtttgattggttgtttaaaagtgtatcaataatgaataggcacactagtaaagactaaagaggataataataataaaagtaacaatcaacgtggatataaaatatatcatacttttacacatttactttcataacttttgttctaataatattggattggggccgaaattatttgtgaattggccttaaattatatattattgttaatggcactaactaatgacctctaatacactatattaaattccactaataataaatattaatttcataataatcttaaacatcactaatactctttaccaactctcttcattagattgtgagtacctagtgcagatccggattgttgttggccctcagaataattgaaaaatttaggctaaataaaagaataggtaatctttttaaaaatcactaaaaaatatatgtatttttaagggatttgtttttctctttagagactcttaaactagttgggacttaggtgcaagcctaatccgctcacaaaaatattgtaagtattataaatttgaatttttttttattgtatatccattttttatgggaaacttacaaaaatactagagtttgggttaacttttacaaaaatattattacacggaaatctttttaaaaatattatgtttttataaaac

SEQ ID NO: 42458 - DNA, 10119 bp, Cannabis sativa
cttcatttgatttgttaattcttccataactttgtcgtagttttgtgatcaattattccaaacacaataatgttgaccttcatatcttttgtgtgaattgggttatgagattattgagatatttagtacgagactggaaagtggtgtaatatgcgcgcactcaattcccttttaggtgttaaattcaatcctctaattctaatttcttacagtagttagttaagacttgaaattggactttgactttgactctattgactatactatgttgactgcaatatttcttcatcctgatagttccctattttttcctttttcttttcctttttttttttgttttggtacaatggaacacgtgaagcaatatttttgcaaatgttacatactcaggagtaagggaatatgtggggccactggattttgtttattgtaactaagcacatatatgttaagtctaatggactgttcgtagatgttgttgcatcatgctggcttattattctcagttcttacgacccatcttactaatcataatggcaaacggtcaaaggtatcgctaaattggaattctggcaaggcatacctgattttgactgtgccaactagttatagtgggccagtgattatgtattggactttaccaacacatgcaaatggcatttggttatatttttcttacctgttgtatttagtttgctgtttgatgatagaaagtctaatttctctcgcattttaagtatattgtcatcacactgaggctttatctaatttgaactttctagatgttgtctctttattcttttttatgctttgaagcattatgtttttgttataatttgtactctgttctaatttctctctcttccaaatttgtgtcatgatttgctccaaacttaatttacttctgttttgctcaagttctgcttttgaggaaggaagattctgtgagacttttcatggaaatgcttctggctggaggtgttgtgaatcttgtggaaaggttgttagaaattttgtgactaatatttagattatatatgtctaatactattgaataaaaaaaagttacgtctgttcttgatatttacatttatattggttatattttctttgcagcggattcattgtggatgtattgtttctattcatgcctttacattattggaccctggaggaattgaatgcattacctgtgcaaggaaaaatgtctttttggtaggaggaaatccatccttatgttcatattctttattgcaacaaatgataaagttttattcatggttgcatatatgaacatgtaaaagttgcctgttcatgttaaattctgagtttattttctttattgcaacaaatgataaagttttatttatggttgcatatacgaacatgtaaaagtttcctgttcatgttaaattctgagctcaatttttttttttaaaaaagtgtgttttgcttagtgacaatttgattttttaagcctttcattttatgtgaaaaaatattatcatgcaactcagtattctgtactgtgtgcttcagacatcaaatccaacatgggcccaatctttcctttttccatctgaaagactcaaagatttgtctatgaaaaattggaatcaattggctggatcaggtcctgttccatggcggcaagcccctagcttatttagttcgtctattccatcatctgaaatacattcaagggttccttatgaagttgacatttcaagtgcaataaataaacttggtaacggggaaaggatatctggttgttcgttggacaagagaaaagttgaggatttatctgaaagattacataatggttccctgaagcttggtgcccaagagatacatgaaaatggcatcacaggtactaattttcatgctctttagtatgtagtagaaagaataatggtatatgtatgagctgtcttaataacggtctatttgtatgaattgtcttacttttgattggaagttatagtggctgtcaacatttgctttatacgtatttatacaggaaagaattgtgatgatcaaattagttcatgtttgagtatgtctcaacagtcttcttctgtaaaggaggatccatctcctccccaatttggtttgcttgtacccttttccagtacaattgaaacaaatgaccaatttgtggtttctggaacaaatttgcggccaaaccctcctccttccttgtcaaaacaatttgttggtaatctacaaaacggggttgacccatctggtgaaactcaaattcgcaatgcaaggcctcgggcagatgcccgaggaagaaatcaattacttcctcggtattggcctaggtttactgatcaagagctgcagcaaataactggagagtatccttttgttttattttcttatttttagaatttagatgttctccttggaaagtttttctaggaatttatatttgtccatgttattatctgtataggcttgtgttatgtgttctaatatcagcatcccataagccttaaccagatttaagttctaattctgtaatcactccattgtttgagaaaatgttaagtgcaagtgatgctggacgaattggacgtcttgtgctgccaaaaaaatgtgctgaggtgagttttaatgttattaagtcgaatgtatctttggttttatgaagtgccaaaaaaagaaaaatatcttcagttttagaggcctgagaaatgttaattataaatatgccaattagttgaaagttgaatacatttttgaagacctgctggtgggttagatgggttagttaaatattagggatttgaatttgataattgatatgcatcattaagtcatgagaattttttaccatgtatgcttagagttgaggcctccaagcttgatgaattttttatttggttttattttgtaacctttgtcgtctcctctcctccactgaattgctctttgttttttctgtcaggttaattcttatactgctttgttaatatatgtagcttgaaaactcaattgacatggacatgatgcatatttgactattggcaacacaaaatgatccctttggcctagtattttcactaattctctttgtaggcatatgatattgatatgtttttatggaaataatgagtttttcttgtggcaggcctactttcctccaatttctcagcctgaaggattacctcttaaggtccaggatgccaaaggcaaggaatggatatttcagtttcgcttctggcctaataacaatagcagaatgtatgttctggagggagttacgccttgcatacagtccatgcaattacaagcaggtgacataggtaatcaactgctgtcaccaggttaattcttgaattttgaagcatggagttgattgttacttctgaatatggattagtggcactttaatattgatttagctcatcgagcacccttccatttttcattttagaaggtttgttggagttggttatcgctgtcttggatttactggatttttctgtacatgttaaaattaatagaatatctagtcaatattaaaatgccaactgtggcagtgtggtgggtcttaaagtttctccatttaggctgagtatgtttttttcatttttctagtgcatgcagtgtcatcttatattcacatatggtttttcttctcccactttggatctgagtgttgttctttgttttcttttttttttttcagtcacatttagtcgtttagagcctgaaggaaaactagtcatgggattcaggaaggcctcagcagccccaccatcagatcaggtttgaccttttctcaaattgccttccattacgtttattctgactgttgatggtggcttggaactttgttagtatgttaggttgggataatgcaatgccatgagctgtagaatgaactaaattctttattctgtactttaattttgtgtatacttggaggatttgtttgaaataataaaagagaaaccggagaggactgtcaaaccatttgtgtggtattatctatctcatccaaatgtgtgagctctcaaaagtaggtagagggtcttctatttaaagttctagtgctagtagctctttttttttttttttttaagaaataactggaataaaaaagtaaaagaaaatactaagtattaattaacagaaaatagtctttatacaatccaatagtgcaccaatcacaagaaatattgactttatctcagttcaatctgtatactctaatcatgtgcactaaatgtaaacctagctcacattgatctaaggtttgttctattaagtgttcattgacttgattagtgagtcaagtatgcatgtcaatggagcttgttatcttgtgttgttaaatttctagggttaacatgaatatctcgggtttgtgtactatttataattttagcatactatttactttttctaatcgctttaatttgcaggagaacgaaacaaacaagaacgcaaatggagttttagcacgtggagatgttagtatttcaaagtatagagctaagtttaattttattcatcttttaaattgtacctcagtataacctagtttttcatcaatcaaccaggctgaactggctgatcccagttgttggtcaaaagttgacaagtctggatacatagcaaaagaagttctaggaggagcaaaagcgttgatctctagaaagaggaagagtagtactttaggttccaagagtaagcggctgagaattgaaaatgaggacatgatggagctgaagctaacatgggaagaagctcaagggctgctttgtcctcctaccaatcacattccaagtgttgtagtgattgaaggctttgagtttgaggaatttgaggtaattagaaaaacattgtgatgccactatatatatgtatatacatatattaaatgctagcaaggaagatggaggttgtttctactaaagttttgctgttctagaatggctctaccatgacttttgttttgctaatgaagcccaagtcatatagtgggtttctatatcatcgagctagaaagtaaacttgaataaccctttcttttttctttttctgaggggaataaaacctaatatgaatgacctcttgtcgttgtttccatttttatttgtttcatttgggtcagtatattactttgaatattgctttagtacattttgcataaacttcttcttgtattgattatttcctagaagtatggaaagcattatatggacagccaagttttattatgctcattattgtattaccatcggctatcattcattttttggcgaagcaagcatacaagggtggcttcatatagatccagcatcccgccctttaaacttactttacagtgttaaactccaaacttacatttttaaaagatgagaaattcctgcggtattaatattgtgtgtgttctcaaatattaaactcgtgatctagcatgtagagtcctcttactaattctggttattgtcattacaggatgccccggtacttgggaaaccaacaattttttcaactaataatgggtaaattacttggttttgagttctgatatataaatatatttgtatatattttcttatgctagttcttatttgtcaattcatgcttctttatcatttcatgcttcagactggtgctttttttgtggctatgggttaacacaagcttaaatgttttttcatctatctgtatcagtgaaaaggttcaatgggctcaatgcgaagactgtttcaaattgcgcaaattgcctgctgatgcccctgttccccctaaatggacttgttctgataattcatgggacccacaaaggtataagccaatcctgcatttatgttaatcttatgtttttggcgcataaactctacatctcactccttaaattatcgagcgtgatgcttatgtgcctcttctccttaagcttatctcacttcaatatcatcaggcgtaatatatatgcatctttttctcttaaagcacaagtctgcagtttaaagtggtgaagtttctcaatgaaaccttcccccaacaactagggacgcaaaaactctcttaagaacaaagatacaatttcaaatgagctattaagagtttattgtttgctgcttttacggcatttattttggggaaacttcgaacttgttatgttttcaaacttactgtttatggtattcttgctaatctgttaaaacaattgcttgcagagcttcctgttctgcagctcaagaattaacatcagaagaactcgaagatctactgccatccactgtttcaggtagagattaccggagacagtatttgttagctgttttcagttccccatcctgtatgattaatgtagagttttacttgtttaagctgtggggtacctcatgctattttcatttaaaagttttgttctgaatattgcaatatgcatttttgtgctaaaactaaaattgtggtgtcctacggtgattgaatagctgcttctaagaaaatgaaggccgctaaacaggatgtggagaatgtggaagctcttgagggtcttgacacccttgctaatctagctattttgggagaaggtgactcccttccagcatcagctcaggcgaccacaaaacacccccgacatagacctggttgctcatgcattgtgtgcatccagcccccaagtgggaaaggccccaagcacaaaccgtcatgtacctgtaacgtttgcttaaccgtgaaacggcgcttccgtactctgatgatgcgccgtgagaagaagcaatcagagaaagaagcagaaactacacgcaaaaagcagcagctactcttgccgtataagttgcaggatgacacagtgaccagtaatagtaatgcaggaaatagtcctaaacagaatgttgatgtccttgaaatatcagatgacgatcctagtaaggtgaaattgtctacctcaccatttaaaggtcaaatagacctgaatatccagccggagcgggaagaagaactatccccaagttcagattctggcagcatgatgaagttgctccatgatgctactgagaaatatattaaagagcatagatatcttaaactaccccctggttcaagctctgttttcggtgaaaatccatctggtaatgtgatgcagtgcgatggaggtgagacaattggagagcaacacaccaacggcataaaccttagtagcaatcatcacaatgcagatgaagatagttctgcagcattgtccatgaaagctgcagtatcatcaaccccagctggatgaaccggcggtttcttgtttcttgtatactatatactatgttgcattgatcagcaactagtggtaactttattgaacaacttgggttctgcattcatccacagtagtatctctcattcagaggtctgtacataaaaaggagaggtggaagagggcttatggagaaacgaattgtgtgctctgatatttttctctctacatttatagtatttgtaggcccaagttgtattgaagtaagtagtagtagggagacgatgattactacaacagaactgaagtgctttgcaagttgaagctattgcagtttcttttgttttttttggagctagacttgaagccttcatttctgtgatagaggacgcaccaaatgcctgttttttcggctcaatgaaagtagtgattttacattcggggtagcttatttgtttactcgatatttttgtacataaatttatattacagttatgcgatttacaaagatgtcaaaattgaaaactgcttacaaattcatttctggaagaagagaaaaaaaaaaaaagagagaaaatcacttatcatgaatttcacttaaaagaggaagccaaaaaaatattaataataatagaaaaacaagctacattaaacaaaatcagccaaaaattgatatgaatcaaaatcaaatcatgttttccttatagtataataaaaaaaattatgaaagaggtacttataatctgtcagaaaataattcgacaagagaattatatcatatatttatatatatgacattaatctaattttaaatggaagacaccatttcatttaaagaaaaaaatgcaagactttttaaaaagttaaccttatttgtaaacttgaggataactcacgactaaatgatccccaacccaaccgaagttatattatgctacagctttgtggttgagacttggagaaaagaaaagaaaatgaccaagtcaacgagacagttcctgactatgcaaaaaaatagaaagagttaattgaggattaaaaagcataggcatacatatacgtacgtacgtacgtacccttcaaaacgggataatttggctggtcctaatataatcctaacataacaccaccaacccctctatctaataccctcttaatccaatctccaccaaataaaaactaaggaaacttcatcccatgtccatttctggatcactgttttatctttctctttctttttctcttcattattattacttaccaacataaaatttattacaatagtttttaataacattcctagtactgcgacaaaatcactgctatctatatagctgtgttgtgtgtttaatttcacgttacagaagaaacccatttcgcataagaagaagaagaagatcatattcatttcagataaatcaaaatgaacgatttattctcaaactcattcaaaagatatacggacctgaaacaacagtcgtacctagatgacttggaagctgggaaagagagtgccaatctcgacaaattcttcgaagatgtggaaaatgtcaaggaagacatgaaatcagttgagaagctttacaagaaactacaggatgcaaacgaggagggtaaaatcgtccacaacgccaaaaccatgaaggagcttcggtcaagaatggacacagacgtggaacaggtactgaaaagagtcaaactcataaagggaaagctcgaagctttagaacgttcaaacgcagccaatcgaaatcttcccgggtccggacccgggtcatcggctgaccgtacccgaacctcggtggtgagcgggttggggaagaagctgaagactatgatggacgattttcaagggttgaggaatcgaatgcagtgtgagtataaagagacagtggaacgaaggtacttcaccataacaggggagaaagcgagtgaggagactatagagaatcttatatcgagtggagagagtgagagttttttacagaaggcgattcaggaacagggcaggggtcagattttggacacgatttcagagattcaagaacgacacgacgctgttaaagagattgagaagaatttgattgagcttcatcaaattttcttggacatggcggctctggtggaatctcagggtcaccagttgaatgatatagagagccacgtggcgcatgctagctcgttcgttaggcgtgggactgacaatctccaagaggctagggagtaccagaagagctccagaaaatggacgtgcatggctgttgctcttggtgctattgtcatttttcttctcttgttcccactttttacatccatattgcctactttgatctgaaaatgaaaatgtttacttggaattattattttccattaacgacaaaaaagaaaaaaaaaaacaaaattggatctctgtgtgtatatggtgcagtgcaattcagtaaagttgcatagcctaattaatgtaagtatttttttttcttttgtaaatgtagagaaattaataggtgtacatgaatttgctggtttataagaacaggtgatactatttgtatactattatcgattatatttttgaattctctaatgaaattaccatttgactattgctttctctttttctaggggaaatctatgaataatgttcgtgaattaatgttggacctcctttttagatatgaaattctttaattgagtcttttatcttaataaaattcttaaatatatcttaacaaaataatttaaatattctttatagaaaataattatagtttttaataaataataattaaaatacaaaatgtggtttatgtataaaataaatttaaacttttttgttaaagagttttttttaggcttagtggaggtcttaggcctgaccctggtgccccacccttagc

SEQ ID NO: 42459 - DNA, 8295 bp, Cannabis sativa
caaaattcaatattcaataaataattggattggatcggatgggtccaaattcattggatgtgatccaatgaacacccctatttataggtcactcgatcatcacattaatgttcacaggtatgaatattaccatattatttctgttttattttattgagtggagtgcatcatgtttctatatatctcaatcgatctcatatatccatcatgatttgagatatatgttattctcaattttcatatatgtttatatattttggggttttggaaagaattttaacaaataatatatcaatttcgtgttaagatgacttttttcttgagaagtagtttggcatcatcatcatcatcattatcagtactctctactcttactaataataattataataagaagaagaagaagaagaaggagaaaaggattgctatatcaactactgctattactaagcctcctcatcatgataatgataatgatcatgatgatttgatgatcaccaacaatgagattaccactactaacaagtcttctactgaaacaacaattacacatgaggaggagaagaagaaaaagaagaagaagaataagaagaggaggagatcactaagtccggtgattattatgcacgctagatatcctaatcctaatcctaatcctacaccagagatacaagtcaaatacattgacaccgggtatgttatgttatgtactactaattctaatgcatatccatcattgtcctctatgttctttgatctattctactactcatcattatatgtatgtatgtgtaattctttctttaattattatgtattaattagttgtacatgtctgattatatatgttagtttttacacgccccctcatcttagggatgtactggagaaacactaccgccaagaggagttttatgaggtatatatataagagatatatagtatagtaattaatctattatgttagttacaacaatttaattattagatgatcagaagtaactaattataataattgtgtggtttttttgtttaatggtaggggttttacttagaccctcttccagaagaactactaaaactcaagcctcatcttctcaaaccagcctccgtagatgatcccctaatccaagagcttgcaaaatgggcaatccaacaatataacgctgagaacgacaaggttaattaatttctttcattctttatttgaattataaatttatttatttatttgttataattaatatgaatggaataattaattaatgcagggtgagaagcttgaatttcagaggattgtgagagtgaataaaactacacaatctcctagtcgtaagtactatgtaacagtgggtgtgttaggagcttggcatcgttattatgaagctaaaattacatatcacactaaattcatttctcctggtcgctgtgttcccactaaaacacttcacttttgtaggtatgctcgccactatccaatggtctattagtattatgatgatgattatttattaaattggttaagagtgctgtttgtaattcttggaaaccaaatctcgaccttctttcttatggatgaaggaacaacaagtacaatttcagtcaaaatatttgcctactaaataatttagcagtagaaatattccctactaaaatattagctaattaagtttgtgaatatatacatgggccaattaaaaatcaataaaaagaaaaaatggaatgatgatccctgggaaaagatatgaaacatatttgaaatttaaagaaatacatgcatattaattattccatgccccaaaaagttgtaatattataaactcattctacacagagattttggggtttcattctctacttggaataatttgtgtgttatttattgtcattcatctctcatgcaaaagaacccactcatctttcattctattgctatttatttaagttataaattaatatttaggaaaaaaaaatatgctaaaaagttaagtttatttatatttaaatatagagatgtggatagcatattatataaaaatagttcaaaaataaaatctattttaaccgacacttaaatattataatgtaagttagtatgaatattatttattatatattaaaaatacaattcacatcaaaaattatgaaaaataaaaattatattttattctcatttttgacagaaatggtgagattagataattaaggataagtgggaactgaaattagtagaaatggtggcttgtcgactacaatattaatctcgaaatctcctttcaaaactcgtcaatctagcatgctcaaaatgataagtgttagtggtatatataacctcaggataaagattctaagtcagaggctacaagtgttaagttagttaagacttgacaaacttagcaaactcctcgtaacaatatttccacgccagcataagacagtgattttggacgagacatatgcttttgggaaaaaagactaaagtgtacgctaaagggacttctcggataagaaagacaacagctggagtcgactatccggaacttccttccaggaagaataactagttgtttgaaactcctttttcgggaaagactagcatttttgaagactcctttcaggtggacgtgacagacatctgggaacgcccttctcgatgacacctatcattttacgagactagcttcttccagatagacaacttagacttctgagaatgtctttccgaaattcatctaactttccatgaccaaaataattttgagatttttatttggatgaactataccacaattacggtgaatcatattctcatgataatgatgatgattaagctagtgttgttgaaaataaaaagtattatcatgattttgatgttattagtgatgataatttatttattagtaaattaaatttctaataaatttaaatattttaattactagtttgtcatctaattgagaagttgaaacatatattctcacccaaaacaatattcttgtacttgactcacttattgatctaactactctaaaatcccctgccaatatcattctcgtaatcatcattctttttaatgaaatgttattttgtgtttttttattatttacctatgaactttattttaacaatcattggcaattaaatatcttatgtatttattagaagtatggtgttctaattttcagagtaaaattgataatcagggaaccattggtaagtaaattcaaaatagattacatatatttggatttaattattgagaattacttattgtttagtttgttactatgtaaatatttaacaacgtattgggcttttgtcaccgtgggatgtgtaaaaatatatttaagaaagcaaagaaagttggagataaagctttcggttcaagaattaattgatttatgttatattaagaataaaaatgaggatggagatagggataagggtgcgggtgtatctagcattattaatgcgctagattatattacaaatcatgacatacgatttaacatggaccattcttttgcgggtgaagatcaaaatatacttgaatgcaaaatagacaagtcatatctaactccaatggtatgtatgtataatgttattattataaatttgattaaagaaaagagcatattaattattttattcattttagtatcgacgagtgcatctcttaaagggatataaagaactagacacaattgaggagatataaactattatgatgaggagaggagacacagtaatagcgggagttaaaataaataaattctatcaatacttgaatctaactgtatgtactatgattaattttgtgtattttaaatataatttaatatttacaaagatattttctaacaataatattatatattgttccattgttgtagaaaatatatgatgattcccctcataataaagtagttacgcatgtactacttattgtaggatttgggtatgaaattaatgaacatgaaaaaaaaaaatatattggatcgttaaaaattcgtatggaaacgattggggagccaatggttattttagaattgaatatactaaaaaaaatgattaagaatactatgttctaattcttagtgataaaacaattttttgctaagtaaatttaccaatcaactgcatccttctctcagaattgcgttacaatatatgtatatataatgtatttatattattttttcagtgtagtctatcatttattattatattaaattttagtattatatgaattatatattaaatttttgtaatggaatgggttgtattcaagtaaaagacatgttgttagcaactcattctattacaaaaacttaatatataattcatccaataccaaaatttaatataatagtaaatgatagataacactgaactcataatatatatatatatgctgaaatggaatttagagaaagatacaactaattagttattttacttagtaaaagattattttaacactaagaattgaagcatagtatttccaatcattccttttagtatattcaattctaaaataaccaccgcctctccaattattttcatacaaatttttaacgatctaatatttcttttttttttctctacattctttaattttatacctaaatcctacaataagtagtacatgtgtaactactttattatgaggatgatcaacatatattttctacaataattgagtaatatataatattattgttagaaaatatcttgtaaatactaaattatatttcaaatacacaaaattaatcatattacataatggattcaagtattaaaagaattaattcattttaactctcgttattactgtgtctcctcttctcatcacaatagtttctatctcatcaattgtatttagttctttatatccctttaaagaatgcactcgtcaatactaaaatgaataaaataattaatatgttttttttaattaaatttataataataatattatacatacatacaattggagttaaatataacttatttattttatattcaagtatattttgatctttacctgcaaaagaataatccacatcaaataatatgtcatgatttgtaatataatctaccacattaataatgctagaagcacccgcgtctttattctcatctctatcttcatctttattcttaatatagcataaatcaattaattcttgaacaaaaaaatttcatctccaactttttttctttcttaaatatacttctacacaccatacagtggcaaaaactcaacatattgctaaatatttacatagtaacaaactaaaaaataaataatcttcaataatcaaatctaaatatagaatccattttgaatttacttaccaatcgttctctaattatcaattttactctaagaagtcaatcggaacaccataattttaaatgttcatcataaataatacataagatatttaattatcaatgattattaaaacagaattcatggattaataataaaaaaaaatgaaaaatgacatttcataatattagcagaaagaaaattttagagtagttaaaccagaaagtgagtcaactaccagacgattgttgtggtgaaatatttgtttcagcttctaaatcatatgacaaactaataatcaaaacaatcaaatttattaaaaatctaatttattaataaagaaaaataaataaattatgagtaataataacacaaaaatcataataatatacttctcactttgaaccgcaggagcatcattttgaaccgcaggagcatcatcatcattttcatgagaacgagattcaccatcttcctcttcatcatattcacgatcttcatcctcgtcttcattttcattcccttaaccaaattcttccaatttctgaaaaaggacattctgttcttaattaaactgaaagttgcaagttataaatgtattcagactcatcaataaattatgtaaaatattgattatagaaagaaaaaaaaatggctactatcaaggtttaaaagaaagcaacaattaagttgtacatatatgcacaatatgtattatcttagaacaaaacattataaatcatagaaaagagagaatcagttgagaaaaatcaaagataaagtttcaatcatttttctgcactaaacatgtttcaagtagagaaattaatttggattagattacagcatatatatatatatataacataatcaaactcttctatacattgattatagaaaaagaaaataccttttgaaatcaacacttttagctattgaaacaaaaaaaaacaaagaaatgtaatcaagctaagagaggatttaatttactagtgtatatgtgtgtgttgttatatatagaatagttagtgtaggtatgtgatcgaattatatctcacataaaaaacacatgcttatatattgatagactagagaagaggcagagcaaaaaagttggtgaaacttgaattgcattgaaggagtgtgtgtggggaccattggaaaattatagcaaagcaatggccctttcatcattttcctatctttttttcttgttttgatacatttttggtgtctggtttggcttcttttttataatcaatcaacaagtaatttccttaaaggtgaaaatggtattaatgtgtatttgaatttgtagtaatgggttttgtctgaatctattttccctaaatggattggtggcccattgtgaaactaaactagtctaaagtgatgttgttttctaacatgttttagtatcattacatttattaattgggagggattgaaattaattatgaatcaaaatgaatactttgctgataaacaatgtataaaatatatttataaatgctaggattttccaaaaattcaaaattaaaattacagtttataagatatatagtaatcaagtaattcttgtaatgaaaataataaaacaaagatgagatgggagaattacctttgaatattctgagaaaggtctttttgttttcttaagctgagagaatgaagtagtaaaagaggagtcttgttatataaatatataccattttttatttgatctgtttctttttaccatttcatttcatttgatctttttgataaagatgatttgaatttttttcattagttagtattagtatagatatatattaataaaaggttgaattgggctggtaggtataactataaatcacaccatcaattcttattggtatgatacgattattagaaaaaaaaaaaaaagaaaaaatccacataatgaacaagtagtactgtagtctgaggtggttactggttaggtggtatctctttattgaaatgcagggcctgaattgaaaatatcaaagaaaagcatcattacttaccttgtatatatatgaggtggtcctgcctgcaatatattgcagcagcatcattacttaccttgtatatatatgtatcaatagtccattgtaaaaagcagagaaaagcaattattgttatgtcatatgcttacacaaattcaaaacaaagcattgaaagagtcaacaaagacaagacaaacaaaaaactgatcaattctttcaattctggctggtcaaatcttctttaatttactgcattttatacatccctcatttatttcaattaaaactctatatactcttaattccaaccaatgagattaattttcagtttcatgcttttcttttctgcattaatttttaaagatttttacttgttcttgctgaacatgtgtatgtatgtgtaatgaattttcaataaatcaatacttattttatacaaggtaatgtaggtaagtgaaaagtatagtattctttcttgtcttggtagctgtttatatatatatatatacttatgagagttagtgtgactttgattctcatacaattttttattctatttttcacaatgggccaccttataagaattaaactatcaatacaacaataatatatataattgccaaaagattcatgaataagaattaatttcatacaggacttctgctctaaactaaaattttgggaggaatatacatgccacatttgatcatttagaaattaattagatgctgttggaaaatatgtatattattgtgtgtgtgtggtagatttattccaccagatgagtttattatattaacctggcattgcttactttagagttaagaatttatgaaaaagggtaccaaaaatgaactgtgcttattgagttttacatatataattcaattgggtctaaatataagcattgtgataatcatgatgagtttctggttatgtgttttt

SEQ ID NO: 42460 - DNA, 3101 bp, Cannabis sativa
atctaaagttatgatagtttttttttttgttctgataggttctttgttcttgtaatttgaacctaatgctagtcatttggtattatacagccctaatgggcagcagtttgtctcgtacaaggaggtctcctcctacttgctatcctcgtttggacttcaagatgcaagcgatttaaatcccagccttgctgaatgtaaaattcaggaggttgcttatcaagtgggttctggagatgtaagtcattatacctgatctttttacgtttattccgttttattcgtaatttttatttcatagtacgctacaggatgcaaatctttcgtttgatgatgctaagactgcaaatgagctcataatcagctcaagagtgccaagtacctctacaaatgatgattggaagcagggcatgctcttggaaacaataaatctgggggatgttccagtagataatgtcttaattaaatgccagcatcatgcaatgacttttgatgagaaaaatgacctaatccatcaccttttctcatctcataaggacgcgaatgggtgtaattctgtattttgtgagggtcttatttttaacaatggtaattatgaatgccagttctgccacaaaatattggatgaaaagttttgtcacaatgataatgttgcaacccgtgttaaggatgatgtggagagcattgaagtctcacaaggaatgacaagcacactgaagaaatctaatccttcagtaagtggtatttcaccaacatccttgcatatgaaggaaccaattggaattgatgaagaacaaccttctaccatgcccgttaaagatgaggtgggttctggagaacttaaagaagaaattgtcactaaaatttgtcactctttaagaggtcaggattcttgcattcaaactaccgatagaggtgaagttgctaacactgtgaattataacaatgaggacaaagatatttatgaacattctgatggaatgaatcttgttgctaagtgtattactaatgggtctatggaggagcctaaattagatatggatactcaagctggtatattttccagtgaggaaactatttgtggtattgatgattttgaatgtcatcaatttactagtggagtggaaaataggaatggcgaatcaatatctggtcattgtgggattgggaatgaggaagaatgtgccacagtaaaggatgaaaatgagtttctgggctctaatttgatggactctgtgcatcaaaaacatgctgaacttggtttttgtgattcattaattgatgagaaaacacacttggtgtctggcacttcctatgagtctagaaatattggctcaagcagtgattgtgttgcattaaacgcagatgctttaacaattgatgatagaaattcggaaagctattttaatgttcatgagcaagattttggttatgttgttaacacacaaagccctagttttaaaatcgaggaacactggccgcaaaggagtttccaaggcgatgtattttcagcattttctgctgaaaataatgctactgagtcttctgttggcgctgtcaatgtgacaaattgtaagagtagtgaatttaatgttgtttttgataacaaggaccggagatttcaaggacagaccatctcttgcatggatcaagatagaaactctggaagagattctctacttttatcttcatatgaagatacatttgctttagaagatagtgcagcctgcattggaaaaattgagaaagttgacctgagaagagattttttgcttaacccatttaattatgaacaatcctatgatggaggaagtattgggaaaaacatgctttcaagatcaagggatgactacaaaatcaaagaagtgaagtgcttatcaaataatgaggtttcacatgattttggcagcagttatggaggagtgggttcaagtgctgctacaagcactgtgaagggaatgagttctgaaggctattcctttgatacttcaggaagtaaccgaacatttcccatcccaaatagtgtgcatgatatttgcaatggaactgtaaaggagcttgagccagaaagaaattctgaaattggtttaatttatccatctagtgaccaaatacatgctgttggagataatctggacagtggctctactggcacacattggcagcggtctgttacttcgtctattccaatgcaaatgtctggccattatttgaactccagtgtaatttcagacgaggtatgaaaatggattattttttagcattctggtcaaatgagtaaattttaagtaatctataagcaagaaagggaaaggaattttaataggactatagaattatctggactcagttgcttttattacatttggttgtggtgtgcgggttttgattactgctaatgtctcattaattcctatattgggttttcacatatcagatgtttgtttattgattcattttatagtggcagatttatagtgtggaattgaatagtctgcctgttgcaaaacaattgtgtgcaagaaaatatatagctgtagatttatgttattcaactgttttctgaaattttagattgtttagttggatagagattttgttgttgatgatattcctcttcttttcccttgcaataattttgaattcatactaaaactagaagctttttaaattctggcctattaatatgtcatgagaaccaattaagaattaaactttttttggggcaggatgcctatggaaatttgagtgttgatgaaaagtttgagatgatagatctggaagggctagaatcaggcaatgcggatcagttgctgtacaattttttgagtcggcaaggagcccccagttctaatgaatcaaagggtttcacacataaagagatgaatcaagggtttgattcttctttgaggctttcggatgaagcatcaacttttttgccgaagacttctagcaggcatcaaaacattactatctgtgtctggtgtggggaggagtgttattatgaaggtgttagctctggaacagaatttgagtcgatgggaattatgtgtacgacctgccaggctaagttctctaattaacagactatggcagttgtctac

SEQ ID NO: 42461 - DNA, 1693 bp, Cannabis sativa
  modified_base (1244)..(1244): a, c, t, g, unknown or other
aatataccgcacgtagttttttgctagtatgtataaaattaataacatttattatactcatcttttcttattaaaagaaaaaaaattgtgtggcggccatcaatggatgcatcccaacgagagttcaattaaagtcgaagcatgtggaggtaccgtattatgtccagtgtcacttggcaagtgtattatgccttgtttggttacttatcagtttgcttggagttattggtgtgtggttgtttttggccttggatcctatggttgcccattcttttggagaatggatctgtttttgcttgattggataggagagagtgtggtagagtgattatgttgtgttgggcactttagtatatgctaatcaacttttgtagaagggaaaaaagaatcttatggatgttgttgttaatttatgttgggccactcttaatcaatggaagaaagctcgggatataagtctttttccatcgatgaatacttcgtgtcttgcggaaggtgctaagctgtggactaaactagatgttgacaatttcaagattaatatcgatgcagctatatttgaaaaggaagacaagtttggatacaatggagtgattaaagatcatcatcgttttgtggtggctggtatttcaggattgaaggagggtattgtacttcctgagttgctgaagttttagctttgaaggaggtgttgtcgtggctgaagcgagatttttcgatagtcagtagcatcgagaccaatttcttggttttactccaagtatttcgtagtcttaaggtgatgcaatctatattttggaggtgttgtggaagattgcaaatatctttttgaagttcttatgttatagtttcgttaaattttgttaaacgatctgctaatgtagtttctcatcaacttacgagagctttacttttaaatgctaattgtattttttcgagctctaatatctcgagtgatgtttctgtcattgtcgaaattgagctggtctagttgaaaaaatatttcaattaaaaaatagtattcttttaaaaataataaaaatagtataaaacaaaagaggcgtttggtaatatttttgtttggtaatattttttattttttaattttttaatcacaaaaataatagcaaaatttgtgtttttaaaattttgtttttaaaaaataaaaatgtgttctataattatttttttttaattttaaaagtgaaaaacaaaagtgtgttttataatttttatttttattnttattttttgattttatttaagtgcggtccaacttcagatttggggccggggtttgagtttgggagtgtggccagggccagaatctttgttccaaaatctacgttggggtcgaagtctaaaatattgattaagaaaaaaaaaattattagaaataattttaaaagttttttttattttgtttttaaattttttaaaattttaatttacaattaaaaaattgaaatatctttttggaaaatatttttcattttttaattaaaaaataaaaaattaaataaaaatcctacatatattaaaagagccaataaatattactattcatgaaaaggtcaaccaaaaagaatggtttaatgggattgcaccttttattccttccatgcacctatatatattaataaaatattaataaaattattcaacaatcaaaaatttactacactttccataa

SEQ ID NO: 42462 - DNA, 6448 bp, Cannabis sativa
caacaaattattttgagtgattttagaataacaaaatgatactttttctatatactttttctatatatatatatatatatagacatattgattatattttaaaagttaacaaatagaagtaaaatagctaattaaaaaaaaaaaaagaaagaaaaaatgctaatccttatcaacaaatacttgctcgagtggttaaaacaaaagacttatactgaaatttttggattttccaaagctatactttctttcttctctggcagaaaaataataatacaatttcgccatatcgggaatctcacacgccataacccggcccaattatcggtcaaagtccatgtgattaaccattgtctgcttactttttttttttttttttcctgtaatgaccatattcacgtgttcacactttcattaatggttaatattaatctaaaatgagtaataaaccaaaccaaatttaagattgtatcaaattggtccccaagaactaaatcttaagtgggtcccactccacatagacttgtcagagtaacccacagtgaagtatcatcacagacaaacacgttggatcgtgaacaatactttactataaattatattaatcattattcataaacaaataaaacaaaatgtctcaaaagaaaaaaaaccaaaaaagaaaaaaatgacccatcgcctcaaccacgccattctccactgtaatttcttttataattaattaaagaaagaaattactcagaaaagcagcggattaataggaggaccccagggagcagaatctcctgtcaacgccacccacctcctttttggtacatcccccaactaatccattttgcaattttgcctctattcttgacaaattacttgttcagaaaaaaaaaatcatgacaaattatacttattcatgctgaaactttataaaaacatcactttttatttaaaaataaaaatatagtagaattgcaaacacatgtaaacgtaacgtttgtctcttttgtcatatcctatctgaaatatggggtgtcattttccagtcaattttgtagttttataccaaaataaatagaaacgttcaaacataagtaccactaaatattttaattttgaatataggaaagtttgatggctttttcttagctataggtttgtcacagctaggcaaaattcatctgacattgctttcaatgcctcgctctgtcaatcaaataattaataccgccaaaaatataacaatagttgatagaatttgataagtgatattaatgccaataaattaaaaggttagaaaagaaatagagtaatgggaaactgtaaacagcgctctatgaaaggtaaagatgctgtttttatgtactatttaactctggctattaattttggttgtttaaggtacaaaacaaatccatgttcagagtccctaaaaagaaacagcaaataaataaataaaatattttatttatacataaaaagaccaatccttgcatcgaaaagagagtgctatcagattatgtgcaatccatatccttaatggtaatcaactatgcttttttttttaacatttttctttcttgttttcccgggaaagtagcctagaaaattaaagcctctatgctagccttcttggttgtcctacacactgggcaagaatcgagaaagggttcacaaattttacatgaacaaaggtgcctgcaaggaaggaaaagaacgctcgagcttcgagaattacaggctttgcaaaccattgtcgttttgtgttctctgttctcctctgttactactattacgtcgtcgttttgctcccgttctgctacttgtctgttttcttcttcttcctcatccatgcccacgtcacaacaagactcggcgtcctcggcgccattgttgaaacaacacatagctctttctctcgcttcctctagtgagttgttcaatgatagaaccatggcttcgttctcttgagccagtctctgccatatttgattttcagcttctaattttctcagtaaatcttcaagctccattgatctcttcgttgcttgaagtagttcttcgtccttatatctcagtagtcccaatagtttaggctcaactttctttattaacgttaaaaattgttgttttctttgctcttcaagcaataatctcagtttctcattctgtaaccaaacaattcataaacaacaacacattacaatcttattacaaagagaacaatcctgaaaacttggtcacaaaccgattatgtcaccagaaaaaaaaaaaacaaaattgaaagagttttagtacctgaaatttcatataatgatcgatttcttgtctttgcttctcaacttgatccattacactatgggagaaagccattgttgaaggagtgggagtgggagtggcagtagtcatattactagtgttgtttttagtgttatgatcgaaccaaacggtgtcgtttctcggttgaagattctgcaactcaggcatcataatttgttgttgatgatttttttgaggaatatcgaaacaaaactgattaaaaccaaagttactattaacaccacagccattatgaacaacatccgcaaccggcatcatcatcaaatcctgtgaaccaaacagaggaaacccaagattctcctgatacaaatgcgcttgaatagccatttttaaacgataataaaagccacaaatccaaatccttcttttaaaacgaactcgacccctttttctcaatggttcatatactcctatgggttctcttcgaaaccaagaactaaacaactttgcagatcaaaaaaagtaatccaagctttctctgacccttctacttctctctcgtagacgtaacatatagaaaacaaaggtgatagagtataaatgggggtatatataatgtgtgggctggagtttttagtaataacaacgatcaaagagttgagactaattaaagtatgtagaccccacattcaaaaaaaaaaaaaaaaagaatttggaaaaagtaagaaaaataatagggatagggaactactttccctgtcttttatgggtttgttttaaatgtaatgaagaaaataatgtgtattaaagaaagatgtatgggaagcggtaagcaacgacgtacacatgcagattttgtgactaaactatcgggtcagatatcagaagacgtttgttttgaattgaattgaattaaagaaaaaattgaattcaaagtgggtgaggaggagaagagaaccagccctgtgaatgagtcagtttccgtatttatatatttttagagagaatcacagattttgtcagtttagtcatctgtaaaggctgaagaataggatcctcttcatctcttttcctttgtgcctttatggttttttttctttattttctttttcaagaattatggtttatttgttaggctttcttattattgaattacgatactttagttacaactgtgtgtgtattataacaaatttaattagttttttaaatttggatatcacattgtataaattctaaaatattcaacggatgagatccactataatatatgtatttagttactgatttcaaaatattaagtaaaaatcacatgtttaactcttaatattcctctatttgaaaacaaaaacaattaaatagtaaagttttaaattataaaaattctaatataatattttcaaattaaaaatgagtagtaattaattaccgtgtttcaagcaaataccatttttcttgcaattatatatgtgtataattattattattataaatagtattgataataaataagataatgaaataaaacttttccattattggtggcactttgtccttgtgaagaaagcaatatatcatgcaccttgtgtgatttagacctataagtatagtactatctttataaataaataataaaagaatactatgcatttaatattggccaaaatggtcacaactgtaggatatgaatatgaatatagacttatataggtttgtagatattccacaatgaacaaattattgattcactgtataggaagaatgtagtggttaaataacactgtattatgactttagtaatcactttcccacaattacagtttacacgttttcacgaaacctctaaattgtaaagcaaaattggtttttttttgagaagcctctggtgggtttctcccaaatatgagaaacttctatgaaaaacatcgattcgtcctcttaataattataacactgttttagtaattaatctatttgaccggaaaggaattgcaatccaaatcccttaagtagagttaatttttttttttaacaactaaagtagagttaattgattgagaagaaaatgcaataaaagtaagaaaagtaactatattttatttttgggagagactacatacaagtcacgattgtaatgtttgtgcaacgtagttgtaactcgtaacagtagggcaggtcattttctttgttttgtagctaattttttctcctcttttatccttatctcatctttttgcctgaaaactttaaattcctaggaaaaagttttccatataaatataaatctctgaactttgcacatgcaatatatagatacgagggccattatatgctaaaccgacactactaattcatttccacagcaatattgacgggtattcaaattacgaaaaaaaaatagagaaataaaaaaaaaaatcttttttcaatactatcaacatacacataacaacaaaattcatacaaaattaaaatatatatactgattgaaatttcatttccctatgccatttcaaaggacatatgtatgcatgtatatttattacatttggttttattatggttatgaaaacatagttaataataggagagttagtgcttagaagaacagagaggcaagcaatgtgggagagggcctatggtgatggtggtggacccacgtgctgctcacccaccacaacccacgagccatttctctccttggggcggctccttctgcaactaatggtgcaaaccatgtgaaaaccattgctcatttttcatttgactataaatattatataatttttttttataaaaataaccttaattttttaattttacatataattattgtattttccttggctgtgttgtgttgtttctccatttcttaatggttaattaatgcgtggaggtgcacataaatccaaaagcacttcattttctcgtatttgatgctaagtctttccttctgcaacttctcaactgcttcgctttgttttgtagctttcggcaaagtggacatggatggacgcatttgagagctgagactctttagtatggtactttattcacataacgataaaaataatgaaaaaaaattattatagcgttacagtgtttggtattattaagtagtaagtaggtgatgtaatttgaattggatacgtacgtatgtttgttgatttgatttgaaagattggataatatctaccctagacacaaaattataaaaaagagtgattaagatggcagtgtcttgtttgtgtagtagtgtgtctatttattgttattattaaagttacggagaattgtgatataaaaaataaagcaaagcaagcatgttacttttaaaaaacaaaaaagctagaatatcccccaattttcaaagtccattcaattaacatattaagtagtgtaatctcctatgaatgacaaagcacttccacttccatgatgttgaattgcacatatgatggacgtgaatgaacatctctattaattattcttcttattattattattagtttgaacagtaattataaataatttctctgaagcttctgcgcaaacaccttgtaatatatttatatatatatatatatctttttaattgaaataaaatcagtatataacctgccgtctgagccggataatattaaactcatcacacgcttctagtctatgggccaaattcaaggaaaatccaacgagctttttagtgatccctattatttacatatatggtcgtctattcaatatccacacacaattactcaccaaaactcgtttaatttaagaatattgttatagaatattagtagtgtacgagacatttagatatattatcttgtaattaactagtaatattattttaaagttattatatttaactatatgagatttgatatttaattagatctagtgatattaacacacacaaaaatatctagcatttatcttaatttaattaaaaattaattggcaagctttatgaattgtgagagactttattatatgcacacactaaaataaaattatagtgtcatgactatatgagtaattgttgaatagggtacctaagaccaccttacttcaactggtctttggaccatctgaacacctctttcagacacctttcgttttctccagaaagcatggcttctctacaggtatcttcatccttctcttcaaatag

SEQ ID NO: 42463 - DNA, 8040 bp, Cannabis sativa
gatgagggtcggaatggtgggtgtgggtctcggtcggggtggtcagtcgaagtgggttgtgtggggggttgtgcgatgtgggttcgggcgatgagggtcaggtgggtgtgggtctcggtcggagtggtcagtcggagtgggttgtgtggggggttgtgggatgtgggttcgggtgaaggggaaaaggcaaggagagtttgagggaaggagagagaaagagtgagtttttgagagatatatttttggggttttgaaaaagtggtcatatgttttcaatgttgaaaagtattagtttagggaaaaaaattatcccttaatgcatgcatagaaattcaaatttccccaatcttattacatatgattgattttattaagtacatcataattttaatagaattattattacttaaaaggatgtgtatatacctatataatgtattattgtattttttgtatttttttaataaataagatacaaaattattattacactaataacagcatgagaccaaaaaaaatattagacatcaataatacttttagcacaaaaattactttacaagaaaaatttattaattatgaaataatcatcataaatttcattaaaaaaacattcataaaatgttaatatttaattcatataatttgattatacgcacacacaaatcatacataaaattgacagacttatatttgaactaattatttttttaaatatacctattaaagtgaaacatgaaaaattttattttcagtattataaattatttgtaaattttaaaaaatttataaaaataataaatattgttataaaaaaatattataacatataatttgagatgtaaaattaattaagagatttttaacactactcatatctaattacaattactaaaaaagtgtactcaagcacgagcaatagcgaaaaacatttgatagatttgatttgaatacgcgccacgtcacatcgtgggacaggtcaccaaataaaaaaataaaaaataaacctaagcatataacacgtgcccatctcaaacaaaaactctccgaagaaaaaaataaataaaaatcattaaacaaagaaaacctaaaaaaaaaaaagaaaaaaaattacaaggcaaaaatcagctttaactgacaaaaatagcaaaattagattagacaactgtgaaatgaaattttttaattttctttgtttatctaattatttttttaaataatcccaaaaaaaaaaaaatagtgtacaatgtggggtgagcttatcactcccactggatattgtgacggtttaagttacatgagaaaaaatatatgagagagagaaagaggtctcaacggtttccaacacctattctttcttaccacaaatacacaaacaaagcataagtacttgctaggctttttagagagagagagagaaggagtttctagtgagagaaaggggtagagaagagggttctttctactttgaggttccatttatcattagttcaatttttattctggttttgttttgttttgtggtctgaatttttcaggtatggagaacaaagtggatgaggttgtgtctgttgagcttccagctcctcctgcttggaaaaaactggtctttttcttctctctctttttctacactcttaataacaagtgctttgtctaattaagagtaacaattttttaatttctttgatgtttttggagctcgaacgatttttatgtgaatatttgcctctgtggctccaagtttgctttttgaattttgaaggtaccatttttatgattcatgacatcaatttctttccttccgtttttgggtccgagtttgtcacttttttgttgtgcttaatttgctagattgtttctttttaagtagtctgacgggagtaattttttgacaagtaattaatagtatatttagttttcatagctagggtttctgcataaaatttggtactaactgccaagatagtaaattttggggttagggtttcccaagatggggttctttgtccatctgttactattttcgggtaacagtttcatttttcttgaaggagaaaatttgaaataagcttgtaaatttaaaaacttgtttatgatgaaggattttctccctgaaatacctacattagcaaaaatttctgtaatttatggtttctggaatagctttctcaaaataatggtttttggttatcaattttgtacttacacactctctgctttcagagggttgactttatcttaagtaccatttgtatttgtttaatctctgaagtgtgcttcttcaattttgaaccaaatatgcatttttctgccgtacggattttgtactttagatcgtgttcaagtcaataaacttgaatagaaatttggaaattgttggtctctcgaaatatagttttcctaaaatgcagatgaacagaagaaacgagggaaagaaaatcccttttgtagttttactagtatatactatatagatagttgacgaatttagtttcttataaagctgagattattatttgccattttgctatatttagccatttcaatttttagctgattttaaatttctgatggttctaatctatagccctatttttgtaaaagtggtaagactggcagttgtcttgacttctaaatactctgaagaaatatgtattgggataccactaaattttgtacaactcttgtgtagtgggagtccataggaacaagattactttaggtattttcttattacaagtatctctgatctgttttttttgggtgcagtttgtgccaaagaaggcaggaacaccgaggaaaactgaggttatttttatcgcacctagtggggaagagatatcgactagaaagcaattggagcagtacctaaaatcacatcctgggaatcctcctgtatcggaatttgactggactactggtgagactcctcggcgatctgcaagaatcagtgagaaggtgaaggtaaccccaccgccaccagaaaatgagccacccagaaaacgtcgaagatcatcaatctcgaagaaggacaagaaagaaggggaagttgctcatgaagaaaatgaagcacaggctgctgaaaagacagatgctggagctgatggggccgggaatggtagcaatgtggaagaaaataacagtactaagattgatgatgctattatgtttgaagaaactaaaggtagtgatactaaggataaggaaagtcaagagcaagtagttgcagaagcagctgcagaagaacaacttttgggtgaagctgtggctactgagaatggaaaggaaagctttcccaaagttgaagctgaaaaagcaaatgagaatgcccaaaaagaaaccgagacttctactgtaactgcagttgaggtagagaaagtgaatgagaatgtccagatagaaactgagactactactgtaactgcagctgaggcagagaaagtgaatgagaatgtccagatagaaaccgagactgctactgtaactgcaactgaggtagagatggtgaatgagaatgtccagatggatatcgagactgctactgtaactgcagctgaggcagagatagtgaatgagaatgtccagatagaaaccgagactactactataactgcagctgaggtagagatagtgaatgagaatgtccagatagaaactgagactgctactgtaactgcagctgaggcagagatagtgaatgagaatgtccagatagaaaccgagattgctactgtagccacagccgaagcagtaaaaacaaatgagaatgtccagaaagaaaccgacactgctactataaccgcagctgacacagagaaagcatatgaaaatgtcactgcttttgtaaccgcagaagcaaatggaggagcagagaaagaggatcctagtggagtggcacctccatcccaagcagagaccaagggggttgatgttgaggagaatatcacgaaggcggatgagggtgttgttgatcacggaaaggttgaccatatggggcgagttgatgccccacaacaacctccggcaccctccccagtgagctgctgaacgttacgtggtagagctatcaattcaatttcccctgtgcattttgtaatactctagtcaaaggtaaaggtaatttatgatgaattgggtagccccagaatttaatggatgactgtaattctaatattaaaatctatgttagctttatttgtatgtagctttagtagattaggaggtagattttgatatgttgggcaggagctttattgtaggagtaataaggtaagacatcttatgtgggttagtttctcttttcttgtgctgtagagtttaggttatagcttctgctctgttggtacgctatttaccgtaattgctgatgttggtaactaaaactgtcattaaatgttcttatgatacaatttatttgttattatgttgattaaattttaaagtttcagtaattggattgtttcaaaaggttagttaaatacatcatgtgaacatggtttttcaaggtataattcagatgaagaaaaaacctaattgctgcagaaattttcttaaactgtaacaaatttctgtgaagatggcataaaaataaaataaggtaggaagagattaatttttcaatacgatacttatactaaaataaaaatttaatcttaaaataaaaataattatactgacttaaaagtagcactataagaattgttttatttttattagaaatgtgggacaaaaaaaataaataataacaagtggataaatagtcaattttagtttaaatttatgtagtgtttaaatgacctgatgatatattaaaatgtacgtctgtgaaacagttcttaactttatatatgcataaatattgtaaagattgaaattaaaaaaaataaaataaaataatggactttgactatgcatgatttgcttattttgattaattatgctttttgaacgatttcattatggaatggactgtgtgatttatttgttaatagaaattttcatttttctcttaaaaataatgaattttttctgtggttgaattgtatttctgtttcaaaaaaaaaaaaaagaattgtatattcatttgaaaatacaataagctaaattcatctaaaagtttgtttattaaaagtccttttgttatttttttatagttttgttgatgtaacactaatatgtcattaattttgtataatttaatagtttaggcaacaaatacataacgttttaataacaaattatgagaatatttgtatgtttagtatcaatatatccaagtaaccctattgaacgaaaaaatttacaataatttgtatagttagattttagttcaggaataaaaaattatattcattctaatatttttagatggcttgccaagtttattaattttctttaaaaatctattccctacgaaaagcataaatatacaaacatgcatgccaattcaaatcaattatccaaaaacaagagacaaaacgtacaccaatagaaagttcaaatttttttccgaaaaggtatactttagtggagagaaaaaagataagaatctattcccaacatatttccccatctttggatttaggccaagaacaagaatcatcttcaaaagtttcaatctttctaaaccatcatcatctttggacaaagggcaagaatctacttaaacaatcccaaaggaaaagtactaaaatcaaaattctattaaaaaaataatagtaatggtgaacacttcatctccctcttctttcttcttcttcttcttctctacaaaaatggaaatttcattcattcttcccaccaaacaaatggcattctcttcaatctccctctccctttccttctgcttctctctactcttattctctcctctctttctcaaaggtaacatctttttcaaataagttttttgttttgttgtatattattgttttttttttttcaaatatattttaacacattgtttttgtttttttggttgaccagaagtcaacgcctttacaggaacgtatggagtaaactatgggagaatagcagacaacataccaccaccacaaagcgtagtgacacttctcaaagcagcaaagatcaaaaacataagaatctacgacgcaaacaaagatgttctaacggctttcaaaggttcaggaattgaaatcattgtaggacttggtaacgagttcttgaaagatataagtgtagctgaagacagagcaatgatgtggatcaaagaaaatgttcagccttacattcctggaactcgaatcagaggaatcgccgttggaaacgagatattgggtggctctagtttagaattgggtgaagttcttctcccagctgtgaaaaacgtttacagttctcttcaaaaacttaatctacacaaatctattgaggtttcaagtccacattcagaggcagttttcgccaattcatatccaccatcttcatgtgtgtttaaagaagatgtagcccaaatcatgataccacttttgaaattctttcaacaaattggaacccctttttatatcaatgcttacccttttctagcttacaaaagtgaccctgaacacattgatataaactatgctctgttcaagaaaagtcctggcattttcgatgccaaaactaatcttcattacgacaacatgttcgatgctcagcttgatgctgcttatgcagctttggagaaagctgggtttcctaaaatggaagtgattgtgtctgaaacaggttgggcttcgaaaggtgatagtgatgaagctggtgctaatctcaaaaacgctagaacttataacttgaatttgaagaaaaaattgcttaagaaaaagggtactccttataggcctaagactaaggtaagggcttatattttcgctttgtttaatgagaatctaaaacctggtccaacttcggaaaggaactttgggctgtttaaggctgatgggagtatatcttatgatattggtttcactgggttggctccttcttctgccacttcttctctattgtcgtttaaggtatgtttacatttgatctttttgattagtttagtttatacgatgtatgcatagattttaatggttttctttttgtgttgttaaaagggtattggaattcaaggtttggttcgatcatcgtattcatgggcttttacgagctgtgctgcggttctgcttctaattttatcgtcgtgatgattgaggatgttgaccaaagactttgactccccatcctatacgttgagatccttgaaatttgaatttgatgtaaaaatttgtatttgtgtaaaatatttactgtatatggtaaatttattcattcaattccaagtatatataccaatgataacacgattattttttatatatgtattagacgtggatcacacaaagctgttttttttttcataatttacaataagaaaaaaatcaaaatgcatatgttatgttttttttcccttaccttcctcctctgttttttatttgttcgttctttttcttacattttcataattcatgtaggattttactgccttaaccctacaccaacaaagacttaatatcagtattaaggtcaaaactgacctttccaagtctaactaatgctttagacttaaacggcaccgtatgaccaacacgacattcaaacttgtgtcgtttggctctctgagtattaaatactctgagaagggtctagaaaccctaacactcaaaacactcagcctcaccaatcccacagatcgaaaccctagcagagcaagttctcaaagagaacttgctcgattccaaaccctagaaacccagaaaacccagatccaaacacacacacagattttaggtttagatgaatgaaaaaaccaagtaataggaaagaaatcaccagatttgtttcagagttcaccccaaaattagggctacgtctctgtcaagctcgtctcagagattagcttgatatccactatgattcaaaggcaaaatacagacttttggagcttcctgtcacaaggtttttgaccaggtaaactcgattctttgtttt

SEQ ID NO: 42464 - DNA, 6479 bp, Cannabis sativa
tatgttttattcattaatttttcagagatgctttatcatacgctattctattaacttaatagcatcatttgttccttgcagcttctcgaacctggaagatacatgtggttgttaaaaaccttgtatggtctgttgatgttgcttcctcaggtacatctttttactcttttcatgtaagcacttgtattcattatttcttatttgaaaattttcttttcggggtttgggagagtgaaaagggaatgcatggcttgccttccatttatgtgaaacaaactgttgtgacatggaccaaaacatatgtttttttaactgcctgattaaccagtcaaaataaaaaatcatctgctcttgattatgacttgcaaatgagctccgaaagtagtcttttcaagaaatgagatcaatcaaggaagtataaccaataatgaattgatcagaaattttgagtaagataattaaacctgaaaaagttcaccaagacgatgtaaagattttaaaagcccgggctcaataaaagcatgtagaaccagtcgaagggagactacagtggctatatttgtttcttaatgtcattagtattactagctaattataataccattttttgaccatttgtcactcgtttggcctatagacttgagctcttgttattattacttaaaaattttggttatttttgctgctccttgcctatgctctgatatttgattcttactgttattcttgtttgcagcaaagtgcagccttcaagatactacgaactcgtctaaaaactgtaccctcctattcttttagcagtgatcacctcaagcgaacgccttccgggaacccctatcagatttttcagcaaatttcaggggggtcacatataactgatgatggagatgcaaatgagaatgagaagaatttgcataatggaattaaatttaatttaagactacaacaatttgagcaaatgcagcatcaacatcgtttgcatgctaaagcgcagtcacaaattcgaagcagtattgcacctccttcctcttcttcctcctcctcatcatcaaaggtttgtgaagctcgtccgttttcctgtcgtcaatgaaaattgtttagatgtatatatatatatatattgaatctaaaactagtaacggtattgttagtggcagtacattgttactgaggcgtgaatattcacgtacaagtgatactgtttattttaagttgcgtcttcaagatcattaagtagttgcctcaaatactcaaaaggggtagttgctaaaatggtccgaaatgtggttttttctctcaaggtctgaggttcgagtctctcttggctactcatatagtagttggtatagtttcccggtccccaaatattatagggttaggcggggattctagttttgaaaaatttaattattagttgcctcaaatgataatgctgtgtccattcagtctgttacgtgtagttgatttaggcttatttgcattgtagatcactagattctaagatgttcatatacatgcaggaggtgcgaagactggaagaagccacaagcaatcctccacccgaaattaatcggccaccttcaagaacgtcaaggagaggtccgggacagttgcaactatgacaatattatgctctgcttctggagtttcttgttaaaattataatgatggatgatcccaacataggaagaagccatggaattgggatgtctagtataatctgtaaaattgtatatcatagtagtttgttctatggagagaacttgtggaggttgggatgttgaaaattgggttgttgtttttggaaattgagatggaagttcagtttaggctgagcttatattcttttgactttgtaaacgacatacaaaaacccccacgtggttctgttattttttattgaaaaaccatgtgggttagagtatttatatatttatatataatatatcatattcaatttagatgatacagtttgttctttttatgtcttgtttataaactattataataaacaaatcagagttaaatttacgttcacattgtcttgggaagaagaaaacaaaatttgtttgtttgttaattcaatttgtgttgtttaattaaaccatatggagattattaattaattttgacggtttcttaaaaggtttgaatgtcacccaccaagattgtttttttctttaatttaatatgatgacctaaaagttcaattatagcaatacttgaaagaattatatagtaggactttactaatatgatcatgcttaagcaaattgacttgtaatttggctgttccaactctctaatcagagcttcaattttgggatttcatcaacttttaaccatctattattgaggctgaaaatgattagatatttattgagaaccaaaagttgaccaagtgggatgagtatcgagttttatattatttaacataattatttttataaaatattgctaaccattcttaaaacaacgccacttatgcactaattgctgcttaacattaatgatataatatcgttattagtaaaattagatatggagtgtttctttgttctaatctaagtaaaataaatgctagtagttatattattgcattgaatatacatgaatctacagcctttcttttatcttttgtaagttacacaaccaaaatccgattactttttcacttgggtataatctcaacattttaatggcaacacctacatctgaactctagtttccattttactattttacagatcaccattcaataagaatatgaatgaaaaacatctagtaaagttcacaaagcatagattttctcaaggtcagaattatagtcctcaggatctgatatatttgcagagtaagccgaccacgagaaggacttgcttccacttgctcttctgatgcgcctttgagagtcgcggtggaagccacaatgttgcctgaaaacaaagtaacacatgaatgcaagtgtaccaataagaatcggtgttcccacaacggttatgacaatcgccatccatgaatctcctttcccgaccacctcgtaagctatggaaagaaaagccccacaagtgcaagcacaggccgcccacatcattttgttaacaaccgatacaacctgcttctgtgcccttgtatcccaagccactaaagttatctgaaccacaacaaccgatagagaaatgaagagagatatggcattcaaaaggtagaatacatggaaaccaacatgatcagcaatgttagcctttccaacatcctttccttccattagatattgaccaggcaagttgaatatcgccaagaaggctatggatgcaaaaagaacagcaacaacagtcacagaattcgtagtgttttgaacagcttctcggtgtagcttttttagttcttttgcaataccagaaactcgtcgttgtgttctttcgttatgtttgagttgtgattgaacctcatgcttaatgtcacttacagttctcttgagttccatagcttcatccatttggccaacaaatcgggcattcttggcaccagcttcggctagagcttccttaatttcgtgtgaagattctccatatggtaagttatcagccaaatccaatgcagtctcttgattattatttatggcattgacatcaacagatggataggtgagcaaaacgttgactatctgaacctgaggagaacaaagaagatatcagcttaaagcataaggtatgtcaacaatcaaaaagagattccaagtgtatccattcaataacaagaagggaaagttggctagctcccatctaaaccaaatcccaatcaagtagtgtgaaaaagatgaagaataggcatgacagttatatatataggaaaattctgtgttagaaacatcacttttatccctattggtaagaacgtttttgttttcgttatatagagaattataatccaaattgtttcatatgatgatgtacattatagttatactataatcagttgcacgagcgtaaataaagttaaaaactaacacacatgtaactgattgtttgaaccttattttcaacgttttttaaaaattgatggaacgcatgctagaattatattataacaaaaacatccatactgataggaacaaaagtgatttccctactataattttgtcctacatatatttaatgagatgatctcattcaaaatgtctttttccaatgttagtacctaagttttcagttttaaagtcagatattttgaattcataatgcatatcatactaatacaatcaaaacaaagctttacaagcacaaggatttagatagactaattaagtgagaattttgaactcacatatgcatgtatgattcttcatcttgtgcataatttaaatggaaatatacctgcgaacgacacttccttgtagctaaatgcagagcggtgttacccttcttgtcacgatcgttgagtatagagtgatcagcaagcagtaactcctccacaaccaaaggacaatcacctttcactgccatatgaagagcagtttgacccttcttatctttgatacgaactatttctggatcgcggtctataagcgcctttacaatacgaagttggccatatctagctgtgttatgcaatgctgttttgccattttttctcactatcatcattgagctaacatcagcatcaaggattgcattgactatttctaaatggtcttgggaggcagctgaataaagggggcttgtgtttcttgcatcacaacatttacaaagctctggccaaattcctacaagcatcttcactatacctaaaagatatatgtaataacacagtcaatacaacataccacataaagatttaagcttttataagataacttaagaattagactgttaataaaaacaatcaatgctcttttataccataaatatcacctatgaaaccattatgaattgtagataaaaaacattcagggcgtgtttggaaagacatgatagaattggatttgggtgtaattaaaggtaattacataatttgacacgtttgttcgaccatgtaattgttcttgtgtaactagtaaacattaggaattcatatctaattaccgactttcaaacacacactcaaatcaatgcaaagtaatcagttcttttcactcatcttaaatgattattaataacatgaatatatgatccaacagtttatcatgttcaacaactcatctctaagaataaacatgagaaaagttgtaacataaatttgtgctgaaaagccaagttttcattaagtaaactaaagctaatatcatcaccaacaaagaaaaaaaccattaaaaacccaattctcaaacatgatcaaaaaccccatttcagaaatcagaaagcttgaacagaattcaaatttagaaaagaagaacaaaaacaaaaacaagagcagagtgtaaagagattaattaagaggcataatacctaagtggccacgcttagcagcaacatgaaaggcattcatatcagacttagacctgattttcacagtctgaacatcacagtgcctaagcaagaacccaaacaaatcctccatattcttatctgcagcaacatatagggcagtctcacctgaatcattctgaatagccatcagatcagatacagatgactgatcagaagattcctcatgagtaagcttatcaactaactctttaagagtttcaatatcacctgattgaacggctgagaagaacagttgatggtttatgaaacgcaaagacttattattattattattactattattagactccatcatctctggaactccaaattcaatcaaaatctttaatttctctgtgttttcacctccattaatgctaataaacaaaacccttttctcaaatcatctccttcctccaaatcccagatgggattgaatcgaaagcgcgtaaagagtaagggggtgctagattctttggtgactgtaataataagtatgaatgaatgaatgaaaattaaaaaagtgatcttttctgttggcaaaagccaaatggtcgattattaataattatttcgttaaagaaaactaaaacccaaaagaatagaaaagaagaaaattgaagtgtatttgtttggattgatgtttcaatggaggatgatgagagagaaagtggggtccttgtgaatggagaccatgtgaagatgatgaaggagttgacccttttctccaatttttttttccttaattaattaattaatttaattaaatctaaaagacaaagctttaagtcagattagatgaatttaatgaattatgttctgtttttttgatactcaaattattgttcctctctttcatttgttgaaaattttcagttgaatatacagtgtggctgttttacaaaaaactcaaaaatgggtaaaaataaaataagttagattttcattagttactctaaacctatttttcttttttgtaattatcaaaactaaaagataaataattattat

SEQ ID NO: 42465 - DNA, 3129 bp, Cannabis sativa
ctcgcacaattaatatccaaacaaaaaaattaaatactattttaaattggatattacactatgcatcagatttatatatgtgactttaggttttaactcttttattattcttcagcttatttttctcttggtttcttttgttgttacagtaaaaaaataaaaagaaaaatagtaacagtaataatacaactttttgactcatagtaaaagtattacatgtattatagtaaagatgtagtagtgtattaattactaaatattaccatgcaagatacatgcaacgattgatatatgaaacaaaaatttaattgattaaaatatatattaacacactgactgaatatatatatatatattattattattattattcattgcccacctttattttagtgaatgtaaaatctatgtcttgatcaactttttacgtacttaataaacttataatgtagaagaatgcttgattaacatattataaagaaaatacaacattttttcttttctttttttgctaaagaagaacatacaacatttaagagcatacaattggcattcgtaatacttataaaaatattaaagttctcttactcgtactattattttttatagttttagtgagtaagaacaagctcttcttcaaacgatttaaaatataaatactaatttcatggagcatagccaccatggccgccaccttctcctgcaccgctaccacctccataaccacctgcatgtgcacctccagcagcatacccgccaccaccacctccaccagagccaccgccaccgccacctcctgcaccaccatatccaccagctccaccaccagcaccaccaccttctcctcctccagtaccataacctcctccatgagctcctccagcaccagcacctgttcctcctccacctccgccaccaccaccatggcctccaccacctccaccgcctgcacctccagcttctcctgctcctccaccataaccaccaccttcacctcctccagtaccatatccacctccatgagctcctccagctccagcaccagaaccacctccaccaccgcctccgccaccatggcctccaccaccacctgcaccaccagctccaccacctccataaccaccacctgcaccagttcctgcaccacctccataacctgcaccgtggtcatcaccatatccaatgccaccgccgcctccaccaccactaccaccgcctccaccaccaccataacctgcagctccatgctctgcagcaccaccaccatatcctgcaccactaccttgacctccaccacttccatatccagcagcaccaccagcaccaccatgagcagcaccgccaccacctccacttccaccgcctccaccagctccatgaccaccagcacctccatatccagcaccaccaccttgtccactaccagcaccgctaccataaccagtagcaccaccttctcctacaccagcataaccaccaccactgcctgaacctccaccaccaccaccaccataacctccaacggcgacacctccatatccctcagcaccatggcctgcgccataggtgagaagagccctagttgtcgagcaaaggcctatacttagcaagaaaaggaaagcacaacctagaagcttattgtgtttagccatattggaaatgttatggagagaactaagcacaagaaatgagtaagaatgatagaagagtaggtgagtatttatagggatgggtttggagtggaaaggcatatttccactgaggagaaagtggttgaagcacatgcaatacaatcgatatcccatgaagaagaagttggtgtggtataattggtacattcaactcatacagtttacaactccactatacatatcacattgcagtaaacccacttttgctttttctttgtctcccacatatatatatggccgcgtataatataaataatataatggtaaacctaatcgatatatttgtacgtttctgtaaagtcaaatttgaaagttatatatattcatataatatgtgatttgttattttgtccaaaaagatattattcttagagaaattttataagtgataatattgactgtttgtgactattattaaagttatttggtgattgtagatatattatttactaacattttgtcataaatatacctggcagaagtgtagtattttggtcaaatattaccttacaattgttttaattgaattccatttattatttctgcacattttaatcaaataaataatataaaaaattactaacaatttatataacatattatatgagtataatattgggcgtcatatacttcatagaaatactcttttaagtaaacactctagcattattgataggattaagataagttcaagatgttggactcttagtcaatgcattttttctgtaattctttgtctttaaatagtttacgctctaataactaattttgtgtatcttaatgagctaggtattttgttttacgacattaaagctcttctaataattaatgtacatttaatattattgttcattgattatgcatgcttttagaataaatattaattttttcagatgaaagttacactctaatcaaataacagtgatcatgacaacaataaaagatatgtaataaggttatttccgtcgatacactattgcaagtctatgcaaatataattggcactaatgtgcgctccttaataaacatatatttgaattttgcctatatggatcggattgggattgtaagattatatatcaaccactaccatatttttatcaaaagttaaaataatatataataataaaaaggggcaaagccttttttttccttataaaaaatatagaaatatttacacgtagttggtgtattttaatattagatttcgttatatattaataaataaattgtatcaattaagtatattatttttggaaacgaatctaacccgtactcattagagaaaactctatcaagtttagagtagatcttattcccaacctcatgtttatttgtttaagtatatagaaggccctaggcatttgaattcttccaattggcctaaggcaagccaattttaagcattttccacatccttagccaagacatgtttacc

SEQ ID NO: 42466 - DNA, 1415 bp, Cannabis sativa
ctagtaaaagtaggtcgaaccaatctttgctatgctttcacaaggtctaataggctaaagtttacaacataaattttattcttgcatttgttgtttcattgtatgtgttagcattgcctgtatatgttgtgtttatgggcttcaaagattttcttttttggtttctctttggcaatgtatatccttgacagcaagcataggagacttgtacatggatttttttggagtgcaagaaacatgcttcagcctaatggtgaaattcatgtaaaccacaaaacgacaccaccattttccctctggaacctagaggaactagcaagttggaacacattagctttgattgaatgtgtggagttcaacattaaaaattaccctggttataagaataaaagaggagatggtgccagatgtgataaacctttccatttaggtaagtgcagtacctataaatttcgactttttagtacacccatcatgcctggaacaactacacactttgctccaatgtgtagaagatttgagcaatcacaaataccaagcctatcgacttcatttgatttcaatagatctgaaatgggtgctgttgcaatgttcaatcaagactttcaccaacaacttcagaggtttccctatcctccatatgatcatgggagggattatcttggaacgtttactcggaaacttgaatatactggatcaattcagggactaaatcatcatggtatggtctcttgtgtcaatgatttgaaacataaaagaaaagcggatcatgacattcatatagtggtcgaatctaataaaagaacttgttttgatatgggacttttcaatgaagttggacatacatccaacaacacaactgccatgcttcctggaagaatcacaaactatggtattgatatgcatagatatcatgaatgtgatcaaagaacacaaatgcctcttggaagaaccttcaacaacttgcatgttttctccgactttaatcgaagaacctgtcttgatccgagctttcctgtcaatgaaaggatacgtagttttaatagagacatggcgacagtgtttggtggaagaaccttgaaccatggcaatcatttcttgcccggttgtgaatatagtggtgttgagcctcggaggttggtacgggatttcggcaatctttctcgatgttatcattgagaatagccgtgatgttttttgatgttttggacagggctttctaagttgggttgctgatacaatgtatgatacagtgttttggaatgatggatcattatacaagattatggttaactagaagtacaatggctggctacatacagattaggaaaaggtctgatattatggagacaattgtgaactgaacatttgcttatatactagtactttgctttttaaatttagagaaactataa

SEQ ID NO: 42467 - DNA, 3280 bp, Cannabis sativa
  modified_base (68)..(75): a, c, t, g, unknown or other
  modified_base (3026)..(3034): a, c, t, g, unknown or other
ttggtacaatgttttaaaaaaaaataatagactttaaaaaagaggataaaaataaaagaggacaatannnnnnnngtatagagtgtaatttcctccaatttacatgacacttcacaaacaggtacttacagaagttttagaattataacttaagtattattaccactaaaattaaacgtaagtatttatttgcaactgaaaattaaacttaagtatttatgttataaaaacatgatctaatttatcatttaacaaaaatcagttcaaagaactattttatattatattttagaaaatatatgatctaatttattatttaacaaaataaaaaatctaattaataatttttacaaaataaaaaatctgaaatagtatttactaaattttaatttatttgctataaaccaaaaacaaaagtatataaaaacactacatgtaacaacaacaacaacacaatgaaatgaaatgaaattattcaattaagccaagaattgtttgatgaaaatgtatatacacataaatcaaatcatatttgaaaagaaatgaagctatgattacaactatatatatgatttttttgtgagaccctactaagaaagagaaaggagggtctatatttgtcaaacaaggcaatcacaatgtctgagaatatgatatgaaagcctatctaaaacttattcataacaagtctgaatttttttgcttattattaagttggtgaaagaaaataatatctattaattaattaattaaattgcattattaaaatctagaaagaaagtaaagaaaagggtaacattctattatatcaaaagaaaagaaagaagaagaatacaaaaacaaagaaagtaaaggattccttttgttatttttgttcttacattccccttacttaaaattagaccacaaccacatacatagagacatataggccatgtttttgtatcccaccactactaaagataattgcttttctcattttccatgcaatatttctaaactatatatattttagaaaagagagtgagaaaaagggttttagggtggtggtggggtgggggctttgcttacattgataagaaatgacacaaaaagaagatgttgaagttttctttttaaaaaattcattatatattatagtaataataatttccaaactattgtataattcataacccaacaaagctcacaaggagtacttgtgagaaaaaaaaatgtgaaacttcttcatcagtactcccaatagttttcttattttattatttaaaatatatcactaaaaatttattattatatttacttttttaaaatatataatattaatatctacacatatcctcgtacaaaaataattaataaaatatatttcgagtaataaatagtattttgtaaatgtaaagcataaatagtaaattttaaatatattttaaaataaaaaatgagtttagagtatctgtagcgtgtttttagtgcggttctttaatttttttaaaacatttctattttaaagaaatggtcagaaatattaatattaccttatcatcatggactataaatacctccatatacatgtacgtatatatttgcaaatatacaagtttttttgttttgttttgggcaggtcgactctgacattttgtgggcctaagaaataactttgggtaatagggcagctttaggcattatgtgcctatttcacaatgtttacaaaactatcacttttcttcttacacattcatatatgtataaaaaaaatttgccctaaatttggatggaccctaaacacggacataactctcccgccttaacctaagtctaggcggcttggagttaggtttaaacccataaccctttagtataaagcaaatttagtgatcaaatctttcaaagacatagatcttagatgagaaattgagaactattccttgttttgtaagagaattatttcttcctttgttgggcgtttattctgtattacggtaagaacttgtaattttgtagttcataacatagccaagtgagcttttgtccataaccgatttgggcgattagctattttgtctattcctatgaacttattttgtaatgaccgtaaaatttaatatttttttattgaatgaacatttctttcaaaaaagaaaaatagtacaaagcaaaagataccaccattaggccagcatgtggtggttgaaaatgttgaaattgaaaaccactctttttttttttaccaaaaagaaaactatcaatggaacagaagacagaaccaactcactcactcactgcatggtaataattttgacactttgttctaagtttatatgatgatatcatcacaccattaattcttttctatatttttttctttctgcaatgtaatgatgaatagtacctaagatgtatatatcatcaccactacaagaaaacataatgaaaaaggttattaatttgttatcatagttgatttgaatttgcatttccaatttagtgtcattctttcttgtagtttttgtacgtacaagacaaaaaggaatgttcaacaatagaatttaaagaatatatatgtgatatgtcatcatcatcatcattctcataaacacaaaacaatgcaactaattgaatttgaaaatcatgctttttatctaattggttgtaccaaacttcttaattatagtttgagcattgttgttgttggacactattagtgtttagtacttttcagaggttttgctttatgattgactatcaatactctctaaaaattatatatattaaattatatgggatatgatacttagttgaaccaataacaatattgacatgtaggagggtgctaagcattactagtaccttttagcgtttctcttataatttatatcctcgttccctttcattgatcacaacttaattttagggaaattatgaaaatattatgatgataaataatgacataagcacctaaaattataatttgttatgactaaatgtttttgtagtcataatgcttgttgtgactaaaattaaattannnnnnnnntgtatctaaatactatgttttaaacttttagtcacaagtaacttattattactaaaagtcatatttcgtcacaataaagtagtttttttttttgtaatgtactatgttatatttggtgaaaaaaataaaaacattggattatgataaatataaaagagttcaatacttcaattattgaaggtcattaaaaaggaataattatataaaacattatatttggtaaaaaatttatatttttaagttcaa

SEQ ID NO: 42468 - DNA, 5952 bp, Cannabis sativa
aggatgcagagaagagctagcttcgattagcttcccatgacaatctctaatgaccatacccgtaccatattgagtcgttgcagcaaaaatcgccccatcagtatgacatcttttttaaaatcatttaaatggtaatttttttttgaaactgcatttatatggtaatttaaagtataataataataataatactttttataattgttattgctcatttttcaagggttagttagattcattattttaaaagcatggtagttttatttatttgatttttaaaaaataatagaaaattatttgaccaataaaaaccctaaaactgtatcttcctccatagatctcaaagttccaagaatggcccagagctccgacgattgtgaagtctgagtgggttatagccgaattgaagcatttgaagtttctactcagagttcattttgcatttcatgaggtaggtaaggcattcgaacaattttcagttttctttcttctattgattcggttttggattgtgatctcaccaagtcaaactcaaaaaaaataaaaaaattcgaacgatatgtttgatatgatgtcaagtctcttgcgacaacttcaattggcataatgagctccatacagattctgattgtgcttagaattgaaccaaacacacacatatatatatatatatgtatgtatgttttgtatttagctgtagtccttttgatatggattcgcatttttgtctttagcattagtctctttgttcttgcaaataaaatataggaggataagaaacgcgaaaaattgcgaacagtttttttttccccgcaaagtaattgcgaacatagcttgttgaagatgattattttgactgaaaaagtttgagttagaagaagctttgtttctttttccttcctcaaatcgaaaaaattgacaaaaatagccagtgcatttgtcttcttactaaatatttagtgtcatttacggcttaaaatctttgcttatggaaatgctagtgaagttgttgttacaatccaaatctgagtccctaattttgttttatttttgcctaaaaaaacaaaactagaatgccacttttttttatttgcttttaaaaacaaaaaaactgtgaaccgcgctgtccttttcttcttccctatcgttattcctatctttgtcgtcggtgctcagtgcccaccagtgtatgcggcttccatttttttttgtcgagagcaaattttttgttttgtgggtgttttgattgtttattctttgttttgatttatatcatctgcagttataaatttgcttctttgatttggttaggggtagagatctagatatttgattaggattgtgggatgtctgaaagatatggctgggctttgattgagacctttgagttttcacattagttaagctgtcttttaggattggctcaacttgtataattgatggcatcaaattattgcaatttttaggtgatttattgacattagaaaccaaaacctttagcgtatgttcctacttacataccctttggttattgttgccttatgtggctttgtttgatgatctcatggacctgctcttgtgcttttgagtggctatcatttcagttacttatttagtagtagtgcactggtaagaggtaatagagcatcctttagttaccgagacttgaccattaggctgtgggtggattgtctctaaccttattttgaaggatctgtctaattataggattatttagcagtctgatagtctcgtttctctttttggtttgatgttgcttaaattcattccataaattttctttgagcgagaaaaatttgacttaccctatcattgcctcttctatgaagagctggatagatacaaatacaattagtctcttttatgtttcactatatgttctcagcctgtaatccttttacgttttccaacaagaattttatgtcatgaaaatggtgtatcctttaatttgttgtaatagtaaataagaattgctatgaaaaaaaattgtttttgcattgacctcactgatcgcaatttatttattttttctttgttttgcttccagattggcaaccaatcgcagttttagttttataattttcaggtttaatagacggacaacacaaaataatgtttttaaacatattttctcatactaaattcagtttcttaattcagattcacccttcggagaatagatttttttaatgcaaaccagtcagtccctattccatcataaattaggagttactttcatgattttagttacttgatgtgaaacaatgtgtgctgcttcacagaatcacaagacatatatatgagtatgaacttttcttgtttattattatgatttttttcttggcatgaaattgcatttatattgttgcaggatctcattattaatattattctaaaactttttttcccttttctcttaatttttggaaaaaacttgtgatttcttatcacaaattttttcatctctgcaacttaagtgttatgtaaaattatcaaccaattatttgtgattgcaaaattatcaaccaattgtatgtgatttgtgatttttttgcatcttccaaatttttagcagagatagatgctgccacgtagggaccatggaacgaataaacttgcttaccttccttggttactgcttatcctttcatcacatcttagcttattatccattgttgttgtacatctggatttataaactttcttcatctttcttcatttcggatttgttgttttattaaaatttacttgtactttgatatgaatttaaaaaaccttagtcatgttgcataatgaattatttgggattttgttttaattatcatgcgacaacaacattgcttttgaacttattgcagattagagaagttttatatggttgatgagttaggaatagtaagttttgactttattaattcttatattatttgatggatttgtgatttgacagtgtcgtaccaactcacgtagttatatgtgtgtagatttttctatatgctagttttattaatactgtgtaatcagaaagagcttgaaccaggtttgtatttttgttaattttgatattaacaaccaatctcaatttcaattcttaaaattaaaaaatcataaataatgggggcaggcaaccacatttttaaaatcacttattcaattgctaaatccacatttttaatgaccatgaccatgaggtctagttagttttattcaatataactttacgtttatttcaaaaaaaaaaaaatccacatttttaatggaaagtaatttttcaatcacgaaccagtcaagagaaagcattgtagaagattttgttttagtttctgtattctttaaaggtattttattatttcctttacgtttattaaaaattcgtatgtgtcctgtatcttgtgctttcttcttctcttgaatgatattgtctttaatagagatgagtaattgatatatgtatcttcttaacaggttccatcaacatatgtaagtttcacgcttcaataattgtgaagtttctaattaaatcactttgttggtggaaactgagcctttgggaagtcatttcatagtagtagttggtggaaacgaagattgagggagagagagtgagagaacaaattcacttttgtttagacaattggtgatgtagatatataaatgatcaccataagtgtagtatgaagaggataaagtttccaaagcgttactggattgttattttgaccttcatctgcacgtctgtttgctatattgaacgtgtgggcttctcaattgcatataccgttgcagctgatgctgcgggagtaaatcaatctagcaaaggcaaaatactttctacattctattatggatatgcctgttcacaggtgcctggaggttgggcagcccaaaaaatcgggggaaggaaggttcttcttttctcatttgtattatggtcgatgacatgtgcattagttccactagaccccaatttagtgggaaccttggtgattgcgcgactgcttgttggtgtggcacaagggtttatcttcccttccattcacacagttctggcacaatgggttccacctcatgaaagatccaggtctgtttctctcacaacctctggcatgtatcttggggcagctgcaggaatgcttttccttccaagccttgtcaaatttagaggtccccaatcggtttttcttgctgaggcagcattaggtggtatgtggtctatgctttggttcgcatatgccagtgacccacctcgttctgaacatcctaaagccacagctgctggatttggggaatctttgttaccaattaaaggaagccaaaagttgaaagtggagaatggaggaaattccgctagaaattccaagatcccatggaagagaattatccttagcttgccagtttgggcaattgtggtaaataatttcaccttccactatgcattatatgttttgatgaattggctgcccacatactttgaattaggtctcaaacttagccttcaagagatgggttcttccaagatgatgccttatctcaacatgtttttattctctaatattggtggtatgttagcagaccactttgtcactaagagaatcttgtccgtgaccaacacccgaaaattcttgaataccatagggtttgtagttgcttctcttgctttgatggcgattcctatgtttagaacgtctaatggagctgtactatgttcttctgtggcgcttggtttcttagctctcgggagagctggttttgctgtgaatcacatggacattgcgccaagatatgcaggtatagtgatgggagtttcaaatactgctggaacattagctggaattattggagttgatttaagtggcaagctattggaagcagccaaaagtatcgattcagatctttcgagtccggaaagttggagaatggtgttttttataccagggttactctgcattctaagttctgttgtgttcgtactattctctacaggggaaagggtttttgactgagcttaagtatgttacatgcaaagcctctcacttttgaaaggtgattttatcactttgggttattgatataacttaaagtaatcggcataaaagttggtggctataaaagagaattcttcattctttgatacattttgctgcattattttgtatctcacaataccaagggtttgtaggatttggaacatgtaatattctttctttttttctttttgtgaaatgttaagcttgtaatttaatttatttgaccacactgaaaataaaaggtctcaacatagtaggactctagttgtatgattaccaagacctctgtttagtggaccataatcacattttataattacccatgcttttatagtccacattttcatggcatatgtgacttgatattgtgctgaacaatactattgtttagttgaataatgtaaggttttgatggtatataacatatgatattatttaggtaaaaaaatatgaatgcatctttttctttctatattatgagagctgtaaaaactttatgcagaaatcaaaggaaaaatatcgaaggagtggcttgacaacaaaaaattgagcaacatagccagcatagttttagtacctgagaatatttacaatataccacaacataaaaggaacattagctctttaattcttgaatggataactaaaataattgaaattccaaaaccttgtggtgaatcatgtaaaggaaagtgagtagcttagagctaggagtgtattagctaggacaacatgaggaagagaaatggatttgaattcttcaaattctccagattcaaaactctttgctaagccatcttaaacaagacaacaatttgaaattgagatgcatatacaaggcttaaaatcactttgtatacatgactcatgatgatatgataataaattatcataaagttcagct

SEQ ID NO: 42469 - DNA, 3134 bp, Cannabis sativa
  modified_base (1795)..(1795): a, c, t, g, unknown or other
  modified_base (1831)..(1831): a, c, t, g, unknown or other
tcggtaacttttgtaaaatacatggtccaaaatggtatttccattttatatttgtaagtaaatttttttttttctaatttatatatttctctatacaataaataataattttactataaattaataattttaataatatattggatataaacaggtcaatttattgtcaatttcgtgttacatatgatacaaccataatccatttcaaataataattatgtcatttgggttcgacccaattttaacctatatttatttttcataatactgacctgcaaattcgtatagagttcaggtcaggttatcgtattatgttgttatatcataacttgaattgtcacccctaagtatgatagttatgagtagactaaatcgaattagtccgacttgattttgagataaatatacattagaatttaagaatacaaataaataaaaatatggcatattaaagagaatatggagtccacaacttgtatttaaatgggttttttctttttgtttataaatatatataacataccttgtatcaaattactactatataataaaaatatgcaaatgaaaaaaaaaaaaaaaagatagaaggttttgcctagaaaagcaaaagaaggtttattatgcaataaagttgtaaagaatgtttcaattaaataaatgagaataaagaaagactttaggaattttgtaatcatgaatataaagatactagttaccataaaagtgaaagtttagtacgtattggtctataaagatcattattagcataatttatatttatattgttaggccaccaccacatatattttttttattattaaaagatcttgattgaaattaatgaatttttatccaaagttagtgttatatctttttatgtgtacataaaatatgtatcaaaatacaaccagtagagttagggtttgaagtgaaagaaagatatttttggcataaagatttttttttaaaaaataaaatagcaactttattaaaattttagcattatgaatacaaaatattttataacgagcccaaatattatgctcgaaaatattacaactagagaaaaatcaagaatgtctagccacaatatgtattactcaatttttcgatcatttaataaactgtaaattgacatcatgtaaagaggaaagcaaaagttgagagtcatgaataatcaaactaaaagcaaaactcataatttgtttactatggataccttaaatagtgagcatattatttattttgatctctacattttttcattgtttgctctttatccaactgagaacctctttgattcccataatttttacaaccccagtagcgtaaacacctaattgatagtaacttttagcttcaataaatttgtctaaactgctcgtgccactatcctgaagtcatacaataactacacaagttacaagtttccatataatataatttattattttctttaatatttctattaatcaaataatttaactcttgtcttcttaccaaatcactcttacaatttcaatttcaaatcaaatataaaatatggctaattataatttttgcctctgaactttgacatgtaccaaattatgtcccataaacttttaaggtcgttaaaaatatcccttgaactattgagattgttggatttaagaattttttttcaattttagtaaaaaaatctaatatggataatttagtacatgtcaaaattcaatgggcatgattttgtagatattaaagtctgggagtataatttagtacatgaacaacactgaaatagtaaaattgaatnaaattagacaaaaatctttaaatccaacaatctcantagttcaggggcatttttagcgactttaaaaattcagaaggcataatttagtacatattaaagttcagggagcaaaaatcttaattaaccatattttacttcacatacctaataaataattcattcaattttaatttaaatcatatataaattaaatttcaatgataatgttgaggtgtttgatgaagtttgaaatcaatcaattatttctcatattaaaataagtttatctgaataataaaatatatattattttggttcttaaagaaataaaacaaaaatctcagtggtggttattacagtccaaaaaaactcacataaatcaattttgggatttaacatcttaacaacaaaaatgtgtttgaagggtaacctaatgagtcaacaaattacatcattgtcttattgtcactagaattaaatactatagttaactttgacatctcttttaacttttaccaattttgtacattatctactaatagtctcaaaaccatatcctcaaaattttaaatattgtggttaaggcaagatgaaaatgacaaactcatgagaatattatattattggggtttaataataagtgaaagtaggtagatatgctactttttccccaagtgattaatagattacaaattgcctcaattaagctcaaaatttattaatctttctttatttctcttatcataaataattcaaaacatatctcggtcttgtctattgacatggttgtcttgtttctctaagtgttgttaagtttgtctgctgttcgttaattttgctacgcattcgattatggaaaaccattacgattcagtgaccttggatgaggaagaaactgggggtctgcgttatggtgacgaggatgagggactctcggagattgatgatcgttggtgcttggtggggcgatttataactgatagagagatcgattttcttgctatgcaacataaaatggcctctttgtggcgtccggggcgaggtgtttatgtcaaagagttggaaccgaatctatatttgttccaattctatcatgaagttgatattggaagggtcatagagggaagtccatggacttttgataggatgcaatttgttttccaacgactgcgcaagggcgaaaatcctcggtctgtgatccttaataagctcgatttctgggttcagttgcatggaatgtcgacggatttcatgtcacaaagggtggtgcgagacattggtaactatattggaacgtttgtggaatcagatcctaataactttctgggcatttggcgagattaccttcggattcgtgtaa

SEQ ID NO: 42470 - DNA, 5184 bp, Cannabis sativa
agggaattatgttctatcaaaataatttcagggaattatgaaaaataaaaacttgatgatattgggttgatttgtataccgtattacatcgtatgttattgtataatattatattgaattgaattgtacatgtttatgtagtaacatgtttaatattaatttttttttttttttgaacaatcaacatttcattgataaacatagagatttttatgtacacataaatatataacattttgatataaattaaaatttagcagaatattataggaaaatatgatatacaacacaatacgatcaaatacagtgattatgtcgtaccatgtttgatattgatttgtatgtgcatataagtatacactattttgatgtaaatcaaaatttaatataatattatagaaaaatatgatacacaacacaatagatcaaatatggcatatcaaacgaattcattaagaatttatcaaaagttcttaattattctcctgttgcatttggttttctatttgttgtaatattgtaattttttgttttttatagattgcaagcaagagacttaaggatgttgaaatttgtgtcccaattgtatatggaacaattgcattctatctgggtcgaaaggctagtgagtaagtgttgttttcttgttaagaattcatgtttaaattctgacacattattatttggatattttcaccaaaatttttcattcatttaattaggtctcaatctcataagtggacagtttatgttcgtggggccacaaatgaggatcttggggtggtgttaaagagagttgtctttcaattgcatcccagtttcaataatcctacaagagttgttgaatcggccccatttgagttaacagagtgtggttggggtgaatttgaaattgctatcagtctatttttccacagtgaaatatgtgataaacaattggatttgtaagttgtttattttggttatagtttctcttaatgagcagttatctcagtactaaatgatacagtgactatgtgaaaatgtcataaaaataaaatataatctttaatgaacttgttatcatttcaatcgaaatttcaaaaaatgggataactctagagagatgtggtattactctgtaatggttttgtttacttgaggtgaaatcttgatattattggagcttataaaaacgtttgcaggtatcatcatttgaagttatatcctgaagatgaatctggtccccagtcgactaagaaacctgttgttatggaatcatacaatgagattgtttttcctgatccatcggaggaatttttcgctcgtgtgcagaatcaccctgctgttcttgtgccccgtttaccagctggacttactttacctaatcctggtatttttttaagtatgatgttctcattaatttctttatctttttacaaatgctttgagttacattttcttatgattttgcagtacaaattgaaaataccgaaagggaaaaaggatataccaaggatcatccccttaatcagtggttcttgaatttctctgaggctgatgaactcttaaaacttgcagctgcccggcaacaggttatttattctttcttcctttatatgcatcacacttattcccatgactaaacaagtttctttcttgttgttttttttttgtcccactgttatttaaaatatgtaattggcttatatatccttttccattggctgcacttaatagaaataacaaagtttttcctttagctctctgcatattcttaggatttgaatcaaggactttcccttattattatcatcattattattatttgtaaggtggacttcccttattattaaatgagaagaaataacacttgactattacactcaaaacaaataagtacgaatttaacataataatgtaagcaattgattgacttatgaccttggtggtgaggggaggattggggtaaggtggacgtctcaggtttgaacatatgggacctccttgttgtttgtttgctatgtgcaccatgtgtgctagctatgtaaaaaaaaaacgtaaatgaaaaaaactaaaataaaaaggttgacatatgaccaatgttactgatgtatgtgtggacattctaacaagagggagtttgtggtaaatcttctgccatgctctgatatcttattatttatttttgcatgaagggagataaaataaaatcctgttacttttcttttttgttctagttgtatttggttgtatgctcgtaggtctcgactttttggtcaagctccaaaagtcaaatctggattgtagatgtctaattcagtaccatttaatacatcttgttgggtttaagttacttttgatgaattggtttttcacttagagctatatcttgttgcacatgccaattcactttgcataaatgcttgtgattcattggctctatctcaagtacatgcttgattcatctgatgtgcatgaacatattgttgtttatggaaagtagtggattatatagtcctaacaatgtatacaatctatctggtaggtgcaagatcacattatgaagctgaaaagacagttgagctcaatggatggattacctcagctgtcaaaaccaccctctggattcgaatgaatatacatgaacatggtagattgtagttcgagttttctcatcagtgtaaagcattggagtgttagctagcacttgtgattattagatgtgatcatgtgtattctctcttgattttagaagtatgtagtatgtgtaaatttgtattagtatgtgaagcttttagagctaactaaaatttaatgtgcaaacaacaacgattagctacatggaatgatgccttcaatgtaacctatggatttgcatttaattttcattttctcttttcatttaaaagagaaatagaactttagtcctaatgaaaatattgcttctctcttcatgtatcgaaatggattaacaattggttatgtgtattgtacattgcttctcccgtcttcggagttaatacttggtgaaatgagtgcaaagaggctctggtgctatttctactaaattttttattcacagaatgacttttcttttgaatcaaagctagaattggaactagcagaaatggaaggatcaacatgtatatggcatcatcacattatcgaaactgggattggtgtgtaccatagttattacttctttgtaacagagctaatttcaggtaaccaacctatctatctgttgctattattattatacatgtttaaactgaggccatctcttttcatgttctgttttagttgtcaactcacattactcatgtttgctgtcctttgatattctgaatacttgtatgaaaaatgttaatcccaaatttataattatgaaaacaactctttaccgatttgagaataattgaaaagaatacaatacccaactttgttatatctatcttgggtgcaattcacctagctttgtgagttggaaaaaaaatgttctggaactgtgtcctgtcaatgcacatggggttaataaagtcttaatcatatctctgcctggactgatattacatcaccaatctgttttgttttctagtaactacatatacttgagtttgtgaattaagagacaaagtgtagtttatattcctcagtctcactgtaatagctacaggtttgaatgtaatgaacaaagtagtagagttcaagaactagttgaaggagtagatatgagtatgattgtacaatatcaaggtacagagagtattttgatatggtcagaaatgctaagctggctggctgcttagagtgtcaatgctcatatgctcatagcagcagccccctcactaatttgtctttataaaactttctgcagacaaagtaacatggccttcacatgtttataaatttattttttaagttaggggtcaacatcttaccaaaatgaaatgccttttgttgattgtcaatggtttttagcctcattgacaatgatgtgttatcctctgtctgaattctatctatcttccattgttatccatattcatcgtggaaagaacatggcaagccatttctatataccatacccccttaatataatccttttgattaagaatatctactatattggagtagtagagtagttttaacatgctgaaaatgtgtaaacataactgcttgaactgttttacattgaaggagtttgtgttgttgagcacagactctttgagtttaatttagagagagagagagagaaagaaaatacaaaagggaaccaatgctgacagatagatagactggctatatagctccaaaagatagagtttttcagccttggaacatggggaaataaatctcttgaatttatgagaaaatgcggctagtggtatatggtgatggtgctcatttttaggagaggaatgtatgtttgtgtgtataaaaacttcttctgtcattgtatatatatatatatatatattgacagctgtcgtttcgtgatttgtcaattccttacatatctcattacttgcagcaagagaaaacttaataaattttcaaaactaagctttctaatattccaactaacatctcctagattaaatgtatgtaataagttaggcactctttgaatcaccacatttgattttgttttcattattaaaaaatggaatgcattttattatgtttaataagctttgtaggatgtactttgacttctaaccgttagatcaatgcgatcgtgatccaatggttccggacacaggacaaaatcctccatataaattggttggaagggagcaaagtttaatagagttaggaatgtgtctcccaggttggtcagagaaatgaatggaagaacttgggtaccctttaaatgataaatcaaaatgttgtacacctatatttggaaaaactagttatagtttccaaaagatgtgtagccaaatttgtgttgagggtgtagagcactaaataaaacatataattatcttgtaatatacattatagtatggtaaaatgttgtggtggtaactgaactaacataactgaatgttggagtattttggaccacttttaagatatgaaatctgaatgattgaaagtgtgatcctcctcactactactcatcatcatcatcatcacctcagacacttggtttttctgctagattcatgctcctttatatacatatttatatat

SEQ ID NO: 42471 - DNA, 3780 bp, Cannabis sativa
  modified_base (3742)..(3755): a, c, t, g, unknown or other
agctagatgaactctccttttataggcaatgaggtcttattaaaataataataaaatattcaaaaaaatatgaaaaaatacatttaagctattttggaccgttgatgatgatcaaacggtgaaattgattctggaggtcgatcgtcaatttttggagcttgaatcgcatttgcgggacctcttttgggtaagttgtagttgaaattcgtaactctcttgagtacgaaatttagacttgatgtcttcagaattgcgattggagtgtgagacattacttaatagatcattgaaatagcttcaaaacataagtcgaattgcatctatcgggtcattattgagtgagttatgattgttgtactgaaggtggtacatcaccctacgaccaggttgacaacccaacgcctaggttggcacccggcgccagggttgacattctgacatctacctggatgttgggtgagtgccaaaatgtccgacacttgtaattttttatgcctaagtgatgtgttgacaccacttagccaattttcatgttctcgtgaagtcgtccaccagtttttggaaatgttgctgtttcgcagaatcaagatactcaaaattactagatttgcgactaagtcactttgcaaaaaagtgaaattatgaagttgtgaatttaacttatctgagttcaaagctctcgcatactatgaaaactagatgaatgctcgagacgaaatcagaatcggatagaaaaatccaatgcaccaagtcatgtgtcaacctagctaggtgttggttgctctttctagagcttcctggttgtcgttttgatgctttcaaggtcttcgaaattgaggacaaggtctcctacttcgtttttggctagaggaagagaaagggtctagttgtgcgagttatgcggttggtggttcctaggtctttagggtaagtggactctttaacttcaattggtacatacacgaccaaagtggaaagcatataataagggacatgcatgtttggtaaagagagattttttttcttataaacagatgtttaaagtgttttcttaagcttccatctgagcaaggcccttgttcctcttctttctttcacttcgttttataaaaacccaagtaatttgagtttttctttaagtgccaaactaaaaagcaaaagaaaaacaaaaactttgaaaggaattttcacttcgttttttattgattccagctatataaaatgaaaaaaattagctttgtaggaatgtttaactctgctttgatatctatgggtgtatttgctggactctatagtctattggataagcaatatttgtataaaaataaattggagtttattaacatattatgtgctccatctactctaacgtgtaataaattaaaaagaaattaaaactatagctctctttcttcatcaaaaaagaaaaaagagatttaagaggacttctgttctttgattggtcagaatagataattcaattccaattttagaagtcaacaaaagattcattatttcaaacgacaaatggttgattctcaatgttgttttgatcataccgtccacaatattccctttggattatattccatttccatgttcttttgatttgttttctaattttataactatacatatgaagtttaattattattcatgtcatgccttaacttgtcttagctaatatgattattatgagcaccactactacgtgtgcttatagctttaaaataattatctagaaaaagtattaaggttccaacaaaatggaacatttggctaaacaagtggggatttgtcgaccgtcctcaaataaagaaaactaataacgaaaacaaagtcattttagatatatttttttaaaagaataattgctaaagagcactaataatatgtctacaatacttggatttgtttattataatgtaatttttatattgggtatttcatgtttttaatatctgaacggttataattttaatttttaatggaagttcatattagagttactttaagcatcccatcccatgagcttttaattttttttaataatataagttatggaaatcaagattagagcaatctgttttatattttgttaaaaaaaaaaataggtatacatgaaaattgattgctatttttgacattataaattattccaaaaatttctaaattagtcaaatattaactataattacaatgtacattgacatattataaagaattaaaattgtaactttgaattttgaaagaagatttaatatactattgtataaaagatagagattattctttaaatatccaaaaatactaaaattttatgtttttacagaattttgaaatttttatatttttatgaactattactttatagactgctatttacacattgttttaaaaaaaagttatttacgcgatgtttttgcgttacaaaaatatagtataacattgcgataacattaaaacaatattataataacacaaaattgtaaattatgtaaattaaaaaaagtttattgtataaaatttattaagaagccgaaatatgaagaaaaaaaaaaaagcactaattcactgtttttctatatatcgtaaaagcaccttaaagtttatttttttaataaaacgcctagggctgcacatgggttgggttttcgggttttcgtgtggtcgggttcgggtttttagatttcgggtgttggaaatgcacaatcgaacccaattttcgagtggtcgggtatggcgggttttgggtcgagtatatcaaatttcgtgtggtcggattcaggtattatttgaatgacttcacgtttcaaaaaaaaaaaaaacatgtatatgatataatacatatgattatagttaattaaaatatatatataattcagagtatagctattgtcaaatcaataactattatagtattatatatactacgtttattgtacaaattaattaagtaatatataaaataaaaattataaaatcatataacataaatattaatacaagaatgaaagaaattgtaaaatgtgaaactgaaatgaaaagtctgaaacggacacgggcggagaagactttttaactttggatgttagggaagaggctcatcggattgagtcggtcgttgggatgcgacattgccggagaagaagaagcagtcgctgcctctctctgggagaagaagaagttcttagattttttttttagggtcttgtctattggtcttcgaatagtttgaatgaattgtgaactaaaatatgataaaattaatattattaactttttatttaatgtaataaaaaattaattttttttactgtgtttgggttacgggtcagaacccgaaaataaataaccaacttttgatacccgaacccgaaaccagtgtggggtatttttgggttggacccgacccaaccaccaccggggttttcaattttttgggtttttttagcagcaggtcagggcgggtggtcggatattccaggtccacgagtctaaatgttcaaccctaaaaacgcccatttttacgagggtctactaggtatttttaaagttattttcgttattgtatttgaattttaaattgtttccttaccataaaccaaagagaaaaatcgtttgcaattcaatcgattctatggcaaacaactttttattactaaccttaaaaacattattttcattactaaccctaaaaaaattattagtaatttctaatagggtaaataccattttggannnnnnnnnnnnnnaaagttaccaattggaccctgtgtt

SEQ ID NO: 42472 - DNA, 2605 bp, Cannabis sativa
ccttatttcaagcacttaaattggtcaactttcattatattttcaggtagatattgccattccagaagtttttgttggcgggctattgggttctatgcttatttatctatttagtgcatgggcctgctcagcagttggccgtacggctcaagaagttgtcaaagaagtgaggagacaatttattgagaggcctggtataatggtgagttttctttattcccttcccctagtggtatgtggtactttatttgttttgatctttgtattgtttcaagatggaattctaaccttataataaccacaggactaccaagagaagcctgattacggtcgttgtgttgctattgtagcatctgcatctttgagggaaatgataaaacctggtgctttggctattatttcacctatagcagttggtgagttactgctgtttctagtttctgttttaagtatattgatgaacataatttgagtgggtttgtgattgtattctttctttgttgttttgtttttggcctagtgtttcttgcacctcattgttcttacagaatgttttccgtctacaatatttaatattgaccttttctgtagcattttcttctgcttacagaaaagcattctataaagaaatttgtttataccagaattttggcaaaataccacatcaacacctttacatattacctctttatatgtgaagtaaataatggtgtgattgattagtctgtgtggggaacattcaatttgtttcagctgatgatttttggtatttatttgggttatgttcattttatcacttgaatgaaacttttatttcctttcgacttaattccactaattattttcatccttttagggattgataatgcatcgttaatttttgtttcttataagaaaaatgaaggaaataattatgtttgctaatctcacctgcaggtcttctgttccggattttgggatactacaccgggcaacctctgcttggggctaaagttgtcgcttcaatgctgatgtttgcaacagtttccggtattctcatggctcttttcctgaacacagcaggtggtgcttgggacaatgcaaagaagtacattgagacgggtgctcttggtggtaaaggaagcgaatctcataaagctgcaattactggagacacgtaagtcttatttgttctcttttctatagtattataatttcattggccctaaattatactctcccctaatgcagtgccttttctttttcttccatctttattccaattagaactgctctttttgttttttctcttgttaagaacttgaaatgaattggacttctactgaaaaacaagggtgaagaatactgttttatatgactataagaaaacaactactaccaaccaatctacattttttgggggccaaaatatgatcaatttgtcctatgtatctatgttctttttctttttttcctgagaaagagatatctaaattattttgctgaatactattgaagagtttttgacaaaaatcctgatgtcattagtttttttggtattgattcaccaaaaataaattagaaatgaaattcaaatacactgtaagggattattattgattgcaaagtggaggatgggatgacaggctcaagttttggctagttttattttgtttcccatttatctaatgattgcaactcaagtttaacataatggttgagttcattgatcttgttttacatttttctcactggtgctgcagtgttggagatccattcaaggacacagcggggccttcccttcacgtccttataaaaatgctcgcaacaattacgcttgtaatggctcctgtgttcctgtgagtagtggttatatcgaccatggtgtcgtcaccggcatattatattgtatttgttttgcacccatttttcttggctatttagatgttcttttttgcaaatacacataggttttttgatgtagaatgaggggtgcctgatttagtgatataccaaattttctttaccttaatttgaataaaagagatatttaactgcttcatttagtgcttaaacttagttatcacaattgtaattttatcaaattaaatatcaacttcaatataacatgttataaacttaaaaactgtaaactttaaccaataatgcacgatgtgtatttatattaataatttggtaatttattaggtagcatggcttttttagagatggaatttgcagtgtaaataataaataaaatatgagaaacaatttcgagaaacgctgagagaaacaagggaaatttgaatttccatacttacaatactttataattttctccctaaatgcatacttattaaaattggtaatatatgaccattttactaattttccaaaactactcctcccatttcaaattctaattttcctaatctcagctggctctctctcaactcaccaaccccccacgaccctcacccacgatcaacccacggcacccacgaccctcactcacgatcaacccacggcacccatgaaaaccccaaccccaacgaccctcacccacgctcaacccacggcacccacgaaaactccaaccccaacgatgctcgaagccccaggcccc

SEQ ID NO: 42473 - DNA, 3808 bp, Cannabis sativa
gaccagaagtgtttggtccaatacttttcttcaacttctttagaagagcagtgaaaatttcccatgtctttgtgatcatgttcaaccaaagaaagtgttttagtctctccttgcagttttaatttcccacatctgaataaaacattgagagtcatatataataagcctttttacatattcatgtgtctatgctatccacaattcattttttattcttatagtaaagcatggaacatgttaaaagaataaagaattattgatccattggaataacatttttgtttctatttttaaatataacatgcatttagtgatcgatatctatttctagtattaacacatgatgaagaagaaaaagaaaatgtagcaaagttgtgagcataaagataaaaccaaaaatggagcaattcaacatggtaacttataatcagcaaattctatgaaacaatcaataatgcaatagtgagataaatcaaagtgaacaatataacatgcaaataattacttaccttgaattgacattaagtatctcaacacttcctccaaccacaatatttttaagggaaataaagcttggagtataaactatagcctcatatcttgatttaaggccatgaatcccaacatacatgtctttaatgattttttggtcatagtaaaacaacccttgcatagagttacaaaacatcaaaagagctccattttgaaagagattcaaaggttgacataacaaaccacaacaaggccaatcaatagtaccaatattattaaacaactgaacccaagatttgttcataccaaataaatcatctttcattacccaaatcttagtggtttcaacacaagaagtatcacacaagcaaagctcatctcccaaaactcccaaactcatcacattcctccttttagattcccattgaggaggcagaggaacaggctcaaacctctcactgtcaaaaatgaaagaaacaatacaatctgattccatattgttcatacaaaaagcatagagagctccattcaaataggtaggaaaagctagcttcttcttaaatgagtaaggaacattattataatcactcacattacgccatgattttgtaccaagagtgtgtacctctgcaattactgcttttttagttgttaaaactctgaccaccttgaatttcttactctttggactaaaccctaatccacaatcaacgaaagatctttcctttaactcattacaagtttggggaagctttataaactcacctgtgacgggattggccaccgcaacaggatcgttgtgagagtgttctgataagcaaagcaagcctttacatgagttgacgattttgtaattgtgatctttgggcttcaattcaaggcggcgattatttttgttacgaaggagaatttgggcattgcgtattgggattttcaatttggaatttggggaataagaacaaccattactgttattttcatcgatatcgattaagaacagagttcttgaggttcgggttgagtccagagttcggagcagaaattggggctttgcttgggcgaaatgggacttagtgaagtgaggagttgaaatgagaatgttccattttttgcatacggatttgcagaaaacgatggattttacagggaggattatgaaaatttgtgtgagtatggggtttggaaggtggtttatggagaaagttttaatcttatggttggggctaaagttgatatttttacttttatcagtgctgaaaagtggtgattttcttgttcttttcatggcgaatcttctgttataacaatactacttattaatctgtcactgttatatataatatatattcatatgtagagagagataatgtaagagggaagtagtagctgtagtatagtactactgatagtttagggtttataggaggaagaagaagaagaagaagctttagcttgttgaacaagctgttgttaaaatgcaaaataattgtttagctctgaatatttggagcttcaaatatctgacacgtggaaataacaagcttctgttggccaatttttttttttttttcaactaaataaatgtgtgttaaaaataaatttatacgaaaagaagtacatgttaaagagaaaatgaaattagtaaaaagggaattattttttaaaaaaaatgaactatatttcattgaaaaatcagattaatatttaaggaggaaataaattcatttttctttttcattttaatatacaaaatattattatatattttttaaccataattatcttaaatatagaatcaaaattagatgttacgataaaaatcttatcttttaaagttatattttttttttttttgggtttcataattttttttttaatgaaatggcggtttcataattctaatataactagactttgaaaaacactaggcttatgccatatatatataaggtaaactttgtaatgtagtcatcttaatcttaattcaccagtaatatttaaaattaagcgagaattaactattagagagtaagatcgcaaaggttcgttagtgaattttggtaagcctttttctttttgttgaatatcttagaatttttttaacagatttaattacaagtcatttattcaagtattaaaatcctatcattattcctgcatctttatttatttatttttttaagaaaaaaagttttattattaaatcttgatatgttctttttgtttttggtcgattatacaaatattcggatgcatgcatcttcttttctttatatgttgtattgttttgttttatataaaattgcggcaagataaaaaaaaaagtttttcccaaactaattaaataatataactttcataaactttaacataaatttttgtaaaccgtctaacccaaacaatttgcctaaaataaagctagataactcgacaaaaatacaaatcgaaaaatccgacgaaaatatataacatgtacaatctttatattaggcggattaaaaataatatcaacccgcccaatcaacccgaactaaccggactaacccgattaagatttttttttttatatatattttttatatatataatctatatattatataatttatatacatatttataaaaataaaaagtttaaactattatattttttttatgacggatgatttgaactttaaatttaatttttatttttatctcattgtcacaataactaaaatattgaatgtgaaaaaaaaaatattagtgctcggtttagacgggttaactcgactaaactgaccaatttattgggtgggttgaaactttttttcttaattaggcgggttgtacataaatttttgtaacccgatctttacattaggttaaattaactgtaacataaaccgaccaaaccgactcacgtacaattctataaaaaagtagagagcaaaatagaattaaaatttggagaattctacctccaaaaattcaaaaatattcgtgccaaactcaaaagtttaggacgtagccacaagttacctaatctttattcataaatatttacaataaaattaaatttaacaaatgtaatttaactttttattaattttttttgaataaaatatataatctaaaattattatttttaaataaaattcaattgaataataatttttaggggttttctattttacacttcaaatcaattttatttttatatttttacaaaaattcacataacaattaatagagcaacttaaattacaactaaaatctatatatcaatctacatgaaactactaaaacaattaccgaaacaactcaaactataaat

SEQ ID NO: 42474 - DNA, 3227 bp, Cannabis sativa
tctctgttgtttcttctgcctcttacgttcaattgccaaagatattttttttcaaaacccttttttcttttttttctttaaccgttcccccaccctctctctctttatagccaatttttttattttatttttttgttgataaaatccacttaatcgtgaaagtggtggaggtggagaaaatatttccttaattttctcttcctttttgactgacccattcctataataataataataataattaaaatttatcgttcaacagtttgcttaagaaaagaaaaagaaattacatatagaaagaaaaagaaaagaaaatgatattggcatagatatgtgaaagccacttgttattggcatagccacacatattttaagctatatggttggtttgtgtcatcgtcgttccaatctcacggatataattcatttctctaatactccctcacttcgccaccttcacctcccttccatgcccatggaagtcaatcaggttgtttaggtttcaaccaaatccattcattccttacacttcaggttctaatctacaatgctttgttttctttatattcttatacgtttttgggtgaactctgcttccttctatctcatttttgtcttctttctattgccctcaaatctttctttttttgttttgctcggttactcaaataccctttggtgtaaaacctaacaagtgtttggtttgctggaaaattttgaagaaataactcaaaaatacgcatatgtatgtctacatacattcgtacacacgtaaacgagtttgagagtaatgtaaagttttattgatttatattttcttggtctctgagatataaattagaaaagtagaacatttgttaaagaaggcattatactgcagaagtaactgtctgtgcctgtgccatagtccacctattaagtatgaggattttcctttgctgattaaactctaagaaagcaaattaatagtcccatttggatttttaatttagattctatcagtggaagatttgaaagattacacaagtcaattttgaaattttggtatgtttctataggccatatttgtcgctgttttgtgtcttacttgaatcaattgccaaattataaagagtaagtgcatataaacaaaattaacaaggtataacatagaattcaattgatgatacaacatattacttatggctaatgtattttctggtcattccactataagaaaatagtttagcttttacttactctataacaaaggaaagcaaatctttcattacaaaacatgaacagggcagattggggcaggtgttaaattatctattgtagttttggatattaataggccacaaaaggagggggcttgaaatcagcataagatattgtattatttttttattatttcttttttaataggaactctacttttgttagcttgtagcagttagagaaagtaagaccacgtcaaataaagagaaaacttaatagtgttcgttaggattgtttgtgctttgttctatcagtatcttgtttggtgaagtcaaggctttttcttttaatcccatcttctatttttagtacaaccttgtttcttatcaatagaaattaaaagatttatatatagtacaacttaatttcacctttatgatatgatgctggttattaaaaagatgagtaatccagtattatttaatatatgacaggaacttcctagacttttttgttttattattagttcatctcggggcatttcctattattttttattgcacgtatttgcataaacgagaagtgaacccactgacaaagtaataataatagtaataataatattcaataactacaatgaaagaaaagaagaagaaaaaacaagtaaactgtaatgacatagcttacatttatgtaatgatgcttgcattatataagtcatcaacatggttgatggaatatactttatttttttctctttgtaattcttattattttgtttattgatcttataattttgacctcaggttataatgataataaaagggttgttcagaagatatgaaagatggaatcctgtgcatccaacatatggagcattttggggtatgggagtagggattggttgtggtgttggatggggtcctggttttggtcctgatgttattggttatgttggagctggctgtggtgttggatttagtgtgggcttcacttttgctggctttggcattggccttcctgcaaattatctctatgaagttccttacagtggtacttgtcagaatcttatattttaaaattcaacattttctaatgcttgctgttccattatttaatatgaatagttttgtgacttccataatgattggaagtaggaagatttttcttgtttagaataaatcaacgatgagaattgcttacttactctttcacaattttggatctttgctttccttttcaagtggatatattatttcatagccttgagtgccaaattctgatgcagtcttttccagcttttatgacaacaagaaatggtgcagtggaaatggccagatccagtggtttccagggcccaaagagtgttgcaagagatagacagactatatttgtgcctgacgtctcaaacctgcaaagagaagttagtgaaaaactatctagttttaagcaaaaggttctcttggatgaaaaattaaattcatttgacatgaagagccttctacttgccccaagtaagtccatctgggcaagtgtaggggaatttcacaaacagttatccaagcatcacaaaggtattcttacatgcataatatacattaaagtctacaactcaaactgcttattatgtggaacaactgttactagtttaacttatggcatcatccaatattatcgtatgctaagtctatagtgtggttctttgccttcatacttggacaattcttgtaaaacctcaactttaagcattatcaagtactccctgccagataaaaaattgacttaattcaaatatttggatgaatataaggcgtttagatttccgttcttaatggattactaaggactgagcgtaagaaatgttaaaattgtgggtgtataccatgaaactagtgtacattgaggaaaccttttatgaagtcttaaaagagtatgttggaggctgatatttaagagctattcaaagaaattagttagcttgcttggtgtttctcttctaggctaaaagagtttaggaaatcagcatg

SEQ ID NO: 42475 - DNA, 3268 bp, Cannabis sativa
gctgaatgttattaatagaattttcgttttcttttgaaaaaaaaaggtcaggtgtgtattcagttaaagcttaaaacgcactgcactactaaaaataattatctttttcttacttaaatagtgtcataaagatgatttgatccacactaaacatggctttgattttctgtatatataatatatataaaatgtgttgtgccttcacctctcttaacattaccaagtggaaaaggtagatgagatgcacaatgttgcatataaaagcaaaataccttgtgtctgtaacgaaaaagaggtccatcactttgccatttggggcagtggataccttcactctcttaattgttagctctagctcgcagagaacctcagtgacatctattaaggaaacatggtaaacaacactcaaggtcaaatatcaatgaaacagcttcatacacaaagattaaaaatgcacttcaaggtgcaaatttcatgtgtcatcattttccttcagtttaattcctctttgcctccatggcaagtaaagacatattatgctaacttatgtcctcctaacacgtcaactttgtgcaattttaaaaagaaacaaaattaaagctcgtaaatgatcagctatcaccattgtaaaaccagtttaagagctaaacttcaaagtcaacaacttctgacacatatgagactatattcattataaaacattaccatgtaataggccttctcgatcatatgtacaccaaaatttcaagagaaacacatctggtgggcttggctgctggttttgaggccggtaataatccatttcagacgtggaaaagtaagaaggacacacttctagaaacctgttcttcaacaaattccagtttgtgttgggcttttccaccacccagaacaccatgtagcaccatttcccatccgttgaaaaatcttctccacattaaattgaaaaacagaatataagaaatcactaaaaaatacacacatattgatacaaaaattaaatacaagcaaaacccatttcatttcccctcctatcaaaatcgaacaagaaaattaaaaagcctgacgatcacttattcttgatattaacttagaaaccatcaaaattttcaaatgattcaacaagaaataagagtataataccgagccccatcctataatcaaaagttccagattcaacagtaagattttcagaaatatagaaagtcaagtagtcgtacctgctctgcaaatactcagcccaaagatcaaaacaattctacataaatcacaccccaaaccagttttatctgggcaattaacagtaatcacagtgggatcgccttctttttcttgtttaacgaggaccatgtcctcgtgcaaaattcccattttctttttccccaaactcacttcctactctctctctgtctctctctacacacacatatatatgtattctccattaaaagcttggaaatttgatggagaaagcgagaaaaaccatttccaatacttagtgaacaaggcagctgtgtcagtcagtcgattgttgagctcacaggaagcagaggggcataatggtctttttaatattctgccgctgcctgctgtaactctaatgctttgttcgctcgttttctttttttgtttcttttcttacaattcaatttctcgtctctttcaattttgttgggggagacataattaggtctcggaaaataatcaataaaactccaaatgaagatcttaaacgtgtttaaataattgattatttagtaagatttaggtgagttttttacttagtcaaaatccaaaattaatgccttctgcttgtctaaattcttcaaggtcaaacatatatttatggattctcgtttatatgatttagaaaattaattaaaataataaaattcacctatgcataaggtactatagaatttagttatcaacaataaagatttatcatgacactaaatttacattaacgtcataattagaaatatggtttgctcacacttgaataaatgaaatgtcttttctaaggcattagcatacaatgtaaattagtattgcatgtatagactatgcattagattgaatcgatattcacagtagaaaggatatcataaacttactattatatcttctctaagttaatatcacttagttgatcttatgctaattgatctttgttaggctatttttagcttagattttaggtatcacttaaagttatttttagttgtttgtaatatttttaagacagaattacacttattttttttttttgtattttcaggcttcctatagttttaaaaggccaaagcttcaaaagtgtggtaaaggatcgaggcgagtgaagttatattgaaaaaatagcattcagtgcattcttcgtcggggcagatttattcgtggtcgcagctaaaatgtggtagaatagaagagtttcgactggcccagtgccatggcgagaccaatcaacgccacgaccaaagctgtcatcgctgcagcgagatcttggcagagagttgcgaaatttaggttcgtgatctcgcctcagcgaggcattttatggccgcggcgagaataacagacgataacagacgatagtgagagcaaagtggcagcccaaattcattccaccatcagtgtctttcatctctttttatttattttatgttaaattctattttagttttattatagatatgaacatgaactaaactaaactcccaattagggatatgatgaatgttagttgaagttttcccaatttagttaatgtgattattagtttactttccttgattgtgtgatttgttcttatttgtgttaattacatgttttagactggttatctttaatatgatttatgattctaatatgaaatctaaaaagtgaatattagaaatgctctaatagaacaaacatagattttgatgtaaaacgagagtatttacatagcttatgtgacaattctgtatttaatgcaagttatatgttaatttatttcagagatgcaagtagataacatatgatttaagactttaatgatctgagaagatgtaagggtacttttataatctgtcatcacttaaaggaaagaacattaataatttatattaacaattgggtaactgaaataacaggattcatatagcattcatccatatttaactacattatttttctgtttttgttttactgcttttaattttaattcttgttaaacattattcttgagtttaccaaatagaaatacaaatctaatttagtggtactc

SEQ ID NO: 42476 - DNA, 1656 bp, Cannabis sativa
attccattccatttgatttctatttatatttctcattcccattcatattcttgtgtttaacctaatataccgtaccctaattattagctcggtcttctttaaatgaaaccttccaacgaagtctggtccctaataaattttgtaggtacatggatttatcattgtgatgtttgttttatggcaaataaattctagttgatttgtatacgtgatgatttgcatgttatgatagttgcatctctccttgacgttgtgagaatatcaaaatgttttgtagggttggacaatgtcagaatcattacttaatccaggccgcgctcgtatatgttagagtggttaattgggaaagagacgctgaggctgttctatacttggttgaatgcgagttgatggttgggacaaaagcttcggaaggattaccagatccgtggcatcataagaaacatgtctcctatgaagccaatgtgctctcttattcttctcatttgctctttgttcggttggagacggcatgttatactgttttaagagtttagaaatagctcaattgtagatagtacgtgttagtgcatatattacaatttcatattacttgctaggaggttttatttcgagtttatcgccatttttctttttcggctaactgtataacctatacattattgtgttttttttttcagcccataaaacatgatttccgaactattaagtgttgtaaagtgatctttctgtaaagttttgtcatacgatagaacatttatgtggctgtttagtttattgttatgggtcagtacaagtacttgtgtaatttgaaaaaaaaaaagaataatataattttttttagtattagttttgttctcttgttggccgtatgataaaacattggactaaattagtttgagagttaaaatttttaaatagccttttatttaatatctttaatcttttttcacttcacatcaacattatatatgtagtactgtattatatatagaaatcagttttcatcgttaagtttccttgtaagccattctaacattagggaactctattatgagccttgaactccgaatgcagcaaataatttttttggaacaaactgtccaatttctgatgctgtagaagagcatgcatgcgtgttattaacttttttgttttcttccttttaactctgagctctgaagagttgtgcattgttaggtcaaagtcgttcactctattacctcttgtgtcatgtctgtctattgttgtcagcttctctgatttatttagtgttttatatgtttgtttttgtgtttcatatgtttggatgatgttgataatttattagtagtataaaattggcttacatattgggaagttctatagaaggatatataaatatatttttttggctatgtctttatttaggttataaattgtaatttggttaagatttctgtctcatgaattttaatattactaaattacttttttgaatttttcagctgaaattgcttttatcaaaatcttatttataattatgaattctaatatttaacctaaatattaaactatctagaatatgcaaactaaggcataattaaaacatgtaagtatgagtatacttagagtggtaattcagaattatgactcctcctttcaagtcctctaacc

SEQ ID NO: 42477 - DNA, 1246 bp, Cannabis sativa
gggtctggtgccggtgcgctgatctggcagtatttggttgatgggatggaggagtacaacgatgattttggaatggttccatgggaagtgccttcattgcaaacattggtggtaaaacaatcatgcaggttgtccaagttcgagggagtggctcaacaacagccggacttcaaagcctcttgtatgcaaaaacagtgatatttctgagtccattgagaggagggaaaaaacgtttctttttttttggggtgtggttatattaggtcattgatatggctttttacagtgttggaagataaaggggttcctcgtttttgtttcatatttattctactcactcgtacactatttgcactctcttatcaaaatccatacttagtcttatgtattgctagtggcttggtaaaaatatgatgctatgaattgtaaatgttatggcgtgtgtcatgttaaaaaaattacataatggctaactacagttcagccacaacaaaatgaaaaatagcagagagaaaccttttgaataataccttccacttgtgtaaaaaaaagtagcaaattataaaaagtggttgcatctgtactatattatgatctttggtcactcttggtaagtttgcttatcattataacatgactttaagtacattacactattgttaattaagccccaaccactgacaatggtctgtcatagattttcacaagtcaatgaattatgcagtgtagtttgcctctcattttctgcgcaagaatgcttctaccatctcgttctttagtgggtttgcatatcttgtcactagaccaaatgctacaacaaatctcagcagcatggataatataacacatccaatacttgggtcccaacaagctacattaaacattaggatttagtcaaatcatatccttacatgttattgtttattttgaatagattgtaagtttgtacctaaagatttatcatttcaaaacaaaatggctaaaatgagaacgaactaagatgaatatatctaaatcattgaaaatctttatattgtaggcaaaagtaattcctgcaattttgactatacattactcaattttgaagcaaataaaacaaattcaaacatcaaatcactactagtataaacccattcccaaaagaaagaaaaaaatacaaattgaaatgaaataaattcatatattctcatcatgctagcgcaactgagaatcattaaacttagatttcattacatattcaaaaaaa

SEQ ID NO: 42478 - DNA, 4375 bp, Cannabis sativa
ttcgaaacggctcaaaaagtaaaatagcccaaaccaaggcccaaagcccaaaagtatccaaattacttggcgaataaacagattgcgtgcgcactacgcacagtggcgcatcttagtgtggtacagcccccacagcacctgctgatgtatagtgattcggttccctttaaatagctcaaacctcaaagttacccaatttccgaaaatccttacccatttctcactttctcacttctcagggatcaatcaaccaccagaacaaggtattttcttgtttttctctactcccaaacactaatttaattcatgctcgaacgatttctagatctaaatatcctcacattagaattattttattgtttggtttacctgaaaactgaggtatcaatctcaaatcattgcgtatttccccaagattttctcttgattttgattttaagatgaatttcaatttgggttttaatgaacttagcgaaattttgagtctttagaatttccagtcattcaatttcagtatgattctcgattgcttaaattttgtactgtggttgttaatgtatatttcctctagtctattattgttttctattatctgggttatttgatgctttggttatgtgattttgtgtacttcgttttcgaatttcttttaagactattcttgaaagttcttatttattatgatatttaatttatttataattttttatgtgattaaggactgttttatgactccaattaagactgatatttaggctcttgggatttcattaaatttatcaaactttagtttttagtgtttgagtcctttgactaagttttttccatatagggatctttggaaggttaactatcctcattgaggcagcaacaacctaatacactgtaaagatggtacgcttttactatataattatgaagtgatcatcccaacttttctaatgagtttactggttactttagtcactgtatttcaccttaatatatatttgaattctccaccaacagttggtttaaagatatcatgctgtttggtttttggggcagtgaattagagggtgtctgtgttgctttattttattattagtagtgggtttttttttctttcaaatgcgaagtgtgaagattgtaattcttttctatataagataatcggatttttgtggggtggacttttggagagtgccattaatttttgcttcattgacttggtctttatttgtgcagtatttcgatggatatgggtatcatggaacctcatttgagcagacatatcgatgttactctgcatcatttattgaaaaggtttgttaacttcacagtttagacttttaaaatggtcattgttagatgttctatttttatatttcgtcaaccactttataggctgctcttttatagttgatgttttatgtggtgtttaggatagcctaccaaacctttattaatttaaaatattaaagtaatgcgtgcacagaattcataaagcattaccttttaacttctatgaaagttattgatcgttattctttatttgctgcaatacaatgttttaagtttcatcttttattgttatcttcaagataagaggaaagagaaaagagatgaatgtattcttgtttttccttgtcaataaaagtcaactaaatattttgaattttgatcagcctcggtggaatctcatgcattctgggtgcaatcctttgaaacgttacattaatcgatttgtcttgtgtgtgcatatttcttttccttctataatctttagtggttcaatgtttattcttattctaattcatctcatgtattttgcagccacaacttgagagtggggataaaagtaagcattctacttcttactactttcatgcttaaattgttttatatgtcaccctgatacatgatccctattgaatttttcagttataatgcctccctcagcccttgaccgtcttggttagtgttttaagtttcaattttgttactgttatctttaatgctttcaattgaataaaattcaaggggttaatattatagcaattctgcagcgtctctacatattgattatcctatgctgtttaagcttcagaatgactctgcaaataaagtctcacactgtggtgtcttggagtttattgctgaggaaggcatgatatatatgccttattgggtacggattggttttttctgcgaaatattcacctgtacagagttttctggtccatttttatctagcttttgacccatggtgatttgcactcattagtgttttgttggttctgtttatctattagatgatgcaaaatatgctcttaggagagggagactttgtgcgtgtgaagaatgtgactcttctgaaggggacatatgttaaattgcaaccccatacgaaggactttttggacatttctaaccctaaagctatgtgagtaactgatctcatgtaattaagtttggcatggtttccgggcaacaatttgctatggtgtttatattgttttctcaactagcctgtataaatgtcactgtcattttattcaaaatttcacgcatgtcgaacttttttatggagtgttcattcataaattgtggagttatgttgatttttctatattttgaggaaattaaaatttggactggatacatgaccatggatattatattctttttggtaggtgtgttgattctaatttcatttttcatcgatgtgtgattttaacttatataggattttttcccttgaatgaaaatgtgctacgaatatagaacattatgcataatctgccatgttagtcggtatgcttttcaccatgtatatgcaactttggtagtttgccttaggacttttgagttcttcttatctgtcatgtttgagaaatgtgatataatttgataaattttctcacgaatgaacctatttaaaaaaattaatttgatcaccaaatttatccctctaacatgagataagttaacattaaaagaattgggataatgttattgcattctatgtttcataattttttactggtaaatgataaactcaattattgtgtttttttccctttgctatggttgcaccaattaatgtatcaattctactctgttgtgatgtgcagtttagagacaacgctgagaaatttctcctgtttatcgactggcgatagtattatggttgcttataacaacaagaagtattacataaatataatagaaacaaagccagctgacgccataagtataattgagacggactgtgaagtggactttgccccaccgttggactacgttgaacctgaaaggcctgttcaacatgttcctataaacaaggcatctgctcaaggtaaattttcactaatcctgtcacccttttcaattaaaatatttattgagattctgtcacttcggcaatcatcccgagtttcataaatttactcatgtcttgtagctgaagaggcccctgttgaagaagaacctaagtttaacccttttaccgggtcaggtaggcgcttggacgggaaacctttgaagactcaaccagcaccggcttcttcttcagggtcaaaagacaagcatcctgttgttgcccatggtaaggcacaaccttccacagtgtctggttctcaagctactgctcgtcaatctcaaggaaagcttgtttttggaccgaatcgtacaccttcacagaaggttttcttttgtttttcttcttctgtcttttcattgtcatctttttaaccctcgaatttcatttccctagtgcatagaatgttctcaaaatttcttatcggttacaggaagctcccaaggaaacgaaaaaaccagaggcggagaagaaagaagagcctaaattccagccttttacagggaagaagtactcattaaggggctaattaagacaatgaaatgataaacaaacagtcaatgatagttgtgagcccttgattagaacacagttatgtatttaatctgtcattgtattaatcaaaagatgaaacaacactctctagatttcatatggagacaggttcaactgttttctggttgtatgatttttacaatgattttcctcattaaaattgcatttcatgaacacttgatcaaaacatgtaatgctcctttggttatgtcattggcatcatactttcctcaagtatcattatgattgaatatgatgtttaagatatctctaatgtttttggtcaatgcttttttttaatctttggttatttcaaattcaaacttttgtttagtcaaggtacaacaacatccttttatttattctatattttatataatcaagtttgacatgttacttaaagctcaattactcattcgatttcttgtacaacacaacctgccattatctgagaataat

SEQ ID NO: 42479 - DNA, 12183 bp, Cannabis sativa
  modified_base (3123)..(3131): a, c, t, g, unknown or other
  modified_base (8946)..(8947): a, c, t, g, unknown or other
gagagagagagagagagaggccaaaaacatccaaactccaaagaaagagagtgagtgagtgcggaagggaaggggggtgagagtaagtatagttcataaagtcagagatgaaatgacattgaaatgaaattgaatgcttaacagacatgaatttgacgtttcagattctaattgtcagaatggcttgcagtagtaccagctaccatataacctttcttaaccttagcccaattactatttactttccccacctattttgtattctttcctacatatatatctccaacttttttctttttctaataagtaaagaaattgtggtgtttggtaatatttgcatattttaatttattaattataaaaataaaaataaaatttgtgatattttaattttttttttaaaaataaaaaagtgttctataaattttttaattttgaaaataaaaaacaattaaaaaataaaaatgtgtcatataacttccattttatttttatgttttgattgtttttaagtcgggttcaggtccagatttgagtctagggccgtggtttgagttcgggactaggactgggaccagagtccgggtcccaaggtccatgttggggttgaattccaaaatattgattaagaaaaaaaaatatttaaaaaaatttaaaattcacttttttttttaaaaaaaaaatttaattctcaattaaaaaattaaaaactgaaaacaattttatagaatatatttttagtaaatattttcatcttttaaataaaaaagtgttaccaaacgcaccctaaataaagagaaatgttaaaaggtactcattttcttcggtgtcatatccttattagtataaataagtatcggttcttatctaattttaaaaaaataattattaaaaaatatcgctaactaattatagagcacatctataaaaagtgtttgaaacaccactcatcctcaaaaacaatacttataaataaaataaagcattttacagctttatatatagtcaccatttactacacatgataatgatttatgccttttgttttttcattgtacaagccattattcattcaaatgtaatttataacaatatacatatttacgccatactctatacgtacattgtatgagtacgtaaaagggtatttggtatgattagttaactaatcaaattaaattcgcttcgcatgaaagaaaaataaatagtgatttggaaagtggtattgtttggtactctatctttagtgctttaatgaataagggtttctgtgagaaatgtggaaaaatatcggatgtcacagagagagagagaaccaaaatggtggtccatgaaattccctttttcccactgagcatagcctagctggtcatgtgttcattaatttatgtgctacatacattttcagtatatatagtctctgtagctatatatgatgtatatatacacttattatatagcttggggagcttagcttttgtttctttattagagatatacaatttctataactttgtttcttttctctcgaaatccatcaatatacatatatatatatatatataaatatatatattttctcgtataaagtcatatacggtagtatagcctttgtttatcgaaactttcaaggaaaaaataattatgaaacttaccatttttctcctttctgtttcaaagctagggtgcatggagagagagagagaaaaagagagatgtgcatgctttcatttaatacagcactatactatgacaagtggattttttgtttcagataaagtgtgtatatgtatatagctacctctcaaaaagtgatattgttgtctactgagtttttatctgcaaaaagttgtatgtgtaatactactaaaactaatttatttctatacctcatgggtattcggcacaaatggaatttcttttagaaaccatgaaataaaggtaaaaaagttcactattatacttcaaattttacattttactatcccttgtttgttctttttttgaggagttttgtttttaggggattaaggatttgacaatggatttgaagggtaattaaagatatcattggattataacccttgtttttctttgttctttggtttcgaccatttaatacacctccacaatgttcaaacaatcactgccaaaactgcttgggatcagtgagttgaaaggaacaagacacttactcaacattcagcaacggatctcaaataattcaatataagtcaaaatgaaagattctctactagtatatatacatatatttaattcttttgtaatattcaaaatttgcactagatttttaaatctttagctattaaaaggagcagctcagataaatatgctttgctaatttacacgcagaaatcccaaaagagttgtactggtacactatttatctgttttgacattttgagagttttttaatttctttttttttttttttaataatatgagttattaaacaaccacatgtaaaattttagaaaatttaaaataattgataatgctaaaaataaacttcaaacaattacttaattactatatgcttggaaaataaaacaacactcgtgcgataaaatatttgaattttattttcatataagtaaattatttagaattttctaaaatatatagtgatccaaaataattatcacatacaacatatagtattgtaaattcgtgtgtgttgatcgtgctaccccgacccatactattgtaggcctaatattttcgtttcatgtttggattaatattgtgctttactcggggttactcatttttcttaaacatgtcaatccattttcatatatccgcactcaaaatcatgctttacttttccatatttttttttacagttaatgatctaattaataaactatatgtattttttttttcacaacttcaattatttttatataattttcagtaatattttacagacaattatacgaaaaatttattaaaattttaatatttacttataaatactcaaatttttaagttgcaatctacaaataaattaatatatagttttagatttataatttttaatagttttaattatacaattttaatattcagaattatatttaaattttattattttatttnnnnnnnnntattattattattattaatttatagaattttttaatgtgtcatgtcatgtttttatgcttgtttgtgtcgtgtgtctttcgggctagtttattcgtacttacatgtcgtgcctttggagcttattgtgccgtgtcgtgcttaaatacatattttttttcatgtcgcgtcgtgccaatttataacatcgtgtcgtatcacgcccaagctcatatatttctatgtcaggtcatgctcgtgcctcccgagctcatgctggtttcatgtcctgttaaaaagtcttgcccatatatttaaaacattgtcaacatacatgatgcggtgaaaaacaccctctctactacacttttacaccagcggcagtgatatcaagaacacacgctacaaaaaaaaattacttttaattagtcacaataaaatttgtgactaaaagtaaaataattgtaactaattataaatcatcattcttatgttgcgactaaaaggtctatggctaaatgtaatagtcacaaaaatcacaatttgttgtgactaaatgtgtttttagttacaatacttgttgtgactaaaactaaattagtgataaataaataatatattttagtcacaagtaactttttgttgtcactaaaagtcatatttagtcacaaaacattaatgttttgactaaaaattatcactatatgtatctatattttgtagtgacaattcaaaaaagccaatcaatcaaaacagacaaacagaatttaaaacaatggagaaatagaacttagcttgaaaagtgaatcttttttaagtataattagcaccattataatctgtgtatacaatgcttattgagcctaaggcaccattgcaaatcaagtcctaacacatagttaccattgatcaaacacacaaagaacctgttaacaaccctccaacacacacaaatcttggacaaaaaacagtagggagaagagagagatgtgtctaagtgaggctcggatttaactcgatctgcttactatagagtgagtggtgttctgtaatttataggtatttgttaggtagtctaaaagtggaggaggtcaactaacaaaactaactccctgctgacaaggatgcacttctgtattaggacaaatcactaacacaggattatgaaaaataaaattgactaaaaaattttcctaaatgcaaaaatagataaaagggtatatttgaataattccttttggaggtgcactatatttttccaatcataacttactacccctatatatatgctataatatgtactaaatgatctcacaataataataataagtttttgatatcttttccattttatgaattatgatcacattcaataacacagataaagaaaggagattaaaaaacttactttcttatcatatacatatatcatcacatcaattggtatattattatcaaaaagaaaagttgagacaatattgaagaacactaacattattagtaattattcatcaccttctgaaatataaatacatagatatataaataaaagatatattatgggattaaattcttttactgatttaccccccaaaaaaagatatactatgtgtagtattattattaaaaatcgtttaaagaaataatatattctgaatgaagtataggtttgttcaaagaagaacaccagttaatttttcttttttttttttaaaaaaagaaataataaatacacatgttccatactagtgtactactgtctaaaaagaaataaaaaaaacaaataatacagaatatatatacgtatagatatctcaagcgattgaataaacccctgttattaatttaatcattatcgatcaatgcatacttgcaaatatgaccttattacaatatataagatttattttggttcgagagactcttatatataaccactttatgaatgttatatattatattctaattcataaaatctgactcattcattaattttattatatatttttctctatctacatatatgtctcgcatgcatgtaataatatttaaaaacaataataactctttcataagcatgtgaaatagaactgggatacattcaggccacgttgactgatccgtagacaaagtcattttagtaattcgacctacttaattactataattaagttttatctcaacaaaactattagaggtcataaaaatgtcttgtaaaatcactccacaataagaagcatcgattgattaattgttaagcaacgcgtcattaatacaatcgaactaaactatgagacatatgagagagtacaagtttgacagtttaattaatttttaaaattttttatttataaaaaattaaacctctaataaaatccacaaaggttaacatatttaatataaattagattaaatgtgttaaattttaataggtttaataagccactaatttttgattgaggatcttgattcgttataacaaaatactctatcaattagcttaccatgatgacgaagttatttcaatcaatcatgagaaccttgtcttacaaaaatcttgagttttatgggaatattcaatttccatacatttatatatgtatatatatatatacacacactacttaattaactgatattttagttaattttattcaaattgcttcctgaagaaaataaatcaaatattcgtaaacaaaatgatatatgtacgtaagtttgacctctgcagcatttacataaaaaaaaaaaaaaatacaacagcttataatacatattatatatatttatatctatattgtttattaattcaatatatacattgattttttcgtgaaaaaaacattgtatatttgtactgcaatatttgctaataaaataaaataaaataaattgtactgcaaattaaagtaccatcaaatttaattgattgaagacattattaattcgtactaactaaacttagaaaaatatgaatatatatatatatattatattagatatattgacgaaatatataagatatgatgacccaatgaacaaataattaaaaaacacagaatttattacaggttttgtcatcattatcttcagtgtggactgtggagctatagctagcatgcaccactgaagaagacgactagagaaaattaggtaaagctttaaacaatattttgagtcatagtggatggagataaacataataatatcccgctaagtaaactatagcagaaacacgtacatgatatatagttcttattattatgtgtatatatattatatctccttacaacaaacaaaaacacatagaaaagtactgattataatatagcaactcatcatgcgaactcagaagaacttggattaaacaactccagctattactcatctcatcaccagtatcatcgaccacatgcaccctatagctatatatagcttcatttatttaggagtgcagcccttgacggcataagatgcttctcagatccctgccaattaattttgcatatatattaatcaaagcaaagatagttagtgtaagagcatgtatcatctaacacacacatatatgtttatatatatatatatatatatatgcacacacaatttctaaactacgtacgttaagattacttaaaattatttttatataaatgttagtgttgatttcttctgtatgtttattatgtaatagcccatcacataaaatgatactgtatatcaaacctctgtacacttaacgatagaaaggactcattaattatcgttaataatgctcagtagtacacattaagaactgcgtataatattctgtgcacatctcaaaatctatttacttatacgtactactacaattggtaaaaaaggaaagggaagcatatatagtatgtacgtatcatcacatgatcaattctttatatttcgattattatatgaatgtattaaacatgcatatacatataatagcggatatatagatggatgaatgactgagcaagaaaaaagaaaccacacattgttttcatatgttatcaacacacacaacatagaaataataatactacgtactactttatcgatcctttaaaaatttaataataaagtaaatgcattaattaacacttagcttaattaattgctaatactgattataacactatctatttttccccacacaatgtacaaattcacattggaagagcaaatcattcttcattaaatttgattgatttcgctacacacgcacatataatagttctacttacattattttccagcttagtttgattgttggtcttcaacatcagtccgaaatggatatggggaaaatgtgcccactacaaaattaaagatacaaatgtcaatgaatatatatttaaagatacaaaattaaaattaaagtcatatatttaaatatatattataacatgaatatgtataaacaaacttttaaatattattaatttaaaacactattgagctttgaaatgttttgcatatgtacattcttagcagctgtgctaaaggcttccctatggctaatatctggattattagccttgattcgttgaatctcctccctacaaaaaattaagaaaataaaaattataaactggttaataactatcatatatatcactgcatgctttatctgcaaaaagataggaaagagatgatcaaaagagttgtgacagttcttgattattactttataaactggttatatgcagaggggactcgctgcctcttctcgggagctgtgacagaaaataacagctcaagaaaaatacatcagaaataataataataatacaacattatttaatatatgatataattaaaaataataattaattatctagaaaaggaaaatttatatactaacgtcgattgacaaccctctcttcagtgatgttagtagtagtggtagcagtagtgggagctctcatagcaagcctagtgttaatgttacatcttgatgaagaccccgagtcaattcggtaatctggagcactattattgtagttgtaattttgtgcctgaaattattttaattaattaaaacaacattaagctttcatatatatatatatacaaccaaaaagaaaaatcataataaaaaaaaacagctaggtttgaggagtaagagagagagaggacaaaagaaaaatcagagttgaaatgactgaagagttaagttgttagaatagtatcaaatcagaaaagaaactagcaaaacacagattgacagttcgttaaaagaaagccttttagaatctaagggcagaaaataaatagtgtttttgcgtttgtaacagtatatatttttaggacacctacatacatagtacatagatattgaaaagaaatcattaaacctgaagaagaagaaaaaaaaaaaccctaatatattcccactaattaaaccaaacaatagagagagaaagagagcttaggtatataggtagctagttaataagttagccgttcattggagaacgaggagatctagattacaggatctgaactacactgatcatcattctagcttactacaaaaaaaaaaaaaaaaagagattaataaaataagaaatcaatacataggttttgggttatggcggctggtataggtagggttttcagtaatagtatgacttttaggtctaaaaaaccaagcacacttgatcagagctagctagccgcgagaaattaccgctttgaaacactcaaaatataaagtaaaacttattaattaatatataattttagtcaaccagcagggaacagctatagatttcctaggggggcgaggcttctataagagagagagagagaganngagagagagagagagaaataagcgccctagatataaggtgatgaagaattcagagaaaggcagagagagaaatacctggagatgatgatcttgttgccaagagagtgactgaaaagcagcggccatattcacggaccatagattagtgcagtgcccgcatcggacggtcactatgtcaaacaggctgctgcatggaacacttacctacacacacaaaccacttgttaattattatatatccaacattccattccaatcattcctatattaattaattaccatattatctattatctcttatatctctacacagtattattataaataattaaaaaaaaaaatacccatgaaagagaaattaataaaagaacacagacatgatattagtaaaactccacggtgggcaaagatgtgggattgtgtattaagctctaaaagataagataagagaaactagaagatatagatagacgttataatggggttgattatgatgatctttgtggtggttgagaattattgtcataatgaaaattatattaagccaattaacaaaagagagagagagagagaagagggttttaatttgataataatgagctgcaaaagaagccaggttagtgcactgttctatgtaaagggaaagctaagtcacagagtgaggaaatcaaagagggctcttggtcttgtcttcatcattgttattgtattgccttcaccctagctgtctctcaccccctgaccttttttcttttacgtcccattttttattttttaaccaaaaaaacgaaaataaaaacaagtataaattaaaaaatttctctctttcttctggttgggtctcaactctcacaagcacttcttcaggttatattattatcatcactttctttcttttcatgtattgactgcaaaagaagaagaaaagtcgtcctaacgattgagacctgactgaacctcaaaaaacaaagaaataaccccaatccaagaaacaagaaaagaaaatatatattttctttcataacaagaaattttgggatttttataaatttcatatatgagtactaaaaataacaacaaaacaaacaaaaactgatcaccaccatcattatcatatagaacaagggcatatactagatttatcaggatctaataaactatttatatatatggcaatttgatctctctctctccctggatttttttaattatatcatggtaacaaaggaaaatagaaatgagtacatatattgataagagctgaaaagcagatctcccattaaccccaaaaagagacatagtatcatattcatgtatatataaatatatatgtaaataaatatgagtgataccgcgagaacgatattgcaaaagttgcaggggatgtagcagagttgctcaggcgcaacatcaacgctgcagctcgacatgtttttgtttttgtatgtttttttttcttcttttctttcttttttttcaatttctcagcagaggcaatcaagtaattccagactgattctctccctttatatataccgcaaaaaccaaagaagaagaaagataaaagcaacagaaattaataaataaaatagaaaatatctctcttctctttcaaattacaatatagagatgagtagaaagcaaaagctagctttttattctctctctctctctctctctcttttcttctactacttgctttgaagagagcccagctatcacaacagtagtactaaaactttgtaatattttggccctatatatatagagatatttgggggatgagagagagattctaaagagaaggagttggagtgaataagaaagagttataataagggtaaggtaaggtgaggttataataataagtaataataataaggggtaacaaagaaaatataaaattattttttattttctaatttgtttaaaaggtgggttcagtactagtgcccacggcaggcaggcaaatgctatctggggccattaaaggaattaataaagacagaaatgaaaacaaaaaattaaagaaaagaaaaatagaaagcgggttcatggaaaaccggatttattttgatacaaaaatggtggttcagcttaagaactattgagttttgaggagtatattagggttagggtttcgtagataaagatgagatatagaatagatgtagggttttggctctattactaattctgtccacctgatcaaaatgcttataaccatttattatgaattgagtgtgaccactcccttctctgctacaacatctagtactactacagcggacgaggggggcgaactttttctccctttttatttctttaattaaatatattataaaaatacttttttttttttctctttgttttgtaattatacgtacatactacatatatatgatatatgtaatttatatatgttacctagggttgtacttacaagtgtagggaaacgtgtacatagatggatgaagatttatataaattggctgaggctggcggtgtgtgtgtatatatataatatatttcttacgatgttttttcatttttgtatatttatttctcatgtgatttcatttatataggaaaaattaaaaaatttatgtttgatgctcatgagtttgtaattttaaaaattaatggtaataattgctaagattatattttttataatttggttagtcatttttctaatttattttgagagaaagaaaaaaccacacttaagggagaaaagaacatagggtatggtgcaagctattgggattttatgccttcaataaaactcttttcaatataatcttatttgttatcaataaaagattagaagtcatttatgtttagatgtattttttatgtttatgaatatatacaatttttgttaaatccagaccatatagttattcaccattacagtgatgtcaacacagtggaagataattgtaattatatgcttcaaaagttaatgtcccatgattcatcagtgcactgaatttacacttatatgatagtcagcgataaaacttacttacaccttagataagtgtaatgttctttttaggatattgacatagtatgctagtgtaagacctgagtttgaccgaatcaaaaggaaaagaaatatatatatataataaataaatatatgtattaaaaaataaaacagaaccttctgttggaattaattttaccaggatttagatttactaacaagtatgtttgattaacaacct

SEQ ID NO: 42480 - DNA, 2125 bp, Cannabis sativa
cttattttatattttaagtaaataatattgtttattaatatacacaatattgtaaataatggtcacaagataattggtgggcaggagtaagaatttttttcccgtaatatacttttacgaaatatatttcgtggtaaattaaatgattctcagagtacattaaatgagtgtcaaagtacatttccactttttaaccctaattacccctagattaatctcagccatcagatcaaataactccctcatctgacggctgccgtacatcacggaatgcattccgtaaaagtataatcacgggacaaaattatatcccttagtatatattaattaatgcactaatgttatgatatgctcgaaataaagggttacattaattatcattatattcattaatttaatttgtaaaaaactaatttaattttaggtacaagtattataattaaaaataaatttaaaatttattgtgactaatacttttaatcaagaacattttagtcacaacgtttgaataattatatatagttagtcactaattttgttatacttaaaattagattttttttttctgtagtaagtattcattttttagataatttattgatttacacatataattataatgcaattaagatggtttatttaactaacttaattaatatagctaaaactaagtataatgtaacattaattattattgtactactgcctacttttatcactagcaatgtgtaaaacgagccaaatatgctactcattaaaatattcatgaaaaaaatgaaagaattatctataaatagaggatggtttagaatcatatggccacactaccaaaaaagaaaagaagaaacaatactatcattccatacatcaattattattattattatattctcttttagacaaaatggccggaaacattggaaaacggtggagagttttgagcggcgagggggagtgggagggtcttcttgaccctctcgactctgacctccgccgctacataattcattatggagaaagggtccaggctgtggtggattccttcattgaagagtccaaatccaataactgcaacctttataggtactccatgaaaaacctattcacaagggtgggattggagagtgggaataatccttttaagtatgaagtgaagaagtacttctacgcgtccactgcattcaagggggactcgttgccggtctctcccaattgggaagcggggaaatcaaagtggctagggtttgtggcggtggcgactaatgaaggaaaggaggtgttggggagaagggatattttggtgtcgttcaggggaacgttaccaaagattgaggaggaaattgataaaacaatttgtttagtttctgcttcagatatatttaaaaatgacagtaataatcctaaggtgcatgaaggtttttacttgtattatacttcttctgaaactggttcagcctataatcccaacagttgcagagaccaggtatgattaattaattaaattaagtagtaattaaggtataatcataggttagtttgtcagatttttaattataataggttatatcaattaattgactaattaggtctgctattagttgtaaatggatcaaaatgagtaatttattataacaagcttctatcaaataatattccactttatatgtttggtgtattttaatattgaatattttcacatatattttatgataagttattttgatatgaacagattctgggtgcggttagagaattggtagatcaatataaggatgaggaagtgagcattaccttcaccggacagagcatgggcgctgcaatggctactcttgccgccactgacgttgttttcaacgactacaacaagccgactggaagccttgagaaggcgtttccagtcaccgccatcgttttcgcaagtccacgctttggaaacgagggtttcaaggccaccttctccaacctccacaaccttcacgtcctgcgcgtgagaaataagaaagaccccgtccctgacctcccaatccccattccattcctattagattacgcccacgtcggacgggagctagtcatagacacccttttgtcgccgtacttaaaagaagctaagaaaaccgtacac

SEQ ID NO: 42481 - DNA, 5345 bp, Cannabis sativa
ctaagtacataaccattacattatttatttaatacaactgtaagtaagcaaatttaaaaataccgttgcctttttatttattattactaattaaaattaaaaatggaatttattaataataataataataattattattattatttacgttctgcgggcctaccgtacacccgcggctttcgtcttcactcagaataatgaagtagacagagaaatatttgactttttcttaacagagaaaccagaacagcaagttctctctctctctctctctctctctctcttaaacttgggtgggaattgagaattcgcctcaattacacgaaccctcattttcaagtctttacctttaaaaaccatttttcattttttttgtcatattctcattttcatgcctcacttttcccagaaaaatttgatattttctcgggaaaattttctttctttctctctctcagctgatcagttatggcagctacttctaactttgttttaggtaaagctctagtatattttttaacgttatttttagtagtattgtgtaggggttctgtgagctgttatggtttcgggactttcggtttcgatatccaccataaattttcggatcccgtaaggggaattctcgggttcgatgaggtgccacagaaggggactgtggattattataaggttttggtccatggagaccatctaatcaagggtcgacacctcgcctctgatgatcagaccacacccctcgccttctaccctggcaacgacacagtacagcttggtggcccgtttggatagtatgttctctcacgattttcaagttcttgttttttgagctgggttttgtttggttggtgagaaagtggaggaaaacaaaaacaaaacaaaagggcctattttatattcatttatcattattattttttttttcaagcttttaatcttctttttctttttataatgttttgtattacagtttgcattatgccaatatatcagtggggacgcccagttcatcataccttgtggccttagacactggaagcgatttattctggttaccatgtgattgtaccagttgtgtgcgtggaataaggtctggagatgaggtaagcgatttgatctactgctaaaaaaaaatcagagctgatgatgaatttcattaatttaacttcaggatctagtattcgtatgctaccttgtttgactatctgaatttgattagtttttcgtggatttagccgaatattacctagattagattactagaaatgcagtcaaaattttcaatgaggaaatgtagttgtgaaaattggttaagctcatataattgcgtgaaaaaatcccaattttggttttcctagactgtaatttttagtcataaccgttgacttagtagtcattgatctgctgcttagtatagtaaaaaatagctctattcagagaggcagagagctttcaatggtgtttaatatggatattattgtgaaagaatctccaatttgtttcatctggactgtaattttagtcataattgttgaatttgttctaaaatggctctcttgacttagtagtcattggtcttctgcttagtacagtacaaaaatagctctgtttagagagttttcaatggtgtttaatatggatattatcgtgtgaaaaaatctccaatttgtttcctctaactgtaaatttagtcatagtcgttaactttgtactaaaatagctcttttcagaagctaattataacatatgttatgatcagtcaactgaatttagtaacatacttaataactgcttcttaataggcttctaagatttgtattcaatcagcatagttttcggagagatttgcttattgtttgatcaatctgcaaaatagcttcatttgtttcttaaaattctttgtcctctcaaacagataacagagtttaacatcttcagccccaatgcatcatcgacaagtaagaaagtatcttgcaacagcagcttgtgtgatctacaacgacgatgcccttcccaaactagcacttgtccttatcaagttgtgtatctttctaatggcacatcatctactgggtacttggtagaggatgtattacacttgactactgatgattctaaattgaaaggtgttaaggctcccattacttttgggtaagtagtttttgaagtgattttgtatcaataactaactacagggtagttaattaactgaaattactcgagctgatctcatgtgcttgcttgtggagctttgtaatgttctcatcattatcattcattctctgttagcaaccacgccgtaatgtgctatttgattgcagttgtggtacagttcagactggttcatttttagaaggtgctgctcccaacggtttaattgggcttggtatagaggctatatctgtccccagtctcttagcaaaagaagggtacacttcaaattctttctccatgtgttttggacgcgagggcttaggcagaatcagatttggagacaatggaagcgtggaccaaggagaaacaccatttagtcttagagaaacacagtaagtggtctcctcttagtaagcttaattcaagtgtatttctaagataagttgtgtaatatctgtactaatttttctttgggaatcattaacagtccaacttacaatgtcactgtcactcaaataaatgtgggaggtaccgatgctaaccttgaattcagtgcaatattcgactctggtacctcatttacatatctaaatgatccggcttatacacagatctctgagagtgtaagtggtttaattagttgctttggcctatcattcaaagctttagtagtctcatttgtagtttttggctatcttgcagtttaataaaatggcaaacgaagatcggcattcaagtaattctagtatcccctttgagtattgttatgtcttgaggtcagctattattattatttcttttcatggttaatgagttggtgcacacccttccaatgactgacttggtttctacccacaggccaaaccaaacttcctttgaatatcccgccctgaatttcacgatgaaaggcggtcatgtttaccctgtgaaggagtcaattgttgtggcttctgataatgtggggactcatatttagaattctgatatccctatactgcattgtgtaatctaaactgaattcttgtgatctccagggtacacttatctactgtctgggtgttgtcaaaagcgaaaatgttaatatcattggacgtgagtatctgtttgacttatccttttcttttttcctcgtagcatctgtgcatctgtgccattatttacaataagactttattgacattcatgcagaaaacttcatgactggttatcgtgtaacttttgatcgtgagaaattgatcttgggctggaaggattctaactgtgagtaaaatgtaccatttctggattcatgttcagaaagatttctaatttattatattatgtgacaatggcaatctatatctctaccaacaggtttcgatgaagaagaaacctcaacgcttccgatcaagccatctagttctcctgctatgtcccctgctggcaccctaagcccagaagctacatcaggcagtgtcaacaatactatcaaaccagaagctgcgccgcccagaaatcattcgtcaaaacttaactctttctcatttatgttcattctactgattatttgtcaattctttgtcattgtttgatcattctttttatttaggcaggttttctcagcccctgtataatatatgcatatgtattagttggttttttttttttttttgtatcgaggcatattctacaaacaaataggaagttgtacaacatccttatttttttggggggtatatttgtaacgttggtaatagtataaacatggggttgtaaatatacattgaacatgagcagaaaaagtaacatctttatattgattctagttgagttattgaagtattgttctttggctatgttttgattttctgtttctttgtgtatcaaaattgattaatgtaaagttttgtgttgtagaaatctatattatcaatcccttttttcctttgagcagagaagtttatctttgtcaaaaataaaagcaaaagtattcaatttcaagtttcaacaggtgaaaaaaaaaggccatttaaggtgaagtgcaatttaatcaaagttggcatcacatgtgatgattgctgcaattacaagtctcaactcaattcaattttcagtcaacaatttgtcgaaatgccattatgtcctcgaagaaaccgaataattaaattttgactagggatattttgatttctattatttctctcttataatttatatgactatgtaatgctattcacccaatttacaactttggaaacatacacaaaggaaatattatcaaaagcattacacccaaataaaaatcagataaaggcttatgtaaaagtttaaagctgaggacttgacaatcagctttcatcacaagattagtgaacccacattggtggcattggcaaagaccatagaagacaacatgagcttcagccaagagagcagggaaatcagctttcaagtgccaaactgtagaaacttaggacttggccatcagagttacgaaccactagactgaccactcatcccaatagaaattcccccaatgaatgtggatttgcttaagagagacatccccacaaaggatgataagtggattcaagcccctgggaagacactgtgcacaaggtaccagagttaataccatgatgagaaagatttgacagtgtaaggaaaggagctactgattagtctcttgagaaacaaaattttttacctttagaacaatctacatggccccagactagcttgtcacaagaatcaatacgtaattttaatgtaattttaaacataaatatttatgagtggaatgacaatcttaaattttggaataagctatgaaatagcaaaattttggagggtcataagagtctttggtggtgcatcctttctaatgcgctccctgttaaatcattgcttggaagaagatttcagatggaggatacaagctgtcctttgtgtgggttgaaggaggaatctattgtacatttatttctttcatgcgatgtggtgttacacttatggcgatctttgccttggggcatttaccttgtgatactggtattcgtgtttcggaccgggttaaattcatatgggatcttagaaatagaaaatccgagttgatgatgtatttctttatgcatcgattgttgttgacactatttggaggacgcgcaacgaaattgtacacaataattctcctccagatgtgatgaaatgta

SEQ ID NO: 42482 - DNA, 4981 bp, Cannabis sativa
  modified_base (49)..(55): a, c, t, g, unknown or other
ttaagtatattctgttaaaccaataattgccgttagatagacacttttnnnnnnnaaagatatatatatttatatttatatatatgtaaaggatgcgaatggtaattttcagaattacgatgaattaaaatggtatgaggtggtgtaaatttgaaaacacagacggataatttggtatatttgcaatcaatacgtttattctttatcttatgactctttttaaaaaaatatataatgatgaagaaatggcactgtatgaaactaaaatacatcatcaaccatatgaatatgtgatttatatttcaaaaatatttatgaaacaggtgtattttttttttaaaaaaaaaaaagaaacaaactatagcaggtgttcttataagtaatcaaacaagtacttttaacttaatttttaaaaatttgtaaatttttttcctttgaaaattttacatttataattttaatcatcaatagaataacgtaacgtgtattatcattttcccaagactttagataacaattggatatatatactaatgaaacgaatatgaaaaagatgataaaagaaaggaaaaagtttctaaatacaaatttgttcgtaatattataacaataacaaaatattgttttagttagtcaacaactcaatgcagggattagattaagattaaatatcagataataatcagtagacctgttaaattgtcctaactataaattaataaacaagtcatatataaatatactagtatataatattaacaaattcatttgcttaaatagtgtcacatatttatcttcttgtactatattcaattcgtgtttagtacaatgtgtttagtttgttaatagtaggaaaaaacgattaaattataatctagaaaaattggaatatttattatgaaattaatattattatggggggtgtaaacagggttggaaaagagaagagagaagaccgcaaacgtggatttcagatagagaaggaaccaataacaatgcttctttgtgccacgtgtcatatctataatgagccacccaaaagcaccaatatggatgataaaccaataccaaacactgaaaatttgaacaaaaccaaataaaataataacaataataatattacccaagtcagactctcaaatctttggataggaattgcttagttttggccacatacgctcataatggcagcaaccacggcgtatgcggcggccaccaccgtcttgatccctcgacccacctctcagcccactcgctgctccgccttgccactcctcccacctcgcctctcctcctcctccactacttcatcatctttccctctcaaacaagtttcaggtatctatgaatcttcttcttcgactactttgaggcatttcgtcaaacagttgtggtttgagtcaactaagtatcttctgttcaacttttttttgttctttttcgaggtttctacttttagtcttatggaattttatgtaccttatcttgttgaatgctgaggaaaagaaaatgaaactgtttagaggagatttgttgaaattatgggttggctgtgctgaattttgagaattattggatgaggaaatttgttgtttgacgggaaaatttctttttttttttttgactatcattcaactagatatgaaaatttagaggaaaatttaatggcttgctttgtttttactgagaaatgtttagaggagctgttggtgggctttattggtaatcgagttttttcatcttacacaaaaactctttcatttttgtaatgataaaacagaattgagttcatattggtccatctttttctttttcactgcattgtagctcttaagatgaaagctgcctctttagaagagacatctacttctgctgatgctgtttttctttcatatagagtcacggaagcctttgctgcttcagattaaagctacttcttcagaagagacatccacttctgttgatgctaatgaacttttcacagacttgaaggagaaggtcagaactagagcttatatactctaacatcactttttagataagcttagtcctttgtcattccataaaaatataatttcaggctcgaggaaacctttttttttttgtttttttaactagtttgtgatgttttcttttacagtgggatgcagttgagaacaagtccacagtacttctttatggaggtggagcaatagttgctgtttggctctcttcaatacttgttggtgccataaactcagtacctttggtaagtcaagtcaagccctttagtgggaaattgttattctgttcttaacatcaaagaaatggcaaatctttgaaaaattgattggttgattataatttttgttaaattcttcatgcatgtttactctttcacactgcaaatttttattaaatcattctgagttgagtttcttctcgtgtcagcttcccaaggtcatggagttagtagggctaggatacacgggttggtttgtctaccgttacctactcttcaaggtaaacttgaaatcccaacaatgttgtagtggtttataatctagacttttgcttttggttactaaaagagctaatactatttttattttattattctcagtcaagcagaaaagaactagctacagatattgaatccttgaagaagaagattgctggaacagagtaaaggcatctatgtgatggcaaagatttaaaagcatgttattattaattactctttgttatccttttattttggtttttaatgtatttccgtaaagaggcattatttgtatccatcctgtgatgtagaataggttttgtatcaaatcctagtaaccctttttattttctttcaataagatttgacaaatttgaggtctctctctctctctctcaccctccttgtctacaataattatggttgctaatatttctaaggttgagataggctagccttaccttttcaatatgataagtgataacaactagattagtttggctaaatgtttcatgaacggtaagaggctgaaagagtgaactaaaaagttatttactttggttttggcatcgctatactttggtttggaaaacaatgggttgtgtcgattgtcacttctggcaattatgtactaaccttcttaacaaaaacgtgccaccgaccaataaacaagaaaatgatttattgaatgaaaggggaagggcaacatacttacataggttcatattatattcaaaaataaaagtcactaaagatacattgttgtcacattcgtatcatattatattgtaaattttacgtgtagcaagaaataatgactcattattactacaagtctacatcctctaagccaatgatggttacactaatagctcatatcactttttggcaaaccttgttaatataagaaaacaagaagaaaaactaccgccatatagtgatcaactgatcattatgccaacttttgtttgttttgtttgtttaaaaaaaaaaaaaaaaattcaaaacttcgtttccaatcatcaatatcaacatgattcattgataccgaacccaccaaaagcaaatatcattttgaataaaataagttaaagtagaactcgtttcactaaaattgaccaatcttccatccataatatattttgttttttaaagagaaaaaatatacttgcgtgtgctatcacaattcacacatctaacataattcttaaatcaaaatccctataatttaatcttttcaaacaacactatattaaatggggtcgacccaaaaataggacaataggtatcgtccaagaccctccattctagtccaaaaaaattcatttaaagaaaaattaatttattttttaaaaatatcatattttagatttttaatattattttggaaagagtgcaaaattattttttttcaaatggcccaatttattttcctaaatgctatatattaaattgcatttaaaaaaaaataagaaaacataaatatttttcttcaaaacaataatttaattaaactttttagcttaagactcttaatcagctaggtctaaccttggtactaagtcatctaagcctgtagagtgtacttaagaattaaatcaacattttcatcatgaaaatcccttagccagacgacaatgtggagatccaaattattttgttctacttactacaaatattacataagcttttcaagtcgtcgctatgtgtcacgagctcacctttttaggcagcggaacatccgtacgacaccttgacttctctaagccaaggtcagccattcaaccgagtaacaatgagctcatttttcgcgcgaccgtgtgcctcgtgcatacttccgtctctcgaacaactcccactaagtcatgctcgcaagcatccatgagtgcatccatgcatcgagacgctctggccaagatgctcgtactttccataggttctcactatgataagaaaaatcccaacatcgacgcaaatcccaacatcgacgctcacctagtcattcgtgaccaaggtagcatgtgcagcaagataccaacactaagctgacgtgacaacgcttctaatcgtgccccattcgatactgtccgaaccgtctccctcatcgactaaggactctcatacgtccatggtccagttcttaaggcaccatggcctacgcatgttggcaggtcctcgagacaagccaccaaactagtagcatacgttagacctctgtctctttcagcatggtgtatccatcctatgtgcgcatgcaaactagcccacgaataactacccgtttcatctcgtgttgagactcgtgcccaaggtgcaccacaatgtctcttggaggtttaggccacgtcctgtgcaagcggcatacgagaaaagccaataaaaatgtacccgctaacctctgacagcattcttaaatgcactactgggtcggcccgatagtgtccatgagtattccaactcatggagacatatgattcccctcgtggtcctcatatgccc

SEQ ID NO: 42483 - DNA, 3491 bp, Cannabis sativa
tttttttgatggattgcatatttcaatcatacatcataggtacatttgtacgaacgagtaaacaaaaaatttacaaaagtttattgttagaaaaatcaaaacaacaaaatattaaataccacgttagttaatttgtacttttttgcttagctacgtacgtgtaaatatgacgcaaggaactttgtagtacacaaaatcataataaaatgagatttctttttagaaatttggctttataaaaatctcaaaaggaaaaaagagtgacaagatttacttaggtgtcatataattacatattttcactagtgtaatttaatatttattaagttttattaactagtaaattaaagcaataataatttgaaaaaacaatgagaaaggactgtcatattttgttttgagtttcaccaaaatgtttgattctagttaaactaaaacatttattttttaccatacgatttttagtatttgaatataattttattttattttgaaaccaaagctaaaataaacatcattataaataccttgtttttttagaaaaatgaataaatccattaaaaggcataaagccaaagagattttgagaccaatacaatcataaatcatctaaagtaagttgggtggaacacccaaccactaaacttagaagtttttaatgaaagagaaaatttagctaaagaacgggcaaaagtattactagctcggttacaatgagaactagagacgtgggagaaatacttctaaacgtgaaggataacaataagaacaatcccatactcattgcaatgattccttttgttcgaaagagagttcaccaagtacaaacaatcaatgaatatattaataagagtatatcccaactacacacaaagaagaagcccatagagaaggacagaagcctccaccgtatgaggttaaagcaagcccgagacaatgtagaaattgaacataaaacatcaccatcttgtagagacaccattgcctttataaactaatatgccacctttcatagcaagtaccaacatcaacaaatagatcgtactcctctaaaattaactcaggaatcgcacaccacaattatgaccagaagaaattggcaaaaaactcactagagcaatctgagtttaagcttcctataatatcgccacagatagctcagagcccaactactgaccttgtcatcaaaaaaaagcttattatcatgcaaaaatatattacgacgatgccatattttacaacgaatgacaagaaattcttcaattttaaacttggataaaatatccataactctagccagaagttcatagaaactgaaagccatcttccagctatctaaattcctgaaaccccatcaaaaccaaatggatttaagagaaggacataaccaaaaggcatgtaatgttgttttattattttgatgacaaatactatagaagcttttatgccatgtctatccaagttgggataggatggaacaaaactaagacttgctttccaaacaaaattcttaatcttaaggggatgagaaagtttccaaaaaaaatttcaccactttgatggccttgaagaagaagaatgtttactccaaccaagcctaaaaactgagctccaataacaagtcttaacagaaaaaccaaccattatcataaagattccaaatcaatctatcatgtcaatcaaagctagaatatgaagaatacacaaaatgaatttagcctctgcatcatcaaaaagttccatgatgagtgggacattcaaaccacttgaggcaagtttttcaccaaccctctcaacaccaacattccctcaaaaaagagtataggactggtccacattatccttaatgatccaagaatcattacaaatacagatagagcccccgcgccccacacccctctatctaaagatctcgcccccaaagaattctcttccaaagaaacaaggctcatttggttttctccacattagtaatagaactatttagaaaataaaacattttcataactctcattgctaaagaagtatgaaaattatgtaggaataacttgaatcacaaattttaaaatagttgttctacctaaacagagaaaaaaaatgaacttccatccaaattgtgtataaatttttttatctttgattgattgaaacaaattactttcactctttctcgtaaaacaaggtaaccataagtatttgtcatgagaagagaccaaagaaatccctaataccaaagccaaatatgcacaaaaagatcatcaggcatgtgagaagcaaactgcatgcagacttattaagatttactattgtcctaatgctgcttcataatactggagaatgagtttgaaatgagagcgcgactttccaaattgccttccaagaagaagaagctatcatcaaccaacaataagtgagagattgtacggccaccctgcccacaagacacacttaaaatattatgtaactcaatttctagtttgatattggaatatcaacccctcaacacagacaacgagcatgaagggagataatagatccccttccattcgctccattcacattaattgcataagtcacgattgaaacacgcctcataatcagaccaatccgccctaaatgaaacctcagcttctccatcataccacgaagaaaagcccaatcaacacgatcataagccttaaatatatctactttgtacgccaaaaaccatttttaacccttcttgtgtcttttgatagcattaagacactcaaactcaatcatagcaatgtcagaaatatgcttccaaagaataaaggcacttcgttatttagacataatatcattcaaaacttcacgtagcctattattaatcatcttaaaaacaatcttgtataacacattacataaagtaatagacctgaaattactagtcagaattggtgatttaacctttagaattagcatgatgatagtctcattaatagatattgctgaaccagactcatcaatgaacccaaggaaggagcgacacatctgagcgcacaacatcccaaaatttctaataaaaaccagccctcatgccatttttgtttggactttagaatgcatctgaaacaatacctttctcacattggcttcagtaaaaggcctcatcaaaatattattcaagtaattagtaatcctaggttgaacaaaattcaacacatgattcatagtatctaatgaaagctcgtgagaagtaaaaagagacccaaaataatgctaaacaattgaagctatatgagaaagctacacaaccggcccatacccatgtgataaaaaaatactatgaatcaagctcattctctttctctttttgttgataaagaggccaagtgacattatcaagatcattatctaaactcgccaattcattattttttagagcaccacgcgtttgctttatacacatccccatgcattctaacccttaagaacagcagtgacttcattttttttttttttttggt

SEQ ID NO: 42484 - DNA, 7176 bp, Cannabis sativa
ctaatttaaatttttaattattttcttaaaaaataaatttatataataatattttaattaattttatttaaaattataattaatataaccactaaaactttcaactaattaattatattcctttaaaataagtctcatttgtaaaatttattaaaatgattaagaatttgtagagcaaacaagaagagaagcatagctctattattaatgttaccactaaccatctcttttaacattccaactctctttctttctttgtatggacattcctacaatccattgaataaaataaagctatattttatgaaattgaaacactattttggtttcactatttcattgagtttgactagaagagctataaaactttaaaatcaaggtgttttgtcatgaaaaggattggaagactcctaacttgcttatttcttgattaggcaaaatcattaaccataaaaccataaccttttcatacaatgaagaaaacaaaaacaagaacaaaaaactctcctgttttcgtcgatattagcaaagcaatccaatcaatgacaaaatctggaaaaacaaaactgcatgattaaaatttgttcaactgttcttcatcaaaggttctaagtcagtcacatcaccctggctaaaataatagtgttaaacataataaatatgatactcttcagaaaatacaagaaaaagcataaaaaaaagggggttttcctcaagtttaatctgcatgaaagcatctgaacatttttgttaaacatataaattaccttaccatgaaaataaaaactaaatataatagaaggacgagagagagaaagagactcagaaaactgccagaactttcccagcagatgctctccacttgcaacttagccaaacccaaattcgaaatttcatcctcaagattgaattctgaccctacaaagaatagcaccacacccaaatgattggacagagaacataaccaataagctgggcttatctagaaaaataatagagtcgggcaggcgtattaaatggctcttagagtattatggtttcatctattataaatcggctgcaacaataatatgcaccatagtgaagaaacagaatccatgggagccacttaccggtcactggaagaagcccatgtttgaagttagtttgtcaatgttgtccctggctttggctcatagagggatggcgatgaagcttttgactcggagtttgctgatcatcctacaggtaaaatttaaattctgaaatatcagtaatctaatttggagaagaagactaacatcgcctaaccttgaattataacaaaacatatatttgatttctattaacaacaaacaaagcaacgaaaaaccttataaagagatgctgctgattctgactccacattctggattgcaacagggcccaatgatcgcagggtatccagggtatccaatgttagctgccacccacaaagcgcaacggcatcagcactagagccagatccactgctggtgctgccagcagctgcaacattgccgttcacccagggacaaaacttgttgtgatgagcaattggatcaaattctgaagcttcttcatagttgctctcccctttaggtggttctgaattagattgaaggaagaagaaaaaaaaaagagtaaacacatcatcaatatcagagagaaaagggaatcacaataaaagctttcaacttacaactacaatatggttaagaataggcagaggcagaaagggacaggatgaatttacaaaacataaaatagcaccaagtatattgaagcagatgttccaaaacaataagcaataaaaagaacaagatataagctcagatgttactcatttatgcacactaacttttgtcagcaatagtatccatatccaatatcaatgcacactgagatgactaaaatcaaatttaatttgcttgagactcattgattatgtggacccgaaacacaggaaaataataacgtaatctaaaagctactgatgagtaaaataaatgcaacagattattgtaagtttgtagaaaaacaaagagctgcggagaataataagaacgttagaagagaaattaaagaaagtaaacaaggtcaagccttaaaaacagttaataagatggggaaatctacctatcccatttactaatgcataatctgactctcggtagacacgaacatttgtagatgaagactttccagcctttgtgacattttgcttggttgttttatagccagagtctataatagcattgcaggagagagaagggtgtgcagaggcctctacaccaaacttacagcttgcacttaccttttcgccactttcaacagattctgccttggcagaaccatcaatcttggagccactatcagccctcccaagagattgagacatctcctggctatcaccacgaggatcttccctattaatttcatctgggacaatctcatccatcaacccaggatctggagctgattcgcctgtctgaccctgaacgtcagtatcctcaactctgggttcgacatcaccaactacactacctgctctatgaacagacacatcagctccatgaatttcagcttcgtgactggcacacatgccaacacttcccccacttactccaaaactaatccccccacgggcttgagcattcacagtttctgcattgaaaatttcttcaccatcatttgtactgctgacacccatttccccacgaacagcttcagcaactgaacgaaaaccaacactttgctgagcttgattactgtagtttaattctgatgtttcattcatgtccaaatttccataagtacttgatgaaggaaactgaatatcatcaatatctccaggataattttcaacactttccattgagtcctcatttgcactatgattgtaagtatccattgcaatgacagatgatgcacgtgctgaatccctagttgcttgaattcccacaggttgctcactcctttgccgaaatgaagcacctctactgccatctgcatagatttcaacacccattgagtggctaggaccagcaccagaatctctctgatacgatgaacagtatgaatcaaaaatatccaaatcacgtgcacgttttgaaggcccagcagaatattgtctaccatcggtgacttcatcaccatcacgatcaatcactgttccttcaacactatctgcctgctgcacccgtaagtgttgtctgtcatctgagcttccacctatttccaaacttcgtttacgagaactaggaccccgtgattcatatgaagcagcacgatcaccaacctcacttcccgcaggttgcccaatcatcaaatcccttcccatgtctccctcctgcatgttgtcaaacattgatcttcttccaaaatggttaaaaggtaaacctcctgccattgtgagatttaaatcaacatcagcattaggcaatgacttcccatcatttgttgttgctacttcatcacgatcttcagtctgctctttatctgcatcatcagctgcaacccaaccactaattccactcgctgcacttactccacgagtcaatgccatttttttacttgtgtcaggaatgtcgatattgttggaagaaaaacgagcagggcgaggaacagttaaaaagtccataattctaactgtagcaccacataaactgcaatctagtaagggcgacctgaactcacatcttggatccttagcaaacattttactctttccagtgtcttttttagctgaagcagatagtggtttcttgcctagtccaggatcctgtgaaggatggacacggcttggtccatgagaagttccatttctggctgattgtgcagaatgctcctcacagtcttgaacatttagaagccatcttggttcccatccgcagagacttataagcctttgtgactgttgaattttaagagcatgtgcatatagtcaaatatatttattgattaaaaagaatgtttattttcttgagtgattagacaactactagcattgaaacaatgtctaaaactcacagaagaatatacgcaagaggacccctcatgagagctttccaattctgggatactctcaggtttgaagtctgcttcccctgcaataaaactctgtgactgggacaaaaagcgatcaatctgtggtccatgtgaaacacgcatttgctcaatagaagaaccagctactttgggaagagactcaaactgcaggagcccatcacatctatccttataacccccaattaaggctgattgaggagtaggaggaaattgcaccaggctttcagggcagctgttccctctccaaggacatgtggccttgtgcccagaatccagctccttcaaaaaggcttcacccgcattttgaacttcacccacaaaaataacaattaaaggtagaacaagcaaattttgtaaacaaataaaggacaagcctatgatctacaccttattgtcatacaaaacttttcttcaagaaggtttgaggaaattgaacagtaatttgttataattggtatcagtataatgcacactacagacatcagcagataatttgaactcgaatatcaaatgctatgtttgtaaaagtactaacaaacaaagttatgttagaaatataatagattgattagcatgtgtctccaccatctccatcatgaattttttagcaaaacacataccaatgtagcacagaaaacactagcaacatagttcacaatatgaagctccatggatcaaatagcagctgaatttcttaacattgaagtgtagtcacaaaattttagctgattatgatgtgtatcaaaaatataatagaattataacacagttatctttcttactttcccactctaacacttttctcccttgtacattgacctttgtataaagaacagaattaagtccatttaagcctttaaggaatgtatcatgaacttttaatttcattaattgcaatagctaaccttcagcaagggtccaagacggcaatggaacaaaactaaggctagcactgcaagattcacatacaatcttatcaacctcaacatttacccaacctttctgagcacaagccaatgaactgataacctgcaccatgttaaaagtgaaatattaaatgattgaaactttggaagtgcttcatttcgcttatgaaaatggaaaaatcatatttgtactgcattataaagactgtagtatcacaaatttaatcttcaaaatttcatctcagctttacttcctagtgttcacttagtgcttaaccctgtgcagaaaaccaacttcatcaaatttacaattatcatgaattaatgataagatttcatcagtaacgattaaaattagaatccttggcctcaacatagatggaagacctagataccatgaaagggggaaaggttatcatttttcatttttcagttttttacaatgctataaaggtgacaaaactgttgtggagcatttcaaagattacacatttttattagggatattatgataatttaaatagtgtgatttctgaaaatggcaagtatgtttctcaaaaggattttaatatttttccatgctaaatcaccaaggcacaagaataaatggcttagaatttccttcaaattgttcgcattaggaaattagcagtaaaagaaaaaaaaaacgaccgctcgtgtagataaaaaatctaaaagtaaaacaaatgttaaaaaaacaagagtaaaacaaattttgacttctactaatttttaaagaaaacagaactatctattatttttgttttctaagttacacattgtaacttgagtgttatttgtttgtattctgaagaaaattttgtatcctttgttctagtaatttttaaattatattaaaagaaacgattgtttcttattaaagaaatgcatatttaataatattaataataaaaataacagtcttaattagagaagttgtaggtaacattacataaattataatctaaaactaaaagctatcttttttatgctagtattagtcaacattcattacatgggggtgcaaaactagcaaaatttaatgtccatgcagtatcgatgattagaagttaagggtgagaataaaattaataaaatattaaaaattgatcaaatgaaaatcattatatgttatgttgcaacccatgacaagctaattcaaaccttaggctttccgaaccaatgtgaaggcttaaatgtagccaagcgcctcaataaatcccctctttcccagggtctacaggaaggtcttgaagatctgaaggcagaaccaccggcacttgtgctcaaggaagtccgaggtggttgtgaaccaacacatgaaatagaagctgccttggagccttgcccatgaattgacccatctatactgccaacatttgttggaacagctggagatgacgccccagcagagctgataagaccaaaaaaaagcacaaaattgtcacagaaagctatagataaacatgtgtaaccttttcaattattcctaccaataccatcttagtaatagctgtaatctataatgtataacaaaaacaattaacaaactattaaatcagagaagccaaactcgtaaagtttctagaaatacacatacaagaccgatgggtttagcatattgattagttcaattactccctaaccccattacatatacataataatgtgccaatgttcaaatttaagtaatcaatcgagtgcatacaaatacacatcgcaagttcacaaaaatagtggcgcaaaacatcaacagaatcaaaaaatctacccctaagtcttaaccaaaacccacgttcaagcacacagtacggacaataatcacagcacattgatccagcgaacaaaattcgaccagcctcaatcgactaaaatttcttaatttccaaagaatccacaaacagaacttatcaattagtataatcatgctcaaatattaagtaatcaatcaaaggcacatacaaaaaccatatacgagcacagtaaagcaaactcaacaacaaaataaacgaacgaaacagtaaatcgccgaaaaacctccacaaaaacccacctaaatcaattgaaatttcacattttttttcttttcaaaacaaccaaacaccacaataaatcaactccagcactctttcccatctcctctaaaaaaaaaaaaaaaaaa

SEQ ID NO: 42485 - DNA, 5262 bp, Cannabis sativa
atacaagacaactttgtgtgtgtttgtatgtgttttataaaaaggcatgtggaaagataaaactcacctccttaggtgtgatcatatgttccgggctctgatagattgaaggtacaactgactcattcaagttgtttacattttgcactccttcaggtctttcttctttacaacctattcaccagaagaagataaatgaaaactagagttagtttgaaattgtataaaaggtgtaaacatcttttaatgtcaactgtaagcattacatgaatatctgtaataagtaatttcataaccaatagatttgcatgcacttaaacctttacttattaaaaaaaaattaatagctaatgtcttatgcaatcaaagctataacaaccatacatttccataaatttatgattggtttttaacaagcaagataattatattgtttaatgtctccatgaagagcattccaccttttgatgttaaactataatttgattcatcacaagagccaaaatttgaaatttccatctcttcttttatttcccttccacctcgtagcctcattctggaaatctcactttcaaagttttcaggattagttttgagagcaacaaataatttttgtgccaaattcttaatagcacgagcctgaaaaccaaaattcaaaatttttatgtgagatataagtattttttttattattatttattttagatttttaatagccaacagcacataaaatatgttaatggactaacctgtctataatatactgtagtcgaagcattaaaaaccattgcattgttggataccaaatatacatcatgctgaacatcaatgaaataagaaaatgatcttaaaagggttgcaagaaaatttatttagaactcagaactactgatttcaacatctaaatttaatatttttcaaatatgtatgtaatttaaactttggaaagtaaaaaactcctttaatgacagactcttaagtagaaagctgcaataagttgagcaaacctcaaatgcatctattgacttgtagcttccaccattaagttttctagaaatggttccaaaatccattggctcttttatggtatcataatatccatcaaccttttcaaattcaacattaaaaactattatgaactataataataacaagaattaagatagagcaacaaatataaagtcacaagatattgacctcatttgggtttactggctctgcaaatatttcaaaagagtccctcctgcaatttaagcaaacgaaaatctaatttgtcatagtgataaagaaaaatttagccattagaagaatactatagcaatttatgtcctaatctaattaattagaaggacaaaccacaagtcgcaacaaaacattgtttgaaatttacctcttcaaaatactcagcaatagttcaagcttgctttttttggatacaacaatttcaggtccagctgatgtagcagctgataatttgaaaagaaaaaatattacatattttgtgaggatcgattttattataaatgattacataatatataatgtttcaatacacatcttagaccaaaaaataaaataaatgtaagaggttaccaaaatttgtatgatggtcttcattgccagattttccaacctgtatcaaatctaaattaagacatttacaacaatgaaacctgaaacatagttgtagcaaacttaccccacaaacgcaattaaaattttttagggattaattggaaaaggaagctaattctcatgagattgaaacgcttgtacatattcataactaaataaaaaatgataacattgacatttctaatgagtattatggtaactattatttaataccatttattcgtttaagaacttaaaattgtattttagaagtaatgagaacgtcacaattctaatgaaatgatctttcattaatgtttatctaacacaacaagtagaaagttcttagttcttactttaagtattaggaatactagttttcacatacattttaacatagaactaatttttaaaacatatatttatatatatacatgcttagcatatgcctatctaacccataaaataagtataatatgtaaataagtcagagagaaaaaaatattaatacaatagaatataagtttacaatatcacaatctgacttggaaatttcagttttttatcgctcaataaagaagtgtatgaattttgtggtccaatatgatgtagtcaaagttaagacacatcaaacaattaccagtggcgtacacaaaaataaatcatactttcaatgtgctatatttaaaactgattatcaaaaacaacagataaacttttactttctacaacatgcttaaaagaaaaaagattttaccaattactacttaaggttgtgctagaaatgaaccaatgatttaaagaattaaaataaacataaaaggcatcttctaaacctgatatgtagctgtgtccataatcaaatcttggatagatctagtcttgacctttttttttcctcgattaaggttgaagtctctatgtccagtacttgaatcctttattgttgtctcacatgtcttcttacccttattttgaatattttcttgttgagcccttcgcacattgagttcatatattcgtgcacttcttctacgctcactagttgacattaattctataatttttggagcaaataaacagcagaactacctttgtcaacatcagtaaatgctctgttattgttttataaatattaaatcaagttaaaaaaatcgctttcgaaagaacttaactaaatcaataatctatttatgagcaatgaatctaacaaaaatcaaaagtaaacaaggccgttagcaaataattgtagcaagcaatagtcaatacacacacaagccgaagctataatgatctgtaaagaaaatttatcattttttcttttccaatacatttcatcggtgatccttatatgctaatagtattgatacactgctttggatattttggctcatttgcagacaattacatggcataaaatgaaaagatactcaatcaagaaaagaaaagaatagaatagaacattaccgaagatatccttgacgaaggtgaacaagagcttacaaaagctgcgcctcttaaaatgaaaaacaaaactccatcggcgttgccctattgaagggcttgagctttttgaaggctctgtacaaagtattttaataaattgcacccatttaaggaaatcttggtggatttccatagaggagaatgaaaattaatgtccgttatggtcctccaatgcacaatgcgcttgtattgacaattgtgcgccgggtgaattaatgttgcatcacatctggcaagaaaatactaggcaaattagatcattgagattaaaagataggaattttaatgaaaataaattcattctatatcacatagaagtgaaactcaaatgaaaaaaaaaatatatatgaaataactttgctctaaaacatgtaatatattgtaaaaaaatgagcaattaattatccttccacttaattccgttgtgtatgcacctactaaaaaaaattcacttaacaacttaaagaaattagaagaacttttgatgaaatgtatagtttataagtatatgattaattttaacaaacaaaaaaaatcttattcccctgtaaatcatatgttaaatatagtcaatataaaaaaactacatattatatatatatttcaatgcttatgctaaattgttgtactgaaactagaaaatcaaacactttacatataataagatggtaaattagttagtatttctcaataaaatgcattgcttcttcataaaccaatttgtatttcattccaccatttatgtatacttccatgaatgcaattattctaaaatctttgaacttgccaacttattttactaattatgatcttggaatttagctaaacaataatgagatatagaatgaacaaaggagaaaaatcttcaaaattcacaaggcaataaaacaaatagtcaagtatttttcttttcttttcctgatgggttgaaaaaaaaataagccaatattaagagataaagtgctttacttgtatagcatattgtcaagcagatacacaattatatttaaaacttgaataatagagttattgcattcaaacctgaaattgtttgaaataagccaacaagtatcgctgtccgtagagacgaaaatttgaagatgattattttccacaataaattggtagaagcccattgtggataatttgttgcatccaacactactgtaaaatcaggagagaaaataaacattataaagctgcataaatattgtaaaaatgaaagaaaacaatttcttagtttgaaagttgtacctcccaaattgactatctcattgataagaaaaacaacaaaattatgagacctaaaagcctcatagaactggtcaattagtttctgtagttggaaagagttattgaccttggaaaacccaatacgcattagggtattttgtcttgtgacttcaaaaacaagtttccccatcacttgaagaagaaggagaaggagaaggagaaaggtttgattgttcttaattttttgagtacaatacttctacttgtatatttccattatcctaataaacatgcagaaccattagaattatgttatgcctttacttcttctaacgtagtggattccatagctaattctgaaaccactgccatctttaattaaggggagttgccaccctatgtggtagcgctgctttgattttcatagactttcttatttgccaaaccaaaaaaaaaaggagagatttgtctaacactttacacgattggagatgcaaatgttagttttgaaaataataatagtaaaaggatatttggggcataattactaatggttttttttttttttggaataagtacgaaagttttgcggtaaagttttgtaacatgtataaatttttatgaataattttttttttttttttgagaaaagactattatattaatttgaaaatcaaattacatgacaaccgtaagagaaggtggaagttcttccaatcaaatacatctcaaatccactgtaagagcaaacttagtcaataagtgagtttcgttattagcagatctataaatacgagagatatgtgctcgtgggaaattcgataacagaaaagtaacatctttaagtatagtataaaaagctgacagaaatttagctgaagactttaatccattaacaaccaataatga

SEQ ID NO: 42486 - DNA, 6752 bp, Cannabis sativa
  modified_base (1912)..(1917): a, c, t, g, unknown or other
ttgcacaactagtacctagtagtagtaatggtcaaacaaaacaattgcaatctttagggaccatgtcttctttcaagccatctaaattgactttctatttctaatacatcaaaattggccccaaatctactaaaatttacaataaaacaatttatacatatttatataattttgtcttcattttggggtgtcataattaatatacacaccttttgtgtagatagttgattattacatctctcactatttctggatttctaacaaagtttgtatttgtaaatcatttggatacatttataagcatgcatgtccactctttttcaagggttttaaaaggcatgtaatttgtttgtttgcttgcttttcttttcttttgatttcaatacaaaaagtgatattaaaaaaaagtaatttttttacccgagtaataaattgtgcacacataaaaatataattagtcacttttaataagtggggttcatctcaaataaaagtaattagttaaaattacttactcataagtgtgtattagatttgtgtgtatcatatttgtttatgatttgtgtgcacatattattactcttttttaaagggttgatactatttgggatactatgttttgcaaaagttaataattgtgctatctgttttgttaaatgagaaaatgaatcttgtattttctaaaatagtataaataggatcctaagtttaatttttgacaatttactttttaatataaccagcgtaaaaataatttttagcacaaacagatgtagaaaacataaccaattttatcatgacacatctatatcgaattattattaagttttattttatttagcaatattttaaaacatacataaattctaatcagtaacttttgtaaaacataaaatttaaaatagtatcgaatattatatagttttatcatctaaactttattatagtagctgaaatttcctatcaatttttttatttaatgttaatactaatagactccatttcggttacctttagtttgtaatggttcttataatttggataaatttttacccaaaaaacaaaaagctgtcgagaaatttttccaacataaaaattcatagtgcaaaactttacaaaatctacagttcactagaaaatattactatttagtattgtgcattgctattaggtattagtattggtgtctagtactattgtaaaccctaaagtgacgctttgtgaatagttagtgatattctataataattatttaaatattagtttagatcttaagttttacaaaagataccgattagattttctatttcattaaatgacaatttagaccttatatttttcaaaataatataaaatagattttgaactcaatttcgtcaatttttgtaatataaccaacttgaaacatatttatgtaagaacagatataaataaatatgtaattattattgttataacacctccaagtcaagttatttattaattttaatttgagaaaaattaagttcaatgcctatattatcctatttgaaaaatataaagtttaaattgtcattttataaaatacatgggtctaaaataatatttacccaattaatcacatggaatataatatttaatttctctaatttaatataatacaatacaatacacataataccgtatttcaaataatataataatataaaaaatatcccaaaatactcaagatgtagtggacaagttgtgaaaatagtagggtccttgctactttggctagtctacactacacacacttgtatatgttaggtacccacaattccctaatttcaatgcaatagatgacacatttgcatgcccacacacgtgatgtggacctcatctcttttgctcaaatgaatttttatataaattaataataataaaaaaaaannnnnnagagagagagagagagagattacaaacttcaccattttgtatctactattttagaggttgttatggtatggtatggaaggttataatgtgcattgttatcagagcttattctgtatcactaatctaacatcatacaataaccacttggggctagctcaagtggccataggggatgcgtgtgtgttggaggtcctgggttcgaatcccaagttatgctgatgtaatatataaacgcttaaatcaaaaaaaaaaataaataaatctaacatcatacaatagttttttttgataagagcattgatattgggtattcaataccttctataagtggctgtctataattagccttcaacactaatagcggtatggtactgagaagtatgctaggcaccaataatgcgtttttacaattctcaattaaaaatagagagatgataaaatacacttatagtgtctaacactcttataagatataatattattattggtaaaactcaatatcagatcttaattattttactttaataaatattataaaaaatcactaatcgataacattttattgtgatactaggtaccatattaataatgtataataatgttgtcatttttgtccaatataagagcttacacttttatattaacctagcatgtattttttttgtttataagtgattcaatatttttatatttaattcaaataatattttcctaacatcttttgtttttacatatcatacttaatacttgtgtatgatttctgatccttttttgttatgaatagaacataaagtggaagaggataagaaatagtcctagttggacattttcatcatattaagagaatttggtcataatgattcagttagtgaaaaaaaaaacactctgtttttacacttttatgtggttgcttaataaatgaattattgattatttataatatttttaaaaatatcaagcatttacataagatgagaatgcaaaaaagaattttcttaatattttcacacttcaattttccaaataaggtgagtaactactaaaaaaaatagttactcaccaaattatacttttcaaatatcttatttcacttctctttcatgtttataggcaccaaaatacttttattggtgttcggatttacataaaagaaaatcaactttagcaatttattgaaaagctaaaagcaaaagtaaaagcttagcgaaataatctcataatcaaaccctactagtttttattgagaaatttttgaaaccaataagctgacatctttgggtaccttttgaggttgtgaaaatcaacatagacaattccgaaccttgaagtgtaacctaatctccactcgaaattgtcaagcaaagaccaagcaaagtagccaaccacattgactccttcatcaactgccttcttcaattcagctatgtagcttttgtaatagttgattcttgtgctatcatgtaatccttctgggagtgttacattgcccgaatcatccattcctgacgatagtttaatatcgagaaaaatcgagtgtcatcaaattaagcaaaatttgatacatttttacatatatgtaaataaatttcgagtcatttcacattcatgttatagtattgctgaagcaatttagaagtaaagatgcgttactcctatgtagattggtaccagtgccaaaccaatctacacaggagtagagcaatatttaaaaatttataaaataagagtatttatatcgaaataattgtttttaataataatattgaaaaaaaagtacttgaaagagtcaaaattagtatcaagaagttactttcaataaattttcttttacactaaagtactttgttttctagttatataattgcttagcttaatcatataatttaacaaagagataatgactattaattttcaatacatttataaataaatgagaagataaaatttattgagagagaattgaattgagacataccattttctgataggataacagttgggttaccataatgatgttttatatatgttaagcatttgtacaaaccccatggtacttggtaaagccaataagaatttgcctgcaaaattcacccacaattgtgttaagaacacatttatagaatacatacattgtgtatgttaaattttctatgttattgaattgtaacttaccctaggaccaattggcactccattcttctcaactgaaaatttcataagaaaaaacaacaaaagaataagtgttatgtttgtgatatttatgatgatattttggaaaaattgcctctcttttggtttagttttgataattctttgcaaaatagcattcgtcttaaaattcgaccattttgcaaagaattatcaaaactagaccgaaatgacttctgaaaagaggttattttgctaattaagatcgagattgagaataaaaagagtaaaaactcacaagcatatccaacattccaatcttgttggtaccccaagtcctttgattttggttggtgaggatcataaatgtagtatgcagtgtattggtttatgcccacaaaatccattgaccccttcaccattttaatctcctcttctgtgaactttggtaaccttttgcctactatttcttccattgttcttggatactcaccatacacaatgggatgaatgaacctaacacacaacaagtcatgatatgtctcatactatatgaaattgaaaacttaatcaaatcaaatcaaatacttataagctcatattctttccattacacatattttatatgtttttatacaatgtgtacataaaaatatgggaaaaacaagtaagagtaaccaagtacctcttagtgtaaccagttaccttatactattttcccgtatattttaaccttttcttttttaaattttctcataaggtaagtttcttgaagaaaaaaaactcacatttttgcaaagttatatcttaaaaatcataaaaataaagtttttccacataaaaatgtagttaaaattaaaagaaggatttttaattaccatcccacatgaaagtctcttgctctttgtgcagcataattatcagcctttgatctagtaagaggctcataccatgaaaagtctagtagaataccaattcttcccttttgttctgcctaaaaaataaagaaaatggtaattagagtctaaccaatataagaatactaagttacaaattttggttatttttacttgaaatttttggcgatatctttgaactgcggcggcatgagataagattaaattatgggcagcaatgtaaggttcagtagctgaattcccagctgtgcaattcccaaatggcttggaacaccttcctggagcatgaagcccattatcgtacccgagcgcagccacaactcggggctcgttgaatgtcatccagttctttactctgtctccaaatgtcttgaaacaaaactctgcataatcagcaaaatcttctctgcaaaaatatagtgtgaatatgtttaattattatagtgttttatataattttgggtgtttctgtatttgttttaatggtaatttggattctgttttaaacattcataaataaaataataaaataataataatatgtgcgctcaaaatataaatcaaaactttactcacattaatattaatatgaaagttatgatagaaaaaattaaaaaaatatataaatattaatgtgtgcacccaaaatattacacgcaatgatgttatattactgagttattgttttgatacgtatttgagttaataatttattcaaatttacaaaactgaaattcatgtttgtaagtgttagaaactaataatccaaattagctaaaaacaagaagagtattaccattaaataccagtgatgtctaatactatcattaaggtagtattttatattcaaatagtaaattttaaaaataattattgatttaaaatatatgaaattcaatactacattgcgttataacatctcaattctcaagtgttattaagtatcattggtgtcctttaacaattctttatgataacacaaaaagtgtaaacttgcacacttaaacttgttattagtatcggcggggtaggcctgtctttagggctcacctaacttaaaagctcaaaaacataagatctcaattttttttttactgattttaaaaaattctaaactttttttacataagatttcaaatttttttttcttatgatccactaaatttcagaaccggccctgtgtgttatttgtagatttgaatgggtaaaagtgtgttatatatacttacataacttgcttattcagccatcccaagtatttctcctcaagagtctcaggaagatcatagtgataaagatttgcatatggtgtaatgcctgttatatgaatttaaaataattgtcatttttctattatatttcttataagattaaataataaccactcaattgtgatataatcaacaaaattacctgatttaagcaagtaatcaatcaacctattgtagtaagcaactcctttccaattcacttttccagtgccatctgcatcaaaatttaattattcaaaaatttaaataaataaataaaagataattatttaattaaaattatataaaaataaatacctggaaaaattctagaccatgaaattgaaaatctataagcatcgaagtttaattttttcatgatattgatgtcttcctgaaacacacattgtcaaaaaataattactaatattaaaaaattattaaaaggcacaattaaacttcgatgtattaatatcgctattagtctaactaaatatcaagtcctatataatttaatata

SEQ ID NO: 42487 - DNA, 5265 bp, Cannabis sativa
ataataaaaggatacaagcaataacgggtgacaacacccaaagaatgaataacagttcaaaatttaagagtcctcaattttaaaaatatacaaatgaatctatagcttgaacttctagagacctaaattcacaagacaccatcaatccatgtctaaaaaaacttgaatttgagaagagcaaaatacacaatatataagaatacttatcaaacatgtgaacgatgccagtacaatgaaaaacatcagatgagaatgtgaagacttcatgttcctccattacaaccattataagtggtaaattcacttctttaatgacaatgaacttggtgactaaagcaatttctagtaggagatttggagaacaaattagataagaaaatgacaaagctttaaaaaatcgaacaaagtaatttgagcagctaatgtaaaatctagtaactaaataaactgatatgaaatagaaggaagaagaaaaatccaattatacctgctgctttgttagtgcttttcacttttctatacgtctgtatgaacaccaaagaagaagaaacaaaagaaatgtttttcttataaaaattaagaaaacatagtaatgattactttcatggccaccaagaagctggatgctgaagaattaaaactcaatgtataaataaaataaaacagaaaacaaataagagaaattaccttcctaaatctctttcccaaatctctaccttttttttaatttggaaaagaaatgcagaatcaattaaaacccaactaccaaatagaattttgtgaacattaagcttaaccaacatactataatttagtattgcatcttacaaagctttaaagccacaatatttctccttaagctaagaaacgggagaaactgaattcaattattcaataaatagaaaattaaccttggcaatgcagttgttcacatccaacactttcaggtattgtcgaaagtgttacacagggtcattagtgcaagcaattcgtcagtatagaggtggttggggagtgagtgaattagcggaggaggcagagtcgaggtcaatgagggcgtagcgaacggagtatgtgaaggaatggtggactggtcagcgaagatcgtaaaagaaggtaccttgatagagcgggagacagtgtgtgtggctttgcaattttattaacctaaataatgaataaagggtataatgggaacaatacttataaatgtgggtataaatgaaagaataagaaacagaaggtaaaaattaaaatggttaagctaaagtgggtatagtacgcaatttcctctattcctttgtatgatatattgaaacctttgtaagtttgtaacattatggctttgggcctgatgaaaaaccggattcatcttgggccgtccaattttgaaaattttattttcaatagagcaaaatagtcgtagccagaaattagaatatcacactattacacactttttattttatttgtgcacgcatcattactcgtctaatttaatggtacttttcctctcagtgtcaaatgaaattaagtaactaacctatattaatattaatgtattagaaagttattaatagttttttctaaatatatatatataaattgcataattttttaataaaaaaaatatgcaacttaaagatatatataagtcaatttggaataaatacacgacaaccatgtatccttgaacattacgctttcgttttcgttatcgttgttcgttgagatttggacatgtctttaatttttgccttggataagtagtccatatttttatgtcagcaaagtatattgtaaaaagaaaatccacaatcgatttttagaaatcttattccgttaagttccactcctttaattaatattagttattggcatacagtacagttggtttgttataacaacttgtcattatataaaccctagataattactcaaagctttttttagctggcttacattttctcaagacactcatcaaatccttaattatttatatatgatctctatataacctttctaattatttgttgtgacttgagttgcgatgctaattgtttctacgtagtcatctatgtgtaggttaataaaataataataaggtgttatcccttaattagctaatgttctttttattaaagtccaattccattacatcacaaatcttgtaacagcagtcaagaaaaccaataaacaattattatatgtatatatatggtaaaacgtcagtatctgtactttcttgtaaattttattataagcaaaaacattatatttactaacgtgactgagggtaaagatctgttaagaaagtaaatgaataattggtgataatcactattggttggttgaaaaatatattaattatttcctactatatatagtctatagaaatgtgggtatatacttgtagatgtcttattcgagattccctttttatactttcatgtttatctatgctaaaccgaaaaaaattatttttttattactttgaaaatcatgattatttggttggacattattaaggatacattattagggagattactttatatattgttttttaatttacagtttttgcttcgataatttttttaataatttttatgtgatttactatacgaattttagttataatttaaattgctctgttagttagtagttattactataagaatttttgtattaaattctataaatatatatatataaaaaaaactgttttgaaatacaaaaataaaaaactttttttttattaataactcattctaagattttctaataaaaacttaagacaatgcattcattttgttcttttgaaaaaatttacagagaattttagactactatcaatgaatagtgaataaaatggtatgcttttctttattttaaacaaaattattacacattttatacaaattaatataaaataaggtatatatatatatgaattcatttacaactcaaggtaattgggtgctctcattgtaatagaatattattcctcataatttagctaatatatatgaccttatcctcataatttagctaataggcagtcctcttattgaaatctctttcttcctaaataactataaataataaatatttacagcagatgccacgtatctaccgtcaaaagatatgtgtcgtccactaatcacgagtataaatatagatttaacaatacattcattcatatataaacatataatagtgtatatatatatatataccactataagaacaaggggcagaggaaagaagcacataatttatttatggctaggttaaagtttttgaatctcttatccttatatctttcttccatatgggcaatctacaaacaccttttatctagtttactaaacacaaatggggttccattcatagtcaaactgattgagatttgcttaggactatacttctggttctgtggtctatcaccatgtaccgttgatttagatgaccaaaccaccatgcatttctggaccgttaatcaccgccgaaacaacaagccagatctagttatgattcatggctatggtggcaattcaatctggcagtttctgggccaagtgggtcctctgtctcgagacttcaacttgtaccttccagacttgttattcttcggaaagtcctataccaaacgctccgaccggtctgaggttttccaagccaaatgtgttgttgaaggtttgagaaaactgggcttaaaacgtttctcgctttacggtataagctatggtggttacgtggcttatcagatggcccagatgtgtcctgacgaggttgaaaaggttgtgattgtgagtagtgggattgtttggacagaggatcaaaaacaagagcttctccataagaagcatgggagatatggtttggagattcttttgccacaaaatccttgtgatctacggctgttagtgagtctatcagtctacaaatttaatcctcttaaatgggtacccgagtttgttgttagaaacttcgtaaaggttacaacttttcttggtttttattatttgatacataccattattttgctctgttttttaaattaacttttttttaggcaacaatggtacatcgaaaggaaaagatagaaatggtagaagaattgcgcaccggaacactagattctaattttccagtcctgactcaggtacataattattagcttggttaatatttttcttgttttatcacactgagattgattttgctatttgtttttggttcaaggaaacgctaataatctggggtgacaaagatcatgtattccctctaaatttggcttatcagttacataggtatgggaaaaaatttaatgtactaaatatttagtatatagtagtctttttttattgtatgtatttgagttccatactttgattgcagacatttgggacccaagtcgaagttggagattatcaaggacacaggtcatgctgcaaatctcgattcaccagaaatcgtcaatgcactgaccaagtcattcatttcgacccttctctagtccctagctagcaacagtacgtaggcacttaatgctaaattgcactaatagcacgtacgctataggagcaatgttattaggccattcaagggatctaatattatatcaatgtcaagcattataatttgttaaaggagtttttatattattcattcaattaaaatatgtaggatctcatattaaattgggtaagtttatcccttcttctagtggttcaccttaaaatgcatcttaacaatgtattttcccttatagaaataacatgatgatatacataaactcatttagtagtgtaaatggatcgggtcgaatttcatctgattatgattttgattattaattaaaaaaaaaagtgaaaataattttataaaacatgattttgaaaaatattttcactttttcaattttaaaaacaaaaaactaattaaaaaagtattatcaaacgtatctttaattttaaaatgaattttaaaaataaattttgaataataatattaaatataataatataaatgtgacacgtatacaaaagtatacacataattattaaatagataacactttaaatttattactagtttattaattttaagaattttaccgttaaaatttaaacttaaaattttaccacatatttaattacacattttaaaaaaaaaatttaattacactaatacaaaaaagagtcacagatttcgaactcactttttagcatgagtatttttttggggtttttttttttt

SEQ ID NO: 42488 - DNA, 3004 bp, Cannabis sativa
gtgtaagttactaaactaaatgtgttatcttcattcttctttaatggaaattgtttgtttgtctatttatttattttcatttactttgcagaatggttcttgggtatgcttatccagcttatgagtgctacaaaactgttgaaaagaacaaaccagagattgaacaacttctcttttggtgccagtactggtatgctgtatggatttttcttttctgtattttcattttatatatcattctttataacattttcttttctccgggcaggattctggtcgcatttttgacagtgtgtgagagagtcggggatgcgtttatttcgtggttgggatttctaatctatcttaaaaaagattttgatagtaattctctgttgtgccaccaccattaatttatttgctttttcatgttcatgaagggttccaatgtatagtgaagtgaaattgctgttcttcatatacctgtggcatcctagaatgaaggtaacaggatctggttcattggtttatgaaatgatattttttgtgcttgtcatactctctgctttcatatatttagttatacttttcatgattgctataaatgtttatttgtcagggaactagttatgtgtacgattccttctttagaccatatcttgcaaagcacgagaatgaaattgaccggaacttgttggaactaaggaccagggcaggagatattgtagttttgtactggcaaagagctgcaagctacggccaaacaaggattttcgatgtactgcaatatgttgccgcacaatcaacaccaaggccacgtcctccccaggtacttactcatgaatttgattatgaatctaatttattttaacattacctgaccccgctgattgttgaatggtcctttagttatatcaatttattgattttacctgttgataagtagagtgcctgaatactttcgtgatttattgattttataatgtatacattgtttgagtgtactatgtcactcttgatatttctcatcaatatcattctgcattttttgttgattgctgtcccaacccaatgcctttgctcttgctctcatatctcctgaacacaaatctcatattggttatcacagcaacaaggcggtagggcacgtcctcctcctcgccaaaactctggtggttcaaatcgtccaccagctacggcaccaacaccggaagagccaccatctcctacatctagtacatcttcaagtcaataccaaaaggatattgcagaagagttggcttcttcggaggttcctaaagctgcctcccaagcagcaagtacaagtactcaaagtcaatcggcaggtccaaataataaaagtcttaacgcagtttcaattgcaaaaaatcaagcagcagttccaagtgccagaactcaagtggcacttccaaatactcaaaagccaacaacagtgccaattactcaaaaatcaacagctgcacctgaaaaaccaagccagtctgcaccagctgatatggaagcaatgcagattgagccagaggcgtcttcttcagaaactgaaaatggaaacaaccctcccgcaaaagagacggtcatggaagatgcaattcgggtcacacgtggtaggttgaggaaaactcgatctacaacaggtcgttgatgtggttatgttcccaattttagtcacaaaaagctagcattaggtgaacgaatgataatgggcatgtaatttgctataaacgttgttgtatatttgatgtcatctagtttcaatgataattgttgctttatttttttctaaaattgtttggcgaacgtgtagggtcctggttggtaaaagcttatcttgaaataggatagatagatcatagatctggatttgattgaaagcccgatttaggcgactaattctattttaacaaatgcttaaataattgtcatctttgaagtttggaaccaattagttagtggagagtattttgaaagaaagatttccttttgggtacattaatccaattcatagttgacaactgggtcttacactatgactaaaatcgattaagattttgattttcagtttaaaaaaattatggttggtacttacactatgtttggtgagatggatcgagaggataaaggatagagaacataagagagagagaatatggtagtaattctttcaagttgtttggaaatggagaggtagaggaatacattactatattcttgtaaaattactttattatccatttatttatttttttataatatttttatgatggtgtatatctaattttaaaataaattagaaagaagagtataaatcgtttcgaggaaggatttaaaatggaggattgaaatggattgtaaatcattccacctcccttctcattcccacaatcctctatgctaaacaaattgattttcctctcccaccactcctctccctcctctatcctctatcatgccacacccatttcggaggtgaaacctagccaccgaccacctcctccatctctcttgtcattctcggatgttgaccaccttttgtgctaccaccatcaatgccaacttcaatcaccattgaagcacccattgcatttttctttttcaaatccgtagagaagattttgatttggtttgtggatttcaaattataagattttcttatgttatgtttacaattctttttccatcgagaattatggagattgcaataaagcaatgtaataatgcatttgcaatggtattgtgaaaattttatttatttattaattattgcaaaaataagatgtctaatgatgcatttgtgaattgtgatgatgttggcaaaacttaattttttctataaaaaaatttaattcttaacgatacatttacaatagtctgcgataaaatttaataaaagattcagtaagacataacttttcaccatggaatttgaaaatttggtaagctcttcatgcttacaatgtatagaaggccaaatttgaagtgcgtagaataccaggcttaatctatg

SEQ ID NO: 42489 - DNA, 1811 bp, Cannabis sativa
ctttattaaataattatttctatttcattgtgttgatccatgcctatattgttgtaagaaacctctcaaataatataccctagtaattaaaattgtagcgatagagtggccgccattttataaatatatattatctttaacaattatttatatatataactgataatattactgaaaagtagtgccatgaaagcacttcaactaccacgaatagagaatcttataagattactattaggtcataatatcagcctcaaaaacacgattaaagatatattaattaattaaactggcattggggtccaattgtagctgtccctatacatagcctactatactcataagccctagctatgcatttatatatttataggactgagccctccaagctgagaggaatagttttaaatatatcacgagggagagccagtaagtacgtacttactaaaatctttgtccttcatataaatatatttatggttttggtggctaatgatattgtctacacatataatattcttacaacataataaacaatatatatccagctaattaatttaacaaagcaccatataattataattaacatagttataagtgcatgccggtgaagtagtacatgaataaatatagtattaaagagagagagagagtacagcatgaaactgtccaaaataacaacacggttaggtctagtggaatgaaataaattagttgatactagttgcatatagaataataacaattaatattgaactcaaatgcaccctttgggtttgtttaaaggccgatttatacaaacttaaagagaaaagaaagtacaatcgatcatagaaattagaaactaagcccatgcatgttataaataatgatcatggtatatataaatgtatataaatatatatgtactgtatccgtgcacttaattaaagatatctgacatgagacatgagttaaataaagaacagttttatataatattgaaaacaaaaggaaagtccaaattatatgatgggcctttgggcatgtgggtatggccctaaataataagcaactcttgagatgtttgaagagaaaaagagagtgtatggtaccaggaatctgtctccatgactattacattcattcaatggccttcaaatgatgtatatatgtctatacttaaaattaggacatgtacccgatcgacttatatttatataaccttggtaaactccaccccttataatatcaatagagaacccataattaaagtccacaagtctctttaatttctttaaaaaaaaaaaaaaaagaaaagaagagtgcaccagtctctaacactatttggattgctagtgtaattttaaaattgggcttcaaataatttaatttcacaattttataagaaaaagaccactaaatactatttatataattaagacgctatctcaaaattattatattagacattattattaggttggaaggaaaaaatcataaaaataggaatgtaataaaataaagaataaaaaattattaattttttttgtgaaataatttttcttctattttaaatagaatataatcattctaccgaaatagtaaaaaataaatttttatattggaatgacaatattttaatattaagaatgtaacgaaataaataaataaaataaaaaattatttatttatattttattctattagattacttccaaccaaaaacacataacacattagtatctgataaccatatgtacgatatatatgataaaacattgataacaaacaaaagtagaaaggtaggagtgttggtttatatatatata

SEQ ID NO: 42490 - DNA, 3467 bp, Cannabis sativa
tttttttttttttatgaatataaatacaatatactttcacctaattatagtgttctatttatcatttattttatttttctggtatactatacagcagactacaataatatagatagattttcagttatccttttcagaataactgaattaataattgctcaattctactgtgtcaataaccatatttgattatttcacggaaacaaataattttttctaagcgaaataaatttccctacagcataatagttcgtttacacatagaatataataacatatttatcataagcctaatgtttgtaaatataaaagaaaatggtgaatgacagtttctgttttgttaataaagcatcataagttttttatatacctggtcaagcaaaagatagtgctttatagatcgcagttttcccataagatcatactgcaataaaaatagcataatgatcatgtaataatgtaaatacagtgccatttagataatactgcatggataaaatattctctcagaatttcaaatataacaagatacaagacaacaaatttcagaaataaattgagcttcaccttttctttgatgagattaaggagctctccactggcaaagtcataggctgattttatacattcaagataatgatgatttgtgccaaaactcatcaattttgagttttctgatacaggaacctagacatacactccaattagtcaaatctacaatgcaactacaaggaggacaagggaaattactattactatctttaattttccctccctaacaataaatgttaaaataatcttaatgaatgaaagcaacaatataaactataatagaacctgaacactgtgcccacattccctcatgacatttagatattttcctgttgtcaaaattgtcccagcggtatttgcaaggaagctggggatcccatctttaagactatagcgttgcctccaatacttagcatcataatcttgtgttaggctctcctgtagaattctaaaactgtaaatatcataagacaacttgcacctgcactaattctgagagaagacaatgtaccttctgaagagttttgttctcagcaatgaaaaattcaccgtaaggatcatcaattaccccttcgtagacccacctgaggtgttataattaccatagaagaagcaaaataaattagagcgaactgctaattataatgcaaaagatgacagtagaaaatgctcagagctgagagtgtttcgcataaaagaagcaaaataaaacatgatgagaacctgctccaaatgatattaaaccacccgctaaccagagaaaccagagttggataatagcagatatcaatggaacagtaaagaaaaactgaaaatggtgagttgttatttagtaaagtagaaaaaggaagactaaagtctcttacagcagagagagagagctgagctctagtgatattgagaacacttaattctagcttattccttcccacagacaagcacgctctatatgagcactcaccactagaaaattactaaaacacccctccactcactcacagccaactagcaaacactctcactgtccattacccctccttgtttacgcatattcaactaaaaaaatagatttaaaacaagaataatcaattcaatccaaaatagaaaaaaaagaaggggcaaaaacagtataaaaacatgatatagagatatactattattgccatagtgctatcttgagcctcaaaggataattatttataaaagactaaaatgaagtccaacataaaaggattaaagggaaaataataaaaatttaaaaatacatcatgtcgtagatattttagatcctttccaagaatttacacgaacatgtgcaccagatagaacattttaaaagtaaagtccaaagtccagaatcaagtgaacattttcaaagtgaattgaggaaatttcaccgtgaacaacaaagtaatattgagagatgtgcagtatgtacctctctaatatgctaaggtatgcattgcttgcacattgtgccatcttttctagcaaagatcttacagcattatcaccagccattgccttggcctaaatattgcaagagtaaaccaatttgaataacattggaaaaaaaaaaagaggacatttagcctacagctgatgagtgaagccacagcgtaatgacattttttgttccagcaaactttagtcttatgtacgagatgtaacctggctttgcaagaggttcagaactgcagagcctgcataattgttagctgaagccttctgtatgacagatgataatgcttgcatggaccccatcattggctgcaacataccattttgagaatcctgagtaaacaacctaatgacctcaatgcaaataagaaagttctaagagaagccaaacctgacagtaaaaccacaacccttgtagtgagagtcttccaagccgaaattgatgttcaagctgggccaccatggcatggtaatcctagacataaaaaacaaaaagacacattcagtgaggtgaggcatattaattgtattagcaaattcagtaatacatagattagcaaccaaaacatcaaagcatatttgatttgaagaggaaattgccacaagattaagatagatttgaatttgaatgttccaaaaaactaaaaaagtaatacaataagacctcgtcatgttcatctttactaaaaagtaatacaataagacctcgtcaagtttaatggaattggtgcagcttttggaacatgtgaacatagctcattcatcgattgatggtaggggttggaagccagaatatggaggctctttttcttgcaaatctgccttcctttggtttacctcaagtcacagatcgagggacttaatgtggaccaaaactctatggaaatgttgcgttccagtaaaagtaaaagtttttggttggttggtggctctaaggaaagcaaatgttcatgaagtaatacaaaagagaagaccatacatggccatttctccgggatggtgtatctgttgcaagaccagtaatgaaatgatcgagcatctgttccttcattgcacatacactcaaaaaatatggacattactttatcaagaacttaggttggaatgggttttgccatgtttggtgacacatgccctactaagtaaaccggtggtaagcaaaagaaaagttaagctttggaggactacaatgttagcactactttgggctgtgtggaatgagagaaatagtagaattattgaaggacaagagggattagcaacctttgtttgggagagaataaaattttggactgccacatggatctttaaaaccgaacactttgaggccttttctttcctagacttatgcagggattggagtgcttcgatgtaaaacttgggatttctttctttttgtttgcttggtcattcaatgtgctaactcattatattgttataattttatgtaccat

SEQ ID NO: 42491 - DNA, 1502 bp, Cannabis sativa
attaacttgataatgaaaatattaaagcaaacttatattgtcaatagaaatgattatacatatttatattctttcactttttcatacaccttttaacacttattgcacgtggtcatgaatatatctcgaaacataatcctgtggcctatatgtagctagccactaataattgtatacaaagcacaatcttttttcctatatacacaataattagtgtatagcttcattatcatacctatatcccggctgagacgtacataaaaatatatactctttattattattagtttttgtgtaattaattaattgattaaaactggacaaattaatataagcttgcctttaattagtttgcttaagctttctcagttggcaggctatgattagagtaacccaataagttcatcgaaagaattaattaagctaggacccagatcttagctagccagccactaactttgttactttcttcatgtaaatataacatatatataatatactaggggacatagaatagcaagtgtgatcatatgaagtgttacatatacaaataattgatatcaagttaaaataaataaaggaaaataagtatatatataaatatttaaactttgcggccaaaagatacagcaagatatatagggctatataggaaaaatgatgaatgaaactttataatatgcacgttcatgaagctcatataacaagttgcagggaactaggagacatgaaagtttgttttagcccccacctatacaacttttgcttttttatcttgctaatcaaaatttatcatcattactagtatataatcacactcttcttttacgtgtataaataattaaaattaatatttgttaatgagattttggtagacaagatccgaatattcatttcacatacactactgcagatattattctaggttcacatgacaagaaacacgtactgacatctaatgtagtttgtgtctctctaattcacgacacccaacttgcccagagtactttccccccaccttctctctttctctctctatgtttttcctatacaaaagcaaatattacttgtagaaaaagtctactctccattatttacttcaaactccttagaatcgagtccaatataactccttagtccttagagggcttaactttttcaagaccctgttttatcattactgggttgaacccaatcatattgctactggttggcccattacaagttacgtacagagaaatggggtatataggaactgaataatttcaacaacaacaaaaaataatatatatataaaaataattaaaaaaaattataaaaatacagtttacacagaattttaaatatttttataattttatttactaaaaatacaatcttttgatgtactcttgttattttgttatttatatgttgtttggataatattttactattagttttatgtatttttttattattttcgtgttatttttatgaaaaattgtaaaaatgtaaaaaaa

SEQ ID NO: 42492 - DNA, 3607 bp, Cannabis sativa
aaagctaatgaaacagcttttgatcaaattttagtagtatggaattcaacactttttggaatcgttcttacttacataggatggagtaacatggttgctacttcctccacaccagtctctggcattgctcttggcagataatggatttgatgtatggatagccaatactcgcggaacaaaatacagccgtggccatgtatcgctcactccagatgatggggttaattttcttgcttgacatcctaataaccatcctcaattcttgttaccctttttggttcctactttgcattgttgataatttatttatttatttattattattagtcttattggaattggtcatgggatgaattggtggcttatgatctcccagctacactccattatgtgcatgatcaaacaggacagaagttgcactatgttgggcattcactggtgatttgttatagtctgttttcttttgggattaacttgcttcatacaataggtaaaacatcaaactctgaaatttgttttgtgtagggaactttgatggctttggcttctttctcaaaagaacagctgttaagtatgttgagatcagctgctctacttagcccaattgcttatgtgggtcagctgacctcaccccttgcaagaaatgctgctgagaactttattgctgaggtgaaacaatgactcactcttcaaattatttcagttatccaatagagtaacatttttttttaactactactattattatcttgaaacagacgttatactggttaggcattcacgaatttgtgccaagagggtaagacatagctatagaaccttgagtttcccacctcaattctgttcatacatacagtttaaaaatgttgtgattttttgtggtaagaaacttacttgtgcttcaatacaaatgtcatctagtaaaatcacatcaccttatgtttgctttgcaaagttcagtagtttatgtgcgttatgcatacgagtgtttgtttgatcttgtgctcaaatcgacagtatttttcttgcattctgtttcaatattatgattgattttgactgaactatgtttccaactgtttctgtctcctccctgtggtaataaatagagaagctgtaatgaaacttattagagatatctgcaagaaaccaggcattgactgcaccgatttgttgacctcattcacaggtagtatacttttgtcccaatcttcttgtttagttatgatcaggaaaatatactgtccaattttgacatgagtcttcgtcctacaggagtaaattgctgtctgaattcttccatagtagatatttttctagaccacgagcctcagtcgacagcgaccaaaaacatgatccatctggctcagagtaagcaagttctacttcaaaatcttttaatcaagttagttttaatttagataaaaccaagaacaaccattgtaaatacttttaaacataaaatataagaaacatttcagacaagtactaagaacaattctcattaagcttagaaggcccaaagactgtttaggaactgatggagagactaatttgattggtgtggatctatcttgaattagtgataagagatggaacgattacgatgtttaactatggaaccgaagatgagaactggaaacattatgggcagtctaatccaccagtctacaagaccagcattccaaatgaccttcctctctttgtcagctatggagggagagatgctctctctgatacaagagatgtaaggcttttgctggacagtctcaaagaacacgaccaagataagcttgtggttcagtacacaaaagattatgcccatgctgattatgtaatgggacaaaatgctaaggatgttgtttatgatcatctcatagctttctttaggcttcaatgaaagtagttagttattgtacaaaaaggatgtcatttctctatagtttaatctcatcacaccacaactcagttttcttgtcaacataatcctaatctaactatcaaataacttgacactaaattaagtggttgcttgctttttctacttttccattgaattaatactgtttttcatgatttacgtttttatataatcatttgtttagtgttcaaatttgcaacttgcctatcattttgagaaccgagtttcttaaagttgaaacttttatatgaataacaaatttcttctttttctttttaataacttgcatgaacaacaagtcttgaaacagtatcctaaacttttagtatccttcaagtgcactaatattaaccttaatttttgtaccctaaacaactcagtttcttttctctgaaatggtacatatgaggttatttgtgactataatttaacattaccatataaaaaaaaaaaaaacaagttaatactattttgtatgttatgtttcgcaaaaattattgattgaaccatttgttttgttaaataataaattagactatttattttttaaaatagtacaaaatagtagtgcccgagctcaatttttgacaaactttttttttaaaaatataattaacttaaagacaattctaacacgaatagatgcagaaaatgtaactagtattgttattacctctagatcagataattaataagatttattttgataaaaaattggtacagtgtactattttgtactatttaaaagaaatacaggatctaatttatcatttaacaaaataaaatgtccaaaatagtatttacccataaaaatatatgattgactatagtcttgcacgaaaagtgtggacacacaaaattcatattaaattaatcacgtcatatatttatttaaaattacactcattttataaataaaccctcataatttttgcacctaaaatagttttagtacaagtttttcggtaaataattttgttttaaatcgctttttcccaatttttttttttttttaaaaaaaagataagggggtgcacttaatgggtgtgttacagttatgtcatttaactaacttttttttttttttgtacctaactatttcaaaattttcttcatctccctctctttttcctacattttcttttcttcttttatggatcccctgatgaatgcgttgaataccacactgccactaacagaagaggagagtactatttttgctctttcagatgatgatgtgccaacctcgataccactttcaaaccatgtttttgttttgtcccgagtactcacagacaattacgtccataagctgactttcattgatcaaatgtctggacattagaaaggttgtttccctactgtgatttctgcctatggtgatgatttgttcaaagtctcttttagttgtgcaggaaataaactcagggtgctaaataaagaaccttggaacattcaaaatcatcttactgtgatgtacactccagatgttctgcagaatgtctcaatgaataatttgatcttgacaccattttgagttcagatttatcgcttgcctttcttaagaaaatccaaggccttggcaaaagcgttgggtgatcttattggttacttcttagaagtacacaaagattcacttgatgaaggatggggtccttttttttcgtatttgagttaaactctcgg

SEQ ID NO: 42493 - DNA, 5227 bp, Cannabis sativa
ctgtcaagacctccaaagtcaattgaggagacaaatctcccgcataaccgctgtatgtcgacacccaaaagaagaccctgccaccaaatctgataagaaatataaaatttctcacacaataggctagtacatattcctggtaaacataaaagaggaaaacaaaaaactaagcaaaataaatagcaatttggatcattcataccataaagtggcagaggtaccagccaacaaaacaaatggaacgattggatcatttggatcaaagccaagagttttctcaaaaccctcaatagcaatataaacctgattaataaacacagttcactcagcatgtagaagaagtaaaacaaagattaaaaacaaaagggtgctgaaatctatgatcaccttttgaaaagcaatcttggcaggtgtcaagatttcggttgctctctcttcagataagttgagtgtatccctaacctcaggaggaaaggattctttggcagactggtatgaagaaacagcaaacgaagtgccatttgctaaagcattctccactgcaacaattgtacttctcaacacatcaacagcaacaacagctgctctgcctgtagtttccctcaagccacttgacaagttggtgagtttatcaccagctaattctccagtttgatcaaaagatgaaaaggctttaccaaaggcgctatcaaccgcatcattagcactttgaatgatggatgatattgatgaattgaaagtctctagtgagcttttcagagcattctcacctttgtttattgaatcactgaaagtttgactaacctcattagcaaattcctcaaaaccttttacatctaatgaggcagagggaagcccggaaagtaaaggttcgggggctaaatcgataggtaaaacagcttcgggttcaactgatgctgccaaagccttctcttttgcatctaagaggcctgcatagtcaacaattccaatatctgtgggagaaaggtctgagttttggatgtacttcagttcgaagccacttcccgtgtgggaataattgcagttaagatgttcagacacatctgaacaagaatgttcattaaccaaattcaaagagactgattttgcatttgcagcattggttctgatgaaataatccctttgaatattcattgatgatccaaaaacatggtattccaaatcacatctggtctcaaaagagggacgcaataatcctccccctccatgaaagggtgtctgtaaagttcaaagctttactaagaaaatgtaaactttactgataactaaacaaggataatgttttgaagggttcaaaattaagatatttcatagattaattctgtaaagttgaaaactttactaagaaaatgtgtaaaccttactaatacctaaacaagttaagttttaaggaactgacctgagaatgagaagaacaagttggagttgcagagcaaagaggcaacattgtcattaacaaatctcaaacattcattgttcaatcaaaaaagaaattaaattgatataaaacaaagataaatatctaattttggattaagaggattggagtggcaaatcgtgtggcttcgttggaaacttaaagctcttagcttgatcctcttcaactactccttgcctctcgttcttcttgtggggacaaacgttttcattttcataagaagtgagaatttgttattgcatgacagacccctctattatcttatttttacattttgaccccagaaaattcctattattcatgaaaatgacaaaagaatcaaatttattatttggactcattcatgcatgtccaatgtccattgtctacgttatctttatacataaatttttcaaaaagattatccagatgatatactgttttttttcctctctttgaatattttgatttgatatattaaaagaagatttggccaaaaaaattaattttttgcgtgtttttaaaaaaaagtgagtatttttatgcatcaatcaagcttgactttgaagaaatttcagccaaaaaaaaaaagcttgactgtgaagaatgaaatttttaactgttaagcaaaaataaataaataaatatcaatgtgttttttcttggataaatttggtatttttgccacagcatatatatattgatagagtaatttaaatcacaacaaaacatatacaaagtaataattacaaaacaacttatataagatcagtcaaaaatttccataaactaacttgagaccactcaaaaaaatatactaagtctaaatgaacaatttaagcaaatttacaaaataaatagattaagtaaaaagttgattagcacactaaacactaaaatagtatcagtgtccaattacctttgtgtaattaagattggaatggaataaagattacaattacaatattagcataggatttcatgtgcaaatgatacattaaaaattattaatatggattagatctttgtgttaggcccataattgttcgaaaaagtagttgagcttgtaataattgctatgtaaattttccttgtaataattgctatgtttattatatgccatggcccatgattgaactcctcataaatgtgatttttttctaaaacgaaatttctgcgtaaaaaacacttttggttgtttagtttgatttaaaattttagtttgactgagtatgaagggaggaaagaaagaatgaatagtgtatttattaacaaccagaccatcatttgcctgaaaccaaccatgttcaaaatttaagcttaattatttagtattgtcttctcctgttagcctacgtaccttggtaattacacaacaaaaactatgtctcgcaaactcacactcattattgttcttgttttgctccttaactcttttataggctccactcatgcttttgcgagtgatattaattgtttgaaagagattaaagcttcccttgaagacccttttggttacttaaactcctcatggaactttgataacaacacagaaggtttcatctgtaaatttataggggttgggtgctggcatgctgatgagtccaaggtcataaaccttcaactctctgatatgggactcaagggaactttcccaagaggggtaacaaactgcacaagcttgacaggtttggacctttccaataacaacctctcagggaacattccctacaacatatcaagattgatcccctttgtgactagtcttaatctctcatccaacaacttctcaggtgaaatcccaatcagccttgccaattgtacttatctaaatgtgcttaagcttgatcacaaccgactcaccggtaacatcccgagggagctccctatgtctcttgcaaggctcaaggagttttcagtggcaaacaatatattgtcaggggaagtgtctgattcatattcaagattcactgctattagctttgcaaacaatcttgatctttgtggggggcctttggggccctgccattttcacaagcatcgcatgaaaccacttgatccattcaaaataggatttggaactggttattttgtttcagctacagttgtgtttttcacactttctgtgtcttggtttcaagtcaagatgattatgaagagtgtaatattttctgtggtggaaaatttacaaaagagaaaacaaaatgaacagctgcatcactttccaactctcaaacaccaaaaagaggtaccttttttccactcactcttgtaaattctcttcactcatcagaatgttaagagtgcttattaattaaccatatcataatgaacaacagatttctcaacttgaaaagatggttaataggatgagttttccagaactttgcaaagcaacagacaatttcagcatcttcaatgtgataggaagaggaaatacaggaaccatgtacaaggccactctttcaaatggttggtttcttgctgtcaaaaaaatagatgacaccccaaataatgaggctcaatttgtgtctgagctcttagctctggctagaatgagacatgacaacttaatccctcttttggggttttgcatggttgaaaacgaaaggcttctggtctacaaacacatgacaaatgggaatctccatgattacttacaccgagttgaagaaggtgatgctaaaatcctacaatggcctctgaggatcaaaattggtatgggaatagccagaggcttggcatggcttcaccataagtgtgtctttcgagtagtccatcgaagaataagctcaaggagtgtcttactggatggttacttcgaagccaagatatcgaatttcggtaaagcaatcatttcaaactatggtggagtaatgtttgtgtacccaaatgagagtgattctgggttgtttgtgaatagtggggtgtgggagtctgattttgttaagaaggatgtgtatgattgtggaactgtgttgctcgagttgataactggttctggctctggctctaatcttcacagcactttggcagagtggatcagtcatgtttcgactagtcctggtatattgaatgatgccattgacaaagccttaattgggcaaggatttgatgatgagatcttggatatgctcagaataacaagagactgtgttcatcctatgccatatgaaaggccaacaatgctgcaagtgtatgaaagaattagtaatattggactcagatatggtattccatgtgattttggacttttgatgcaaccaaaacgtagctaacatgttcgaagtagtcatttggatttatgtatctttatcaaaagaatcttattttattgattggattttagattttatatataacaataacaccttttcatttccgtttaacaggcctcctgcatatgtatattatatagtcaacaattccagtctaagtgaaaattcaaagatacatattgattttgcctttatttgcagcattattagctctgatgaaatctcttcgaaaatgcattaattccagttgattgagtaaatagttacatagccaagtctaagaaggacatgtgatgtgactactacacatgggccattttgctccatatatttgtattactaattttgtggacagttgactaaaaaagtttaatttgactgactaaggaacatttgctttcttctcaatcttaatttacacaaaactagatctttctttgtcattcctcaacttgaacgatgaggcaaagtctttttatttaaaggttgagtatcaccaatggagagccaa

SEQ ID NO: 42494 - DNA, 5858 bp, Cannabis sativa
ccacctcctcctcctcctccaccattgttgtctaatggaaatactactagaccaccacccccaccccctcctcctccatatgttggtggtactactaaagcaccatcaccatcaccccctccacccccacccccttcatttgctgctaaaagtgttaaagcacccccaccgcctccacctccaccaactgctggtaatactactagaccaccgcctccacccccacctcctttaggtgctgccagatctgcgcctccacctccacccccacctccttcaagtgctgccagatctgggcctccacctccacctcctgcaccaaaactccctaatgctcctccacggtcaactcatggtgttgcaccatccccacccccacccccactgccaggggctaagcaatcaagtgcaccaccaccaccacctttgaaaggaaaagtctcttccggatcaacaactcaaggaagaagtaagggtgcaagtgttgcggctaatgcccccaaaaaagcttctttaaagcctctacattgggtgaaagttactcgggcaatgcaaggaagtttatgggctgattctcacaaacaagacaatcagtcaaggtgaattttcttttagcaaacatttgcatcctttcaagattgcttggccgtgatactcaatattatcatgttgaaaccattttgtcagtatccaaataattctttcccctattgttttgtttttgaatgtaatgtcatttaagtttatggctgtttcttttccacttttgatgttgcattctcacatgacatgttttgcagggctccagaaatagatatatcggaactcgaaactctattctcagctgcatctgttacagatggcgctagtaacaagggtggaattcgtcgtggtcctaacataaacaagccagaaaaagtgcaattggtgagctgttaactccctcaatgcagaaatgatctaattttatctgttaaaatcacttcttacacaatacattataacttggagctgtatatgtttgttttctcttctatagtcttccaaagtgtcttcttatacttgggatttttcattttgatatagtagaaaattgttccaaattttgtggattgatgttgctgtaacttaagataatttcccgtcatcttcttatatacagattcaactatcattcttatgtaaaaactgcagcttagtacaattatacaggctgtatagcttcgagttgactatattgtcaacaaattaaattgttttcgtggcttctattttcattgtggatgtctgttaagttcttaaattattaaaataatatccattctaacatagtacttgtgactaagtgtcgttagaaaagacttgtgattatatatcataaggatttttcattgcgaaatttctttggaaggtggaagttggtctgaatttgaacgtacttcttaaggattcttgaagtatatcttgcattattttttccttatatttattagaatttagaattacctacaattaaaagcccatttgtagatgatcccccctcctcttattttggcttccttgtaatctaaagacatgtatgtaatgtatactcaagcttgttgtgatgtttatatgcaggttgacttgcgcagagcatataactgtgaaattatgctatcaaagattaaaatacctctgccagaaatgattgtaagttattctttttctcttgtttatttgtgccacaacaagctttcttcttttagtttacaaatttaccttatgcatggatcatgactcaaatatgggatgaagttccacgaactagtcaaatgttggtgatttgcactactactatggatgtttttgtgcgttgtgcagaagctatattcagaatgagttgtctactataaatagaaatgcttaaatagtgtttgatttggggtaatgggaatgagattgaatggtccccttaaagaatccgccatcacttctgttttgcttttctaatgaggaatgtccatcaccgattgacggaataggctttcctacaaattaaatggatggaaagaatattccttttgtagtgtagtatatacatttctatatgtttaaatacaaaacataacaaataaaataaaatacttatctccttattatttcattcctatttcatttgtttacaaaatagtacttgagtagcttcagcattgttgtagaaactttttagtgtggaacctagtgctaattctactgcttacaagaaggaatatcatatggacagattgtccttgataatttgttggttgtgtttatgcctcattagtactgttaaaagaatgggggtgtaactattactttatgtttccagaatgctgttctggctttggattcttctacgctggacattgatcaggttgagaatctcattaaattttgtccaacaaaggacgaaatggaaatactcaaggtaagccatttgtttttgttgttacggtctcaagcatgtatgaaagtggataatagctgttgttttctgttttaggtatggtatgctctctcaatgtactgaaaaaagaatatctatgtaacattttgaaattagaaaaaaaaatcttccttttttctttcattttgtttttgggaagtttgaacttaatgcaagaattacagtatatgtctttcaaggtcaaggaacagattaataatttcaccagaagcaaacagcttgtgaaaaatctcatgtgtgcctgtaatgtggcatgattaacatcaaagtaactctttttagtctgtttgtattagaatctttcagatcggattccaatcacatcagtgagtctcccaggtgtgaagccattctttaagtcaaaacaaaataattgaagttactatctaaacaaagggggttgtttaaaggaaaaggagaaacaaagaagtgtattttttttttatctaggaatagtcaagcaaatagcttttacctatacatgcatataaatgtgaatagaccaccagatactgtatggtactggtgatcttccgaattgcttggctccaagctgaggtctgaagtaaatattctttcatttaaacaaggaagaaaagcaaaagttgaattgaatggctctagattatgatggccttatattatattggcttctaatatttatttgtaacgagagtaccaattcaaagaaaagtcattaaagtcaaataccagcggaataaaaaagaaaaagaaaatctttttgatgagcatttaatgaaatatttattcaaaaaataatacttgagggtgttgtatgaacactcaaaagagtttagggaaagagtttacataaaatactgccattctgtaaataagccagaaaatgaaacacctctttaaactctggtacattgtaaggaaacaacacggcaaagtgttaaatcttttcccacaagcttttaccattaccttccgtaggagttcccttgttttgttgctatatccataattgataattctgtatacactaaatgaagaagtagattgtggcagaagtaaattctctgcaccttatgaggttattaagaacatttggtttctgctaatttctttctttgcatcagaattatacaggtgaaaaggaaaagcttgggaggtgtgaacaggttgtatatttattcgggctatcatctcttttattttgaattcaatgtcattcaataaattgattctttggtgacaatgtatgttatttcagtttttctcggaactgatgaaggttccacgagttgaatctaagttgagggtgtttgctttcaaaatcacattttccagtcaggtactgctaatttaatttcattgtatttatatgattgtgcttgtgcttttaattgttattaattttctctgctgtttgttgtttaggtgactgatttgaaaaataatctgaatacaattaacaatgctactagagaggtactgatgaatttatttttagccaagatgcaatgtataagtgtgattctgggctgtatcaatatgtctcatttatttgcaggtgaaagaatcaggaaaattgcgtcagattatgcagacaattctaactttgggaaatgctctgaatcaaggcactgcacgaggtatctcatttttctttctttgtttcttattctttttgctacttgacacagtcctaattttgcttttcctcacttttcatattccaggatctgccattgggttcaaattggatagtcttctaaaattgtcggatactcgtgcaagaaataacaaaatgacgttaatgcattacttgtgcaaggtagagaaattcgatttcaatgcattatttttaatcttttatcttatgtattgctttattattaaagctttatacagttcctatattattttttagtttctatgatgtccttcccatatgctttgagagccccctttacaggagtttttatgtttttgttttgttttttttttcctggtgtttactattgttgctactgatatcatttccaggctctgtatattccttttctgcattattttggcatttctgtgtgatattcaagtaatgcctatgaatattcttgttttgagcagcttcttgccgagaaaatgccagagttgttggattttgataaggatcttatgcatttagaaggtgcctctaaggtatgctggtcattttgtagtattggatcctgatattgagacattttaggagatcatttggtttgcattagccttctaaggcaacagcttgctccctttgtttaacttttacttcaaattaatagattcaattgaaagctttggctgaagaaatgcaagctgtgagcaaaggtcttgaaaaggttgagctagaacttgctgcttcagaaagtgatggttcaatctccctcggtttccagacggtgaggattcttaattagaattcgcctttccatttcacttttattactataggtttgtgaatgttgaatattgaatatgatggaagaaaaaaaaacataaaaaaacaaaagaaacaaaagaaaaaatttcaggatgaaagaaagatgttgtgtcttatggttaccgagggtgtcttacaaacatgtaggtgttcaatatgatatttattatcattgaagattaataacttaaatttccttctctaggttctaaagggttttcttgaaactgcggaagctgaagtacggtcactaatttcgttatactctgaagtggtaagcctgttgtaacatttttcttttaaatgcgcaatgtattgctgcttcatagtatcttctcattgccctatagggaagaaacgcagattctttgtcccaatactttggagaggatccagctcggtgtccttttgaacaaggtatggaatattcttcacatgtaggcactgaaaaaagcacaagtatagagatagatattattacagtttctagttccttgttattctgcacctcgagctaatctacgttattatgcatttttcttgctgcgatgtagtttattttcttcgtaattcatcttttgacttgctaagctgtgtgagcgaaggggttcgggttgggtttgtcatttgattgatgcattttatttatttacatctggcttgcagtgacacaaatcttggctgtctttgtaaaaatgttcaataagtcgcgagatgagaatgttaagctagctgatgctgagaaaaagaaactagagaaggaagccatgaaagaacggagcatggctcttgcatctgcaaagaaagatcaagaaaaacactcttcaatctcagaggctattctggggaaaacaaaaatcaaagaatagtctggcctgacgcgactcctgagattacaaaaaaaaaaaaaaa

SEQ ID NO: 42495 - DNA, 1838 bp, Cannabis sativa
gttcgtggatgctaaccaatagttctggcagatatttacatcttcggaacatgatagcttaattgagtggaagcgctataattaaaaaaaaatcaactatatatttgaatattaatgtgttatatgatcattgtacagcccaaaaggtcctaagtatatatttttataactaaaaaaaatcaaccataagttgacattgaccgccaccatttaaaagcttatatagttgacttattttatttagagaaatgctaatagcggtggaagccttaagatccaataatttagaaagtcacaggaaaaaaacaaatataaaataatacaagtagaggcacagccatatattgactattcaatcacgcggaaataagtgtgtgaaacccgacgaactcttctataatcacttaaatccaaacttaccagctcatatcatatacatcctcgacttttgtaaattattaacacttattatccaaaaatttctttgcatacctttttccacacatgcatggccgaattctcttactttcttctactccaactacattgattaaatcatctcctataaatacacatatgtattatcatcatattcatacccttcacaaaagaaaaaaacctccctttcatcataacaactataatggaaagtgttatactaataacgatagtattgatgtactcactacttgttatgacttccacgtcagctcagagccaacaaggcacacgtgtggggttctacctacggacatgtccacgagctgagtcgatcgttaggtcgacagtggaatcgcatttcaggtctgatcccaccgtggcagctggcttgctgagaatgcactttcacgactgcttcgtccaaggttgtgacgcttctgtgctcatcgacgggcttggtaccgagaaaactgcgctgcccaacctcgggttgaggggttacgaggtcatcaacgacgctaagtctaagcttgaagctgcctgcccgggtgtcgtttcttgtgctgatattctagctctagctgctcgtgatggcgtcgttttggtacgttatagtaaagttacaagtaataatgcataatattcaccaaattaagtataaaatttgcaaaatataacccattaaatttagagaaatgcaaaataacccttacgacataatattaatatcggtctcacttattttaagaaaatctgtcaattaattataaaacatcatgataatactaataattttggtaccctataacaacaatgctcttaaatttatattatataggagtgtaaatttagggtagcaaagtaccttacacagtgtaattttattaaaagataattagttacctttctagtttggttttttttttcatatttatgtaaactttactagaaaaaaatcctaaacatgaaaaattttcagtattttttttgtttttttttttttttgagaaaaattcccggtaattttaagttgaaccaaaaattgctattttattaataaaaaactcaatattatggtaccataagtatcctatcttgctactcttatttatatactatagttttgtgtatatatatttgagcctttatttaaaaaaaataataatatttttttcagatcaataaaaaaatatacatttttgaaataagatactttttaagatttcttaattagatgggctctaaagacaggcctaacctatttatacccaaattagggtgtgcggcctatggctgcaaggttaattatatcttgttttattttattttatttttttttatgatatcacaaaatatatacatatataattcagtgtatttgaattctaattttcaat

SEQ ID NO: 42496 - DNA, 3469 bp, Cannabis sativa
  modified_base (2772)..(2789): a, c, t, g, unknown or other
  modified_base (3386)..(3389): a, c, t, g, unknown or other
ttgatttgttacctgatttggtaactgaattcaatggttaataaaatgatgattttccattcaaaaaaaaaaaacattcattcaattaattatcaaaatattttgataccaattatagcagctttttaatagggtaataatctccacgtttgttacccattttcatttctagtaacaccatttgaaatagttagtgatagcttagaagtccgattatttaaaccaataatttcgttaattttcttttttgcatatcaaaaactaatagatcgatcttatcagtatccatgactaaaaatatataatctcaatcctaatatgtgacaatcctattttatctattttacgtattaaaatcgttaaatgtctataatttttcttgcattttttgtcattcaagtaaatgatatttaaagctatgaggtagtcaacaacttaaacaaaactaacaactttttgtcacttaatatatcttatagaagtattaattagtagaaacaaaagtgttactcatcctaatagaagtagtctcacaaaagtgttaccaattgataagaatcaaagaagtagccttataagcttgagtcccacataaattatgagactcttatatcaagattcttagtaaaaaatagattcttgtataatttattttgcaatttgattttatttaaaaattttattataaattaacatatgtttcaatatcatacaaactatttgaaatttttgacaaaagtttggaattatgattgcattagaaataataaaaattgttttaaaaaattaataatcgcagatcaatggtaggtacctatagtaactaacttctattactaacatgataagatgctatatcgcttttaatggtatagagtaccattgatgcctaagaacaacttcaatggagtcaacctgctattttgttgtttggaaatcctatttaccttttcttatcaatacacctttttatcggtaatattatctgtgtaagacaaccatgcttatactaaagaaatagacattgctacaactttaaatgcaattaatcttttaggcaattccgttagtgttgctctaaagctatttccaatcaaatgacaaaatctcatatattactattttttctacaaaatgctctaactgaattgtaaaatttatcttattttcatagaagtttatagtgtccgactaataatagtaggtactgtaaattttaatattttttttttactttttaataattaaataataaatatatgggttggaattaaaaaaaaatagtgctaaaataattaaataataataaagatacttttttagtgtaatttatagtattttagtgagctgaaaaaaataatgttaaaataatattctttcaatgttgatttaatacttaaatttaagtttcattattaaaaataccctaataataataaatttgtacaacaaaatgaattttggaacacaaaagtgaattaaaagagaagaatcttaccgacaatgttgaaatcaagagaaatagtagtcataattaataaataaataacaataatgatgatgaagcaaaaagtaaagtttgaatttaattgaaaacaatcaaaattattatctacacatatatatatcatacaaacatcaatgcagaaaaaaccccacaaactatgctttgtctttaattcaacttcatattcataaccaaatcagttggaaataactgataaataattaatgaatcccaacaaaaatatatattaaaaaattagaacaatcaaattgaattattaattcaaaatatttattaacattctatttttttatttatatatttgtatggtggtgtgtcatacaagatttcatatgcagcaatagcagaagaataggaaactaagaggagtagtcaataatgatatataattaaaaatatttttctaaaatattattttgtttttttttttacaattttttaacttaaaatttttaattataataataagctcgtaaaattttaaaattatatagaaaaaatacaaaagtaaaaaaacaacgaaaattctacctcacgataagggatttgtgtttctaattaagtttcacttctttttttatttaagagtttatatattacacaatacataatctggaactcgaactcaggggctccaacacacacactcctatggccacttgagctagcctcaagtggtttaggtctcaatttttaaattaaattggtagtaatattaatcctcttcatattctctccaaatctactccctccaatactactctctccaactcaaactcatataacaaataccctattagatgatgtttgattggaatgaatgaaaatatagctagaataagaatgacattacaataaaataaaatcaaacaaaagaatagaataaaagttgtttcatttctattccatttaatttcattcctttcaactaaacgccacctaagagatagatacaatgataaataattagaagagtaataaagaaagagtgtgagtgtttagttgtgaatatattattttgattaaaaaattacataaaattaaataatgtttaaagtaatttatgatataaatacataagttcaactctcatttgtatataaatacttaagtttaattttttatgataataatacttaaattttaattttggaacatctgtaggtacttgactattaaatgttaagtaaattgtcatgtgacaatttctgattggtctacatcattaaatttttattttttannnnnnnnnnnnnnnnnntatactaataaaaaaataacacatggataataacttaacatttaatgaagagtactcacagaagtattagaaatataacttagactattaaaaattaaacttaaatatttatctacaagtggaagttgaactttaaatatttacgtctcaaattatattctaaaaattaaatgaagtttttttttttaattagcaagctataaaaacataaatttataatttttttttcttaacttataatattaatttaaatataacaagtgaaggaaaattgggatagatcattctttttttaataattcctaacattatcccaaaaattagaataaaaaatcagccttgaaacttgaaaaggattagaagaaatagaattgaaaatatcgtatagacacaataaagagatgataaaatggggaaataagaatgagagagaaagagtgtgtgaaagtacaattgtggccctaaaactccaatgtcccaaccctatcaaatattttctagtagtaaaatagtaaattcacaagtgtaaatataggcgacttttatttacgccccactaaattataaatacgctttattattaaaaaaaatataaannnnaataatttttaaaaattactctaaatattttttttaaaattttttcttacatttttttatgttaattttaatacttattt

SEQ ID NO: 42497 - DNA, 4473 bp, Cannabis sativa
gccaccggaacttcaagaagacgaatcgctctgtactctgtagtggatgatttagttggcagacctgaggagtgggtggcggaacaaaggaagcggcagaacgaagaacgctttaggtactgaatttttgttctaattacgagggaaggacaattctcaaatcaactgaagcatgcctaaagcaatatatacatctgaattgtgatagaaatttttatatacttttgcaggaaaaatgatgaatcaagtcatgtgttcaaattcgagaatcctttggttatgcggttagtttgataaatctttttaagtacagttttagagtaatgttaataagatcaacactctctgtccatatgggcaaaagcttacattatttgttcaaaacatcctgctttgcattttgctcagccgggggctttaaggatcatgttcacatacacacaataaataataatgggtcagagtccgaaactgaatgggaaaggttactaaaacctttcgacctgaatgaacttcagaaattgcttgttccaatttccccatttcagctttgtaagctgcttaaacttccacttgatgtcgctacgtcaatggatatatttgaatgggcaggctcccaaaagggttattgccactcatttgatgtctactttgtgctaattgataagcttggggctgctggtgagtttaaagttattgaaaggttgttggcacagatgaaagacgaagatattattttcagggagtcccttttcatcttgattatgaaatattatgggaaatctggttttccaggtcaagcaactaggctactcttggatatgaaagctgtttacttttgtgaaccgacgtttagatcatacaatgttgtattggaaatactagtggatggaaattgccctaaagttgcatccaatgttttctatgacatgctgagcaagggtgtctctcccactgtttacacttttggaatagtgatgaaagcactttgtatgattagtgatgtggactctgcatgctcactcttgagggatatgacaaaacatggatgcgtgccaaattcagtggtttaccagactttaatacattcactctccaagaataactgtgacaatgaagcattaaaacttttggaagaaatgtttctgatgggttgtacacctgacattcggacttttgatgatgtaatccatgcgctttgcaaggccaatcgaattcacgaggcagccaaagtcgttgatcgtatgattcttcgaggttttgctcctgatgatgtaacttacggagttctaatgcatggattgtgtaaaatgggacaagttgatgatgcaagggcattgctgaacaaagtgccaaatcgcaataacgtgcttttcaatacattgattaatggatacgttacgagtggaagatttgatgaagctaaggcagtaatctttgatgacatgttaaaattcggttgtcagcctgatgcttttacatttaacatactgatttatggactttgcaagaaaggtttactatattcagctcttgcattggtagatgagatgacagttaagggttgtgagcctaatgtgattacatacacaacgttgattgatggattctgcaaggaaggccagctagaggaagctggcaatgttttgaacgagatgaaaaccaaggggctttgtctcaatactgtgggatataattgccttatatctgctctatgcaaatctggaaatgttgataaagctttgacaatgtataatgaaatgccattcaatggatgtaagccagacatatttacatttaactctctaatatttggactatgtaaggttagtagaatggaagaagcattgggacattatcgtgatatgtttttggagggtgttattgccaacactgtcacttacaatacattgattcatgcctttttgagaagaggggaaatccaagaagcacttaaacttgcaaatgatatgttatttaagggatgccctcttgacaaaataacatacaatggcctaataaaggcactctgcagagctggggctgttgagaaaggcatagcactgtttgatgaaatgacgaggaaggggattcattcagataatatttcatgcaatattttaattaatggtctctgtagaagtggtagagtacgtgatgcccttgaatttctaagggatatgattcatcgaggttcaactccagacatagttacttacaacagcctaataaatggcctatgcaaggtaggacgaatctgggaagctttgaatctctttgaaagagtacaagttgagggaatatgtccagatgctatcacttacaacactttaatcagttcttattgcagagaaggcatggcaaatgatgcttacatgctactatataggggtgtggacaagggattcatcccaaatgatgtaacttggtacatagtggtcaataatttgtttaaaggagctaccaaggagagtggaagttcatatgcacagccttgatttcatataacactgacaggagtgcaaagtctggtaaaattaagtggcttaaaagaagggtaaaatcttgggaaattaagttttatctggcctgttgagcttgtaaaatgatggaacgtaaagttatgtggctggcaagaagggtaagatcctgggaaattaagctttgtcttgtttgtagagcttgtaaaatgatggaaggggtgcatggtgtgtacttcagctaacaactactctgtcatctattcctaaaaagtatgtcgtcaatcttcgattgttcactcttactgtttttggtaatattcttataatcaattatcaataatatgttgttaaataaaaacatcaataatatgccattcttcctttttcatctacattgtaaaattgtattcagacagggtgaaactgttgttctacctatgtatgatttttagattcatatcggcaaatgcattgtttagataaggtaatggagtatagattatgatccagctatcagttgagagaaaatttagagttttaagaaaaatggcatcatcatggttgggatgaccccttttgttcaacttcctctctaggagaaggatacggtgcaaaatcatgtataatcagtactagacaatactattctgccatatctcaaagacttctattttgtatttagatctgattaggtagattttgatggatttaatctcttaatatgtacaggtgtgattggtgcaaggggaagaagaaccacatgaatgtgtaaattgtagaatctcttaaagacctataataagattcacataattgacatgtatagatgttttctagtactattagtagtattacttgcatagccattgcttcttgtacagaggatggtaacatttttccgtggttggaatataatgaagctgtcaaacatttcttctttcttaattgaaaagaggaagtgatgtacagattttttttctttttcccttttacttaattgaaatgttttcaattgactatcgagtagtgcatacaatactcgaatgtaagaagacgggtttatgcacatatttcacaatattagaatggagattgttattctaatgaaaaagaaacacacacacatacaattttgatcatgaatttatttatctgaatcttcatatgctttatatctatttgaaatgaattacagagaattgtgaccaaaatccttatgtaatctagttggttgtaacttaaatgcttatgtagtatttcaaataattagtatttttgttctttaaagttatgacactattagaatatacttgttacaaattctctttgcactttgggattagttttcgtttcttttaccgataataatttcatatttttacaactttgactaataccatattttgcatcattttattggaaaatttaatttttttttttaaaaaaaaaaaaaaaactatgtattcttgaaaaatcaaagaaaaattaatcaaagtttgataaaatttttgaaattagtaaaattaattaattagaataaaaaaaaattaattgtacataaattttctaaaaaaactaagatttaatcataaaaataaattaaaagaatcaagtttatttatatttacaaacttatatattaaaaaaataaagtaaattattgaaaaatcaataaaaaatataaaattattttacaaattaaactacaaaatattatgtttaatatatatatttttttatattttttttttatttttttttaattttgtaaaggatactattaactttttttcataaatatgtcatatttatgttttgtcaatttttatggttttttttttttttgaaaatttacacctgatttttcctattttatttcttttttactattacacggcaattattacattttcactgtatatactttttttttttttttaaattttgagtaagcctaattaatttcacttaataatatatatgtgtttat

SEQ ID NO: 42498 - DNA, 1484 bp, Cannabis sativa
  modified_base (26)..(37): a, c, t, g, unknown or other
agggtccaatctgtaacttttgcaannnnnnnnnnnnaaaatggtatttacccgaaaaagaaagataggagaggctttgaaccgcaacagagctttgaaacgtaacaaagcaattagagaaaatagtaatgttttttcactcgaggtcttttgcccacccaagagccaaatgaattgcagagagttcaacatggaaaggtgaggagctcacaccagcaatggtcgacagtcgccaatggttaaacttggggtcaagagcaatagcaacaacaccatacatgccatatttgaaagactcgtccacaaagaagcactgattgatggaggttcaatgcaagagagcaagttatggttcgagattgccaagagtaggattgctgaattctataaacttgagccaaatctcgtgatgaaagaactatatactacaaaaatagtttttctccaagtttttaaatagtcatttaaagtattcccgtcggtttctataaccgtcgcctatacaaacgtgtatgcacctataatgcaaaatactcaaagatagatcgtgagtaaacaaataaaatcaagaaattataaataagacaagagattataatggtttagtaagagctcggtctgcttagtccatttttgacaataagtttagcttagtttatttaatttagatcactcatttatatagaaagcaatcatccgtttggatttacatagccaaacaagaacgttattacattaattatgcaaattaataacaaaaatcgtttaaagaataaatgaaagaacaattttgacccttttttgattgattgcctaaatgctcgtgacttgttaagtctcacattgactattcatattctaaacactcgagctcacagattctttggtgttattcacatattgggccttcgagcctataattgcgattaaataattgaatgcctacgattaccctgatcgcatgtttgagcattcatgtgttgaaaacctagaacttgcgagtcttaatggtttgtctaatttttcaacacatgaatgctcaaatatgcgatcgggcctatatctgcccatttattaactaactgtgtgttttctaaattctgttttacttagttagttagttctgttagtttcttaactaactcttgcttttgccttgtaatacagtcatataaataaagggttattggctcagttttgagctaagcttttcagcaattctctctgttttcttttctctctgagtttcttttctctggtttctaccattcctggtttctaccttttctgttttgctggtttagcttctacatggtatcagtcgccttcaatggagtcgtcgattccaccctccgatcctcctcagacggtcaccgcccccgcaccagaccagtctgctcaatcttccgattctgccccctctgtttggaattcgttctctagttgcctctccacttctctaacgatcaagcttgatcgtacaa

SEQ ID NO: 42499 - DNA, 3170 bp, Cannabis sativa
  modified_base (51)..(55): a, c, t, g, unknown or other
  modified_base (959)..(960): a, c, t, g, unknown or other
ggtatttttgacaagtgttgctcaagctttgttgtatttgtgatagtttannnnnttggtgatagtccaaactgtagaaactgcaaaaactgcactgcaccacaccattttttacagtgcattttctgcggttttttagtttcgcggtgcgagtgcggtttgagaaattagaaaaactgcatgtgcgggttggtttaaaaaaatagtcaaaaattgtacaacccgcaccacgaacacccctaattttatgtatttaccccattagtgggccaagtttacatgtaaaccctagtgggtcacgggtatgtccatactcgggttctagcttataaatactacattataccctcatgcaaagggtcggaaattcatgttgtaaacaatatagcaaagagctagatttttagcttgtcaagaacattggggtaatactttaaggttttcagcccaatataactcatttttggactagggttcattaatacccgaaccacgtaagaatcttcatctccatttcgtttatttgattcattttcttagttcttcattatattcagttttaaaaaatcttggtaaatattttggtgatttcattaagagatgaggaaagattttaagccaaattgtatctataacaatggtggctactagaaatgttgtcactaagcccatcgcccatagtcaggatgccatcactgacgtgtaaacccacctcccgtagtgcacacctagtcaggcactatgagagacgaggaaatatccgacgctggtggttgtccaaccaagaaagcccaacattaggagaaatttgtcgatgaaaatcccattaacgactacgaaacagatggccacaaagaagaccttgagggcgaaggtggtggtgaggatgatggcggagacgatggtgagattaaagataggtattactgttagaacttgttttaccaggatctagattnnctaacatgtatgtttgattataaactataatctaacatcctaaatatgaatttcttaaaataataaaataaacacatataaagttatagaaaaccttacattggttgcagaagaatattatatttctttccgtttagatttttaacccttgattctttatgtcgcagagtataatcaatatctaaacatggatcttcttcaattggcagatttctacacaatcttccacaaaggcatgagtacttaattgttatatataatttggttagtatagtatacatatatatattagtaattttgatatataatttggttagggcataaaattctaacatttttctcttgcacgaatttggagaagaatgcaaagtcaattgttgaaaagatggggacatccaccaagggggattttaattttttctctctcaaaaaatttgaattcaaagtatgaaatgggaaaaagtggtgaactgaagtgcttcaccctattaatatgggaagaggtgacgatctatgtgccccaagattagtggctcaaattgcattttagaaaacacaagttaatccaaaggtcttggaatggaaaggtcagaatttaatgtggcattagaatcaaggaattctcaattgtaacatccgcctaagtacgagtgctaacatgattcagccgtcaacatgctaccctaggcatcacgtgctttcccaacgtgcatgaagttaacagaccaagaagttggtgccacatgtagttcgctagctaaaattcaaaggtccatagttatccacaactaaagaacgcaaaagttggaaagataatcccttttctaaatttcccacgtgtccataaggatcaagatagaagactgcaagcctttgcaactctcgagttaaggaagcttgggggtaaatattatatgtatttctagaagggaggcacgtggcattttcaatccaaaattaattgattaaggcctaatcaaaatccctacagaagggaggcacgtggaatttccaatccaagactatacagagggatgggcctctaaaccatccgagatataagatatctatgcccaaaatcaaacgtctctagatccaaaaaggctcgtccgccccacataaaatgaagtagtcaagacccttcaagtacgtggaattttcaatccaaaattaattgattaaggcctgatcaaaatccctacggaagggagggacgtgggatttccaatccaagactatacagagggatgggcctccaaacaatctgagatataggatatctatgcccaaaatcaaacgtctctagatccaaaagggtacctcctccccacataaaatgaagtagtcaagacccttcggataggtgcttggaatacatccaaaagagctttttaagaaattccctagaagccaagctgaagctgacgtggtgatcctttaacattgaatcccactgtatcaggaggttgtcccctatgtcagaccctgggagtgtgcgtaccaataaagggaacatctcctttgtcctacgaccactattctgacactatagtacgcaaaggtggcgcacacacgacacctgtcaacctcaagtggtcccctgtcttacggagcataacatccccacgagttgggcctgagtccgtgggccccaagttagtgtattttatttatttacttcgttagtgggtcatgtttacatgcaaaccctagtggggatcctagcctataaatactacattataccgtcatgcaaatggttggaaattcatgttgtaaacactatagcaaagagctagggtttttatcttgtcaagaacattggtgtaatacttcaaggttattcagccctatacaactgactcgtggactatgatttattaatacctgaaccatgtaaaaatctctatctttatttcttctatttgattcattttcttacttcttacttcattttattgagtcttcaaaaatcaaggtaaataaaaattattaatttttttgggaaattatagcaaatgtccccaaaacataggactatgttagtatatgtcctcatttcaaaaattgtagcaaatgaccctaaatcttaagagtatgttagtaatatcctcatttcaaaacttgtagagaaatgaccattttaaactatttattatttatattgccttttgtcacataaaaaaattattaattttttttttcatttt

SEQ ID NO: 42500 - DNA, 2859 bp, Cannabis sativa
aaaccagaaatgaaaaatgaacaacaattaacgaggttcaatcacaagttttggataaaacttggacctaatcccaggcccggccctgcagggtataggcgggctaggcctgtgcctagggtccacctagcccaggggcccaaaaaaatatttctcttttgaaattatacaatttttttactgatttttaaaaataccacatttgtttctaaataagggcccaaaataaatttttttttatggcccactaaattttagagacggccctgcctaatccctaggtagaaaacaactttgttggatgtgatgattttgatattgaatggcaagaatcaataatgttacaaacacttggaccaagaacacaaagaatactagtggtgatacacaccaattacaatcataatctcacttggaaataccttttacaaccctcattctcaactaattacaaattggtttatctttgtgtttttcttcactaacttgatccccttctcaagtgaatcataaacctatttatagagcttggttagttaggacaaaattaaccgacttaactactaactatcaaggtagttagaagtattgtctaagtgttctgaactttaattttatgttatacttttgttattaaattgttgtgtttgttgatagttttttatttttttgtatattatttttatatgaataagaagccacataaaaaatatatttaaatgtaaaattataaaaaatttatcaaaataatgatttgtgtaaattttcttaaaattttattatttttgacactataaattatattaaacttttaaaaaatttgagaaaaaatgtataaactgtttagatttctctaatttaccgattgtaattttgccagtaatatttatttgtagcctaaatttacaactactaatataataaaccccgtatacatttattatgaaagatatgcaaatattgtatttctttcaattgacattgaaaagcaatcttttgatattcgatataagatgggtcatagtcataggttgacaaaatggaccaagggagtggtatagagaaaggaagtatgaaggggtgagaagaacaaagaccaagaaagaagagcaagttggtggatgctgaggtggttgtgggacccaccttttttatttttgttgatttgaagctgaagaaggttccgtggggtccacaccaaatgcggcgagacgcagcattgctagcgaagaaagccaattcgagaacttaattaattaccaccccactcactactcccacttccactcccactctcactctctcctctctgtctatatttatttatttttaaaaaattaaaaaatatatatattcggtatatattttgtgaagtaatgaagtggttcccaccaacttccccaagatggaggaggatgatgccgaccctttcaagtggacgaaagaaaaaaaaaatatgaaaataataaaggatgaatagggcgtggattattgagactcgagaaaaagaaaagaagaaataaaagggtacataaaaataaaaagaaaaaatcgacgctgtcaatggaccgtactgatgtgcctactattggctaatattgaagcacaattccgcgaaaaaagactttggtagggtcccaatgcttgattctaattacaaaattagcctctcaattctgataagtgataacaaaagaaaagaaaaatgaacaagtgctgctacaatcgaatgtgggtggagtgaagttaactcggggccagatatggggccactctaatgaatggtggaaagacacgaccatcttatatgtagaataacaatataaatacaccaatcttttatactaaatatttttatgatgtaatagctttaccgtataaaatattataatagatacgtcaatttttttttatttggtgtatcactacatttatatatactaaaatccacttgaaacaaataaaatataaaaataattcgttccatcattattttgctaagagcttccaaataatactgtagcagaggaataatttgagtcattgttatgttaatttaatccctaataatataactaatattttcttttttttaaaaaaaaaataatatatatacacacatatccactgttttggtttcaaacgaatcacaaccatagagtcagagttggggaagtgacataagctctaaaatctaaatccggctctttccgtcctccaaaagccgcatctcacactcacaggcacacgcaccaacgatgcaagcgaaaagctcccaagttaattgttcttttttggaatttttaatggctcactcccacattaacaataattaaataatctggaaaaaattagaaaatatcctcgtcacttgcattgttgttattattatgatccactacccactaatatacattgtgtatcaatacactttcgtacaatatatatgagtgcagatttgaacatgagggaacaaaattctatttgtggtttctacaccaacaagttttcgagtcactggtgtcaaactgttactgtaaaaataaggaataaatagatcttgtcactttacttttagcaacgaaatttatcttttaatttcttttttttaataaatataccatgtaacaatgggcaaagcaaaaactctttttctttttctatgtacaaagcaaaattcattaatgaaactaaatgatctaaaattcatgcaagtcattttgaatatataatgcaaaaacacagtaatggtatgtggtcccaaattgatgtgtgttttaattttgtaaagaatggtacaaaagaagatgtctaattagaatagattaaggggaggaaaaaatagagagagagagagag

SEQ ID NO: 42501 - DNA, 3299 bp, Cannabis sativa
  modified_base (3248)..(3256): a, c, t, g, unknown or other
aaatcactaaccaaacgtgacttgtgttttaaaaacttcaaaaactattttttgttcttatttctaaaaacaattttttaaaacaaaaaacagaaaacaataccaaacatgctcgtttctctcttttaacaagtttctctcgctcgtcatctgcttccaaataaaaatccataatttttcgatcgaatttaaaatatttatataaactcttgcgtgttaataatgaaaatagtataatatgtatggaatttgttgaatagagactattacttcattattcataatataataggatcttaataaatcacattattaaagggatttactatattgattgaagatgaattatttatacagttggtgctacataattaacagttttaaacatgcatacaatatgaggtatatatcaatttaatgaacatcgctttattatgtgacaattctcgtagatttttttactcatattttaaagtcaaggccacggcttaataagccaagtaagatattaagatcgactcactcgatcgagcccatgagaatgattagagagagatgagccaccattatacgtgtccagctttgattctcgttcaaattaaacaaagtgagaaaaagaaaattgatgcatatttattttcaataataataaaatagtaaaaaaataatatattattttagaccaattaaattattttttggctaaggacaaagcccgtcagctgtcacgcgtcatccaataatattctgccatgtgcctctggtcaaaactcggtaacccattacgtcgaccttatatttttcgttttttggtttttctagatgacgtggcagaaatctggtggttatggaagaaaagaaaaaggacacgtgccttaactcgtgttaattatcgtacttcattcggagtcgtgtatgggttggagataagtcacaattctctgtcgcgttgatctttaaataatctctcttggcttgccacgtgttggcgatcgcgtctcacttcgagtgttttcagtttttatttctttttaaaaaaaaaataaattataaattttaggagacagaacaaaatgttatggggttcataggatgatcttgggtgaaatttattgtactaaattaaaaatgttatcggccaaaatgaaaaggaaaaaacagagaaaaataatacaacaaaaaaaggaggaagatccaattgtgagaggacatctaaaccaaccgagaaaataaagagaaaaaacagaatgtctttatatttaattatattaataattttttactctctctgctttcttttggagaataaaatgttttataattccttctctcacctcaatccaatgtgttatcaacaattgtatggtgtatattgctagatgtgacaccttcaaatttccattcgtttaatataaccattttttttctttatgagattatactaatataagtaaaagtattttcttaaaagaaatatcacatatgtagtatatatcttcaaaagtacgattactttgtgttgtgttgaagactcaaaacttatcagcatgaagactaaggtatagctgctaattgatatttatattgttgcttatttggcccttggagatttctaagcaataaaagtgaaaaaattaatgaagaaggtaagtgagattaagacagaagagaggaaaacgacactgcgttttagccgtgttaggcgggtttatgattggtatgattaattaggcgttactttcgtttggggtaaggagttaagtaggacgtacaatgtaccgatctatatcgtgagagtggcaaaaattagctaattacaaaaatgaacattaatttattaaggtgataaaaaataaacaactagataatgataatatatatatatattaatatatatgatatatatatagtttgaggttgaggaaacttatagtttcagccatattagcttcttccattattccaggtaggatgatgactcctcagtttaataaaggggattgaaacgcagtcacagtcaagataaaaaatttgtcgttttttggggaccctgttttgtactatttagtgtcaaatccttaagtaggtggtagctttggattcatgagatgaaccgattgagtctaaaagtgtaagactgtgtttgtgtttcgtaaaaaatcaaatggagctaagaaaaaaagactataaagagagagatgagtcttaatcttgatgtgtattcgtggccaacatgaagtaggcacagacggctatagtagtagtgttaatataatggttccaacttccgaagcctttttttctcgtcacaaaaaggaaaggtttaaagatgtgtttaattaggagtgttccaatggtattattggctgttttcgtacttaactcaaagatatatatgcctgttattggttgagattatgtacgtttcagcaaaatatcggtttcgaatttttttcaccaaacaaaaattaatatataatatgcataacatttggttgacatacggatgatttcgtgatcaatgtgtggataaactataaagcgagatctcatcgtgtacgaaaacgggatcgagattaattaggagaatatatgtgaacaattaatgacgttgatgaaataattaatagctggatatataaacattatgagatttttaaaagtactatatatatgtttgtgagtattttatcctaataaccctaaacataagaggtttaggttaacaagtgttttggctgaagagaatatgatcattattacttttacttttacttttatttggtacgaatgataatcacaattactaatttatatttataaaataatgtaaagcaacgaaaagaataatgattattgttttattccaacgttgattccacccaattataaaatatgcttttacaaaatttatttactactcattcaggtttaaagagaaaaaacacttaggaccccgccggatccgggttttgcccggaactatgattgagaattattcatttgtttcttcgctcttacatattccctgtcacaacgtaaaaactatcatttgtaaatattgcaacatctttcctttcctgtaaagctgtatacaaagagttatatatacgaaggattatggagagatattatatatccatggtatcattaaatgttaaacaaatttcgtttccttcaaaccatctcctgcataggtaatatgtgatatttagggctcgtttggtacgccgtataagggtcgtatnnnnnnnnntaataaataacactatgtttggattaagcaatgtattgtatta

SEQ ID NO: 42502 - DNA, 5151 bp, Cannabis sativa
  modified_base (5079)..(5102): a, c, t, g, unknown or other
ttcagcataagttgtggtatcattggtggtgataactaaagcatgcctgattttggcattcaatcctgccaaatacttttctttcttagtgaaatccgtaagtactattccggaagctagcttggccaatcgatcaaatttggttgtataccccgcgactgacatgttctcaccctgaaccaaatcaacaaactctttccgttttgcactgcgaactgcctcattatagtacttagcattatacaaatctcaaaattcttccccagacattatggtgatgtctcgagttagggacaccatctcccaccacacgagagcgtcttcttgaaactgaaatgtgacacacgcgaccctgtcatttccagtaactcccatgaggttcagaattctctcaattaccgtcaaccactgctcagctttgaacatatcgggaccccaaaaatactggaggtgtctgtttccggaaccgctcatacagaggctccatacagttaccaacaacaggttattttgctggcaccgcaggaaccactaaagctagtggttgcggtggaggctctacaggagcatcccattgtctaagcctccatggtggacttattatatgtatatatttttgtgaatgtacagaaacgaaaagatgcaagtggattatatgggaaaccattttcttattacaacaagctagcaaaaatatatggacgggatcgagctactaggataaatgctggtaatgctgatgatgatgaagaagaaatacacctatatgatgcaactggtgtagaatttagagtttatgataatatagatggtggtggggatgatgaagaaatagatgaatttgatggtgtctcacatactcaacaaccagctaatatgcatcgtagatccactaagagtactactagtaaccaacaacgtggtaagaataaaaaaactaaggttatggatgaaatttctacaaatgttagtgtattagcagattctatatctaatattgtcctgaagtttcaagaattaattgatgcaatatctgataaggatgtagccgagatgcaaactaatttattcacagaaataagaaagattaatggcctaactccaatgcaatgtattcaagcaaccaacatattggctaaagaacatccattgatgcgagtattttactcaatatcagatgagatgaaactgctatatatcctgaatatgttgcaaaatgatgcagaattttataattactagacatttgggtttctatttatgtttatgtttcacattagaacgttttcatgtggagattttatttatagtttggtcatatatgatttaattgaataatatgagtgattttttttagcagtattatgttaatataatttttttaagtaatcatttatcaatttatttatttttatatataaattaatttatttaataaatagaagaaaaatataaattttatattaagggtaatgtgctcaacttaaaatattctgattatcttttctaattaatacaaacaaaataaaatgaatttgattctctttccgatcaatttagtaaataacatgttaaaataacaactttgatttcataacattttaattattttcatttctcctattaatttatttcgataatgattacgctttaataaacgtgcctaattaactagggtttagaatgtatgatcaaatggttgaaagtgaagatagggaagggtcatgattggttgtgtttctaaatccaacggcagttaaaataacaacaagatgagcttgaaagttaaaatcacattacgttgccttccctcttcctacctccgtctgagtgaggataaatcctctctattctattaatctattaccaattccaaatctaagcaacctaaccttacctcaacaagtgtacgcagcacgccaccggaacacgcacacggattattagcatttagtgtacaattcattactcaaacagcgatccaatccaacaacatctatctcctgcaatccgactcagctcccttcccttgctgcccaatttcagaaaccttaatctaatcccctccctgaattcgaaaatggcgtacgtcgaccatgccttctccatcacggacgaggacattatgatggggacttcctacaccgttaacaatcgccctcctattaaggagatcgcgctcgccgtcgcacttctcttcttcggcaccctcggcatcgttctcggcattttcatggcctacaatcgtatcggcggtgaccgagctcacggtaagcttccatatcattctcctttacagaatattaattagggtttctgattttaatttcgagttttttttttttggtggaaattaaggatcattctttgcaatacttggagcgatcttgttcattccgggcttttattacacgcggattgcgtactatgcttacaaaggttacaaaggcttttcgttctccaacattcctccagtttagcccatcttctccgtatttccattaccgacatgtacaaatctttcccctctctgatttgttgtttgcctttaaaaaaaaaaaagaaagagtttttgttcgtttttctggttattaatgcgtgtaattatgtgctaatagttgttctgaatatatttgtctaagtagttgaactttgtaatgatataagtatattacgagcttatttcctcttttatacaagtatatttacatcattacttattaagcttaattttgtagcatgcttgtaaatgagaaatcattgctggctttctagagcaaggaatgtagaatagataatgttgagtttatcattacagacttttacgaagctgaacttggttcgatttaattttatcttaggtctagttgttgcttgagaaaagcttctagatattagctttgtaatgtactgtcactgtaacttgaacggagaatgtgaagttcgattgagttctgggagacgttttttgttaggcaaatgttgcaagagtgtcttgtttacgaattactgagtaggtcgtgtggtaaggtccatggtttgatatttaattttgattttgcatcattgctgttgctgttaggttttttgcctaaagaattgtaaggattaagaggatatcattttcaacttaagtttggcactaattggtgtcgttgacatgattgcagtacaaattcatcaccttgtattatctgtctatgaatcctaccctgactcctttttcccttttaactcccaatatgtgtttctctctgtgcttctccattaaatagttttggttagaccactttatgacattttatgtatgatgcatcctaactgatattatctttttttcccatgtcctgttcccacgcaagtttatagttaatactgccaaaaagcatgtattggattgtagctgttcattatgatcactttacaaaaataccctatccactacaatctggattttaacagccacatcttttgcgtgatttccagtatgcaaataaaatgcagcgcgcaagacacctctttactagtcatcatgtcattagttgcttgttttagagcactcacagtgatttctttattgtattttttaaaaatatgtcagtaaattcttttttatcttttcgtcttttgcttgcatagttacttttactatatcatttgttccttatattatttaaaatattttatctaaccatcaatgtatataggaaatatatagggattttgatgatttctgatataacaaaattatgattactaaaccaatcacaggaaaagtatgcttgtaattactcttacatttatgtttataataatacaaaatatgtatcatgctattgtgtcaaatttagtataaattttcaaaatttgtccatttgacataacttttgatagagtaagtttttttctttccaaagtctaatttagcacattattagagatgttcttaggctccaactatgcatgaggttaagtatatttatgatttgcagctcaactaattggggatggataagagcttctactatttatacgaccatcacttagtctttagtgtggtatctaatactggtgattacaaaacatggtacttttttgtgaaggggattagaggcctacacgggacatccagggaagttagtatttacttaaataagcttctcagtttgtcaggtttcaaataatcaactggagtttgtgggtcgcttagaaaaccaagatatcacccttgtcatattagtaactaaaaggaatacgtttccataaaaacaaagaactaaaaggcatgtacctacgtacctacagattgagaagataatcttcctcccggtcacctgaagagatatatgaagcttcattctcttctcctatgtctacccattgttggaccagccaatcttgtccagcattgctaattaaagtggattctactgatgatgtgtacagtagagattctaataaactcaattttgagaatatacataattagtattgatagactgttaatttttgtgatatatattgaggctgagataataaatacattttacattcaaataaccaatctaaccaatttataagataaataattttaaagtatctataactttcttattttggagcagtcaaccccatcttccatatatctcgagaggatgcattattggcagttatgcagttaatcgcctctttaatagctctttccatggtatgaaactttgcatgaggcgtagttctaagcaatccatgctgggctttgtgccctaaataaaattctattttaatgtaatattttctattcaattattaataaagaaaaagatttattttcattatttatttagtgtgttatttagttcatgtgatcatttatttgtttatttgatttataaattcatctaaattcttatcacattgatattcttgtttattgtgttgtcagcaccagtggaaagtaatcaagattgtgtgattaaatgtattcttatttaactgataggataatctacaacgtagtttacttgcacattggataagtgctatgtatatttcatgacattggttaaagtaagcttgggnnnnnnnnnnnnnnnnnnnnnnnnaagggaccgatattgaacttgaatcagatatgataaacttactgtaata

SEQ ID NO: 42503 - DNA, 1971 bp, Cannabis sativa
aaacaagtaatgaaattaaatctgtttctttattgataattgattaaaaaagattacattaaaatagagttttatttagggcacaaagcccaacacttaaatggtctactcacacacaaacgagagagaaagagagagagaggagaaagagggggactgcacatttttaaaaaatcatctagcaaaagatgtgatcaaaggcccgattatcaaaggaaaaatggccttcatgccttcaatgcggtcactggactaaacgcccaaaaggaaaaatgcacacataatcaaattacatcaaagagaatatacagaagtgtgaatacttataaatttgagattgatttagggacggtggcaccaaaaggcaatggtggtaatacgaggcttggcaacgtctgagaaagagtatgagaaaatcttgtttgctcggatattctttcagttcaaaagctttaaaaaatggagtagaaggaaaagtgtgaagagtgaggagaaaatggctatttataggctgagggtcgtgatcttgttcatttaatgatcttatgccccccttaaaattccaagaagcacaccacaatccaacaattgggaggaagtttaaacaagcacattatgaggagacgtttcggtactcgagtatctaactgacattctgcaattatgacctccttaggaattaatgtcaaggaagagaattggcattgctaaaattgaggaacaaaaaacacgctaatgtaataacctttcgctatacaccacgtggcttattcgtacaaatgggggtgtctcgcctacccacgtcgtcatacctcgagccctccgagaggaaactaaagagtcgagaattaatgcaaatcccagctcaaaatttatgagccaaaacttggaggtaaatgttgtatatattttttttatatcaaaatacgtggccacgtaaataaggcacaacgtgacagaaagggccaaccgcacacgggaagactgattattatcttgtaaattctttgaccaaattcctaaagcaagagacgcgtctgggatgggctcaaataaacttataagaatatccaaagtgctatgaaataggcctccaagaggtggtagcctcccaaatcatatgccatctgggagtccataatgcaaataacacaagttccaagttagatcactatagacaactagttcgatgtaaggtaattatcattagagagccatattattctgacaccccatttgcgtatatagataaagtggcggctaatcttgtattgtcacatcaactgcatacaagataaatcttatctcacaccaaactcctactataaagactagatagtacctagaggtaagggagcaaaggtccccctttctccactgatctcattctcccatataaatatacaaagactgtaaatgtaaaggggatttttgggttcacaaacatagtgaactccttatactgtaaactgaatattttctgaactatagaacattttgacctctaataaaagtgactcgtggacgattaattaacaccaagatcacgtaaaaatatcttcatctacttataactaattcttttaatatttgattaaggagttgtcaaaaatctcggtcaacaattgggttaataccattttagactttcatttttgtaaaagttactgattggaccctctgttttgttaaataaaaaaatagaccctatattttttaaaatggtacaaataggactctctgctttcttcaaacaaaaaagaccctgagcttaattttagacaattattttaatataatcaacttcaagacaattcatagcataaacaaatacataaaacgtaaccagatttgtaataacacatctagatcagtttattattaagttttattttgacaaaaaattaattcagtgtactattttgaaaaatacaacgtccaatttatcatttaactgttggaaattatttt

SEQ ID NO: 42504 - DNA, 3026 bp, Cannabis sativa
aatgagataatagaacttttttcaattagaagattaatgtacattttactattaataacatatattattataacacaattatgttttacttactaaatatatagatgataaatctcagtgcacattttctaatttttatttatatcatgtactcttcagtcttcaatagtcaacttaaaactattttatttctaaaacaaatatgtagcaattggtattatgttatgagtgtatattttattatatattttttgtggagaaaaatatgattaaagattaacatagaaaacttctttatgcaaaaagataaaagctatacataatgcacatgttcatggcattattatactttttagtttttagatgattatatatattacagtctcactcatcttcttttttccactttctgattatttataatattttctaatactattagattagacataattacacacgtagtaataatcataacacttagttctatttccatattatattatctatcttgttttgtaaaattctgttgtacgtacatgctcctagctaagagcattcataacagtgtctcttttaacaaatttaaaaaattaaagattctaaactcatttatttaaaaaaaaaaaaattaatatacactattcatactctacatttataaaatattatttattattttaaatatattttattaattattttgagttttaataattatttttgtataaaaatatatgttaaaatgaataaaatattaaaaaaaaaataaagaagtagaattttggtgttatattttaaagaagttaatgtatagtgtaatatgaaaacatcatgaaaacaaaagttaaattttaataatgtgttttaaagaataaaataaaaaaattattaagagtactctaaaatagtacaaaatttaaggaagaacaacataataataaaatgttatcgaatatattttgactcgttactaatttattaacttcatatagtacattttgaagaacagctatatgtattttaaatagaaattatgattttatatggagggaaaagccaaaacaaaataacaaaggacatacacatgtatagatctctctattttgtacctttctagttaggttttcttctttataaaattcagcctgttagagttgaacagtttgtccatgcatagaagcttaacaaaagaaaaaaagagaagaaaatattgaaatggaaagaattagtcattgattttggaaagcaacataaaatggttgctttaaatacaagaagaaatgttaggtgttagctgaaatcgaattgtttactgagattttcaaaaattaaattaaaaaagagcttaataaattagataagtaattaagtaatgaaatggaaaatttttacgtgatggtattaataaaccctagttcacgagtcaatgtatttggtctaagaaggcttgatgatggatcttataattttaagaatcctaattcttgctatattattttacagcagttatgaaagtagcagacagtctgtgatatgaaatgacctatgaaagagggtaaggagtgacagaaacaccttgagacatgtgagtagaagtattagtggctaagtagcaatgataatcttgaagataggaaggtttattaacttttcttcctattctagtttgagtattggaagttggaggatcaaaattacccacctcaatactgatctcatggttgatcagcactatcaacagatggatgaggatcaggaacacggggatcagtattgggtgaatcattatcagttgaatgtgtgttggtctgagaattaagagaaaatctggatggtatttcagagaaaaaattatgatatatagtaggaacgccacctgaatgcacaaagggaaaaatgtgttcataaaagtacacatccctggaatgaaaaattctattggaactgatgtcaagaagtctataggctttcatgcttgtatagtaaccaagaaaaatagatggtgctaatcttggtgaaaacttggacctaaatagactcaatgttgaagcctaagctaagcagccaaatgctttcaagtgtttataggctggtggtttaaaatgtagaacgtcaaagggagatttatgtttcaaattagtcgtgggggttctattaatcaaatatgcatcagtggctatgcattctccccagtagcacaatggaatgtatgattggaagagaagagcacgagcaatatttagaagatgctgatgctttctctccattacagaattttaatgtggtctttgaacacgcgaatggtaatgcatgatgctaaggtctttaaacagtacatcaaactgtaattccttagcattattagatctaaaggctttaattaccaattttataaaatgtggaatgacaatttgtgcctcaaatttgtgcttaataaggtggatccatgtgtacctacagcaatcatcaacaatggtgacaaaatatttaaaaccctcaggtgtgatagtattaaaaggcccccaatatcaacatgtgtaaaatcaaaacaatgctcagagaaattgtgattggagatgaaaggaagtctcctttgtttggcataatggcatatgaaataatgaaataaagaattagaatctgaatggaaattcaaagttttattcaatggatgaattttgataaaagagggatgtcccaacctgtaataccttacagtgtttttattgattttggaattagaaatggaagaagaaacagaaacataatgatcctcatggaattccattacattttagaaaatatagattgccatacttctcacccatcctaatcaccttgttcctcataatgttctggatgacacaatgatcattagaaaacatgaatgtgtaattggttgatgctgttagagaattgacagataataaattgcatttgaatgaaggcacataaagcacatttttaagaactaagtcatggtttatgaaaaaccgtgtttttgcaaatgtcagttgtatata

SEQ ID NO: 42505 - DNA, 5925 bp, Cannabis sativa
aaaaaattaaaaaatagtataaaaacaattccccatatattatattgatagttattcaaggttggaaccttgttctctttctattcccaattcttaattccctccctactaggccaaaccttgctaatgattttccatataattatttaaaggttatgcatggacttctacaactttctctaaagagtatgatttaagcaaaattttacgaagtcttaatgttaactttgctaaccacaaacactgatttgctcatgaatatattaaaataatatataataggcaagaagttataatttatagctaagctatatagcctatatacgatggtgggtaccttgcatgtagttgagaaaattaatagtggagtagacataactatagttggagtattgaaagataagcactagtgagccactaagccaataagttctctaagaaaatcattacattccacgactaatcctataaaccaacatcaaacagagctctaaaccaacaatggctatgttatagagtgatgggatctgagcaattcccttgacttgtctctctcaatcccacgacagcccaaaagcaacacatcacctcatcctagtaataactaatgatgtttgttaagaagaaaaacatcatagacgacgacgaagaagattaacaaaacgacaacaaaaaaacatgaagaagaagaagaagaagaagaggaagaaagaagcaagaatcagagcaccaataacgacagcaaattgcagaatcaccttttgggtgtacaaagtggcgttgacttctgaatcatctttcactgcttaggattgtgactctttttttttttttcttttctctgtatctctcttgttcacgttcattcacatttttcaatctctcttgtatttcttttttgctgtcaacccctcgattttgttctgtcaaagtaggtaaaaaaagggtctttattatatatctctcttccttatctctattcaaccttttattcaatgctgtatggccttctataccctattatttgtatctattgctctgttttctcaagtgggtatgtcgagaaccttttagttaatgccaccgtttaggccagagtgtctcttatagtgtttttctggttgactgattactactctgtggttgtgacttgttgggttttcaattataacttgtttagacttgtccactgccttgttaagtgctcgtaaattttcctactcttgttttgtcaatggttcctctttcttattctctagtttctttagcattattattactattccatctttctttcttcatatttttccttgtttttacgttacataatttgggttttcaatctatgggatactttcctttttacaattgctcttttattcataaaccactctaatttcaatgctgcataaagtttaaaccgttccaaaattgtgtcttgatttgtctacctcgaaaatggccatgcaggggagccatcaaaaaccattgttacttcaatctcttgtcattgttttctccattataattagcctggtagcttccttaaatgaagagggtcatttccttttggaatttaaaaaatccctttcagacccaaattacaatcttgagagttggaactcctctgcttcaactccctgcaattggaaaggagtacagtgcaatgattctaaggtaacttctttgtatctcagtgctcttaatctgtctggaactttatcaccaagtatctgtaaccttccccatttaattgaacttaatgtgtccataaacttcatctctggtcccattcctaagaatcttgctagttgccataatctacagatccttgacttttgtactaataggtttcatggtgaactattgaccccaatctctgaacttacaagtcttaaaaagctttatctctgtgaaaactacatgtatggggaaatgcctgaggagattggtaacttaactttgcttgaagagcttgttatatatagtaataatcttactggtagcattccagcttccattagtaagttgaagaagcttaagattatcagggctggtaagaacttcttgtcaggaccattacctgcagaaatcagtgagtgtgaaagcttagaggttttaggattgtcacagaacatgctggaaggagctcttcctgggaatttgcacaaactccagaatcttactgatttgatcctttggcaaaatcgtttctctggttccattcctccagagattggcaacttaagaagcctggaattgcttgccttgcatgaaaattctttcagtggaacggttcctgaagaacttggaagattgtccaagttaaaaagactctacatttataccaaccaattgaatgggacaattccaaattcgttagggaactgtaccaatgctgttgagattgatctttctgagaatcagctgagaggattcatccccaggcaattgggataccttcccaagctccggcttcttcacctcttcgaaaaccgtctacagggaagtattcctcaggaatttgggaagctgaagaatctgcagaacatagatttgtctataaacaacttaacaggtagaatccctctggagtttcagaaccttacacttctagtggatttgcaactgtttgacaatcatcttgaaggtaaaattcctcctcacttaggacttaacagtaacctgaccattcttgacatgtctgctaataatttagttggaaatattcctccacatctttgcaaataccaaacattgatgttcctaagcctaggatcaaacagattgtctggaaatataccctatggcctcaaaacatgcaagtctcttatgcagctaatgctaggagataaccaccttacaggaagcctccctcttgagctatataaacttcataatctttcagcactagaactctttcgaaaccgattctcagggccaatacttccagaggttggaaagctgatgaagttggaaaggctgctcttagcaaacaattactttgttggcaatattcctccagagattggaaatctagttcatcttgtggcgttcaacatttcctctaatcggctctcgggacacattcctcacgaggtaggaaattgtgtgaaacttcagaggcttgaccttagcagtaacatgttcacaagctctctccctgtagaaattggtgagctagtgaatatggaacttttgaaactttctgataacaagtttactggagaaataccaagtaccttgggacaattaagccgactcacagagttgcaaatggggggtaatcagttttcaggcaacatcccattggagcttggccaactttcttcattgcagattgcactcaatattagccacaacaatctttcaggtccaattcctgaaaggttgggtaacttgcagatgttggagtctctcttcttgaatgataacaagcttgatggtgaaatcccctcctcaattggtgatctgccaagcctcatggtatgcaacctctctaacaataacttggtaggtgcagtgccaaacagccctgcatttcgaagaatggattcaacaaactttgctgggaacaaggatctgtccagattggattcaaatgatcatgatacatctgcaacacaatctcttactcagaaacaaagtgggacaaagaagggttcaacaaaagccaagttagtgatcatcatcactgttgttgctggtttaattttcatttttcttatcatgggattgttttgggcgatcaacggtaatcatcctacttttctttccattgaggaacaaccaaagcctgatgttttcgacgattattacttcccaaaagaaggattttcttaccaggatcttgttgaagctaccagcaatttttcagagagtacaatcttaggaagaggagcctgtggcactgtgtacaaggctgtcatgagcaatgaagtgattgctgtcaaaaaattgaagtcccggggagaaggagcaagtgcagacagtagctttagagctgagatatcaaccttgggtaagatcaggcaccgaaatattgtcaagctccatggcttttgctaccaccaggacaacaatcttctcttgtacgagtacatggcaaatggaagtttaggagaacaactccatggcaatgagcaaacttgtttacttgactggaatgcaagatataaaattgctcttggagcagcagaaggcctatgctatctgcattgtgattgtaagccacaaatcatacaccgagatataaaatctaacaacattttgctggatgagtttctccaggcacatgttggagacttcggattagcaaagttgattgattttccatactcaaaatctatgtctatgtcagctgttgcaggctcatatggctatattgctccaggtggatattaatactttttgtgttcattcattatataggttgcattaatatatacatcattacattgccatatgttgtgtccaaatatcatagaaatttactattggcatgctcattcgtcatagactctatcagtatgaatacatgtttgacttacactgcatttgcattttcatgtctttgtgatagacaatcagtcaagcatgaatattttgacagagaaaattagtcaatttttaagaattgaaatgtattgttctatagttgatgttagaagaaagtaataaactacttgttatatgatcaatttcagagtatgcatacaccatgaaggtgacagagaaatgtgacatctacagctttggggttgttctgctggagctagtgaccggaaggtcacctgttcagccactagaacaaggtggggacctagtcaactgggtgaggagggcaataaaaaatgcagtgcctgcatatgatttgtttgacaagagactaggcttggatctgagtgagcaaacaacagttgatgagatgactctgtttctcaagattgcactcttctgcaccagctcatcccctgtgaataggccaacaatgaaggaagtcattgccatgatgtttgaggccaggaaaactgtcagcaaggactcattttctgcctcatctgaagctcccttagcagaagatgcatcttcaaaaggtaagacaaaccttttggaacccaatttactatatgcacattggtctaaaccttttggaatctttacatattttttatgatcaaggaccctgctgcaggtaatgaagtgaactaactctggctttgctttgattactggttactgtgtatgcaggaataatggagttgtgaattaattccttcaaaagcggtggtttagtgaagttggacacatgttgatcttcaataacttctactttcagaccacgtgattaatgatttcacctctcattttgaccgtggaggaaataaagaggacgttctctttggtcttttttatgtactaaccatctacatataaatatatatatatatatatttatacaatttatcaatacatgatttggaaaggcttcaaatccaagcataattaatatgcttattacataattcactcactcaatcgcttgtaggcaacacaagcaaaaattagatttgattctcggattccctccttttctttctataatattgttaattgttattttaatattgttactggcaaaagacatgaacgaaaataattgctcatattaacatgtgaacgtccacagttccatatactattagaacacagaaagctaattattaagggaagaaagagaagaacaataattatcaatttacgaataaaaaacaaaaatcatgcaggaaattaaataattacttacacaattataacgagaaatatcagttagattaatacaacacacattcataaaataaatataatttagtatagaatatataattgaatacagaagacttgtcagttgtcagtgctattata

SEQ ID NO: 42506 - DNA, 2272 bp, Cannabis sativa
agctctgattatatttctgattggtatttttctcgagtgttgagtgaagggattcaagaaatatggagagaacatgatccaaaattacggttcttagtgaacttagttcttctttagttaattaataaatttctttatcattgtaatgtttctttaaagatttatcaataatagaatgaaagattgaagaatttattattattattattattattattattcaaaattacattattctcaagattttcctaagattaaagatattttttattaggcaaacttgactcagattgatttaagtaattatatcatttagtacagtcaaattatgaagaaaagactaatttcttttaagatataaaactctataaaaatggggcctttttgttactgttcttgaatcgaagactaaactcattaaatatacttttgttgtgcttgaagagaacgaaaaaggtcattttctcattttctgcctttaataaggtgtagcttaattgaaaaaggataagaccattaagagaaataagaaagaaaaaaattggcctgaaaaccccattactattcaatcaagaagtatgtaaacaaatcatttgaattcgaaagagattcgatatcaagtgatgtaccatatggaacacgggcaatgttagaaactgtaaaagcaaaggcataatacaaaagagaacgaaacttcattagaattgccttacttttttagccccaaactcaccccaaatcgggcaacaaagtcgtgaacaaatgtaggttgatcttgtgatagaatgctcaatgtacaacaagtgatcgatcaaatcacccaagtgaataaatcattcgctcgccaagctctttgccaacaacgtgtaagtatctacgcaactgactatccaagtcacccctttccctcgaaccaaaagctcgttgtaaatcctgcacgagtgagaaacataagagccaaatggaaatcgttttagttctcatattcctgtatagctcacaatgaatataacataccttgtacttcatataagtgcctctcatcccaatcaataagttaccgatatctccatcatccccttggatagattctgggagatttgattctccgcctgaatcattgtcagagctgtcatcatattcggcatcatccatctcttccctttgaggtataagaacatcgttcgtgtcttctacgctgttgtcatgatgttgcatttccatggcttgttcagaagcattcggtgatgaggactcctcatcttgttgggcagcacaatctgataagacaacatatgcctttttgtcaaggtaaggcctggccacatcaaacgaaacccacctggataagagaagatcacatgacaaccaggttagcattggtgggcggtaatgaggaaagttatgaatgttaaactgagaatgagaaggttatgaagcacagctatcacaatgaaaaaccaaacgaaaaagaccgagggctttctactttaactacccccgatttgtgtaaaagacttactcataacgaagagggcagagaagctcagaagggcgatacgctgctttgtatctcatcttattgcaggagtgaatgtaaaatccaagatagtaaaattggagacttggacaatgaatttgattttctttcacccaattgatttcttgtaatgcagaatacttgccaagtgatagaaatgcaaagtctggatcccaaaataagtatttacttgacaaacatctaggaaggatatctataacaccaactgcaacaagttggccatcaatcacataccgctgatggaaagacccaaaaccacaaggtggaactgtaccatcactagttggaggaacaaagattagcggagtatcaacaagaaaccttctatatgaactttctgtgacacggctaggtgaatcgttatgtacatttatctgatatcgtctgtacaaggcaaattcctctggatcgaaacttgaccttgttaaataaatctcaagctttctttttttaactgaagaaccttcatgattattcgttgaggaacacactttactttcatgtacagtagcagatccttcagaattatctacaatctcagaacttccatccaaataagccttatttgcaccagaataaaaatttatgtgtccattgcaagccttaacggagagaccagaattttctgctagctgatttagggaactcaccagcttttctgcaattgttttgggacatagcttattctcatccacagtatcattggagact

SEQ ID NO: 42507 - DNA, 1957 bp, Cannabis sativa
  modified_base (45)..(47): a, c, t, g, unknown or other
ttattttgggcccccggaaagtgtgggccctaggcacgggcctannncgcctatgcctagggccggccatgccctcacccttcaacgggtttggtagatacaatgaggtcgggctgcttattaccgcatgtggaaaaattttaatagagaatatctattacgttatggaagaatacaaggaggtctgcccataataccatcaagaaaggcctaaggacatgtgggtctcccctccatcttctttaacaataaaaaggttgacgaacttggaaaagaaagggcttatcaaaaatttgatagcctttcttcatttgatggccagcaagccaatgaccccggggatgatatttgtgtatggtctgccccacatgcacagtatgtagctcttcttcctcttcatccatactttctaatactggataactactataaaattttcccaacacaattttcaccaaagggaatcaaatacttggctgcattgtatgtacttcacatgcagcagaaatggccttctccccatgatgtaaattgattctttggcttgaaatccaacctcaggcaaggtcgttcaagctatttttattttttacaagttgaatgctcttggctatttgacacaacagacaaggatgtctcaaagatttgtgggtacatttaggattactacatcgtccaagggatgaaggccaaccacctttctttccaataggcaaaaacttatgactagcctccgttcatgctgaggttaaggaaaagggctcaagccatcttgcagatgccgagcaaggctcgagatatggttgttcatgaccataaattactcccggatgatatggtgacccaatgatctttaagtttcctttttggcactatcaagatgctcaaggttcttcttttagaacgataatgaaaaatggtttaatgtcggtcggcctatctaatgttacccgatccgaggagctagagttggggaagtaaacttatttgtgatgctagtgttcataacgaatagtggaaattgttcttggggttgtggtgatgagtcgatccggtatggttttctactcagaggcggtgccggtggcgacagcctatgaaccttatgtggtagaggcagtagctttgttgtaagggattattctttgtcatcgattggggtacacaagtatgacgatattttttgattgtcttcacttagtgcaagctactctgagtaaaaaaacacgtttaactgaatttagcgctattattaaggatattagaaatgtctagtcctctttctctagtatttttctttttcattgtaagcggtcctttaatggattagcccacttgcttgctcgtattgctctttcattagatacttctaaagttaagagccccagtcttccccttggtctttaatttttaaattttattttaatcattttgatttgttgcctttgtgcgttttaatggaattattctttttattttaaaaagaatagtataacgttagagaattaagttataaacaaaataaaactataaaaatcggtacttaaataatataagcataaaaaataagtcaaaaatgaaaaaaaaaaataattattaagagtttaatataataaaaatagattatacgtactaaagtgaagttttacctaaggatttcttaatacggaacttaaaaaaagtataactaattataatttagaggttattcttatttataactatttcaaattggggcttattttttttataataaattatatattattcttaaatagagtattcttggataggttctactgatgatgtatttacagttgtcatgagtattcttaaattttaaaaaatatactttttatataaataaactataaaaaactaaaatgaatatcaaagagtttattatttttagtgtaaatacaaaagtgcaaagcataaaaataaaaaaaaaaaaaaa

SEQ ID NO: 42508 - DNA, 4558 bp, Cannabis sativa
ttttccccctgtcccaccaagttgagtacaaagtccagccacaagcttctcgtcagtattgctgcagaaaaatgaagggcaagtgaattaatatatgttttctgaaacagggacaagcagacagctgatctcaggcatggttgaaggtttcttgactgattacctcctcatgttcatcatgataccaactaatggttgggatgatcgtgcaagaactgctccagttcctgaaacaagcaacacataacaatactgattaatctaaaagcaacatatgttagaaaaaagacaatcaagattcattgcataccaggatggcaccaagtaactacaggcaatcgacatcttgcacgaaagctggaagcctgatgcacttcatcatcgctaccattcacaaattaaaatgttagaagcatataataattgtaaacctcatcaataataaatagacattcaagagccaaaaaatagaatgaacagatcttaaaatcttacgaaatgccttttggaacaatcaaagcgaatggataagtctggcagagtgcatagctggagtttacattacttattcgccacagatcattggacaatgtgaaagacccatcttcaatcatgctcattgatgctcgggggaaccctttgccaagaagccgaaaatattcatttaataaccgcacctgagggttagtatttccgaatttggaaggaccacaaactaaagcataaagatcccagatccttgctggcttggtacaccttaataatgcatcaaaaattgcatgtctctgtcacatcccacaataatctaagttagatcagataaagcattcactgtaacatctaaacaattttattctttgactaggcaactcctaccaaaggtatatgtaatggcagtttgatgggtgatgtggattaaaagaaataagatagttttttaagatttggaggatattgtggaatacaattaagcactaagtagcattatggctatagcaatgtttataagggagtgtccctttctgactaaagatcggaaatatcttatgtatactctattttccttgtacgcttttgagtgttctcattcaataccatgttgaattatttttatacactacaatataaatatctgatcttttgttttaacatttaaataataataatgacaataggagcatagaaacatatttttttaaataccattaaaaagaaaaaaaaaactaattgacatagaaaaaagtttgaagttgttgatgaaacataattataagattcaaaatgaaaaataaaataaaagatgaagaagaatgataaagttcacctgctttgttcgaggccgaaatccaaagacaataattctcatgtctttgcctgaaaatatagaaacatcatttactgtcactaccttcatgcttcataaaaaatgtacataacatggttctctattttaaaaaatgattgcagttccaaacaaaaattgtttgacattgtaacataagaacattagtgggaagatctgtatagtcaactagccaaagatgcactattgccatagataaagataggattgactttaccagcattaagagaacagttactgtgttctcatcggtaccagcattttatgtataagaagctatgtttaaattgaaaatatgtgcatctctggcctagaaattatttatggtggaaaaaacaatatttcaattagcttaccaataatctgcagatgtctacgtgacggactcttgtcagattgacgaggagctgcttgtgtctttacaacctaaaatctcataaacaaaacatgaaaaccatgttactttagttccaaaaatgaaatgcaagaaataaataaataaaataagttgcaaaccagctagccacaaatgcaggatgaagagctagatgcacatatcattacaatatttaaaatttaattcatgagaaacattaaagaaaaaagggtttaaaaaaggaataataggaaaataaattcctattaatgaactggaaattaaatgaagtaaacagcattgttcttgttcctatagaagttgcaaataactaaacttgtggatgatgctaagaggtggacagcttaagctaaataactaaagtatctttcaatctagctttccccaacccaaaacctgctaccgattgctaactcaacctaattcagtgtgaaaaacctaacaattgaaactcaatctctattaataacaatcatttgattaaaaaaatgacagcagccaaaacaaaagaaaacagaataaatatgaaaagaggatattaaacagataagaagtgcataaaataaataattagaagaaaaacagagtacgatcattataacttaccaatttgttgaacttctcaattgtcatgagcggtatagtaccaagagcaatgatattcctagttccttcactcttgaaagaaaaacaactcaacataaataaagataaaagaaaaacatgcaccaaaaggaagcactatttattcaatgagaaggacttgatatggccagaaaattattattcctcaaaactagaggtttgagaattcagtcaaactgaagcaggcataagtgcacaccaaacttaaattcaacaaagatattaaggcagaaggaaatgttgaacataccagaaatataagtcgataattggttactaacaatgtccctgcctgatcagtgtttacaagaacaacaccataaccctggagacgaattcaactgttactacttaaacttaaaagtgcataccggaataaagtgatcatagttgatatatcactgaatctatcaccggccccaaagcagaagctaagctacttttacatgtaaaaagaatactatcacaactaccatgcaatgaattcccaagtaattatgtaattaggtaccaaaagatgtagcttttcagtacgtaacttttgatttagcataacttatctctacaaagctagaccacaaaccaaaaagaatttccatttcttccaatttagccgttttagatatatatgaaatcaaccataattattgttacttatgggcttaaaagccaagagtgtaattagaaaaagatatctgtaagcagcctaagaataaaagaagaagtttagcataatatcttactcgtaatgtgtttctaccagctctcaaattcttgtcattgccaacgataatatataattacaaatatttgattttgatacaaaactctataataaaagcaagctccactttcaattcttgctattcaaccacaattatcttcaaatagaaccttgaattgttcattataaaatcaactttcaacctcaaaatacattaaaatattcacatatgatagagtgatcataaaagcaaaaaaaataattcaactacagaactcttaagaatctgctaaaattcatcaagtacctccacaattacttgctcttcctcaagcaaaaactctaaattcgtatgcgaaatggaccgcgaaacaggctgcaataaaatattaaaaaaaataaaacaaaataaacaaaaaccgtaatcaatcaactttcaaccagaatacaaatgcactgaacgagaaatttagaaattccataaattaggaaaccctagaacagaaacaacgaaagaaagaaagaaaacctcaatcttggtccattcgatggcgtcccaactaccagcaccgtccatcttctcggaggaagaatctctaagcggcactgatcgggcggagcgtgacgtcggggcggccatgtacggcgaaccgagtggggagaacctccaactcagttagagagagataggagagagaaagtatggagttgtttttccttttgagcaaagaaatgaggagagagagagagatgtcgtggaatggaatgggaatgtaagcactactgttcttctgccttcccttcaaacgagttttacgcttgccattatgccacctcaccctttcttacttattattattattactaataataataaataataataaactaatcattatctttctttaaaaaaaaatcattatctgaaacttctacttacatttttttaatttcctattctccgcattcgaaaatggtaatgttattttattttatattttctaatctttgtgcactaatctgtaagggtgtaagttaggatttttatttatttatttatttatttagtagatctaatccaatctaataattctaaatttaaaatattaaatgaatttaatctaatctggaaaaaaaaatacttaatttaaaatattaaataaatcataaccaactaaaatacaatattcatggaatcaatttataaacccacgttaagtttgaggtaatgattaaaacaccatcacaatttaagataaaaatacacttacgaaaaaaaaaataagataaaaatataataaataattttttaccaattttttttacattttaaatttttctattctatttttatttttatactcattcttacttctatgtttttattaattctaactcaaatgtgagtttggtctaaaaaatattagat

SEQ ID NO: 42509 - DNA, 5495 bp, Cannabis sativa
  modified_base (5145)..(5146): a, c, t, g, unknown or other
ttcttgctaattagccaaaaaaaaatactataatataatataaacttgcaaatgtctcatattcattaagcttcaaatcaaataatgattggcatgagtgaacagtttgattataggtacttgaaccaggtccactcacacactcacctaatcacttgcaatgtgaccattgcctttttttttcttttgaacatacgtgaccattgcctttaaatggataaaattctccagcaaacaattatgaatagagagaaaatgacctacaataatatagataggcaaagggaaatatggagaactatatagaaacttagcatcacaaataggaggcctgtatacagcaaaaaaaaaaaaccagcatagaaaccaagaaaatgcatgttaataaatatgacttcagctgcttaatttaatatatacgtaaggattagagggatgatttcattagattgataaatgaataaatacaaatacaaatacaatgcaagcaatgacttggaagagaactttcttccataccaataaaacactagatcagtgtaactacatgttcaataatagttatgccacatttgattagaaaatctacaagatcatctcctctgaggaagtgtgacttaaatagatggttacgtcatctaacaacaacaggtttgaagtttgtccatttttaccaatgtactacgttccaaatgaaaaaacatgtttgcctaaaaaatatctagataatttgagcaaaacaaatatcattcattacttcaacctttgctgcaagaaaacctacacaaaaaaaaaaaattgaaattcacattcacaaaatgaaagtacctgtcgaaggatataatcataaccaaaacttgctgtgacatctcgtgacatgtagttgtacatgaagtctgatgctagggaaacctattcaagggagacaatagtgtaagaagccacacaacataagcaatagcaaaatcttacaacagataagtttactcaccttctcagatatcttctgaacatagctcagagcaaccattcctgtgctagcaacctgccctgtggcaacctgcagagtagatgttaactcctgactactaatagttcaatttttaacttatctaagtaacttaactattgcaacatatcatagccaagaaaaaagtataacatgtatttggaagcagaaatgaagaacattttcagtaggaacatttaagggactctgcagaacataaaatatgaaaattacaaggaagttcatttcaatactattaagaaacattttttcttcaggataaattttgtttagaaaatgactgcaaatatgaaaatgatgatcatataaaaattcaagagacaaaccatcttgtctgtgttgaatctagcagcataaccaataccggacttccgatgctgaccagcccaaaatacttcaccacccatagaaaaatgtggggtcacactctgtaaaacaacaacaattttatgttaggaagaaaatggaaggctaaaggaggagagagaggcctgtaataagaccagtgccaagaaacctgaaataatgatttgatgctaacaataaactagagttgttcaactgaaaattggtccataactgccgtaaataggatagataatagtcaacatgtgtattcttccatggcgtgtgcataggttcataaatcctaacttgtggttttaaaggtctgggaaagattaagtacaggtgttgtcggcccaattaccattggaaatgtcagattatgacttatgaaaaaacaggcgttggtttcacaaaatcttgtgaaataacactccaggcagaaattgattttagaaaagttcagagggttgttggaaacagacaggtttaacgttaacttagagatagttttaacaagacaatttatgtacctgaatgtaacttgccccaaataatgctccattccctaactgaaattgtgtcctgaagtcactaccctgcacaagaagttggaatcataatcagggagagaaccataattcatatccaatcaacaaaatagacaaaaagaacttgaatcaagagagatatatgctgaaatggatccaacactaaattttaactagcattttttaagaacccaaagaaccaaagaaaaacctcaagaatgactactataacactaagacactccagagttttgatttcaaattttgttagacattaattccatatgttagtgatatatcctataacttccaactgcaacaagcaaccttaagatttttttataaagaaaagaaatagcagtacattcacatgaaacaaacatttggtggagaaataattgttggtgtctatgacaaaacaatctgttgtccaattagtaaaaaggagacactatcaaaaggtggatgaagtggattgactcatcaagtttcatcttcccaatttcttaaccaaaagtgcttgtggtcagccgagaatgttttgaaatctaaagaagcagaatacaaggcgcacctaaaaaagtttatcttctccccttttacacaaatgacttttttatttaaaaaaaaatgaagaaagaaaaacttctctgtgtgaatacagaatacaaagatagaagatcaaaattttagcaactaacaaagctacaaccgattttaaataagacagggaaacacaaatctaagaactattaatacagaatacttccccaatctctacaaagatctagaaaggaatccctcaaatgatgattctaatataatagaacactaggagaccaaattatactcagggggttgataatagcataaatagaactttggggaaggtaaatggcccgaccactctcaaagtctatgggaaagagagtaaagcaacccaaactcttctatttctatcctaattttggatgatgctaggtataccaaccattatacaaatgtgctaatacaactaatgctattattgacgcagttggtatgatgatattttctatagacatttacccgcaggaaaattgcaaatcacctactccattagtctgtcttaaagattaatgcaatgttggggttccaagcattatttatgtaattttgaagctaataatacaagtaaaatgatacaatcaaataaagcttgaactaagcttttccctttgtaattccaaataccataataaatgaaataaacaattgattagtaatacctaagaagttctgcacaagcatatatgaaaaatcaactatagatatataatatatatagaatcaacgacgccatcaatttgaaagaatatattcttaaactaccgtcatgatgacaatggcagaatgcttagcctgcttgttcttgatttaactgcatttacttactttaaagacgcacagcatgtgcatttgcacaatcaccaatacaatttctttcatatgtagactataacctttttgcaatgagattgaacacacagaaaaagacacccactcataagagaaaaattataaggacaaagattgttccaaaatgccagcatctaaccttgtaatcaaaattgagcataccatgcgacatatggggttcattcgtaagctgagaaaaaaggaagctggccaattagctaaaagatgaaaattgttactcccagaaatgcactattattatttataatagtacctgagcattagccttcaaaatgagattgtcagtcaaatcacatttcactcttgcatttagcctcccatcagttagtattcttccaaaaagcatcaactgcattacaccaatccataataaaaatttaggatgaactcttttatgaaaatatcaaaatccaaaaagacatttaagtaaagggtaagtcacctttgggtctataaagttggctccaaactcgtagtgagcagtagggattttgatagtttccgccgactgggaaggaacctcagtgggacccatgaacacactagttttgggatgacaaaatacagttaataatggcattaactagctaaatagattctaaaaaatcatgtataggtgcagtggagagcctgatacgacctgtgactgagtgagaacttctgattgagccctttggtaaaatcaaagcgcatcccctcaaaaagttctggctttaacgacactattgacacccaaacgcgcaaaattagtataacatactcaccactctctcagttgtctaccactatcagatggaaaagaaaaaacgctaacaaaaacaataacaattaataacatcagaaaaccagtagttataccctttgattctatgctatcctaattccgccagagggaaaaacaataacagctgataacattagaaaattagtaattccctttggttctaactcccaattccacctacaatacaagctctccgggagaaggaaaaaagaaagatcacacatttctaatgcttgtaaagtaaatattttgtcatacgtttaacaatcgctcaaaatacccagtactcggaaaaacaacagatacccagaaaaaagtacaaattagaatcaaagtagaaaacactcaaatcgatcgttttatttatacccaaaaaaacaaaaaacacttactgagagcttcacgatggatctcttcatagggaatggggcatggaagattgaagtaatcgaccttctcatctgctttggtcttctctggaatggcaggctcgggtagaattgcagtagcggtggttggaggagcaagggccgccattgttttggtagttgctcagttgtcgcttcttctattgaataacaacaataataagagttgaaaaagaagaaaaaataataaaacacacagtggttctgtgaatatgaaaatggagagagaaaaaaaatgttaggctatctctctctaaaccccaaatcaatcaaattacagagagagctaacctctaaaaccctagagaaacgattttgggttgacggaaggaaaactcaagtgtggagctcagttggtctctgattggggagtcttagccgtgagccacttaaggcccactttctcttactctaacaaagtccagcccaatatattcacatctccaataggtgtgccattttgtaaaaaaaaggggataatttcaaaaaaataataaaagtataattttacaaaattttaaatatttnnatgattttatttataaaaaatatagtctgtatttttatataatactcttattaattttttgttatttgtatattatttttttttcttcttaatagatggtttattaacattcatttagcattaataagttactttaatacacttcttttaataacaatattactactatgttttttaaaagtatatatttaatttattcattttcattaatgataattactttttatcaccatttacatcttaatatgtttttatgtgttgacaacaagaactcatccactaaattatggctacaaaattaatttagaaattaaagtttaaatgataaactttaataaaaattaaaaaa

SEQ ID NO: 42510 - DNA, 1104 bp, Cannabis sativa
gttattaatgtatatatgcacatatgtttattgagaaaaattgtcttagttccccttcaaaaactaaataaacaaaatagaataaaaaaacccgcacatttcgtagtggtcgcagtcgcagtcgcacgcattgacttaatgttagtccatcaaaactttgccaaattgttatagtacataactggttaataagctatgtatagttatgtagactactactaattgattctctccggccaatcaagttgattttagagcaacctcctatttaattctaatatcttgaatattcgataacatttgtacataagttctttaatttctcaaacaattatcttttttgtttttttttttttaataatagagaagggaggatttagaattagacctctagtagaagtatatatggtattagaagcgtcaaacacaaaagaataacaaatatatataggtgacatagagggtgtaatatatacaaaagggaatatattaattgaatatagataatttataacaaatatgagaaaaattatttatccactcctcgcttgtaattttatttttagatttttaattaaaaagcatattcacttaatctttcaaataattaattgtaaaaaaattatattgtataaatcatgaaaagatagtacctacaaatatttttaaacaatattttatataaaaaaagttaattaaagtaattatttttttactgaattaaaaaaattagttttgtttgaatttaaagggaaacaatattcaggattttataaaaaaaaaaaaagggggaaacaatattctatttcatatttttgctttgaataatgaaattattattattattattttgaaatgaatgaaattattattcatatattagataaagttgaactagttaaattaaaccagttttgtaattaatcagcagttaattacgtggtgatctggtgtgctctatattcataatttttagtagcagtgtccgaaaagtactgtactgcccacaaatgtataattaattcaagaaaaatgctaaaagagtgtctgtttagtattattcttttgcacaattacataaattgtcatttctttttttttttt

SEQ ID NO: 42511 - DNA, 4317 bp, Cannabis sativa
tatcacaatgccaatatatgtaacaacaatgtatgatttgggtgttcttgtgtgaaagttaaaatcccatgatccatagaaaaaagatcgggtaaggtgcacattgtttagaaaaaggcaagtgtgatgattctaagtcaacaagatacgtgttcttttcggtagtccatcacttaagaactctaaagttaagcatgtttgacttgaaatagtctcataatgggtggatacccaaaagagctataagtccgtaggtgttacatcgtgaatccattactcataaaataacatcatttaaaatgaaccaatagaaatagagagatttaaataaataaatatctcaattgggagaattgagtgtagactacattgaacaaaaagtagtagaataatcagatttaagagagtgcatatactaaaaaaaaaataatgatgaaagagcagcaaccatggttgaagaccgaaagataatatatcaagatttactttttcttaattgtaatactcgttgaagtcactgatctgtttcttgattacatagtaatgatggactaacgagaatcattgacaagttggtttattgaggtgaccagcttagtaagaaaccagattatttaaaccaaaattgacttaggtaccggtaaaattgggcagcctgagccacgtggcactaccacatgagtgtttgaagacttacaaaggttgctgctcaacagccttttgcaaccttccaaccacttcgcatagtgccatgtgaatcgtcctgtccaattctatactgataaatagcatgagcattactctatttcaacacttgctagtcaggctcaaaattcatgacccctttggtaggatgagatgagttattcaaaattcaacaatgatgtataagaaaactaaaaaaaaaaacttgaaattatttcagttatagaggtccacaagtgatgtgatgcaaaacacattgttttagatagtcacctaccaacattgtatttcttcactaaattcacatttgcaatctctaatgttgaatttctaaagctaaacaaaaaaggaatgcacattacaaagttacaaacattaccaaagcctcattaggcactgtatttataataatagcaaacaagattaatttctttacctcaggaccccacccttcagattgtttattgtattttacagctaagactaaatgaaaatcagctaaaatggagaccagaccatttacatacacagggccttgagaacttacctcaagatgaaaagtctctaaccatttgcatgcttctcccatattctctctcaccccctattaatcattctcttgcttcccaaaaataagtggaaattcatcatcatgttcggagagaccgcgttctttattcatattcttcaatgattggtaaacctggtacatagaccacctttctttgggccgggcaacaacagaattacaagcaatcttcaaaaactgcatgatttcctcttcatacccttttccaaggagagtcttatcaatgacatcctttgatctaccagaactagtcagctggtttacccaatccactagtttacccttaaaactttcatcaccagtgttaacctcaagaggtttttgccctgtaaccagttgtagaagtacaaccccaaaaccataagcatctcctttcaatgaagcaaccatagtacttgggtattctggagccacataaccaagctcacccaagtctccattaacaaaactactttcatgagcatcagaagtcattagccttgccaatccaaaatccattatcctagaatcaaaatcctcatcaattaaaatcacattagagcatatgttctggtggatgattggagggtggcaaccatggtgaagccaagcaagacccctagcagctcccaaggcaatcctaaatctagttggccaatccaatgaactcccatatccatgcaacaaagaatgaagtgtaccatttgacaagtgcttataaaccagaagcttttcttcctcaaccacacaaaaccccaaaaggggtgtcaagtttggatgccttatctgtcctaatcgattcatctccaacctaaactgcttctcaccaagtttacaagtattaagcctcttgacagccaaagctgacccatcaggaagtacagccttaaaagttgtccctgttctagtcgaaataatcacattatcttgactgaaattgtttgtagcagccattaaatcagccaacttaaccttaacaagtggtttttgaaacaaagaaacttgagtaagcctatgagcccttaacctctcagcccaatcatcatctcttccaataccatgaccatgtttcctcctcttactcaatctcaaatgataccaccaccaaaccccaaaagccaacaacaaagaagctgcagcaccaaaaaccccagcagctatgattatagcaagactcttcttactcaacccaccacacttccctaaaggctcaccacaaagcccactattcccactaaaatcctcctcaaaaaaatgattaagagacgtaggaatagtacccgtgagttgattattggccacagaaaacttcttaagcctacccaaagtagcaatttcataaggtatagtaccagaaagtcgattatccgaaagaacaagctcattaaggtaagaacactttcccaactcaggtgggatagaccccgaaaaagcattaccagacagatctaaagtagtaatgaaaggaacccaatcacagatctgtgaaggaatcgtaccagagaattcatttccacctagatccagcttctgaaggctaccacagtactccaacgcttgaggtatcttaccagaaagcttcatatccctaagttcaagattcaacacacgattctcccgatcattccagcatgtaactccgatgaacttgcacataactcccacagatgtgttcttaaaatcccatgaagatagcttcccctgagggtctaccaacgattgcctgatcccctgtaaacacctcacatcatcttctgcaactctggaataatacccagaaaaactcaacacaaaaaccacaacccatataagattaagaagagcttctgatcctttcatggcgaaaatagaaactccccctcaatttttattttctttgggtcgtttaaaaatttaaagtttgggtcttttgtttttgtttgggtagtaaagaaggatcaaagaaagaaagtgtcttctactttgggcgtagcagtaccattaccatggttgaagatggggtttgaagatggtggtgggagagggttgaacagaatagcccccattgactttggattattgagagaaattaccagacaatattattaatattaatattatcttttagggattttgtttgtgatttaattaaatgtttttctaaaaagtatttttggtttaattaataactttagactgtttggttgaacagattgtatcattgtatgagactggaaaaaaaaattaaggttcttttaataattttaagcttagtttttttaagcttcaaggattataaaaagttcatatgagaatgataagataaaaaataaaaaaaatatttttttaatacgagtaatttgaggtataaatattcaagtttaactctagttgcattgtaaataaatattatagattagggggggcaaaaaaatttctactttaaattaggatataaacaaaaaatattaattttgtaggataaaatattatagattttattaaaataaaaataaatatatgtgaggatataaattaaaaatatacattttataaaaataaatataaaaaatatgtgagaataaaaataaaaatgattaatttacaggaacaaaaatacaaaaaattgattttataagggtaaaattaaaattattaatttttggtttatgtataaaactgcaattttttcattatagttattatgtgttttttgtgtaggattagtctttagctttataactcattattaaactttttattttttttgataaaacttattattttaatttaattagatggagaaagaaaaaaatattggtattaaaggtgatgtagcggtaccacgaggtaaagtaatatgaaattccgagagtgtaaattttttctgagaattctgtattaaagaggttgatgatgggcatcgtcctactacttatttagataaaattagatatcaaaacttgattacaaatttaaaaaaaagcaactgaaagagattacactagagcccagctaaaaaataaatgggatggattgaaaaatgaatggaagctttggaagca

SEQ ID NO: 42512 - DNA, 2719 bp, Cannabis sativa
tcaatttccaccagtcccggtacttaaattatgctctttgaaccttttttttccgctaaaatttctctctgaactattaagattgttagatataagtatatttgtctaatttcatttaattttactaattttgaattgtctatgtactaaattatactctttatactttaatattttttaaatcatgtctttcgaactttaacatgtatcaaattaagtctcttgaactttcatccatattagactttctttattaaaattaaaaaaaattctttaaatctaccaattattaaagttcagagcaaaaatcataattcagcctatatattatatactccacacacagtccaaaaaacttaccttgatcttcattgaattttttttttttgtggcagataagaagcaagctcagtggaataatgccaagcatcaaaccaacagtaaggaccactttttttttttttttttcttttttggattgagaagctaacatccaaagatataactcaataagaatttgaatgagtatctatgcatatggggagagtaacatgtttgttgtatttttttgttgaaatattaggccctgagattttatgggagctttaatgtgacagtcacggggataacaatccagaacagtcctcaatgccatctcaagtttgacaactgcgttggggttttggtccatgacatgagtgtgtcatctcccggtgacagtgccaatactgatggaatacacctacaaaactccaaagatgtgttaatccacaccaccactcttgcctgtggtaattaatacaaactctaatcacttttttctttttactacattggttatagttttatagtatatctggtttttacatgagtatagctgagatgagatcccagaaatacaaggcacaagcttatccctttacctgtatatacacctctgaccaatgtaaacttgacatgtggcgccaaacaaaccgccgcatcctaaccattttaaccactggttgtatggtccattttaaaccttatacatactacttttagtggaccacgagatagcaaaaaagattaggctttgaaccccacaagagcttctttaattcctcatctgtcttcatttggaactagaactttgtccacttttgcactgttattactgtataggatcacataaaacaggtgaagatttttagcctcaagaaccttttccttttcccttttattaaaaaaaaacatatgataagataaggtaactaatatgaaggtagcaaaatagaatgacattgatgatgaaaaactttctaatattgtgtaggagacgactgtatttcgattcaaactggatgttcaaatgtatacgtacacaatgtgaactgtggacctggtcatggaatcagcattggaagtctaggcaggtataacaccaaagcttgtgtctctaacatcactgtccgagatgtaatgatgcacaacacaatgaatggtgttagaatcaagacttggcaggtatataaatctttgatttaagcatagtgtgatatgaccatttatcctagaaaagagttaaaactcattcattgttgtatttgcagggtggtttagggtctgtccaaggagttctgttttcaaacattcaagtttctgaagttcaacttccaattgtgattgaccaattttattgtgacaaaagtagttgtaagaaccagacatcagctgtggctgtatcaggaataacatatgagagaataagagggacttacacagtaaaacctgtacactttgcttgcagtgataacctaccatgcacagatgtgacactaaattccatacagcttaaaccaatacaagaacgatatcacatgtctgatgccttctgttggcagacttttggagagttgaggactcctactgtcccgccaatcggttgtttacagatgggaaagccttcaagcaaccgacttcaatctgaccacgattcatgttgagaaactatacaaattaagcatcatctgaactgaatgaaatggtgtattctcttgtgtggtcggcatgattttcctgacccctttcaacaccaaaaccgggttagaatttttaagcgtgtatagtttgtcaggcaatcctagtttgtagggagtttacttacttattattagttggggtactacattgccattatgagagagcatacagaatttgcttttttagctggataagttatagtagttataagtataaggggccattgtttattgttatggcagattgctttgagtgacatatattattatacgagtgagttgcatctaagtttgaaataaaaggtttcatatctacacttactggtgcttaatgtatgtttcaattatgtttatgagaaactaatgaaaaacaattccaagcagaagaagtaatatcagattaaaccaactactttcctagcaatgttaagaaaccaagaactcataaataagaaacttttaaaagacagctagaacactttcaatctaagatcacaaactcaaaaacaaggtttatgtggttcgaccataaagataatctcattttcaacatagaaacaagtcatatacataagaatatcaaatttcaacaaattctatgagtaggtcataggcttaaaatgtgtcatagcagttactctttcatatttcaaaagtcagttacaagagttctgtttcaaaatggggaattcttggag

SEQ ID NO: 42513 - DNA, 14269 bp, Cannabis sativa
  modified_base (10822)..(10827): a, c, t, g, unknown or other
tcgatctggtttcattctggttgcgtagcagactggatcgatggaggtttcttcatcgtctctgttcgtgacgtgcggctgaaggtatagaccaggtagtatttttataatattttcaatgtgggctgtataaatgttgattgggccagcccacattaatattgtaatattttaccctttccagaattttcctgttcttttccctaataacaatcctcaaacttatttattaaatatatatgcaaaaaattcattatccattggagaaaactttaatatgaataattgctctcatttttttttaatacaactagctaaaatattctaagtgtatttagaaatgattaataggcaatctttagctagtcattcaaaacaaaacatttgaaaaatccactaagcttcaaattaatttagtaaacgacacaagtaatcgaaagctttcccttttttcatttaattaaactgtggactgatgcaataaacatgacttaaaaattagcaaaaaggaaaaaatgtgacttctacaaaataaagagaacaaaaaactacttatttcttctatctttaaaatacgggggaaattctacaaaatgggtcaatatacttactgaaaggaagagaaaggaggaaacttttataaagagaaaaggagacaaaaaatatgtaaactactcctcaaactttctctgtataaaatataacattttagacagattaagacaattatagtacacttgccaccatgggatggcatcttcacagattactaccagaccataaaatcaaagaatcaccaaattgggctaccaggcagatttgcatcagtgctacacaatttcgccgatagagcaaggcatggttagccgttgtcgaaagaggaaggacagcttcagttcatattacttcacttgttttcgttttttcctctctagggataatcttctttgtgtcaactaagatgataatgatgataaccaggaaaggagaatatttcccaaacaaagcaaacgtaaaaactctgttgagtgatgcagagtgtgatgtcgtcgtcatccccttccaaccaactgtataatcttcattcccactgtttctgcagactgcccggtttccagcagttagcaaggcagtagaaaactattgtcatttgtcaaatctttccccacgttctgaagggtttctcagaaacactaatatttacaataacaaattcgtttggttatccagtattgcttgtaagctcggctgctctctgtctcatcatctccatcacagcagcccttcttcgggagtctgactgctgctgcagcctcctcaaatgttccttcaagtctctgaataaaataaaattatagtttttaaacttttgacaattaataaagactaaaaacaaatacgaaagagaagagtgaagcaaaagcaatatctttttagtaagaaaccaaatcccacttccatatgggagagaaagacttttgattattaaaaaaaaataagagcttaagtcatgtacctgcagcgtggtacgtggcactcagattctttacaagctcgggcatgaagttggaggagataccacattctcttacagaggacacagcctccagaagcacgtgttttgcattgtatcccatgacggaaaagtcccttcaccttccgacaattggggtactgacattgtgcagagcgacattgagaggcgtgcactagaagatcgagcatttttcttagctgcaaaatataaacatcaatatgtcaaattttgagttaaaaaatataaaaaggaaaaccagaaccagagtaaactaaggatatcaactttgcggagggcacaaaaaatattcacaggaagaagcaaatattacagaaacaactttcagcattagtaatacaatctcgtgtactccaatcataattagattagtgcagagaaaaactcagaaacagaagttcttaattgaaataaggtgagtacctgctgaacacgtaattgcctagcctcttgattctgtgcatcacgatcagccatggatggatgatttgtcaacttatggggatgctgactatttccatccttctgataacaagcattgcatatatcatagtcagcacatacttcacaacgccatccttggcccgtttcaatgtcaagatggcatatattgcaagttatgacaaatgcaggagcagttgggttgtgaagatggtaaaggaccatcattgatgaatgtttagcccgtcgaagggtatcatattgataatggttcccttggcaaagactcaaaaatgcttgtctagtgtcaaagaattcgctctcgagaatctcatctctgtcttttgtatcaacgggaacctcagtaatttccacctgccggaatatgtcatttgaatcgttataaataaatattcatggtgacaactttaatagataaacaaacaatcaaaaacggggggaacaaaaaatagtctgtgtcataccgggcgaagtgcatgtttttccctatgattagtagggtgcctttctctttcttcacgtttctgctctacttcataacacctagcaataataaaagcatcacaatgaaaaacatgaaataagattaaataaaagaatagcatttatatactacattgcatcagacccgtctataatacttgataccgacataacgaaacaaatcagcacacacagaacgacataaagatagagaaaaaataaaatgtaaaagctacactatatcaataaatgcaaacggacctttaataaacttggaaaaatgaagtttcaaaacaaaagaccaaactactgaatgtactttgtcatgaaataataaaaagcaatagactgaaacgggaagcagaggagtctttgtcaagaaaacaaatataatgaacaccccctacaaaattatgaagggccttacttgtcacatatctgaaaatttttgcactggtcacaagtccatcgatttccggataccattagagtacagcaatgactgcacgcatgttgcagatgaaccattataaaatcctccttcattgggcatatcgtttcaccaagctgaagaatagtatttagattagtaagagaatatctcagtatgccttgcacaaagtgcataaaaacattagggctgagggtgacataacattaaaaaaaaaacagatactattgtacacaacctaacaccaataacaacaacagaaacgagtcagctaaaaggtgaagattgagaaattactttatgcatcagtagcagatccttagagaggtcagactgagctttcaacgcccttttattgaaaggctttttcgccgttcctttcttattctgctttctcccatcctcttcttgacagagctgataaattagatcctctgcagccccaggccagtagtcaccatcaaaatatggcagcctggctgcagtaaccttggccttgctctcaccagtagatacaaagaaatgatcatacaggttagtgagatcaacaacaatgttctcctttgacgcttttctaagcattgctagatacctgcaattaaaagacattaacgtatgtaaaagactatcatgctatctgtaatagtatggagtttctagatggttcaagatcactctttactaatccaacaaaaaaaatagtaaaactggaattttgttaacaaatgatacaaaagttctatagctcaccactcccggagcttgtcagattttggtgttttctgaatctcagggtgacaatataatatatagtcttctcccttcaatggagggcatgcccatatataacagcttgtaaaaccccgttttttgcaatattcaagatatccgatctgcaaacatgatcatgtatgaaagtcaccaactcattcaaatattacacaagtcattaccgagatatatcatacacggagatatatagtacccagaaaatttaccaaaatttcatgataaacaaatgtacggagagcctctccagttactgccttaatctcaggcctaaaatactttacagaatccagatatgaaagataaacacggcgctggtttgggaactggctttcagacccaaattcttgaacatacatgccaaataggcatacttctacaccttcaatcttctgaaataacaaaaccacctagagtggacaagtgtaaatagattagaactccagtactgaataattagatagatcatctatcaaaagaagtaagatggaatatccagccacaaaccttagatttataagggaactcagttggataattctcttcctgaaaaatttcaagaaatcgctgcttcacttctaactttttgtcaactgaggaaacaactctaattacaagtgattctgctccgggaacctaatggcagaaacaaaattaaaaaattataatcaaatcatgtttaaaaacaaaactgctacaattaagtactcattctccctatcttgagagtaatccactgatcaaaataaaacattagcgattaaattcatacatctggttatccaaagttaattattatgttgagaaatggcacatcgaccaaatataaaacccgaaaatatcatttggaaaataaaaaaaatattgatatataaaaacattcaaacaaatcctatgtttgctttgtaaagaagaaacccaaaaacagctccaacaatgaatcttgagccgctagattagaatatattaaagcccaaagggacatttggtaatcataattattatatccacctatattaaccacccatgtcctcaaagtgcagtaacattatcagcatggatagcatgtaacccaattttatatccactcatttcaatttataaacaggttcaataaataatgttaacaaagaacatcaagtatcttcaccacatccccaattagaaataaaaggaagataataaagtacctggtcatagctttttccttgttgttttgccctttctatcctttcatgtttcagcctcttaaacagtcgttgctcaatgtgatcgctgagaatagttcttggcaaatctttagccccaagaacagcactctgtggcaaaggcttacgctctcctctttcaacctcttgtatataacaattaggacaagtgtactcagcttgcccaccatcatttcttcgaccgttaaataaagcacaaatttggtgctgccaagcttcacatttgtcacattggacccactgcaaatacaggcattgagttgaaatgacccacaaaaaaaaaaatgtccaaggaaacatatttgtatacaccacagaaaaatacatacccattcttctgtctcctcatcgtttttcttcttctctagccttgccttaggaatggatgtcccatcaacaactatagtttctccacgtgcctcgttgtagcatggtatgcagaaataatggcgtgtatcaccagcacccatacaataatacatagcatttctttttattcgagcaccacatggagtacagtatattggaggaggttcaaaagtaagcttctcaactgcacacaattgacaggagttctcactcattgcatgctccatagcttgattcttctcagcctttgctttactctgatatagtaaaggaagaaatgacttactaatccaaaacaaatctttaatagaggatgtaagtagatgactaagttgattgtagaaaacaatttcttactacgtgctagaatgcagctgtttttggttgacaactacttaggtttatgaaataacaacaaataactagcgtgtttctgggcctaatttaagaaaatgaataaaaaatatattttagcaaagacttgaaatgctgaaattgttgtcagccttcatctacaaaaaaatttaaaatcattcctcaactattttatttttttattttttagtttgaaaagcagtagtccaatgtcctggttctgctatttccttctgctctacgttagagaaaattgaaaaatgtatcctaaacaagaacaggtgattctacaaaataaagacacgagaaagttcaaaatgtgtaaggaaaaataaatatatataaaatatatgtgtatatacatacctggccaacccactgccttagaccagtaatgtgctgtctaacttgctctggagtaaacaattcagtcaatgaaactcccttgatctttggcttcccagattttgttacagttggttctacaggctgaggaacactctcttgcttagctggttcaatctctttctcatatttaacactttcttgtttagctaaaccagtagaatcatcatatgtgacaggttcggtaggacctaggttgttgttatcaattataatatccttctttacctcatcaaagatctcttgcccagagctaggaggaagttccgacttcacttctgccaactcagattttattggctcaatgtcaccttgttttaactcttggtgctgtataccatgtgacaatggtacttcatcaatcaaagaaactgaaacagcagcattgtgactctcagaaacaagaggctgtaatgactgctctatcttcattcgtttcatagaaggttgtatttcttctgatgcttcaactataggagtcgttggtatcaatttccccggggtgtctttgttatcaaagggtttggaaggtccactaactgaagttggcaaagcagaattagatgtcacacggaggcgtgccttggatgccaaaaagtagtttttcacaggaatacacacaggacagcttgggtccacacagcgcttgtgatgatgaagcaacaccttggtaggttggcatttaggatacggacactgatgtagcatgcatttctcaatgtgtttccacaatttttgaacagtgatacaattaagttcttgacattttccttcaggagctgaacatcgacgtgcatgacgcaagaacaaaagccatttctgttgattaaaatactgtcgctcggaatttgtattggtagatttgcgtacagtagtggccgaatatgagagatctccagtacctttagaagcaacagcctggccaatgatagctccttctgatgataaattattgcgttgagcttcatcctgccctgaaatcctctggcggaaatcttcttgcaaatgatgttcatgcgctatgttaccctgtctattactcctgtcttgtgattgaggatgccactgaccctgcagtactgattccggttgggttccagccgcaacatagcctaaatcattttgagattctgcaaccaactcaggtggatgtaaagtttgttgcatttgctgagaattttgcggcaatgatgaggtgatatcttgctgtccagacagaagagaaatatgatgttgagaattcctcatatggtcatcggcagagttctggaattggttctgcatctcagacaactggaactgttcaggtatttgtggcatcagaacttcattatggagttctgcaggctcacgcttcacttgactacttaggtcagatgtcatctgagggtgaccaaaagcgtcattattaataaaatgctgggcttgctgattttgctgcttcatttgacgttgttggtgcacaaactgttgatgttgttgatacgattgctgttgctgaaattgttgctgctggtgaggatgaagattgtctcttgaagatactgaggattggaaactcatattttccatttgatccattggttgagactttataagagcagcttgttgtgcttgcatatttgactgattacctatgagagtagagtttgttttagataaaggtgacaaattaactgaattcaaattctgggaattcatcattggtccaacagatgttgcagaaccataatagttgccagacgcaaaagaatcaacattgctaattccataaccatcacctgataaataaatcattcataatgagaatgcttgctgatgtcattatagaaagaaaattctactattggacaaaatatatattgaagatttaccattacaaaataaagaaatgtgcaaatcatgcataaggtttgtccacatacagcttgacgaagaaagggagaggcagagatcaaataccttgtataatttgacgctgatgttgcaagggcttgggtgagttgccaaaagatgtgccagtcagatagccttctgaggtgcaatgttcattaccaagtggtagactgttaccaatcaaccctagcccaccatttagagccccatttgagaacccataagaaggtttctgctgtaaggaccttatcccaccagccatttggctactaacattgtgcaatatccggctgttttgaccaataatatgctgtttttgctgttgtggttgagacaccataggagattcaacagtagaaaacccaccaccattacttgctgattcaggattcatgtatgactgattattattgccacttaatcccggagtaggaatcatttgacttgtgagtttttgcccgttcattgataacatacttgctgctccaggaccaacagagaaagtggctggagactgctgatgatacccattagataccgaacctgcaaaaccatattcaatcaagttgctccaaagcaagaggtaagcataactcaaaaacataataaaactcgatattaccatcagatctattgaaagcagttccagcaaaagtaccagtagacaaaatgtttccagtgttgacattattagaagctatattaccacctccacttgcagaaagcattgaagtgtccccagaggaggtaaccatcatgttagagtttccgccgtgtgacataccaggagttggtatcattgcaccaatagaagacgaattatttacgtgttgtgtctgttggttaggtggacgccggagtaaactatgcaaacggttctccaatgtttccaggttcatatattcttcctaaaatgataattgcaaaatcaggggagaataaaagataataatagtaattgaacgaactatgaatgcaagaaatactcaacagcagaataggaaaagatgcatcttactaaattgtctggatagtaatatgcatacaaaacatcaacttatgacaaacaggctaacctttgaagtagccattctaaatacaccctcctctaggcgcttaacaatatctttaaacttctttttctgtggttcattaattggctgttgatgccgctgcaatagggtatcataactggatagagaaaactcattagatgattgggcccaaaagtaataaactgataatagcagaacactgtctcaatcaaactaatttccacaaatatcttaatacatactatgtctttaagtccaataataactattttcttccatataatcatagataattaatttaagccattttgagtatgctcgttgaaaaagccactaaactgatgaagacccctactacattgggatagtcaaagctgccccaaacatggcccaagttaatccatatttaaatttttcgggattttactaaacactttttttcctacacactttttacttattaatctgttacattgacaatgaaacataatcaacaattggaaaattgagccttacatcttttcctgcatatacatacgagctcgtacaacatcaggctccatattgctcccagtacgaggaggagctgttaatgtttgcatctgagaaggatgggggttcccgttctgctgaggcattacaggctgattaggtacctgcccagagatttgtccagacatgtgagcttgcacattcatcttctttattcttcactacagttcccctaagtaccaagtatcgcattactcaaaaacacaagggaatttccaaatgaaccacctacaacaaaagcttttatcaacaatgtatgtaacccaggctacacaaactaaattgcctcagtgctctacagagccaatccaaatacataatattcttactaatacttcaatatgatcaaactaaaaaagctactaactgtcccacttcaatattctctagttaatatccctacgagagaataataaattcacaaccgagaatgtaacaattgttatacttcaaagaatggaaataaaaacagtcaaacgcctatatgtcaaagaaaaaatcaaaatgcttcatagactcgaaaataactaaactttacaccaatttcaacttaaaaaaatgcagcaaatactaaattgaagtgcccaaattgaaggcggcaaaagtagatcgttaatgctctaacccccaatttgaggataggtagtatgaataataattaagcgattagaacaattaagaaacgcgattggataaacctaacgaaaagaaaaaagagtcaacagctacaaaaatcaaaatcagattacaaaattaaaaaagaaaaaaaaaaaaaccctaggcacctaagtcatacctttcagaaaaacatcgtaagcccaaattgacagagggcttttaaaggaaacacaaagtatcgacaaagttgagaaacacgacggcgatcggagattcagagcaacccctatagaatttagagtgagaaagtgaataagagagagaaagagagcaagaaagggaaaaaattaaggtcggtcgagagttgatagtattgagtcgtatagaagatcgaatttatggaaaacacacgtgcgaaaatagacacgagcgaaacgaagcaaagagaaagcaatcaacagaaaagcacaggagtttcgcagaagagaagaacataaaattgcagacacacacagatttggggccaaaaaaaactccaagattcaatttgctaacacggaattataataataattattattannnnnnttattattattatttattttaatggaagattaaaattatcttatttatttgtcaattttcaagtgaaaatataatatcattatttttatctttttttttttcttttttttgagagaggattattaattcatttttattttatcttttaaaaatccaaaaataactcataaatataaaaattgctttattttaccattcttcaactttttcaccacttaaaatttaaaaagcaatgtcaaaaattataaagctaaaatgttcattgattaaattaatttaaattaaattatttttatcttgttttttttttttttacaaataggatgttttatttaaaaatatagaaaaggaagataaagagtaaagggagggaaggaatgaaaggtttgggagtacagagtcatccacacaccattgcctcttcgcttactcctcttatccaaccaaattatggtaaaaatatacactacatagtacatacatatataaacattcaacaatttcatttttctaaatgttcatatatagtgcacccacaaaaagtatatcagcatacttattttgtatttttaacacaaatcattataatcaactatgtaattatttattatatataagaaaaaaaaataagaaactaaaattataataaaagttcaatgaggtacacaattttaaaagttacacttttagaatattctaatattttttttttttttggggttcatgttatagcttattatttttatgtttgctccatttccaatgtcaccataccaataaatacacatggtaaatatatagatgaaaaaacattagatcattctcctaaatccaatacactatttacttcttcaacttttaaaaagaaaaataagcatgaatttaaaactaattaaattttgcggtcattataaataatatttttttgaatgcctgttgactaaattaattatgtcaagataaaagaaatttttacgtggttagaacgttaattaatttaaatctacgagtcacttgtattaatatttttaaaataattattctaatataattttttgtaataatcattgtggaattctttttcacccaccccccttctcctttggaaatgggaaagtgtcttggtggttctggtacattcttccttgctagttaggatctatgcaatcatcccatgagcttaggaaatggcatgtggtcatgagtgtatcaggtaggatttgaaataggtatttagtgagataaaactagatgtgttcacgattgacgggatagcactgaggcaagtcgtcaataagcgttcatgggagacgtgatgtcagaacattatgggcaaaatcttaaagatatcttctttatatacataaaccctttttgtcgtccatatgaaaagagtcagcaacaatgccttatctctgggaggttctcgcccctcccggaggctagagtagttgacatttggaaactcctctagtactacgccttgctccaggatgccaatacaccatcctaaaccttacatgatttagactttaatattaactcttagttctccttcaataggggtccactagacatgtgactaactcttgaacgaccatgtattttggtaaaaatagtggaaacatttactccttaagttccagattgcatttttattaagttgggacttaccactggttaacctttcggttccctcctggaggggttgtattatgatgtcacgactatatagagcgtgcatgtttacacaagcacaccatgtgttgttcaatgtgcagctcgtatgcctacatgctttttctttccaattctaatgaagttgattcattttctgaaaccaaattccgagatgtgcaataaatgcagagtgatagtcggatactcgagtactcgaaacgtctcttcataaatgtgtttctttatgtctatctttagttgttagatcaaaatgtgttaactaggattttaaggggactgctggatcataagtgacatggatcgagggctgaaggcttataaatactgttagccttctcctttctcacatttaccttatttgtcgtttctttagagttcaagttggaaaattcctcaagttcactggattttgttctgctctttctctaacgttatcaggcacgatcctactaacactgcttcatcgtgcccttgtcgttgcttcgaccccaaatttgaaagtgttattaacattactcagttttatttgtaaccaacccctcttatattttttggaaaaaccattaatttcaagaatgtaaagtaaagagtagtagatttttgaacgcttcttgacttggagattttgattcaagcacatggtcattccattttgtttacctagaaactgaccctggtgacatggacatctatgtttgtcacgtggtaagaaagaaaattgttagagtttatgccctaaaagcaagtatttgttagataatatattagaaaatatataaaatacaagtataagataaatgaatatgttagttataaaagtataattaataaatatctaaaaatttcatattcatatagagtaggtatgatcctgcaaggaagtacaagaaaattaagatcatagaatatgaatgaaactaattgttagtgtatgaaagtatgaaattaccaagtacggtttactaagcactatactttagtgtgtgtgattttatttagatcacatatataacgtcctacttaaaggaacgacatgtttcgttattacattgtattaatcttgttaatcggaccgattaagccaagtgaataaacataaaatcacttatgtatcaaaacaacttgtaatagtaataataatttttaacttaaagcaaaacaatataattacatatttgggatcccataaattttttttcaaaatattacaagtggtttacatataagccgacttaagcagcaaaatgagatttatatacaatatctcatataggacgcaacccttgtggtctaccttggtcggaacatgtacaatccatcatcaaatcctcgaactcatggttgacccgacactgttttacctttgctgcacattagagtacccatgagctaaggcccaacaaagacaacaataacaaaataatatcaatttataacatacatattacatacaatacatccctgcttaaataattgtgccaccgtactgtataatatgttatctcatatataatgatgtcaccgcatcttatgtctatattatatagacgccacgtgttacattcaggcgtatattttatatacatttaaggttttaataaggtttatctcagttttagttaccgaatctaatctagctatgccttactcgtataacccttatcataaatttacataacttatttaggcatgcctaatcacaaaaactttagagtaataaccttaacacacatttctgttg

SEQ ID NO: 42514 - DNA, 7885 bp, Cannabis sativa
tatatatatatatttattcattataaatgtctatttatttgaggggaaaagaaatgtgtctttacaatagatttatactgctcccacttgtgaattataaattacatttttttttttctgataaacattttaaaggctgcatttatgtcaatgtagtcgctgttaataagaaaataattttcttttgtttttgttttttgaaaaaatgatcttattaaaaccttacaagaaaaaaaaatatcaaacaatatcattaataatagttatacaatccataaaattagcaatactactagctttgctaaagagtacgcatgcaatactattaacaattctaggacaatacataaaagaaatacaaataaaattacctataacaatacaatttaagtaagatggatcaatctttttattaaacttcaaattaataagaaacacaactccagccccaattttaaccaactcattacacaactcagcgtcaaaattaattttcattacctctgaaggcgtttagaccatctatttatctcaaagtttagccgccaatagtgttttttctaatctattctcttcaacaaaattcattagtttattttattttttatttttgcagaaaaattctttatttcatttaaataaacataaaaaagaagtttgtctctacccttttaagtaaatattttccttcataatttaatttgatttgtatctctaattattgaagtttagtactgccgaagtaccgagttaaggaggagacaataccgttactagatgtacttaaatttttttttaacaaagatgtacttattattgaatacatatatttaagaaaatactggaaagaagaaaaaaaaaatggttgttttaaaattaagaagaataaaaatcaataaataaaaggctatatcaaagttatgagcaatcatattctgaacacttgcacataactacaatgcttccattctagacaaaaactacaacattgcctctgttgtagacaccaagacagaatatactgtctttttcaatattaaagttgagttggtccaataattttccaagaaaggaagaaaattgtaaagtaaaaaaaaaaaaaagagagaacatttattcttcttccatagataaatatgtaaaacgaaaaaatactctcatatttgagactcggaaaagaatcaaatgaggcctgagatatcaagaaacaccaacaatattagagtcaaagtgaaatttcagattttttttgggttgagcttaattgcatgcataaatcatgattgcattgaacagtgaataatgggagttggaccataacagaagccagtagccaattaaggtcgagttttcattttcagtttgagtaatggtccagcattgatcattgctgttttttcttttcattatcagaaaaattaactgtagtaataaaataaaataaaacaagaatgaccttgacccttgtaaaggaagatcaccaataaataatatatgcttctatattggagaaccctatatagagtggtcgtttttattgattttagagctacatagaattcctatttgtaaatgatgacaattaagtcttggtatttgcaatggacttcccgccctgaaggttgaagttagattataccggttatttaaacatagatgataatgatggtatgaagtgatgtagaaagtaagacttaataacgatgagattaatccagacccaaaaaaagaagagaaaggaaagaaaaaaagtggagacagaataaggtcaatttctctctttttgtatattaaagcaagaagaatgaggcatatatttttttttggtgctgggcagtgactcttcccccgtagtccattggtttactttatttgggcgaataattgggcaaatattccaaagcatacctttatttgagggtgggaaggctgaagaaatatgttactactctctccaaggcatattccaaagcataccttccttttttcttctttttaaaaactgagtctttttgccaatacttatatttgatacatatcggttctgcccacaagttttaaggataaaaacctcacaaccatgaatcaagtctatttgggataatagttatcaacatttctaactaatgcaaagtcactaactagttaataaggttaggtagcatgttaaggtgcccataaattttcaccagatctaaaagacttgacagctaaaactaacacccatgtggccatgtcacttatgagtgtccattatccccatggcgttttcaataattatgggctcagaataaccatatagaattttggataaattgcagtatttgtcatcaactttgatgacaccccaatatttttaaagaaaaaagaccgtacctcctgttgcggaaagaaataaaatattatgatcgtcacgagtacattcttttaaatagaaaaaagaaaaagaaagaaaaaaatgaacaagagtacatggatatgcatacaaggacaataaattagctaagtcatatgcagattatgaaatatgtatgacattcaagcccacctccttcgaggagcacaaccaatcctcaaacctcatctatctgctcctgcaaggaaccggtttagtcagatattgtgtatggtttaaagactatcacaagatggtagatttaacattaagtaaatgtacttcagaagggtccaataagtttaataacagatttgagaaatcattcatgtcgtgattcagcacattctaaaaaattcttcagttatttcttcttgttttttgatggacttggatatttagttttaactattagggccacaagtaaaagtaggagcagctaaatttccaaatataaattgctgcaaaactacacaaaaatgccaactaaaaatagcactaacctgcatatcagaagtccagagagtgaggttgtcccttaatagctgcatgatcagtgtgctgtccttgtatgattcctcaccgagtgtatccagttcagcaatagcatcctcaaaagccttgatttagaaaggaaaaacaaattgttggaatcaacttgataagaaagttaaaattcatgtcaatcaaaactatgttgctttatcaaatccctaacaaaaaataatagaatgtagaactacggaagaactcaataaaattatgaaggggaatttatatcttattggctatgttgttgatggggagttgcagaatatcacatttccagtcaaatttaacttcggcactactgatttagatatgagaaaataaaatataaatctcaatcaccaacaacttcattttagataaagactcaacaagcttgagtaactaagatatcgtctcatcatttccaataccacatgacatgatgcaagctaaaacatctctgtccccaatcaataaatagtctatgttatcaaatccaagaggagtagtttaaatgataaagcatgtggttggctcccacaagatctgaggttccgaatcaatccaaggtacctacatagcaatactaaaattgtttggtctatcaactttcaaagctaagttgtcattttcctagtagcctgtaagaggttatgaattaaaacaaagattttcctactaactttcttgttcgtttatgttgattgtaaaaactaagttcattgatcataggcaaaattgcctgtcttctcaatagccctctccatgtacttcttttccgctgtcctctatctactttcaaaatatttaaaaaatcttatgaccactccattttccgagacaacatttaaatgttttgaacacttttattccattttatacaattcttttccttttcccataccagtttcctctattccgaattccactacaataatatattcatggttcacggtcacctacacacatttacacgtttatgtactatattcagactacttgtatttataacatatcaatattcaaaaatgggaaaactttgttgcatctctaaattaaagaccacttataaaatcttaatggcgagctcaggttggatgaggcatggatgtgccaatttcagcagcatcaagtaccataccacaaaaataacacaagatttgtctcatcttaagtagaacaattcccttgcacagagaaaaatttcttctctcttaaacattacattcatacctgagtcacacttttaatacaattaacaccaatgcctcaccagcttcagttatttgattaactaatcagtacttattaacttgaagtgcagttttagggatcaataattctattcatctaaattctaaaggccacaaggaaaagaactaccatttcatctgattcccaagtctattaaaagctgttagaaaaatacttccataaatagtatatactcaacttgcctctcacctagcaataaagaattatttcaagcagaagaagaaaataagggggtaagactctgacatgaagcccaaataacaaatatctctgaccaaaacgtacaaatttattgaatagcaaaaaaaccaggcctatcttgaattcagatactgtcaaactcatttaattcgtacaaccttaaacttagttctttttaatctagtcattacaaatttggtcttgtaaatttgggtaaaaggacgggttgtgtattaaaaaaatttctatttataggaaacgaactccaagggcttgtttatgacaaaaaccaagtgtagttttccgtaaaattaatccatcaccgatgggtacaatcggtaactaatcgcatttgaaacaatttctttgttcagatagtatggactgtcaagcagcgaaatcttaacaaccaaccaattcgtattttcagtacaatcccattaggtattagtcacaaaaatagggctaacctgttttgccatggcacaagctttgtctgatgaattgagaatctcgtaatagaacacagagaagttcagtgccaaacccagccttattggatgcgttggactcagttcagcagttgcaatatccttcaacaaataaaaattcgatttatcaagcttcgtattaatgcaaagaacagtacaaagtacaagagcactaaaaatcatttaaatcgaataaatctcagggtacctgagcagccttgtaagctcccatcgtctcctccgcggcagattttctctcgtctccgaccttgaactcagcgagataccgatgataatcgcccttcatcttcaagtaaaaaaccttggactcaccgctggaagccgaaggaacgaggtgtgagtccaatagcccaaggatcccagcgcagacggtagaaagctcggattccaccttggatctgtaatctttgacgagtggcacgagctcatcgttcttgcggccttcttccttctgctcgatcgacgagacaattctccaggcagctcgaagcgatccgatcacgttcttgtaagccacagagagaaggttccgctcctccacagtgagttcagtgcctcctggagcagtggacccaacaacaagtttctccataaacttaaccatctcctcatatcgctcggcttgctccgcgagcttcgccaagtaaacgtactggtccttggtaaggttttccggaacggcggaggccattgttgcagagctcgaagtcacaggagagagagagagagaaggatttgaaattttgagaaaacaatgggttgagttggggcttaaattacgaggagcaagtatggttggccattttagatatttgttaatattttattttaaggcctgcgaatgaaagaaagatattttgttttttttccttttcccttgttttgtagttggtaaatactacatagacggcgtcgttttgaggggatgtgatgtcattgtgatgtaggcgagtaccgtaggtgttaagggtaggagcgcgtggtggagaatgattggacgataattaagagaggaggataataggaggagaagatggattagagtcagctttgtatggaagatatttcggcttgggctgttgggccgctcttcatatatgaggaaactaaggaaacaaaacgtatcttacttgtacttaaattaaattaactcatatatatatcgtttgaataaattaaatttaaattaagagggaatatatatgaccattaataaatttataaaaaaaaaaactaatcatatgattttaaatttaatgtcattatcctttcaaaaaaaaaaaaaaaaatttgatgtcattaccgtatcttacttgtacttattaatataatttttaatagatttgtttagcatataaaataaattaaataatatgttaaactacttacttatatacataatttaagttgtaactttttttataaataaaatataccaaataaaatctactaattaaaaatgaaaaaatagatagaattttatctaattaactttttagtttttaaccaaaaagacatttttacttcaagaatgtagaagtccaatcttttcgagtttcatcgatttatcaatttttgtagggaatatacttatttagtaccctgtgttttctcaaaaaaaatatatttggtattctgtattttaataatatttatttgaataattattagaaaaaaagtaaaaatctacaaatataattttatttatatacttaaacgttaaaaatttattaaaaaattaaagataaaatcaatagatgtattttaaatgattttactttaatcaaaaattaaaaagggagagaattaaggatagaattattagaagtatttattagagtgattttagaatgctagttaccgctttatatctctgctttatgtatatagatatagacagatagatagtttgaagatatttaagaaaaaaatttaaatatgttacaatagtttagagatatttttgtttttttttttattattaataaatataagttatgaaaaaaaaatgctttaaaaaatatataagtcgtaaaaaaataagaactgaaatatgtgatggttatactatttgagttatacaactatatatatttttttttaaaaaaataaactattaattaattattatatttttcttaattaattaatgcatcaatcaatatttataaagagaataaaaaataaaaaagtaactgaattaagaagatattagataaatgtattttgggtgattatattgattattgtaggataagtaaacaatttataattttatattgaaataatttaaaaatgtgttgcactcatttgtagattgatgagtgaatattgtgaaatagtatttccttgttaatatattgaggaaattacacatgggattttaaaactttttatgaaagatatggcagttttatgtttgtccattttttatggcatcttttgatttttaaattgttttatggtattttttatgtcatatatgtgcaaacttaattttaaatcccatatttaatgtttagatacattattacacaaaattgaaagctatttcttctcctccattcaagcattgtacttcctcactccttaacagtctacctacccaaatctattcaccagcaacacatccagcgatcggcggcgacgacccacacattcggcgaccggcggcggcaacccacacattcggcgaccgacgactcaaatggaccctaaatatgatatctctaccaacaaaaccccaaagactcgaatagattccatggccgttggagatctaaatctgcaccgtaattggagctcaaccgcttggtcccgaactcgtacatattctgaggtgagcttcatctttcttttcgaattgattttgtagattccatgctcattttgtactcttcatcccctagttgtgttgtttgaatggcagatttttttttctttcttcttaaagaaatgaaagatctatata

SEQ ID NO: 42515 - DNA, 4100 bp, Cannabis sativa
taatttattgtaaaaactaattagctatcatagtatagtaattaagttaactaaatcctaaaataaatattgactaagattaagaaaaaaggtaactaattagaatatgattagtattatgagtaatttaatggtttctttgatttcgaaataacgaaaaaatatatgtttcctgtatcttaaaatgttcatattgaagcgtagatcgatcacaataatatttttttaaggctcaattgagtaacaacgtgaccataaattctttttaaaatttaaagataagagagagagaaagagggaaagatagaaaaagataaagagaggggaagatgataaatataaacggatctatctatgcttaattccacatgctatacaaataaataaataaacaaaaggaaaaatgaaaaaaaaaaataaagaaagaaagaaagaaagaaaaaggcatcagcttagtacatcatgcattcatgttttggtaatacaattaaaataaaaacggtatagaagaaacagtaaaattattaattaaatgctgtacaatattactgataaaaagatataaaaaacggctgcacatgtaaatttcccttatattaaaggacagagaattaattatctatattcactctattttttaatgtctcttctattccctctctatagtattttataacattagttaacttacgaaatttagaaacacatcattgtactttgctaaaaaaatatagataaataacaaccttattatacatatgatatatatgtaaagtaacacatattattgttattaaacaacctcattatatataataaagaatttaactatatattattatataagacttaatgatgaaacttccaaggaaggcattgtagtttggagcatggcgcattccagttgcttgtgcatgaacctccttcaccatcgcagcacttgcacacaactccaagtgtttcatcaaaattcttcaagtaattatacttatcatagcctgttattaattaaccaataattattatcaatatataagatcgaagggatataaaagttataatggaaagttgtgatgaaaaataaacgctgaataattaatttaccttgtttattatgcctgatttttaatgttctaccttctactacacttggagaaaatgtagtgaaaaaaacgttcaacatcattatcatcatcagtactaaattaacactacaaagcttaaaatatttgggtgttaccattttcacattaaatttcaaaaaagatcgaaaatgggttatgtagagaggcatcatggtaagccttgaggagagtttatatagagatcaatgaaatggactattgtacaacaatattagttattctataaatgagaattagaaatgtgaaaatgagaaagagtcgtggggttctggaacatatagctgtagcagccgctagtcgacaagaaattaaagccactcgtatccaatgggaataataatgtctttattaactaataaagtatttttatcggccattactattagtaaagtacggttcaacatagaagcatttctctttttgaaaaaaaaaagcaaaaaataattagttataatgtatgtttttaataaaaaataatatttataaacataatatcaaaatttatttaataattaaattaaattaaattgtatatagaatagaggtcatcattcaaattcctccaaaaatattttttttttaagtttacttcaactcctgatttaaaaaaaaaaaattacttctccctccttttaaatgttaagtcttggttagtgcttttcaacatttttctaactaatatccacacaataaattttgtagggtccacatatatacatctacaacaaacaaaaagaaaaacaaaatttattatccagctgtttgaaaattgttgtatggtttagcatatcattattggctctgagtcttttatttaaccataaaaccgtcaattacgattcatatataaatgcttttcatttgtcaaaataaaacaaattcattatattattagctaaacggaaaacgttgaataactaaaccaactgtaaattatggcatatttacgcggacagtctttgaaaaatcactaccaattaatggaaacaaaagttgagtcatgtgaataaatttacaagggggaattttcgggccaattcatgtgctaattggaataggaagtaatcttgtttaatcaattagtcatattataattataattattatattattgaacttaatttagggtcttagtgacactttctaattgatcataacatatatatgttccttaatatttaattagtttatgccaataaataatattaattacaaaatatgatattattttttttcaagccttagaaaaaataataaatattttagaatcaaataaaaaaaataatattttagaatcatattcatctgttttacaatctctcacatcttaaataatattatttgaatcaaataataacaataaaaaatattttagaatcatattaatctgttttacaattctcacattatttttcaatacagtcaggaaaaaaaccattataattaatcttttccattataataataaagattgtgcttatatatatatagtcccttcttaattaatctatatttttcaaattaattaataagaagtacttgaagaataatatgcaactatgggacttctaacttgtgtatccccatcatcccaaaccagagccccagaaatcatatttcgatcatttgcatcaaccctagccctgaccttcacaacaaacgatttcttctgtccaacataatcaaaacgaagagtccttggtttgactatgactttcattccctttggagatttgacaatggcgttataggtagaggccggtgacccaacatttgtgacagtcctatgaaaagtgcgggtgataggtttggttgaggttgtggaaagagcgaaagaaggatagttcaaatcggaggcatgtaatttcttgacttttgagcaactgctgctcttatcacctgttacaagtctcagagatttagtgctgtaaccttgtccacacaagaattccacgtaatcactctctccagcatcgtataccaaaccaggcctaatcgatcgtagagggtctatgtgcccagacccatacgcaaactcaccatctttgttaatctcatcacttaatggataagctgccaaaccacatgacaaaacaaaaacccaaattatatttatttataacaacatagggttgttctctataaatgtgtacacctcttgtttctagctagtagtacttaaaatttttaattctatagtcatcttttttataaaaaaaaattaattttgatcagataaatttacgttttaaaaaagatcaaacaatacattcagaaaggaattaatgaattgcatttcacacacacacacacaaaattatataattaacatacaaaaatatttagattataattaactatctaaaaatttctaagtaattactaggtggtacgtagtattgtaattatataggtaatgtaatcactaagtagacgtagtgtaattaattattaagatagtaattatattttattttaaaatataaaatatgtagttggacgtgaaatataataattgcatatatacaaataaattaataattatacagtttaataatattaattatttaaaaataataaaaatactatgttattacattcaattagttaacacccttaatgacctctcatcacattttgtaattactctaattatttttcaattttaatttttaattagagtgactttttaaacgcgctcttattattaaaactatatatatagctgcctcactcgttaattgtagaggggtaaaagaaaaacatttcagtccgcgcaaacaagaataatatatagtgtgatatactatatcataaattagttttttttttatttattgttttaaagaaaatgtattaaagtcttggactaaaagtgaaagactactacataataaaattagagaaaaataggggagccaccgccccacacatctgacatcttccttttctctt

SEQ ID NO: 42516 - DNA, 2185 bp, Cannabis sativa
ttatgacatttgtttacagaaaggactgttacaaaccggtatgatgcacttccattcgtcaagtttgctgagatttagagaatacaaatcatcaagtgtaatttcctgatctttaatctccatcatgcctccatataaatatagtgtatctcgaccaacgaccatgcaagaattaatgcgtccacagggcttcactacctaaatagttcaaaccaaatttacaattcaattcaaggatatttctaaaaggaccaaggtaggagatgtcatacaggacaacaaacctctggtaagtcagatttggatgatattccattttcatcgacggccatgcttgtgttcatatgctgggacatctgttcaatgttgatttccatattacatgcctcatcatcatactccgatttctcatctttgtcatttgtttcaagttcttcatcgtcattaaatttttgttcagaaatcttctttagctgtgcaacagaaaccaaataaactgatcaattttattctatctattcaaactgaaattatcagatatccatgtataaatgcacattgtcaaaccttttttgttgttgacttttccttccgtaactccaatggatacctgaaacgaaaagaaaattatcattctcagagttgacaggaatgcctgtatttgtaaatgaacaaattcgtatttgtaaactcaaaatgagtttttttttaatgaaaaataactcaaatcattttaaagtcatggaaaataattaaaacagtttcaaccattaccaacgtcggttgtctaattggaagccatagagttcattcaagaacaagctcatcatcacatcacctgaaaggaagacagcacaataaacaagagaaattcaagcaaaagcttagttttagactattgtgaaaacgataagataaaaaggtaaaaataaaagataaagttaaccttcaacttccatgtccaccacccctccaaatagcacagctcgtctcttatgaacacacatggaaaaccctgcacgaggtccaggaggcatcccgattttctttacctattccattataatagagacaaccagacatatgaaccatttattttagtgaaaatacaataaaacaacaaaattatgagaccaaaaaaatgcatggctaaataataaggtttgatttttttctctcttagcaacgaaccttgttccattcccaagtcctagggtcaagggaccacatatctgaatggacatttcctttctcagagctactcttatcagatgaaagttctttggaataaccaccatatagaaaaatctgcatgtcgaaagaggcaaatatagtaaccatttgttgtggatgttatagcaaccaacgaggtacatgttaaacataaacgggtatgtatgtgcacgacaaaagacttggagcaaagtgtagtgtagctgcctaatataatgaaagagcatctgtatgtgctcacctcgtcctggaaaacagaaaactgaaaagcacttcgggcacttggccacatggctccaggttttggctttatttcttgccactaaaattccaacaaaacaaaacttttcattaacatacaaaccataatacaatagcaaatgacaatgcttgcttcgtgtaaaagaatcgagttatatgtaccttgaattgatccagatcaaaaacatataaatcgttaaaatacctgcaaacgtaaaaaacagaatctcatcaaccactcatacagcagagcaatacagttactataaatagaagtagaaagtccaaacccaagtaggataaaaacctttacagcgaaaattataagctaagagattgcgtaaaacctcaaaacgaggaatgacaaacattcgaaagtgaatatttctaagcaaaaaaatgattctcctgtcgaaatatgtcttgaatgaatacgaacttctgattcgctgaattttgtgaattcctttgctcaatgatcattcaatgtcatctgaccatgcaaaataaaaataaaactaaaacaggcatcttcaatcattcttcatttttttttccttttttctttctcaatctaagtctactagactagtcattgtttgcacaaatctgcatttaacttcttctttagttcccagtttcagcaggggtatagttttattcacatggaggaagacaatcaaatttacaa

SEQ ID NO: 42517 - DNA, 13307 bp, Cannabis sativa
attaagtgaaaattaaaatatgagttattgaaaacatttttacttaaatataatatttttacagacctgataggctctcctgatcaatacggcggcttgcctggaacaattgttgattgtcgcttgctgggctctcatgatcttcatttctcgatctggctattctttgaactggcgtctttgttcggcaaaggcaaagtttatggctgctctagtatcttgttgatcatgatgaagagtattattatggccttgtattttccctagagcatctcgcaagttctgtagcttggcatcatcaccgagtggcctttgagaaatggtaacatatgggatttcagtaccgggtgtagtttgctcagctcaagtactggtagttctagtttcttgcacgcccggagtgaacacaggtaggggttgtcactgcttgacctacagtttgtgggcttgttggtggctaaggattaatcagggcggggtccgtcctggctgaatttcttgggtttgcaggcgtctgcacgtttggatccgtacccattggattggttgtattaatttgatttcccctttgtgtttgcacaactatcatttgtcccgaaaaacacttaaaacaaaaacttgtgtttatttgctctcaataaaagtactaagatgttgatctcccttttagccaacgataatgagtcaaatcaaaacgattgagaataattaaataacaaaatataaataatctaaagtaaagaaaatactagaatttataaagattcggccccttctggatggtaagagtctactctccttttttttttttgtattgacttgtgagaagatgaacaagaatgtcttgttctctctctaaagcttttacaatgatctctgaataatttactcttagatcaacgtttctctcttgagtattttctctcaataaaattcgtgtcgttgaatagtgagataagaccactatttatagggattaattacatgaaattgatttcccttactcaataagaaataaaatggaaaatagtttattttctataattacaataaggaaagtaggaaaattaggttgattgtctttcttctttgaagacacgaatctatcctatgaatttaagaattatgtcgtgacttgtaagtttgaggacatacaagaaatatctttaaaattgataactcacatatcctggtcagtgcatgcgagccacctgctttatagaagctagtcggctgtctatgcatactcagctcggatgtcacaactcctgtttgtgagcttaagtattttaatccttcctgtacaacttactaagaatagaattatttgcccaaattataaaatgtacttcacgtgtcacctaaatggatactacatcattcaatagaaatttaaattataatttctaatcaaatgaacatctaacaaaatttacttattatgaccactaattaataatctttcaataaaaattaagccataacaaccttatatattatatacagatttttttaaagcgtgatttagatcacactatgataaacatcgatgcagggaaattttcagtcaataagttaattatctagttaaagatataccgtcataatatgagtcattatataaacaaaacgacttaggttaaattatctcaaaaatttagacaaaacaacttgaaacaactttcaccatgtaatttgataagataatttgataatatgtacagttttatcaaaatatgtttttgttatattttttttgcttatatatgttatccctaggtggactgcatgcatgccttccaacgaataggacacgaataatacaatctctaatagtaatagtatcaaattaaaataataattaaaaaaggaatataactgcaaaatatacttggattggaacttgtccctagaaaagagtagaggttgaacttggaaattggtcccaacaaaaataaaataaagaagataactcctaaattttaaaagaagaaacaaaagtttttgtgaaggtgacatcaataatagctttaagcgttgtttcattttgtataaagaatatttctggcatacatctatatatttatgtatactaagttaatgttagtgtataattaattttttttaataaagtttaattaaataattaatgttaagtgcaatgtatattcaattttttttaattgagtaatatatttttattttagtgtaatgttaaatatggtatataaatcattaatggatgaaactgaaaaaaataaaccttttattcagttctcttcttctttgggctttgcctatattgcttgttttattaatataaatcttgaattttgtctccgaactgatcattcactcaaacatataatatatgcttttaattaattagaattagactcattaaataatgatatctatccttctattctttcttcatcatctatatattttaatctgatgtgattgtgaaccttcatcttaattagtcaaatagtcaacctttattcaactttctaattccacgtgtcatcctctcctttctttaacatttaaagatttacagcaaaccaactcaactgtaccagacaccgtgatatgcgcaaaattctttgaagaaaatattagccatagccagccactctccgcgtaaatataatacccattttttcaacaaaattaatgttaagaaacacattacaaatattgcaaggcaagaatttgcaaattcaactgtttcttaaatttgacatcggtataatcttaataaaatcttaaattttgagggtctctgcaaaaattataaattagactgtttttgataaagtgtatttttttttattgaaacgtttatatattacaaccatgttttatttggactcgaactcaaaactttcaacactcagacactcatctatagtcacttgaactggcctcaagtagttgataaagtgtatttaatataatttaaaatgtccttacaaaaaaaaatatatataatataatttaaaatataagattgtcacgtgaatgtacctttcactggagaaagaaagttttataagatggcccttgattttattatattattttggacgtttataatttatgtcatgcaatgtgtgatacgtgtagggttacaaatcttacttaaatgtccatctcttatagatatatatcttaaaacttcttccttgatttgatctgacaactgaatatatatcgataatcgatttgtttttttaacagtgggactaaatatgataaggctaaacaatgttacaacctcacagtagaacgagtggtatctaatttttttcggaggaattaaacaaagctaatatatatatgattgaatgattcttttcctttcctttacactacaaaacaccaaactattataactattaaacaaaacttaaaatacaatttcgaagaacgtaatattcttttttattttattcgcctacttaattactactctttgtaaaattattaatttatattattttttggcgttttaacaaggtcagaggtcatcattgaacgaactaattatgaaaaattaaaagacgacaaacaagtaattaactgttggtaaacatattattgcttcatattctatacgttacgtaccataataacatataccaaagggtattttcgagtttttagttgactgatatttcttcaattcataataagtacaggattttttattttttttttctcaaaagaaattaaaatataatgtatctaagtgtataggttttggtaagtaatacaattgcatttatagtgcaaccactaagtaatcctacataatcttttctttgttatatttttttccccttgggagctataaatacagaggcagagattttctctattttcattttgtacttcttttcctaatatactttcataccacattagaacagagagagagagagaaaagcaaaaaagaaaatgatgaaaaggagttggggttggggagtggttctgtgtagttttactctgtttttccagcaagtattttcagaagatgggtttgtgaaaacgagaggagtacagttagttttgaatgaagtccctttctacgcaaacgggttcaatgggtactggttaatgtacatggcctctgacccatcacaaagaaataaagtcacaactgctttccaacaagccaagactcatggcctttcaatagcaagaacttgggccttcagtgatggaggatataggcctttacaatactcccctggctcctacaaccagcaaatgttccaggtatatattatatataattattaatgttattatatatgttttttgggtagttctgatagattcgtagtgatgataatcttttgttgttgttgttgttgtttaaattaggggttggattttgtggtatctgaagcaaggaagaatgggataaagttggtgttgagctttgttaataactatgaagactttggtggaaaaaaacaatatgtggagtgggcaagaaatcaggggcaatccataacttccgatgatgatttcttcaccaattctcttgttaagcaatactacaaaaaccatatcaaagtaaatgctttaatcatttttcatatattagatagattccctaaacgcgtgatagattggtgttctttattttttcttttttgtaaaaaaatcttgcatgatttataattaatttatttcttaactcttaaaaaaaatatatatttctagatatataaacttaccagaaactctttagtgttttttttttcttttattcctttctttctcaattggtaaatttacgattatattgttttgtgaaatagacggtgcttacaagaaaaaatacgttcaccggagttgcttacaaggacgatccaaccataatggcttgggagcttattaacgagccacgttgcacttcagataaatcaggaaaaactattcaggtctctctctctctctcttttacttttgttgggtcttccgactctgttttctccgaagaacggcaatttcgtaaatacagatttttatttttaacaatggtggtaagtagtaaccattataattgatgtgatattgcattcgtcaatgggtaggtatatatgtaccaaacataacaaaaacaaagagcatggggcataaaatgagaaaggagagggatgagagaaccgtttcatagtggtaaataatgggctttcttcctttgtggggttcagttacattcaatgttacaattattggagtttagtgaggttggttccgttgatacaaaatattattaaccaaaggatatgtgaatatatgattggtcgaaatcgaaagaatttgtagtatatataaaaataaaaaggaagaaccacgtttgcataagcatgagagcataaagcaaccattaaccaatatcacaagtgcatttaacacaagtggacaaagtggggcggggcgtgtgggcgtgggtctcaacatgcccaatgcgtgaaaagctcttatgccctttttcgttctctttttttcatgccgtaaataaaccacttttcttttcaaaatttaaatagaaagagattaaaatggtaagcataaaaagatgtttctaaataaatgttatgtattcacaggcttggattacagagatggcatcttacgtgaaatctatagacggaaatcacttgcttgaagctggtcttgaaggtttctacggcccatccaaacagcaaactaatccaaattttcaagtggggacagatttcattgctaataaccagatacctggcattgattttgctaccgttcactcgtacccagatcaatggtataattgaatttaaatttaaaacacttttatttttgatgatttgggaagttgaagaattgggttgtctttggttttggcaggttatctggttcaaattctcaagctcaaatggcattcttaaagacttggctaaacgatcatatttcagatgctgaaaatgttctccacaagcctattctcttcgccgagtttggtaagtccggcagcaaccaaagagacgagctattcaatgcagtttacgatgccatatactcgtctgcgagtggcggtggtgctgcggttggtgggcttttctggcagcttctgacagaaggaatggactcttttcgagatggatacgaggtcgttttgagtgaaagtagctcaaccgcttcgttaattacccaagagtctcaaaagcttaatcatattcgaaaaatgtatactcgattgagaaacgttgagaagtggaagaaagccagggatattcgaagggctcagtggttggctttgcacaagggcaaaactgggttaagaaattaatcaattagtaagagagaattttcaaataaacaagggagtgagctaaatgtgtgtggttattccaaaatagaagttaaagtataacgaaacttaagtttgacatgtctgtacaagtgattatacccaacttataaattaaatacaacaaagtgactatagtcaataaactcttaatattggtgtattgtcgtttacccttgattctataattgtgaacaaggatatttgtgttatctagcaataatatatatatttttgtattggcttgattcttcaatttctatttggaaagaaagaagagaaatatggtagaaccaaatgaatgaaacaccacaaatgttcactttataccggaaccatattaaatagtgtacactaagaaagaaagagatggacagggagggtaaaaatggacagtagaaccaagtatgttgaagagtagatttgtttacgcaatagtcagtagataaatactaagaagaacttcatgtgatttattaatatttattggaaataaactctctcagctctaatattccccaaccaaactggtacaaaaaagcataaaaccaagagaaccccttattctctaaatattaagcaactggttgttgaaacagcctttaatttacatatgcgagaagcagtgaaagtcaaatccgatgagtcaacttcctcaaaaactttttctaccattaaataccaaagagaaaactaacttaaattactgtcccatctttgatggttgcattcttcagtattgctgtaagacctgatcttatgtaaaatccttcacttgatcggtctgcttcttcaacaccctgagaagtcaaacaatgagttgagccgaacagaaagcaaacgtatctacatacaatttatttataacacaagaagtttaaggtatcattaaagagaaataaaacacttacatcagagtttttgatgatcacatctctacctatcttggcattcttgtcaatgatgcaatttcttcaacaaagtcaaacataaatgatgagaaaagaaaaagggctccatgtgtgtgaggaataacgttttaaagggtcagttttcatcatattaggatggtgtattttatcgaattttacctgattttagtattttggccaacaccaattggaacctttccttccgcaagcagcgacgcaatctcagattcagtttggtaatagtctgcgcccatcatcatcgtatcctgcaacaaaattccaaagctcaaaggtgaaaaccatgtttaacagaaagtgataatacgacaggggatcgatgatgtcaagtcattaagaattgagcaataaagtccaaaactagtacaaagtagaatactcattggctcacctgaagttctacaccatgctctagacgtgagcggacaccaacaatggagtgctgaacactacactcccgcaggaaacagccatgagaaatgatggcgtccacaatctgcaagaatcaactggtgttgtgatgaaaaattcacactacagatttaagacaaaaaagatgagttgagcttacagtcataccctgcatttttcaactttagtaggtggcaagaacctaggagatgtatagaacggtgtctttgaatcatagaattgaaacttgggaggctgcacagaaaataacgaatccatcagttagctagccagccacaacgatctttttctttgtatgagaaactgtttaccacactttacacaagtttattttagtatatgagtgcacatttaatgcaggcattcatcataacccaaattgtcatcacaaactcaacaacaccacaaattaccacccctcgtcacgacgacacaacacaaatgtgcataaataatcttaactgataattttgtgacgaattgggatcttcaaccttaattttaaccccaagatgaaattgagataaatagaaaaacaaagttgtagatcactagaataaagaaaacaagttctaggcaacgcacgttgcttttgatagctgcagtgcgtcgtcacttgacgccacaaaagtcgaaaaatttatctttctacgtgttttattcaaattctattgggtgttagtccaagacatttttagaggctagggcacatgcccaaaagactgataaagggaaaaggaaatataatttgaatgggagaaccagaagcaactcctagagcaaatttcacgagttttttgaccattaattattcttcatcttttgttttctacttgtatttcttttagacatttgatgttattgagcttatctacttatgaactactcattatatgtagtttccttaattgttatttattagtcatatagagatataagagcaacactaaaagagtactattttaacactatatttttttctattccaaccataacaataaaaatatcttctttattgttatattatttaatatttgttttttgataaattaattatttaattattaaaaagtacaaaaagtaacaagataaaaattttccgtgctctacagtgtctcactatttttagtggaacactgtagactcccctatatataggatgacatttaaagttgggttggaacaattttgtgtaaaaactacactatttttgagtttttgctgtcctattagagatggcctaagctcgttgtcgctaacactattttaatgcgaaacaggagagagggtattaacaacctaatagtgcttttttttttttcttttgagaataaaaaaaatgtgaagtctttacactattttatagtgaaattttgaggtgtgattttactcttttgtaattactgaaatttatatcaaaacctcaacaattgtcaattatttagtattttcccgaaccaatgtgaatttatttttgtaatttatgtttatattttatttttacttccaatattcgaaattgatcacttagatcaaaccagggtttatttatttattcaatcacctaaccacattattcgtcattgcttattcctatatttttagcaactagtagaaaacccaataatgcagagcatattaagattcaagtctctaatgcaaatacaaaatgtttacccaataattcagcatatgaagatttaagtttctaatgcaaatttcaattttctccctaaaccatatcaccaatcctatgatgaaacttgaaaaccacacgtttcaaacagtgacttcagttttttttaattgctatacaagtgacaagggtgttatggagtaagtggagttactaacctgttctgttagagcaaggttggcgtcgaagaaagacttgatggttccaatgtcctcccagtagtcattgaataagtatgcctgacatggatggtagataaataaactcagaaaaactgttacacaagaatgaggatccaaaaaaaaaaaaatagttgaagcatcaaaagctgccttacttggacattgtgttctttcacggctgatggaataatttcagaaccaaagtcattacaatgaggatagctccattttaatagcttcaacagaacatcagttttaaacacataaacacccattgacgctatataaggatattttgctgcatcattctgtgacagcccgagaacagaggtatcaacttgctgcagcaacgaacagacaacattattagactaaggctccagaaagaacaactagtaaaaaataaatgtaaatcgagtagatggtaaggaaaagttaaaaaccattgttttcaagtcagggccctttggtttttcggcgaattggataacacgtcctgtgttgtcaattttcatcaatccgaaatctgaggctcgactacagtaaaatttaaattcacatcatgttaattctcgtattcagaatctggtgctttaaaataacacaacacacattgattcaagtacttcactccaaataaaacaaaaagattaaacacagagtaaagattttagtatacccatcatccataggtaagcatgagactgtaatatcagcattggtgtcaacatgcttctgcaagaaacagtgtggcaaccatgttaaaggcattttttttatataataaagctaaaaaactactttaccctagtgaaattcaaatagatacctggacgaaatccatatagtccatccggtaaagatgatcgccagacagtatcagaatgttctccacattcttcgtcttggcatcctgcatttgttattaaataaaaatttaagtttttatttaagtaaatcttaattactcttataccaagctaatctttagcatatactatgatcccacaaacctcaaaaacccatataaattgtctaacagcatcagctgttccttggaaccatctcttcccagaatcccctggagtttgagtggcagccagaacctgtttcacaagcaaaataattttgatttgagcttgtcaattaactttcacaaaaacattatcaccccactaaataaagcaaaagaaaaatctttctccgatattcatcttacctccacaaaaccatcaccaaagttaacaccattcccaaaattataggttcgagcaaggtggcgattgagggaaaaagagttaaactgtgtcattataaaaatcttctttatgccactattgatgcaattgctcattgggatatcaatcagcctgtaacatcccccgataggaacctgcaaataatgattgtgtcatgatatattcatataaatttgaaagccatagccaactaaaaatcttccaagaagaacaatttgccaaaagcgcagccaaaaatgagaattggacatctgagagtcctgtacaaaaggtgaacatcttaccgccggcttagctcttttacccgttagaggaaatagacgagtcccagcaccgccacccaatatgatcgaaactacatttttggggtctgcttgtggagtctcaaacattggtgtttgaaacgtttgctgtgatcaaattgaaaaggcaaatacgagagtcaataatgaatattcacattaaattcaaagtgggattttagtttcagacattagtaattcttttttgaatggacttacagtctctttgtctacatctgtgagaatagaataagcgacaccaggcttatatttgttatcactcttcaaacctttccgctgttgaatattcaagtttctgcatttaaggctccccttaatgctctccccaaaaaatcctgaagttcgattcctgaagcttccttttttgactttaacagggtagacattggtcttcaaggtcgcacagcccgaatccatggttgatccagctagaaatcaaatacccagatagcctttaacagattccactctaaaaaggcagcagaataaggaatgttagaaaattaagcacacgccatgaacagaaaaagataataaggggaagaaaagaaaggaaaagtaaaaaaaaagcttaacccgaaccccaataaaggaaagatcataagtaaaagtaccaataattgaaaaaaaaaaaaaaaaaaaaacctcagatcagatcaaaactatgattcaccaactaaaaactactacaaattcagcaatagactactataaaggaggaaaagagaaccagatactaaaacataaaattttctgagaaaactcggtcaaaaaagagacaaagatggtacttttagaggtttccgtgaaacaacgtgataaaagattatgataatctgagaaaggcgttgtaataaagaagagaatggtgaagaagggtgtttgtgagtgtatatgtattggcttgtgaatggtcacgaggaaaattttgaaatgggcattaaagattgtacctcttctttcttctttcacgtaatgccgagctttctcagcgttcaaagcgatattttgaatattgaaagagtccactctccttaagtagaactcacttctgttttttttttctaacctaataatacttatttatatttgccgcacttcaagtttcctcttcttcttcttcgtatatttattatttattcatgttactaaattgcaaaatgcattcccctatagtcaatgcaggtttctagagaggaccacaacaccacataataactatattcatctccttattaattattattttattaattgcctaaaacaaaaacagaaattgcctaatttttttttaagagcattgttattagcaccattgtgcttagcaatttctcaacatattgcgttgctagcgatattctttaaaatctattatattaaattatatagttaccgatatttaattggaacaataacaatattaacatataagagggtgctaagcggcacgggtgtcctttagcatttcttttatttttttttttttaataccataaagaaaaaaagttcccgtataaactttatataaaggtgctttgtttgcttctttccttcttttttgaaataattatttgctttcttttttattggctaagtttatatttgtatatttagtagtatttatggtatgtttacttaagggaattgactttgtaatgggaaaaagttagtggagctcatttaaattagacgaaaaagaaaaggaaatatttttctctatttttataggaaattaattttttccctaatttattatatttttattttaattttattaattaaaaaattaaaagacaaatatacccttagaaaaactataattaaaaaataattaattatgtaaacaaatgaaatgagatttagtaaacaatataataaaatattgtttttgattattttatattttaaattcattcatttttcaaattaattattttaattccaaatataatttaattaacatgccatagtgaaaatttggaatagtttatactacacatgcaaacagccgatcctaatgaaggcctaagaaaaatataaaatttggggcctttacagaaagtgctccaaagtaatttaattgttaatttgt

SEQ ID NO: 42518 - DNA, 2603 bp, Cannabis sativa
aattagatagatagatagatagataattagcatttataatctacaattaagtttattatgaaaagtaaaacagaaaatcagtcactaattccttcaatttttgacacaatagaattcaaatgaaggttccaatttcattgagtccatgttcaatatatattactcagagaaatcaatgaacaacttgacaactctcaaaacctacaaaatggctagctcctaagttagtaatgagatcatatatatgtcaattttctttaattaagagagtgaattagttctaccacttttttcttcagagcttctggcgactcgagaagacagaatgcttctgtttggtctatttcaagcaacaccgcagcaacttgcccagcatgacttttttcaagattctccacaagggaagatagatctttatgcagaacctaaaaagtttaagcaaatagaacacttagtcaagtgtaagtaaagacaaagatcttcagtttctaccaagacaacatccacatcatgtcataccttcatcatcattgaagtggtcaaaatagtttgtaagcctaggtgaacagaatttgacacaagctcttttagtggactcaagatttttctaatgtcaggacctaaaccgttatcaaacatgtcatccacctcgtcgaatacctattcgaaatttatgtcatcattaaaaatagtaagaaaataaatctactttcaatggtaggaaaagtgaagtagggaaaggatactaaccaagtatttgatttcatcaagtgccacattaccctcttcaataaactgaagtacctcatcaggagtggtaacgaacaagccaattgaatcattttccattgcatttttcgacttcaaatgctcgagtatgaactttgctgcttgaaagcactgcaaggtcaatgctaagtgaatccgtgtaacaagctataggattctttttgcaccattttaaaatagaaataatgaaaaaacaaactaaacctcctcagcatgctcttgtgtgatgcatagaacaatagctcggggacccttcggcttttcagttgaccttttcgcatcccttctgagattctgcaagcacataacaactcagaaagaagtacataactattgcaacatactcttaacaaattgtttcatattaaagcaatcaaacaatttttcgcttatggtaaagtaaggcttcatagtgataaagaacattaatgaatgttaagaatgtgaaagtaggataggatgaggtgtattgtaagatgtacaggatcaaactcaaaatgaataggcaatgaaaataatagcactcttatcaggtgtcatattgttattagtagtacaatttaatatcgggtcctatttactttactttaataatgattataaaaaagctctaaccattcataccttatagcaatgctttggtaataaatttcacattctcaatgtagttctttctaacaccaaataaattgtaaaaaagaacaaactccaaaacttgtgaatgacatattctttcaagaaaagaccaaaccttttctaggtagaattgttaattgagtggcacagtgttaggagtatacggttatattagttaagcaactgtttgtatcagttagttagttactatcttagctgtcaattctgttttcagttgtaacaaacttctatctgttgctttgatccaatcactatataatcatgtactcttaacactgaatagatgagattgctctttcattcatcaatccctctttattttccttctgctctttctttcagtctttctttctttcagtcttgttacttcgttcttgttctggttctgtttcactctttagctatggccaagagattcaacacacagcaactgtatataaagatgtattatatacggtatcagtacgtatattatatagtataaagctcagtttgattacctgaatcaaaggtaccaagtaggtgaaagcatcaacagaatgagagtgagaacatagaaccacgttcttcccatccaagatagctggaatcccaacactttgaatctctgaaggagacgaataacccaattgggtcatagcttcactcagctcctgactcaaccccagctccttaaaacccaaaaccccaactacccttttcggattaggatcagatttttgtgttggtggggttttagaggagcccttgagttttctgagcctgaactgttcgaggagttgcaagtcttttctgggttttggctcattttcattgtctgtaacactgatcgaagaagaggaagaaagagacctgggatagaaaagagtgtgatttagtggtgattgaagggagagtttggagttgcgagaaaacttgagaagagtcctggctactactgtgcttctcatggctttacaatttcttcgctatgctcaactctgagaaaatccttcgttttttctaatatattttgtaaaatgtgataattttctaaagtttttattaattagcatttttcaaatatatttatgttaatttgaagtatggtacttatctaaaattgtattcaacatatggtacgttaatacatttttcttgattaaataaaaaataat

SEQ ID NO: 42519 - DNA, 2183 bp, Cannabis sativa
aagaatcctaagatcaaaggtacgacattaattactgtttttatttaaagatttaatcaatcaaaagttatagcttgctagctagaaattacatacctaggggtgtttaaaccgttatactgcacaaactacccgcactgcacgtatcacactgcatcaaaattacagtttgaaatcatttatagtgcgattgtacctggttaattttcatttttactaattcgcgtggtgcgatgtggtctgtagtttgaaatttactaattgcagtttaaactgtaccacactatacattataaaattactaatttttacaatatatgtaatatgtgtaaaatacattattttttaagagacaattcaatataatgatttgatgattagtatatatgttatgatgtttagttaataagatttttttttttgtattgctaaaactttaaaaaaattaatttttgaatttttattatattgtttaataatgataatagtgtaacccgcaccgtaacacactgtatttttgcggtgttggttttgcgattttaagattttacagtgcggttgcagtttgagaaattataaaaattgtatatgtggtttggtttaaaaaaatattacaactcgcaccatccgtaccacaaacacccttattacgtaatgcgggacaaatatacataaatttaattaattgattagatgtattataattaaattcagtatgtgttctttttattattaggatatatatttgttaaaaagaaatatatatttttatttataaaaaaattgttatacatattattattgtaaaatacaaaaaatttccctactaaattaataataaaactgtatatatatatatataggtgatggagtgattgaaaagctgttagaaaaatatggcaataatattttagaagggaaagatgagcatggatggactcctcttcattatgcagcacacttgaatgagttccaggtgaataagtttttgtctaaacactccttaatttgttgtattcaagacaacaaaggcatgtctcctcttcacattgcggccaagaatgattctatcaaagcattacaatcattaaaaaatggatcgggattatataggtacaagatgttcgagttattggacaagaaaaatcgaacggctctacatgttgctgtgaagagtaaacacacatctttggtagagagaatgctttcttttaaagaatgtaattacattatcaattggaaagacaaagatggaaatacttgctttcatcttgctgctcttactggaagttctataatggtatcagtattcttcaattatggacattgtggagtactagataaagtaatcttcaattatgacaatagaagactactagataataaagtagtcttcaattatgaccatcgtagagtactagataaagctgcagttaacaacgagaagatgacggccattgatatctattttcgtcaagttgaatttcacgtaagtacttttattatctttcttatattaaatgtgactatctaattatttttattattatttccgttaaagttataaacggttaaaattaataacgttaaatcgatcaatgaattattatttttgagatgaataataatttttggtaagactcatttgatcaattacttaaaaagaaaaatattaattttgagatgaataaaaatgataatagaaataatgtatttatagtatatttaaaagaataatatactatctaaataatgtgggacaaaagtaaatttagtaaagaatgtaacttaatttctatttaagacataatataaaactatgacaatttataaaataaaatgaaaagaatataaaatgtcacataactactttttatgctttcctaaatatatagatatatagatgttaatagcattacaatataggattcgaatcactaaccccgtaaccacttgaggctagctcaagtggccataggtgggtgtgagtgtgttggaagtcctgggttcgagtcccaggtaaaacatgatggtaatatataaacgcttaaataaaaaaaaaaatcactaacccaatgtgaaatgccaagtctctttaccatttgaccaagttaagctactcatatatatatatatatgtatatatatatatagggacacgattttgtcccgtgatgtacttt

SEQ ID NO: 42520 - DNA, 7783 bp, Cannabis sativa
  modified_base (4905)..(4905): a, c, t, g, unknown or other
  modified_base (7157)..(7158): a, c, t, g, unknown or other
cactcttgaatcaccacgctaaagggagaacacaatagaaccgaagaatataaggcttggacagcaagagggcaatcggtttccagttgcatttcattccactgcttatctttgatccaactaagagcctccttaatgcctatcgcctccaccacaacagtttgctacaagaaaaagcttcgacaagatggccatgacagttgcgagccaccataccagccttccgaatcgaaaatagctccgtccacattgaccttaatttaggtcccacaaagttaaatctcatatttaagtaaaaagattttaaaattacatattaagcataattttctctttatttaatacaaaagttacacacaattatatttagagtaaattgcggttaaattgcctaatgttttccacgcttgcaactaacctcctaaaaatcaatttttggaggttaaactttccaaacccgtattctgttagtaatttacagttttgaaaaaattatattctatacccactttttattttttttattttaattttaattttaatttttattttattattttttaatttatacccaattttataggttatattcccattatgtgctttacaaattctaattttgataagttatgtgaggttatatttagtactttaattattaaagagagtatttatcaattaaaattattttggagttatatttggttaatgtgtaataaaaataggtaattttcaacttatccctacaattcccatctagttttgactgttaaatgttatgtacacagtgcgttacccacatagacataatgtacacatatgataattttattggtctacataaataaatattttttcaaaaaattaaaattaaatcataaaaaataaatttttttatacttttctttcgttctcttttctcctattattttttattgattttttttcttcttcattcttcttcaaactatcaccaccaccatccacaaccaccacccactataaccgaagccacaacccaccaccactgaaatatctttatcataaatgttttgaccaaaaatggtgatttttcctttttgattaaattaaccagtcaatattttttggtgggattttcttattcaagttcatagtgcaccttctattctggtaattttttcttaccttttacatgaatttcttgcttcgtttatattgtacgtgtttgcctaaattttaacaatagtgatgtggaaaaaataatgacacatggcacgaggataccgagactaaattgatgaagaatatgtaaagccatgaccgttggtcagaatcgttagtcatgatcattggaagagaagtctgacagtcacatttccctagcttgagcaaggtgactatccccaggggacggtggactaacactctcataaatgggactaaataacaagaatacaatataataaaaacattaaaagaccatattttctgtaaataaaatcttaaaaccgtaaaaatatttaaaattttgtaaaaccatatttttgtaatttttttattgtttttttttatatttctaaaatatttccttaaataaattaataaaatattcaaactttttttagataattttttttttaatagagcaagggctcaattttaaggccaggattaaagtatcatcgggaattcgaactccaaaagacaaccaagtgtgagattttgtgcaaagcatcccaaccactacaccatatattattctttgaggagtgcgcgctatggtcaacctcttgttacaatctcttagtcaaccttcatgcaatacatgtcggaatattttttttcaattttttttcacgagagtgttcgtaatgcttacaacatcatccctgtaaatttttgaatagtttataaagccgaaaatacgtttgaagttttttgaacacacataataaactgaaatatcatgaactctgtttttgctaccgtaaactattctgaatttttcaaaaatttacagagatgatattataactataatgaataccactatgaaaaaaaaatttaaaaaaatatttcggcatgtgattttggacgtggaagttgactaagaaactgtaataagagattgtaattaacactcctctcttttttttttttaattagttaattttttttttttttgcctcatgttaaatatttatttattttttatccctttttttttttttttgtggaattgaatttagcacaaagtatattagaccggtgattttttgtcattaacaagtactttgtgcttttttttgattcctttctctttgactaattgtatggggatggttttctaccttaaaaaattctgacatatatttgattgaatatcataactaattaagattggcaatatttttctcaaaaaaaaaaaaagattggcaatattaatttattcaaactatttgataaaaaaaaccacttatggtctaccttttatttaattaatttactttttattaattcaatgttgatagttaatatttgtgttctctatgtctataccgtgactactgactaagtacgtagaagtttaattaattaagaatatattaattaactcaagtcaatttggatttaaactcattaatattagtttaatacatattcgttacctataccaaactcactaaatatacaattaagtaggttatagaggtaccgtgctgtgtaccttattaaaatttgaagagaaggtcatacctttataatttatttttgttggtctaaaaacacgaaaccatatatttggcaaaaagcaaatgaagctcactagaagaagaagaagaaattttaatcaattaattaataataaccataatgataatcgaatatagtttttcaacatatcaaggcgactttgaatgaacgttatttggtacgaattacaattagctgaaaattggatatcgagtacacaccatgtatatcctcttaaattttacaccaactattaagagcataggttttgttttttgttttttatttttaaaaaagtattttagaaaatgaaaacaaaaaatagtttttaaagtttttaaaaactaagtcgtgtttggttagtgttttttaaaaataatattgaccaaaagtaaattattttttaaaacagaaaacaatattttgttttgttttcaagattcttgttttgtaactttgttttctgaaaactatttttaaaaaataaggccaaacaagcttagttgtttttaaaaaacaattttctatttttcaaaacaaaaattaaaccgttttttaattatgatgtcaaatatgtattaattttttttcttctaaattttatttatatttaacaagaaatttttatatttatactttcctaacttatttttttttttactgtttttttacttattaaagtctcaaaaatatttttttttctttcattatatattttttagttcactttggctgatttttttttaactcagttgctaacttttttctttttcttctctttttatttctcttttttatttttatttttttttcaattatctctctttgttttttattttttcttctcaaactagtttttttaagctttgtatatatatataaatatatatataattcgtgtacatttttttatctcattttttaacagtctttctctttcttacaaaaaaagtaagagcactcctcatatacatttctatcttttacatggtttataaaagtagtatattttttttggatattttgtgatttattcagagttaatttatgaataatttgcatattttaacaagattaatgtcttgttatttttctgttgatttatagttgtctttttgttattttatagttgtttttatgttgttgtttagttgttctataattgttttataattatttttatgtatttttttgtacaattgttgtttagtttatgtacattttttattgtgtatattttttcagtttattccagacatatttttgttgaatatatgtgcatttgttttgttattttatgttattttttagtttatagttattttttaaccatcactaactcaaaacggaaacgaaaaaaaaattaaaagaattgtaacaacaaattccataaaaaaaaatgtaatagtacaaaaagatagattaagttgtcaaaactaagtaaaaaaattgtaatacaaaaacatattaatgagtttatattattttgcttaatagagttaagtcaatgtttttttatttttctgtagttttgtagttatatttttgttttataattatttgttgaattgttgtaggattgatttttagttttttttttatttatttattttttgaaacatagtattttttacaattttaaaactttaaacacaacattcttgtaaaattagtatagtaaaaatataaaaaatttcgtttcacaatatttttataatttcttaatttttgtaagttacctttatatatttagtcctaagttgattttttattgttatttaattttttgttccatttttgcgaaacatgcatatgttcaatgcaatagaaaaaggagaaaaaacaaatgtgggtggattcattgaggcattggaaatatatgtttcttaggcaagcaaccaattattaagcaattaaatgaacataatgtaaaatgttcaatcaaaaagaagggaaaaggaatataattaatatatcgacttgggaaaagcagaagaaaaaaaattcttttagtcggtaaaatttgagaaaaattattaaaatttgtttatattggatataatgttataaagcctaatcatttaaagttaggctaagttagtctgataggcataacactttttttttagacagttgggtcaaattgtcttccttttttttttttttttnttttttaaaaaaaaaaatgaacaaaggattgtgaattctacatgagattctatataactattaatcattcaactataataataataatataatttatcacttaacataattaattagaatatataatttagggatatgattttaccccgttattgtactttcacggattgtaatccgtgatgtacggcagtcgtcagatgagggagttatttgatctgatggctgagattaatctagaggtaatcagggttaaaaagtaaaaacgtaccccgacactcatttaatgtaccctgagacccatttaatgtaccacagaatacattccgtaaaagtacatcacgggacaaaatcatatcccatataatttattaggtcagcatccacttttttaaaagagtaaggactaagaaaacacttacacaaagctcagctaaaatgttttgtaattgagagtccaatatatggagcaaactaaaacagaaatgagcaaaaaaaaacgaaaaaatgcttaaaggtaccatgtgtatctagtatcttcttatgtattattatcgctattgatctaatcaaatatcgagtcttatataatttaatgtaataacttttagagagtattgctaacaatcacaaagtgacacgtatagaggtgctagacaccactagtacttaataacaatactaagaaaaataaatatgtatgtaacaaaatatatttaaaacataatttaacattataaattatattaatttttaatttttttttttttacaaaataaccctaaataactgcaatatatacactcactaagaaaaactaaacaatttgtgtaattgccataacatatatagaagataaacatccttttaactggtttaagataaaacttaacttatatatacatattatatagaaaagtatatgaaatgaaattttcagaagtcaatggtcaatttactgagatagatatttttaataactttccaagaaataaaaaaaaaacatggaatgaatatacctcgtggcacatcgaagaatttcttagatatttctcaaaatatatatgtaatcaaataaaacctcatgataatagaaaataattaataaagttcatcacaaagtttatttttatttattactagccgaacacataattgtccctgtatataatagttaagtttaatttttaatgataataatacttatattataatttttgaacttatatatgtagctatatagatatcaagtattaaatagattatgttaatttctgattagtctaaagtttaaattttttttatattttttttaaaattaaatataacaataaaaaaaataatacgtggataataacggtcaaaaattaaacttaaatatttatttacaacgcgagtaaaacttaaatatttatgtcctaaattagtttatatataaacaatatttatgttaactatagatgaaaaaactaaagtgtgtgaacgaaggtttaataacattaatgcaaataaacagtgatggacgaagaaagtgtaaaatggtggcatcatcaagatagaactatttattaattttcttatttaatatcacacacattaatgcctcatcaagatatagagaaaatgactatacaacaagggaaagtataaattgtactatttattattgattttcttatttaatatcacacacagcaatggtcctagctattttctccattatctaaaaatatcaagtaactatttcaatttcatatgataattacacaagtttttagataatgatgcaagttgatcgatcatgcacaacaaacattattgtgtgaggttttgaaattaatatatagatacatcaatatataattattacacaattgaataaatctatcgagtttcggaagcaacatatatgtgcaacacgtttaaacgatgaataaaattaacatctttatcttgccattttttttaaaacaagtgcgatactattaaatgagaaaaataaaattgaaaatttttacaatacatgtatcgatgtaccatatcagttttggtatttgaaataattttttagttaatttttttttatgattatgtacgttatagttgtttaagacattctgcaaaattttaaaaaatttagaaaaattaatatattaaaaataagattcaaacagtatgttgcacacatgactaatttattttatacgcatgtgaaatagactatttaacagtattttttatattgtaaattattnngaatttcttaaaattttataacatattttaaataattataatatacacgaatataaaaaaaattagacatttcttttaaatacgaaaatatgtagaagatagaatagtacatcttttttaataagagaatacattataaaagcactcaataaaatatactgagccaaagtttttttctgtgtgtgaataataacataatgagtcatagttgttttttctgaaactggctgataaaataacactagtacataatcttgatcatcacgtataattaattattttctaaatttgtgtttgaaaactcataattattaaatttcaaaaaaattatataataataatttgaataaaaatttcataaatgggttaatcgatagaagtcaaccttcggtcctgtactatatttaaccaaatatttacctatataactaaatatctaataattaaaagtttgcatgtgtattacttttttttttctttaaagggacataggtagttgggaattgaactctagattttttaattgtttttttttttgagaaattttctatattattataactaaaagtcatttacaataatagagaaaataggataaggtatttctcctatccaagatacatct

SEQ ID NO: 42521 - DNA, 6071 bp, Cannabis sativa
gtggatgcaaactatacagtagtacttacagtagcttctatgaaaggcattgaagatctcttgcgcttcaaaccccagtcactgaggacatccctgaagataagggggtttggtgatatctttgctcgcctgccttgtctttttaataattcaaccttatctattttctttttggttccaagatagccttggcaattggtagcaccacagtggcacctcacctcaggtccaaattgcacaaatctgtacaagtaaaacaattaaaagacattctccttagcttcaatagcaaaggtagttttatgactaaagatgtttttccattccaaagcttaaattagaaaaaagccaaatgaaaattcaaatgcaaaagaaatgtcccaggaaacagtttagcatgtgtttgttttctgtggatataattataggaagaggcaaaaatgacaatactaatgctgttccttattactaaaagacgtcactgactagatttcagtgaagttcaccaatggtgagatggaaagtatgtggttccattccaagatagcagtcatacagtcatgaattatcaactttgtaaagactccactgtacctgtaatcatatgtcaatggctctccaacttttatcaatcgagcagcaaatacacccacgcgtgtttccccatcaacctgcctgaataaaatagtagtcaaatcgcatttttaatgagaaatttgagtttgttactaaaacaggatttctttcactacttccagaacaatgaattaagcaagttattccagtaatcaaaagacatcaaaggcccatcatcagattgtactaaccacttttccagaatacagttgggattacaactgtggtttagaaatctagataagttccctttaaaagttgcatctattgtgaagtcttttctaatttcacacatatagaaattatgcacgcctttgtctttcatgttccacagcctttgttcacacaaagcatcatcaataactgaaacgccaaagatctaaccttagaaagagctaatagcttgtaataataacaataattacaaccaaacaatcaaaaataatataagcaaacatccaagaatttcaattgccagataagctaaatcttcaatgtaataaaaaaaatgaaattaagactgcagtttttcatacttgaggtgatcgtaagcatagcctagtggtgtcacacctctcctcacaagaggaggtccaggtttgaagagaccactaaccccagaaagtaaaggaagccccaaagaccctggatatcccataaacaccccagcataaagccattgagcactttcatacatgcaataaactatatgataaaaatattcaaaatcctaatcgatattaagaattcaaattttcgagttagagatttaaagtttgtgacaaatgtagctttttatactcaagagggtgttaaattggccaggtagtaatcaacatataatctaaagggcacaactttataagaaaactttcttaagacaatatgttgatcttaaaaaagagtgaaatgggaaaatgagtagtacgcttcattataaagtatgacaagcaaggcaacaaataaaacaccattaccttcaccaatatattcaataacaaattcatctttgttaatagattccgctgcctctactccccaaccacaatgttcagtctgtcaagaaattacttgttaacctaatagctcgcaaaagtataatttagaacctatctctcacaacatacaaaagaaaccaaaaaagaaaatgaaaaatcactaaagcattaaagtctctctagattgttaagtggtagaattaacaatcaccttaacaagtttgatcttcttttccttacgaaaaggcctgtttgtgcaatttcccgagcagcgacaagcctttgagcaacttatgcattgaactctatagatgattacatgtgttacaagttataactcagaattgaaacaaccaagtatctggaatatacatgatacttgttcactgagtagtttcaaatttccattgtatggcacaatcttagaggatgaacaatacatttacttatcatatagtacaaacttcacctaaccagcatgccagtaaaatttgagacagaaacaactggacagaagagaagttcattgtaacatttaagcgcgtaataaatgttaggctaaaaatctgtggctaatacatagccgagattgatttccattatgacacaaacataaacaatactgaactttctacataagaaagaactacatgcaccaaaaagctaattatttttacacattctatgcattataaacttgcttcaaaaggcttcattggtgagcacacaaagacatactcaaatagcaacacgtttcaacaatacgaagcatttaatttaagaagagcagttagctagccaaacaaaatttattagctacattgagagtcactcacatattaattaactgaaacataatgactgccccaaaaaaatgattcaaaaatcacctgcaaacacaactctgagagcattcagagctgcaacttgtgcatccagtgccatcatcagcatcatcacgcttcttcttcacaaggtaaatgtctaactcacattaaggatgattcccattctaatatttaccatgaaccattggatgctgtatcaatactttaaccagtaaatgacactttaaaaattatttgtcatgtgcagtatgtatttctgatattcaacaaattcactaaatgattgatactaaatgcaatggatagcaacagatacaaaaaacaggatactacgcctaatgtgcatgaaagggggcggctccatcttataatcagtgtctttccatgtacagtcaattttgaactcctcatcaatgtaaggcagaggcaagcgacaaaacacctcctaaaatgtcaaagataaatgaagtggtatgagcagtaatttctaagtaacttttctttcacataaacaccactaaaaattgaaaagttattttttttcttagctttaagaaaataaattattttgaaatgatgcgaacttagccataagaacaaagtttatatcactaaattctctttgctaatgatattgatgcaactcttggaagcatttaatagtttgaaaaacacaacaagatgagaatgtctcaaatttgtagtaccctaaaattcacggtttgccatgtgcaagatgagaattcacatacctagatcctgtgtataacacaaagtaaaactaacagactttagctaaagctaacctctatgtcgcttgttgaagctgcattctgcccattcaacaaaaaaatcagtcctgtcatccagcctaatcaatgaaaatacagacgaagaataaaactttaacaagaagttaaggactccatgcttatgaagggaaaaaaaaaagtcaacctcaaaagcatttgatcccttaaaaagtagctgtatatttgtagcatcatcataataaaataaaaaaatcacaaacataagtccaatgtaacaacaaacatgcaaaataaaattcacaatgtaattaacatagaatttactaacccaaaatatatatatgtgtgtgtgtgcatgtgtgtaattaaaattcagacaagcaaatcaagaggaagataatgcaagcttacaaagtatatgggacacattattaatgggattttgttccagtgatattatttatattttcaaaaataagcaatcaatacattactaagaaaggaaggaaagaagaaattgacctcccgatcgagccgccaatctgcagggtgcctccaacaaatagctttccctttctggtctttcaaagagatgacttcgtctggccatgctgcacacttatcgtgtgaagccattgtgcatttaacacaacgccaatttggtttcttcagcttgcaaagaaagcatacctatgcagcaaaacaagaaacttcatgaaaatttgttcagcctccttaaaaataaacatatatgtaatggtatgagcagtcaacataggtcactggcgaacaaaggctcatatttcctaaaagataataataataataaaaactcttccttccattgaattgtgcatgattcaaacatgagataaaataaatgcataaagacatgtcagaaagaaaaaaaaaacaatgataagcgaaaataaaatgaaacttacatgttgcacagatactactaaagaaaataatttgtaagcagttgggcaaattaaatgacgcccaagaatgcccaaaacaatgtatcagaatcagtttagaataaatgtgttcagtgagatcaaaacatttggttgtgtgcactcatgtatgtttcttcttacaaactcatgtatgtttcttcttacaaaatataaacaacagaatcatagcacagtgattgatatgataaaaagacctgaaagcaatgaaaactattataagcattgtcataagaacttacatgtcgtgggcacttgaactttttcacattatatgttcctcgcttgttcttcttcacacattttatgtgataacaaccacgacaatcaggaactgagcacactaacccctctccagggtatataaaaaaatgacaaacaacacattcaacctgagatcaaataaacagcagatatattcatattcaatctcaatcctggtatacaaagttgttcaaaatagtgacaatattgtggaaaacaaaaacatcagaaaaatcattcaaagaaggtaggtctttaagagaatataagccctagacctacaaagattcctagaatttaaaagatttggaaatcaactaaaatctttaaattaatcaataaattatcactataatcacatcaaaagaccattataagttcaataaaatcaaattttcccaatttttccaaaaaccaaagatcaaaaatagatcaaatttataacaaatgatcactgtaatcacatcaaaagaccattataagttcaataaactcaaattttcccaatttttccattaacaccaaagatccaaaaaataatcaagtttataacaaagtattactataattacattaaaaataaaacattataacttcaatactcaaactttttccaatttttcaaacaaccaaaaaaatatcaagtttataaaatcttctctttcccaattttctcagcgacaatagaaaattcaagaaaattgaaataccattttgttctcgccaacaagaaaaggcagggaacaacgagactcgggaacaccagattccttcttccggctaacccaatctctcacatggtcgtgcaaagccttagcagtggaagctttcttggtccgactggttcgcttcaatgccttaattgcagcgtcatctgtgacctgacctccaacttcaatctgtatacctatagtggccttgactgaattggagaaaggagaggaaatgggatcgggagggcagtgggtaagggcgatagaagctgataatgaaagattcccgaggtcgggcatggttgtcggtaggttggattgtgaagtaggaagctaaggaaaccctagaaacggaagttttgcaggaagaagaaagagagggaaaattaaaaccatggagagattcagaaatggtgggaattttgggcgggaatggaatttttctttttatcttttttttggtcaaatattttcaggtcaacaacaaaaaaaaaatagtgaaattacatatataccccttttactgtgagatgggagtttcacttgtacaagcttttatgttatttttttttccctaggaagtacagcacctacttgaagagttgaacgcttttattttttttcttttttgaataatggttaaatttcattaaactagatcatccaaaatcaaggatgcaaaaacaaaaagtaaagagtctctactaaaagtacggtcagcctcagaaagagaagatcgcgccaaagcatacgcaactttattagcagaccgtctagcaaaaataaaagaaacaatatcaaaatcagcaaccaaagtcatacaatcataaagaatatggccataaggagaagccat

SEQ ID NO: 42522 - DNA, 2890 bp, Cannabis sativa
cttatttgtgtcgcaggtccctaacatacatagtttggcaagttaatcctcaaatttttgtttttgtgacaaatttcttcgtagcgttagttttcaataataccaactttttttttcttttcgatttgtatctaatcttaatacttagtaatatttttcttttcagttggcacaagtaccaaaccaagattggagtgctgtgaataatatgaggcttcttgagagatcaccatcacattcaaaagaaagcccaaaaagtccttttgccctaacttttgacaaggttgactataattttctttgtattatttaagatacactagtcttctaactaacataactaacttcaaaaatttcagaaaaatcgcgcagttcgtaaagattgcgaaaatgacgaagaaaaaacatggcgattctcgcgtttctatccccttatagaggtaaaattctttacaaagtaacatttttcgagtacgtagagaatactactttatagaaaattacccaaaagaatgtaattttgtaaaaatgacattataaaaatatcttctttgtttttttttaatcaggaacttgttgaaaaacacagcaaaggtgaactttcagaaatagattatccatggttgaataaaccaagtccaagttcatcaccatcttcaaaaccatttcataattttgtgaactcaaaacgtacaccaacatgggctcgatgccaatcctttcatgacatgtattcaaagtaagtttagatttttgctctttttgtattctcttctttgttttatgacaactttttaaaatatgtttttttttttaaaaaataaactatagcatattctcaacttaattatgaaaaggatattttttaggggacattacaaattttatgggtttttatactttcggtttgaaaatatgattttatgagaaaaattaaagaaaaagttaaaaaatatgcgaaaatagtaattaagcaagggttaaccaattatcttatattatttttcttatatttttaaacttttttctaaaaaaattccataaaacaatttttttttgaaaaaaagctgtattttgcatatttataccttaaaatccataaaaatgaagactctttttatttatttatgtatttattttatttttgttaattctttttttttactttaatctgttaagtttcacattttcccatgaaactacgtataaaaagcagacataataaatttaaatttctatatataaatatagttaaagtgccaaaagaagtataatttgtagttgttttttttaccatgtgaatcatattatattattcactatcttgatttttttatatagtgatgatttcaagaagatgggccaaagaatttttgtattcattgttggtggtgcaactagatcagaggtaagattagtagattcttaaaattaagagtgtatcgaaaatgttatttttcataatgacacaaaaaaatgtcttttttgccaacaatccttatactaatttatatggtcaatttttattttttatatttcttaatctgatcactactgaagtgttttgtgttattattctttctcagcttagggtttgccataaacttactaggaagctgaaaagggaagttgtcttaggctctacaagtcttgatgatcctttagaatttataatggtactttttcttttctttttgtttgatcattgattatctagcacatggtattttaaagagaattgctaaaatgtattattggtgtctaataccttgttagtgtcatactgctaagtattagtgtaattaaatagcgagtctcatataatctaagaaaataacgttaaggaaatattgttaactaatcgtaggataccacctatgaaagatgatgagcactgctggtgtccaatagtaatgatctattttaaatgtgaaaatgaatagaacattattattgggtgccggtgtgcccaatacattttagaggtgatgccctgtgattggttaattcaaccaataacaacataacacttagaaatgatgtcgtgtaatcagtaaacatttctcttatgaataatattaattattataaaaaataaagatgtaattaaatttgaatttaatgactaagatggtctttttgcaaaaataattagaataaatatagtttaatttttggtaaggagaattagaataaatattgggattatttcatatatatatatacaaaagcaacaaaaaaattacaaaaatacggttgtatagaattttaaatattttatgatatgattttgtttacaaaaaataaggtctttggatatatttttatcttgtactcttgttaatttgttgtttattttttttttctaattatatgttattattatttttttatattgttcggatgttattttaatgttacttttatgtagttttttttgttgttttcataaaacaccgtaaaaatataaaaacaaaaattttgaacgtaaaaatataaactttttacaaaaaataatactttatgtatagtgcagatctgtattatttttcaaaacattattattagcattagtaacaaaactacgtgtcgtgtggcgtaatggtaaggattgcctttagtggcatcctttcttgcttgatcagtcaagaatttgaaatccacctaagcccctcttgaaagagattaaagaaaggcttggtccttgcgagtggtgtcatctatgtgatgaaaactcttgaggtgactactaataacttagtaaggtagactgaactataagacctctataactggcacggggtctctaaaattgtcaaaatgacaaaaaaaaaaaaaaaaaaaaaactaaaaaacaaatctacaccacgtgattttttttttttttttt

SEQ ID NO: 42523 - DNA, 7100 bp, Cannabis sativa
agagagtcttaatagaactagttgctttaaacctaatatatacatatgtatatatattattactagctactataattgataaagatagtatatatgtgatatatatatataagtaactatttaatctgtgaaaaatgtatagttaattgataaaaaagagatagttctataaacaattatacaaaggaaagacagagagttgttgtagccctccatcttattataaaactataaataattcgattttaaagaagaggtagcatgatcttgtaaaccctagtacttgagaaacgaatatctcaaatctgatttattaatatatataattatgtatattgatgaagaagaggaagtagtaaagacattatatatatgatcatcaaaatcacatataaatatatgtattatatatacatatcagttaattaattaattaacaagaacagcatctctctaatctccataagtaaagtttcttaacaattatttacatgacatatatatgatcacgcatgaaaataacattgtgatatactatgtgtaggtgcatatatagaataatatatatatatatcaagcaaaaacagtgatagctaaagagatagagaaaaatatggcatcatcatcatcgagcacgtacaactcaccatgcgcagcttgtaagttcttgaggaggaaatgcatgcctggttgcatttttgcgccttacttcccaccagaggagccacaaaagttcgccaatgtccacaaaatttttggtgcaagcaacgtgacaaagttactcaacgacctcccttctcaccaaagggaggacgcagttaactctctggcttacgaggccgaggcccgagtcagagaccctgtctacggctgtgttggagccatttctttcctccaaagacaagtccataggctgcaaaaggagctcgatgcagccaacgcagatctcatccgctttgcctgcaccgagatgcccccgcccccgccactggcccctaatgtatcagatcatcatcatctgaataacattattcatgatcatccaatgatgtctggtccaccaaggcaaggagcaggagggggagatagtcagttctatcatcatcacccaattggtggtggtggtggtggcttttctcttccttatagtactacttctctcccttggagtcatgacaatatcaacgaaggaggaggtggagaaggacacctttgatcaaattgtgatgagagaaagaagaaataaaaaagaagaagaaggtataataatcaaatctctcatctagggttttctttatataatttgagtcttttggaattgttatatagtagcctcacgtgatgagtcgttttctatatttttgcttttttcattcatcctgctagagagtctatatatttatatattgtttttggtgggttttagttatattattagtattcaaaaaccttgtattattgtgtgtgtgagcttatttttgggatcatgagtagggttttcatatatttatatagggacctaattaataaaggctgtactactcttgattgatcagtatagtagtatagctatagataactattgtaataagtaatgggatgaaataatgtcttttatttttttttttattgtgtgtaattagtgcaattctgatcaaggtattcgcatgcggattggagttgacattctgtccacattgttttatggttctctcaagaataaatgaaataaaaactatatattactatatttcttataataaagaggattattcttcaccctaactctagggctttactcttcttttagacctatatatgtataaataaaaatatatgctctcacctttcacctttgcttccgctttgtttgatcttgaggaccaccttttgattttctctttgcagaatattgtgctaattaaattttttctttgattaattagctgaatttcattttcttaattattatttttgttttgattatttatgcatactacatacacgtatacatacataccttcatacctacatacataatttacgctatattaatatatatatgactgctagttacaaaacagtaattaaaaggtataaattagaacgaagaagtgggactttaaactatacatggagttatatattttttcttgtgtacattttattagtgtgaacaacattttttctgttgaagtacgaacactacattacctgtacttaaatgttctaataatatatatatatataatatacctcatttatatcactagtgtggtgtgtgcacatatattttggtgataatattataattaatctactacatacaatttattcatgtgaaactgattctctatcctctacctctcatttaattatagatagtatgagatatccaaaacagtactatatataaatcacagttgttttcccctttatcagagagagagatagattggattcacgaaaagttttatttaattttcttctatgcatatatatattatatgatcactgatattgatgaaacagcttttccatgcccaagttaagcccctttcatgatcagcaatcaacactgctgtgtccattatctgaccaacacttacaccagacaaaacagtgaaaccttagacaaaagtcttctcacagtgaaaccccaggtcccccccttctttttttctcactctctatctcattattgttgcattaagttttacattatatatgtttcaccttacatacacatatatatatatatgacatcttttcctgacaatcagaagctagctcttaaattaatgcatgcatataagttgtttgtatataaaactaattaataaagctggccggctctctccaaaaactaaagtatatatttcatctatataatatttattaaagattctctgattgacactaatataatctttcagtagaatcccaaaagaagatatatccaaattaagttaaagtacagattttcagaaaataaaaaccacaagaaaaacattagtttttgttagggtttatacattttgatgtgtcaaaatcagctcgcggcatattctcagggacctcacaccagtcataaacatttatatatatgtatataatatatattatcgtggaaattaaactgtgttatattatattatttcttcgacgatcatgattaatttgatgatattaataacatttttcatattaacaaccatatataatatatattattaagtgcattcctagttgttatattcattccctagctaatcatgcaacatcatgatcatttttcctacacacctgacattaatgacacaaaataaaataaagagctatatatatagtgtcactgacactgtagtaaagtgttagtctcattacaaataaaataaaataaaaaaaaaataattaataatgaaccaaataacccttctctatgatcaattactatattgagagaagagtagtatagtagtagtagtactatactattgcaactaacgcaaaaacacacacgagcatagatagatgatcagtctgaaccatatctggatttgagtcacatctattatttgtcatttaattcatcatcatcattatcatccatcgatcgatagatcgatctacgactcttttctcctctgttaactgtcagctaaaaccccccacccccaaaatttctcgagatcaccaaaagcactaactttatttatttatttcttgttgcttgaaaataatatttggtgaaccaaatctaactcttctgatctcatatcccccaccatatcccacatatttaatttcttttttttttctactcctttaataatgatgagaatgtagactttatttatatattaatattgtttttatatatatatgtaactgagatattatattatcttgtcatgcatgcactgttttgcttgtgttcatcgaagactctctctctcactgagagaagtattactttatatgtggggctaatcatttttctctatataacctttttttatatatattattaagtacaatatagtattattatttttctttctttttttgcattttatttttcatttcttgttaaggcaataaatttgagtggcagtaagtaattcagaatccatcacacccatcagtttctctctctgtaaaggcgtgggaaagaagcaatgagcagtgaaatttttgcagaatgatcaaaaatgtaaacaataaataaaagacaaaaaacgacagcacgacgtgggggtcctttaaattttactatataattaaatacttatatatattctattttattttttattgacaaaacttatatatattccatttatatgacgccaaaaataaaaattctctttatataatttgtgttccttaataattggattctcgaaagaacaaagctttcggctcaattgtgtcttttttaatccaatcagatctgaatcagttacatatgattgaagagaatatatttttttcttcataaagtataaacttatgaaactttaaaaacccataaattataaacattaattgtataaacaattgtgtgttagcagtcttcaaggtaccctttcaaaaagagaagaggaaaaatagagataattcttcttcttctgtagcactaaaatgtatatacaagacaaatttattttacatccaacgagacaaaataactatatattttagtgataaatgtcttctagattcattattaatggtggtctacgtacgttgtggaatcgaaaatcatataccaatccggacgaggaatatattatttaacaactcgatcaaacttataataaagaatgatgacctcaatcattatcgtgttttaattaatgtagttgtctttgtatagttaagtttttcccaaatgcgcaataaattttatacagctgtattagatacattctatctctttgacatgattaagaacaaatacaaaagaagaaaagagaataacagtagagaaaaagagttagaatgagaatgagaaaagaaatatctatctgtattgaatctagatgaaatgagcttatatacaagaaagaaaaaccaaataaggctaactgtcatgaataagaactatacaaccgaaacataatagaaaactaaccccctttaactaatcccataacagactcaacgaactctctttacacttccccacaaacttgaaattggtacaatcaccaatgcaaagtttggtcttgaaaaatgaaaaacgagtgctcgagatagctttggtgagaccatcagcaatttgatcggcaacagggacataattaacatgaactatttttagggctatcttttctcgcacgaagtataggttcaacacaatatgtttagtgcgagcatgaagtatgggatttgcagtgagtaagatggtgctaagattgtcacaccaaatcacaggggttcgaggcagatggatacgaagctcaatgaagagagagtgcatccattgtgttaaatggacaaacttgagccattaccaacataaagactatttgatccaccataaactgagttggtcataaggttttgaaggtccgaagtgcagtaattagatgctccagagtcaggataccagttaccattttagtagtgttggtttgaaccaaattgactttgaatattggcaggattaaatgttggaaaaatacctgtgaaacttttgtcaaatttgtagaagcaatcaagaactgtgtgtccaagtttatgaaaaagttgacattaaactcgatttggtgttcgaggaagtttgctagctcgaggataattaaatgttccacgaccaatatcaaaaggaaattcacctcgtgacatattgccatattgcttatggtgagatcctcgattatcatgaaagctgaatgaattagaaaaagaatgagaatgatgattgttatgaaagtgacctcgaaaagttccaagatgtttgaagttacgattgaatatttgagctaaattagcctcataatcccagctagagtccatatttggatcagattcagtaacaactgcaagatttacactaagatctggctccttgtcattcttttcaattcttgattccaaagcaagaatgactttaatctcagcaacatagtactcttcaactgtggtattagatgagattctgaaggtatcgtacattcatcactcggaaaacttttgaaatcacaataatgtgatctcaaggagcaagaacctaactaacaaaagtaagaagatcaacatgttgcttgaccttgagcaaataatcattaagagacattgatcctttcctatcattttgaagtttagtttaaaattcaagagtcttggaagagacttaaagagtgaagtgtttttccaaagctttctagatctagtgtaccgtgttgcatcctaccgttcttgtcaacaagattcagtcatcgaggatagcaatcatgacactaagagttgatcatgcacctcccaataaagaaatactggattgaaattctaattagcttgatttacatcactgaggaacatcaattactacgaactgagccatcagtgtccttgttatgggactttctccaactataatcgacaatcaaatgtatcctaaaggtgcaagaccttggccgaagaacgcatacgttaattgtgtacagggtgctagatttgtcaactagagccccatcattttataggttgagttgaaaagtatatgtttgaagaggctccattgtcaatcatgcacctacaactgtcatgttccctttctgtgtaattatgaccaaggggtcatcatgagggaacctgacctgggcagcatctccctctatgaaggagaaggcatgctttccaagcttaagctttctgggatctctttcctctacagctagaacgtcacttttttgctcatgatggagggtccaagcattgggctccatagctttgcttatttcgcctactatatggggttttccaattatgattcataggtgacttgccactagcggtgttattaggtctccattttgggtaccttgtgtttgtgtctggtcatcttacacataatgacataaatgagg

SEQ ID NO: 42524 - DNA, 3551 bp, Cannabis sativa
tattaattatatatattaattaattaattagggtcaaatcaaaaggtggaagaaaagggaatcaacgtgaatcttctctactttgagtctcacacgtataaaagcaagcaaccgcacgtgcgagacacccaagccaaaaaagtaccgtaccttattcttctacattcaataccttaaaattaccaatataccctcgtcctcttcatttatttaccaaaattaccctcgacattttcctttctcagattttcgcccaaaggatctaatcttcttctttttcttctgccatgaaagattccatcaacgaggtttcattctccctccgtacatttttacttcttcgccaacatttccaacctaatccactgccaattcaacaagctgtctcccattattagaaacaccagcttttttcatttatatattattaggctatagatatagatatattatatatatatattacagagacataaactgtaaaggagaagatgattgaattgacggaagaagggttttgttttccgaagcttttggtgggtgttaatgttgctcttgctcttgttgatggttttattgcggttgtttcgttggctcaggtttgtttttttttttattattataaatttctttcatttattgcgaatttgaattgggttttgcttttgtttatcgatttggtgactggattttgtggaaatattgccaatgtgggctttgtgtggctggaatttaatgaattgggttcgagtggtttaatgaattttagatgagttatttatgttttgaagctgaatttggattctgggtttggattttatggctttgttttgattgttttgatggtttggttttggattattgttagaaattggatttgggttattacaggtatcctcattggataaagtattgtgctttatagcttgttatagcaatatgagacttagtttgaataagctgtagttgaacatttcaaaattgtaatgtttttgatagtttgaacttcattttgctctgttgtaaatggagagcttgtatgagcattgttgttaaaattccccatttgcaatgtagtttattaaaccaaatgaagagaatagttatacatttgaggaaacaatgtctaatgcatattcatgtactgtttgttttactttcttaaaatgatcaatgcttatttgtttcgataaattcagctacacaggattcattccaggaacagacacagtgggtggactcgccaaaaagtaagtgttatgtttttggacagtttcggtttatatctatgtgtgtaatgtgtttgtgcatgcctttttttattcaagtgatattgctagggctgtgatgtgaactatatccaaccctatttaaattcggttccttggcatactatgaaactgtttaagaaatttttagagatgtaggctgcttgatatgtgttagagactcaacttgtatctcaaaggttagtaaaaacctgttccttataacctgagaaacacagtctataagttccccacctaggaattggttccaagactagttttaaaattcaggtcggtcatagtaatacttcatcccccaatcttaacctatttgtatgcatattggtattttacagtgtaatttatcttccccaactgcatatatacatacatatgcctatgtttgttgatatattaatatatgaatgtacgtataaagcttacatttacaatacatgtacaagtactcgataaatcttttttgtgttgtgttgtgttgttactgtttgtatggcataactagcatctatctaaaatcctattgaatgttttcatatttacacataaaacttctaaatttcaggtctttcatctcatgattggctcttctaatatgggtaagaaaatataattttgacactataaagtttatactataaatcccagaacttgcttagctagtccaagttcaaacctaatatttgaaaactacggcaattgctatagcaaactacaaacctaatcttttgagctttccctttcgggttttttttgacatactaatatttattagtaactttagcttaagcattttgacacttctgaaacttactgtatcatgagttaacaacatatctggcttctcattacaggttactttctatattttatattaagtcttattgccgcttgcgaggggtggcaatgttggtcacactcttgtggctttgttttcatgggtatgcttcctgtcatggcagcaagatatatattttcattaatggcttgttgaaaattcttgaaaagtcaaacctttgctttgcagctttcccaaatgttctattttctgcagcgtatcttcttcttttatcgttctggtatgttttctttttggttgtttcaaaggttccaaatttacttaagatacattttgaatgtagtttacaaatcttaaatatcctttcttctcaagtggtttggaggtatcattaatttttgctttagttagatctaattgttgttctcaaatcgatcgtattgctatcagcgtattataaactataagtgctgtcttcttgcttctcggtcttttctttttttgttcgccttaataaactttcctatagggttgatctctgtcatcagtcagatgatgaagatgatgaggatgaagaaagcagtgctgaggaatctttgttagagaagacatttaatgaacggaattcattaaacgcagataatcacaatcaccgaagatgtttacctttccggttggttcatgttcgaagccgccagaaaattgttattttggtacggaaataatatgtacaatagctcataattaagtgttatatgttactacgttttcccgagatgcataactcagtacttatttatcaggcaactcttctagctattgtaataatgttcgcatttgccgttataatctggattgggatggggaaaaaccctattgattcgacagtggtggctcgggtatgcactacgcacacattgatacattttgtattttctttccttggcattgttatagaatgctttctatattttcccttttcttagattaacatatattagagttgttacgataactttatcgatttatgcaggtatatgtagaagttttcgcaggagcaatgcttttattagccggagcactagcttgttatggtgagtaatctttcgttcaagtttatccgattttatggtctcgaaacttgttacactttacaagatgctattgatttgttttttgttgaatgaagtaatgtaaatgtaaaacactcgaaagaaccggcctttccaattcaacaccgatgcttccttataaagtcgtttgtagatttcattataaagtcaaaaatgtttatattactaatgaactctcatggaagtcactacatagattgttttacgcatgttttcttttctttttaccattaatttgtgtatgctttaatattttttggtccttttcttttttcaaggaatattaatatgcctgaaaatgagcaaagtcaggaccgaaagagcttcttcgga

SEQ ID NO: 42525 - DNA, 8373 bp, Cannabis sativa
tttactcagagcatcctctaacaacctagataaaacttcagcaacctaaataaataggtaaggagacaaaggatctcctgtcgaagactgtaagagggtttaatcgacttaatctgcctcccattaagacaaatattgagggatgaggtaggatacattgagagacccaattgcgaaacttttgaagagtactataacaagaaagcacatggttaatgaatggattaacaacttattttattttgctaaatgactatttcattattttatttttgggatgtttaattattaatgatattggtcattatttttttttaaaaaagaactaatttaaagatcagaacaaatacttaccctcctttcgtaggaaacataaagcacaaccaagtttcatataaatattaaagatttccactcgaaatcaaccaaatggagatgtttaattcaatgtgaaacagagtagtattcttatcctgcgctcctccttaaactcttaatcaacggcttaaaaaaaggggaatattgataatccctttttgaagggttataactaataaagaagaattagaattctcttaaaactatgtgaaacaaaccctagaagtccggtggttttgatcatctgtgactgtctgcttattattattatcttttctttctttcaattctttgctacaatttatcttcagtttttttttttcatagttgaagctaaagaaactaaagttgaatcgaaaagcaagaacagcttcactggatcttcgcttgacgacgatccagccaacattttaattcgaaatgaaaatggccactatcagtcgcctgaatttgatttcttactgattttccaccatcaatttttttttttttttttcctaaatttcatgagcagaaaaagaaaaagaaaaagccttaaagccctccaccacctctctcgccagactgagccagtggctggcactctcacctcgatccttctctttttaactcgacggcgagttttccttcctggtctgaggcaagcaattgcggcaactccttgatcacgatcacacaaggaccaggtgattattatttcacatttcaattttgaaataactttactctcagatttcttgtattttttggattttactatcgctgtattttgatgtgagatttaggttaatggtttgaatgcttgatgcgtgtaacattttactccgaaaatggaattgttcttagatggttttcagtttcgccaagattttcattttgttaaatgttggaatatgaagttttgaagtcaatgattattatctagtttgcaaagatgaatctgggtttttgattaagcataccaatgatggttcttctggtaatattattccgttgctatataattttgaatgttatgtctcttgaaaaatgtacaccttgatgtttggtttttctttttaaataatttttctacttcttttgcgcagtaaagtagaatgctatggttattttctaaatgaattaattagaagcaaatgcttttttaagcttacagtctgctcttaatagctccaaagttcagaagtatggtttcagcctatcaatcaaatgcttcttttggatgccaacataaatttatacacacatttaaaaacgtggaactaatttaattgggtcattgtggcttgtagctgcagtgatctggtattttgaatacagattaattgatgcttagaaagttgaaatcagacagaacatacgacctttagttgtctttttctaccaacgataccaagaagaagatgaactactaagagttaccctaattggggtttgaactcttcatttccagaaggagcatttgcttgcaccaacattgagatgcttttgattatgatggtcatcgctaacaccaagtaaattatcttctttttcttattttgtcctctttgctaatgtaacattgaaatatacttatatgtttgtatcatttagggaggctaatatgaaattatgaataaaagcgttgaactcatgtttgtttctgcttttttatgctaatttggggaaaataagcatgatatcaagagatgataatttgcgtggcttatctgtcatttaatcatcacttaatgtttgaattcttataaaaaaaaaaacccatttgatcattgatttgattatgatttgataatttgagctaacgtctagatgagacttggagctgagtttggagaacttgagcattgatgcagtttttttcttttttctttttttttttttaaagtaaaatgttagtatttataaagggaaatttgagcataaatgcttaaaaatattttataaaatatgcataattcataaatatattgaaaagcgatgcttgtaaatccacaaaagtttgttatctagatttgaggagtgtttgttctagcttgtatgaaattatttatttcttcaatggtgcgtttatgtttaaagcataaatatttttatggttttgtggttactttggtaattcaaatctaacaatttacacctaatttccattgaaattccattagaaggaaatcttaagctaaatctaatttgcatatgaagaaaaaggtttcatcgaatttttatccaaattgtattaaaagaactttccattgtttaaaggaatttttgattaaatttgcatcaaattccataaaaaattatcaaaagaaactctaaatgtaaacaaatttcaaatttgaaaaaaaaaagaaaaaacaattgtccaaataattaaacagtacggttctataaaaaacatatttatgttttaatacacatcaccttcaataaatatggtgttttaattggacagcttgaatctttgtgttgcttttgaaggaaaatataaaaagattgatgaagtggtagtgagaatatttggatgtagtattgtgagagagaaagagaagaaccaaagagagaaaattgtctgatgtgtatttggtccaggttacattcataagtatagtttccattgtacgtagtctgtacaaaaaaagagtatagtttccaatattgtccgtacaaaataagagtatagtttctattgatgtttaactttaggatattttttcttaatagagtattttcaagtatgtatgctcaaatttcctttccacaacaataatcactaagaacaatctggaccattgactttttttgactgtggaatccaaatttctcaagagataaaaaggcttcatgatatattattttttctttatagaaagctaataataatcttcttttccataatttctccataatatttcaacttctgggttcatttatgctggttgtggagtatattgtgctgactgctgagtgtattataagttgtatgtttggattcagttcccaaatggaattagtagtatcaaatgccatataaagtttcgggttagtaccataagtgttgaaagagaaccctaataaaaaagaagaaaaaatataaagagtgagtaaagagacatttgtctcaatgaattgatggtggctatattaataattcaatcattctgattcttgtatatatatatgcgattataacatgccatgactttgataatttcgctttaatattttgatgaccatggtttgctcgcacaaggcctgaggtatgagtccctcttgggttaataagctgggagtccagtttcaaaagaaaaaaaacgatttgacccaaataggaaaaaggttactcaaatgcctttaattaacttgattagtttgattttttatttcagctatgattgtgtcagtttttgtttcttctttattttctatcgttaattttggtcaagttgaacttgcaactttctatgattttgtaatactacacagatggctgttgtcgattctgagattgtttgccttatgtataacaacctgtgaagattggatttttatgggtccatgttcatttttttgatttgccaacagatttaattttagagaggattgggttaggatattttttataattaaaattattaaaatatgttatttttggccagattgcagtggagggaggaattgatggaaatttaatgaaattttggaaaatcgtattgagtagttgggtaagcatccaaatggagctgagtttcctcattcttcccagtgcccaccttttgattttcctttagttttgattgcttattcgagacgctgattttagttttggtatagacaagtaaacatttatatccaaccaattatacactttaactcccaatttacaagtataactgcatcaatttacttttgcttgatatttaattttactgtacatactttagaatgggtgcagtggcattggtacaaagctatagatatgttattagatattgataaagctacaaatgcttgggatccaataacagtaaagttttgtaggtttgtactctgcttcttttgattttatgttgcggatacctcttttttgttggtttgagatttgcattcttctgattttgtgttgtgtttttggtctattgttttggtattgttatgttggctctactgatgttttattaaatgaactgagaaatagtgatgggatactctttgttttgttaaatagttgtaaaattctttttaggctatgtttggaagttggattttggtgagaaaagagaagggtagggaaaatgtaggaaaaaaaagtgtggagaacaaaaaaataaatcaaaatttcaagtttgaaatggaaaatttttttgatttgagtgtttttctatacaatttttctttccataccaaatatgataattttttttcccttttttatgtcctacattttccctacctttttctttcctcgccaaaatccaacttccaaacataaagccataagcttgcgtgagattgttttagttatcaatcttgataaatgactactgtatggttttacatgtaccaggttttgtcatcactggtgaagaaagaagctttgaagtctgtgatggggtaagtgttgataactgcaaaggacacttctaaagaatgttttctgagagactgactggagaacaatcacttagtcaagattttgaagcactgagtgtgtcaaaacggctggtaagaagtgtcagccagaagttgaggaagaagaaccatagaagtgcatcagaggaagacgatgctgttaagggaatatctattagatgtttaactttatatggtataggtggtggctgcaaagtaggggctgacacaagtgatgaatttggagatccgagtagcaggaggaggtcaagtgctagtgatgaaggtaaggggtataaactgatatgcggtgctgaggaaactggtgttgattgcttctcgtacggggtgaaagagagattttggaagaaacataacagaaaggattttgaacttgaagagtcagtaggaaacagcagaatgcacatatttcttcctgatgacatactggaaatgtgtttagtgaggctcccactggtcagtctcatgactgcacggcttgtctgcaagaaatggagacacttaactacgactcgtcgatttctgcaaatgagacgtgaaggtttacatcaaaatccatggttgtttatgtttggtgctgtaaaagatggttattgctctggggaaattcacgcattggatgtgtcccttgagcagtggtacaggatagatgccaacattctcaaagggaggttcctgttctctgttgccagtttccaggatgatatttatatcgttggcgggtgttctagcttgacaaactttggcaaggtagataggagttcattcaagatacataaaggggtaatattatttagcccattgactaaatcatggcgtaaagttgcacctatgaagcatgcaagatcttcacctattttgggaattcatgaggtgagtacagatttttctgttggccaaatgcatatatgtcggcaagataggcgtcccagaacacggattggtggggtctcggatgtttatgaagaccctcataggctctctttgaggcgtcatagcagaaattcaattgaagaaaatgagacttcattgcccagtagaaagtcatacaagtttgccagaccaagaagtgatcaaacagggatgagaagttccaaaaggtttgttctcattgctgttggtggtcatggatcttgggatgaacccctagattctggagaaatatatgattcaatgtcaaataaatggacagaaattcaaagattgcctgtagatattggagttgtttgttctggggttgtctgcaaggggatcttttacgtttactctgagactgacaaacttgcagggtatgatatagaaaggggtttttggatcggtatccaaacaacattcccacctcgagttcacgagtactacccaaaacttgtatctagcaatggtcggctattcatgctctcagtttcttggtgtgaaggggatggtcaaataggaaggagaaacaaggctgttagaaaactgtgggagctggatctcttgtatcttacctggacggaggtttcagtacatcctgatgctccaatggattggaatgctgtttttatggctgatagaaatctaatatttggcattgaaatgttcaaaatatttggtcaagtcttggatttttttactgtatgtgatgtgtcagataaggagatgcagtggaatcacatatcaagaaatcatgtaactcatgaatttgatgcttcatcgtgcatgaccaagtccatggccgtgctacacttgtaaaatccccctttattctttcaactctcatgctagacatctcaaaatatgcacaatgcaccaatggctcgccgttgtatattggtgactactacactacccatgaactttgatttcctaataaagctctattttcttaattaggtatcttttgcatatgtaatgtttatattttaaatgtttaccaaacattcatttatatttataattatattgttttccgtataaggttgaggtgatattattttctctcttttagctagtactttcatgtttcacatgtacaaaatcctatgagttaactaaactgttattatatttgaagtggaacattctccaacgtgtctatttgtttttgttgtaagcattactagtcaaaatcttgtttttcaacttctcttgtgggcgatgctaaaagttaaaatttagctgtgcaattctatacagatggagctgtgcaataaacaggaaaaatgttgaaattttgagtaccaagattcaatgattgatgataagtggaacttgtaaaataaatggaaatcttgcatcattaaagaagaaaaaataaatgaacaaggttaaaaaaaatgtacaaataggacatcttttatacaacaatatataaaacctttccttttaaagtatgtgtgactgtgagctacacttaaataaagcttcttatccccttattggtggaaattctaatattagttcggtatcctatggacatgtttcagtgcaagttcgattattatatgatatagtcagattttgtagtaaccatcctagaagaaagcttcacaagataatgttaaaatttggatcactagtagtacttactatattcacgttttcatcattttttttttgtctccacatttctcttttccttattttccccacttatatatctcactcttccacttcttaacatataatttttgtcctccatgattaggtttgggtagaggtggtggtgcggttatagctaatttagcatattccaatcaagatctcaaaaccgcaccacaaaataacggtgcgctctgagcgattatttattagatatatatatatatataaatataatttccatcggcggtaagtgattattttttatgtatatatatatttatataatttgttgtattttgaaagatagtgtagagaaattgataggagtaatcttacctgttttgatgtcgcatcgatgctttctaaagataaacttgagctgttttgaccgtgtcatggcatctttagcaaaagtgatctcatggaaaagcttgcatttgatttcaggttctctcctctgttggactaggcttctaacaacatctcaggaacgttgcatcctccgttaataccgatgattggttctatcgtagcagtgtgattgtcaattaatgcttcaacagggaagtttaccaatagagtttgatcttttaactcgttttgttagattgaaattctaaagtgaaaagtcatggattagcatttgttgtttgttgttggttaactggccgggtatggaagggaagagcttgttgtggaggaaagggtaaatgatgtttgatgaatttgtttattcatttctgagtttgatcggtttaa

SEQ ID NO: 42526 - DNA, 9674 bp, Cannabis sativa
aaaatatttaaaatttcgtaaaatgaaattttataatttttttgttgtttttgtgtaattgtgaaataatcttatataattaatacttacaatgataaatccagaaagccaaacgaggaaggcatttgaaatgagctatgcaaagccactcagtttccacagcaaaatatcttgtcatctcttccttttaatccagcttaatgcttttttgatgtgaataatttcagtaaggacagagatataccccgacttagataacacaaaagtcccaatcaactttctattactatctcgagctaaggtaacaacaccataaacatcttgaccatattagtatccaatttaatctaatgctctcaacttttaaagtaattaatagtggctcaaattttcttgattgagcatgtttttattagtcaaaaactaattctgccgagaaaccacataagtagaataatatgttttcttaatattttttctctgttaagagtattaatgataaatataatctttatagacataataataaaaatagtgattataaaaataaaaattataaacttaataaggataaaactaaaattatgtgagataaaagtaaaattacacgaaataaaaataaaaaaaaatatcttttttatgggaataaaataaaaatatatggtggtataaataaaaaattattaattttataggagcaaaaactaaaatattttaaaatctatccacaaaaaataattaaataagaagttggggggctttttaggttgattgtcgttttctccgtttgttgtcgtgtttcaatatttctgtcgtttttccgaactgttgtcgtttcccgatatggtgtcgtttgtcggatatggtgtcgtttttcagatatgttgtcctttttcccgatatgctgtcgtttttcgatatttatgtcgttttcttcatctgttgtcgtttttagatatatatgtcgtttttctgatctattgtcgttttcctcaccccagctgctatctccgtttgttgtcgtttttcgatatttctgtggttttcccgagctgatgtcgtttcccgatatggtgtcgtttttccgaaatgttgtcgtttttcccgatatgttgttttcgatttttatgtcgttttccctgatctgttgtcgttttcgatatttatgtcgttttttctgatctattgttgtttttctcgccagctatatatacagctcaaattcattcaaaatttattgttatatggtcatgtctaagattcttctttctcgtatcaaaccacttcacaaccccaaaacctgttcttctccatcatacctgaagaaactcgtggatgaaaccatccatatcctcaatacccacgaccagtgggaacaatcccttcaaacccagttcgccgaatccgaaattgccgacgttgcccattttgttttggaccgattatacgatgtagagttgggtttgaagttttttgattgggctaagaaaagaccccattgttgtttctcaaatgggtttgctcattcttcccttttgaagcttttggccaagttcagagtattttccgagattgaagaagtaatgggtcaaatgaaaatggaagaaataaaaccaactcgtgatgctttgagtgttttattacgcacttatgtagaatctgggtttgttgataaagccattgaattgtattatatagctgttaaagttcacgattgtattcctagtgtttttgcttgtaatttattgcttaatgtgctcttaaaacttggtaaagttgatattgcacagaaggtgtatgaagaaatggctaagagaggtgatagagaatctctttcattggataactacagcactgctattatggttaagggtttttgtaaagaagggaaagttgaggaaggaagaagattaatggaggatagatggggaaagggttgtgttccaaatatagtgttttataatacacttattaatggctattgcagaaagggggatacagagagtgctaatgtacttttcaaggagttgaaattgaagggatttcttcctacggtggaaacttatggagctatcataaatgggttttgtaaagaaggcaactttatgaaaattgatcatcttttgatggagatgaaggaaagaggtttgaatattaatgtccaaatatataataatgttataaacgctagatatatgcatggtttggtggtgaagattgaggagactctgaagacaatgattgagagtggatgtgagcctgatattactacctacaatattcttattactgaatcatgcagagaaggaaagattcagaaagctaaacaacaattagaggaggcaataaagagaggtttggtaccaagtaaatttacttatactcctcttctacatgtctattttaaacaaggagaatactctatggctttggaattgttagttgagatgacaagaaaaggatgtacacctgatttgatctcttatggagctctcatccatggacttgttgttgtaggacaagtttctactgcattgactgttagagagaaaatgatggataaaggtctacagcctgattctgctatttataatgttttgatgaatgggctttgcaaggaagggaggtttcctgctgccaagctgttacttgctgagatgcttgatcaaaatatacaacccgatgcgtttgttttggctactttaatggatggtttcattagaaatggcagccttaatgatgcaataaaactctttgatcttgcaattgaaaagggtatagaacctggtgttgtggggtacaatgctatgattaagggttattgtaaagctggtctgatgacggatgcgctattgtgtgtaaataaaatgagaaaggaaggcctatttcctgatgaatattcttattccacaatcattgatggctttgtgaaacagcatgacttggatggtgcattaaagatttttgggctgatgttaaaatggaaatgcaagctgaatgttgtcacatacacctccttaattaatgggttctgtaagaaaggattttccagcaaagccataaaaactttcaaggaaatgaaatcttgtggtctggagcctaatgtgatcacatacagtatacttattggtaacttctgtaaggagagtaagcttgcagaagcagccttctattttgaactgatgctgaagaacaagtgtaatccgaatgatgttacttttcattatctggtaaatggttttacaaactgtggactagctgaattttcgaagagaaaagaggaatctgaacagaggcataaatcaatgtttcttgattttttcgaaacaatgatttcagatggattggatcgaaattttgctgcatataactctattttggtttgcctttgcctacatgacatggttagaactgctttacagcttcttgacaagatgaaaagcaagagcttctttatggattctgtatctttttcctccttgctctatggaatttgcaaggaagaaagatcacgtgaatggaggaatttgatcccgtgtactctcaatgagcgggaacttgaaggcgctgttaggtacttacttaagatggatcaatacctgccaaaaggagcaacttctaaggctatgaaaatattgcagtctttggttgaagactccaaatcctatgatcaagtggaagatcacagaatctcaataagatagaaaaatagacttaaaaaggaaggtctctctctacaactaggaaatctgtatcttaataaaagttgattcaatttcaagttaacataaattgtatatacattttgatatatggacctttccattacagaaaaaccactgcttccattagactcactagactacttaaagagcatgctgctcataatttcttaccttgtactgtattatgaatgttttctgtacatatgggaaagttgtaaaactatatgctcgtgtagaagtatgatttttgcaccatgtttgagacagataaggttctttactgaaatcaaattttgttttttttaagtatatgataaatacaatagctcctcttttcaagaaaagatgtaggcattaaatttatacaataataaatcatacaatatatcatcttaaccaaaatctcgttgacaatgcaaacaattaatcactaaaaacaattgagaggttagcatcttaatcagtccttgtcagtggtaaatgatagccgtacggacagctatcttctttgaatcttttcacaagagatgaaacaaaacttggtaatcacaacttgaactcacaaaagcaatcaggcaaagcagatcctttccccattacgaaatcatctctatgagcttcccacaaggcttggcttaactcctctcctttcaaatccttggaagtgaattctgcaaaagctctcctgcttaagaaaagagtcttatacaatcccttgaaagctctcattgctgcaaccatcttatccatgttcccaaagtaagttgctacgtatgaatcgctgttaacagaaacgtaataatccaaagcagctttagtgttcccatgcatgcttctaaaatcttcaccactaagaagactagacttggtaactacattggtgtaaacagaagttaatccttcaatttccattaggccatctcctgctgccaaatatatgtttgtgttcgttggaattttgagagcttgaagtataaaggccgtttcactgggtgtcaaaggacattttccccgttttctccagatctgagctaattctccagtccatggttttctatctccctgtgcctcctcaatagctttgagtgaactaggggacaggccagcatactcacattggctgtaagcaaccatgtcaggttcaaatcgaaggtgaagtgagagaaatggtttgggcatagcttctaaaagttcagctgctttctgctctatggatcttgtgagacgtagtgcattataacaagcttgacaaagggcagcttttgcatactgtggatacctgcatgctcatgtacccatagacaaacatttttagtggtctgttttacataataatacagtttcaacaacagcgagtttaacttgttctagatctagacaactcagttcttttatgaccagtaacccagaaacagcacaaaggcatagaccatgattatacctgtcccttctttggctcatagctggtgtaattgaaatatactgatgctccatcagtgaaggaagcacactttcaacgtagtcaaattggcctttgcgttttctacagtctacatgaaacggttcctttgatgcaatctctggtggcaactctttggcaactctaatgaagccattcatttgttgaatgaagtggtcaacatcaaatatatctgcaaagccactgaagtgcaataaagagttagatagtagagacaagcagagctaagactaactatattcttaaaaatttctaaataaattaccttgattcattccagtacgcagccacttcaaactttggcaaaaccagggtcgcattcaaaagacgggcgataccaacaccatcacacaactgcactcatcacaaatagcatccatgctcaaaaaagctgaaacaaagttcgaccaagtttgaaaacataactggaaattgctctactaagttaatcagccatcactcacatctcttctcatctggttgaggccgccatagcaatccactcgaatatatccattacttttggctggaagagctgcagcatttcaacaacaaaaaaaaccaaagcaattgtctgcaatgaaagtcaagattgactcagaatatcaaaacaactaaatcacaaaccccaccccaacctttctatcattccatataatcatttattatgtccattacccacaatgccagaaatatctcccaacaaaacaaatccaacttttcaattaaagtcacgcagatacagcaaattgctgaaaaacttcattttttctaacatatgcaaacaaaagcacacttgaaataactgaaaaaacaaaagcaagagaattttcaaatacctggaagatgtccttgtagccaccacttgcaaggtctccattcaaacatcctccttacattccaaatacccttttctcctctgcgttcaaaagattcagcacataaaatcaacaaacccaataaaaacaatattgcagaactcacgatccaaaactcaattcttatccttggattgtaatccaccaaatatgcatgtacagtagtaagatgtaagatttgaatcaagaaatcaaaaaccccattacgaaattagtacttacagttgttgtgaagttgtagaaagtaaagtttgagatgatggagaatagaacgagaagagaagcaagaggaaggaaaaagagagagcaactaccgctatgcctaaggtgggcttcactgatattctcaccaccattttcgggtaacactcagattcacaatcagatcacacacagaaaactcctcaaactcagagacgaaactgaaaatttctatggcttaggaatgagttgtggaccatagtcgatcggattctgcatcaccgactttgcgaaatggtttgtttcttccttcgcttgagtcgttggacttaagatctaaaacgacaattctctgttttcctctttctgcaaaataatgtcgtttccatttgaaatacgacatgtagttttaaggtcatttaaaatggagaaattaaattagtttggaatgttttccatcaaaacaataaaaacaaaataagatgagaatattgatcaaaaaaattatttttgaaaatagtggttacttatttattatttaaaggtattaatcatacttataatttttattagtgtaattaaatattaattatatataattttttttaataaattagactcatatattttaatttaataattatatataaaattgttaattatttatagcacttgtcaaatagtgatattgtgtataaaaaaaaaatagcattctcaatatttaaataaatagtgagaataaaaatataatattgcgttttttttcagacattatattaattgtatttaatagattaataaaaagtaataatggttcaactgtgaatatttctataaactctttaatacagccaatgccattatccttgtttgatgaaaaatagtcttcattggccacaataatgccaggtttaagtttggtctcaaagaaagaaaattttacaccgatgtaatcatctcaactttcatttcaagatctcagagaaagactgatcatgttaacattatccaaattacatacacaaaggaaggctgagactaaaatcaatcatgtagttggaaatttcacaccatttttcttcttgttagcaaataatccaacatttgacaacaagggtgtttactacaactattggtttttcctgtcaaacttgttaacacagcttaaaacttaaaatgcagtatcatttgtttcgatgaatcatgtaaacctatccaagacacttcagtacaacaaagtaaacctataatcttcagtcactttcaaactcactttcttcatttcttgatgctttaaagggcctattgcctctcatggcatttgcaaactcttgtattgagcaagaagtacttcgttccattttacaagcaagtatctcaatctgttcaaggagccccaagcctaaaagccgattcctcaacatctcgacggtagatgaatatggcggtattccttcatctaccatcatctcaaaatacttacaagcctcctctagcttacctttcttcttgcacagaccatgaatcatgacagaataagttgaagcagaaggataataccctttcactgacatattctcccaaactgcagccattcgatcgaatctccctatcctgatcagtagtttgagcaccatattatagctatgacgatcaggaacacagttatcattttccattctggataataacttaagagctctattaacctcactatgatcacaatggaaagcaagcagagcattgtaactccaagcatctggtctaacaccatattcaatcatttcatctaaaagttcataagcctcttcaaccttttcatttttcaacagtttcttaatgatacaattgtaagtaaacacattaggcaagagactacactttctcattctatcaagcacacgaaaaactgaatgaatatcattagcttcacagtatgctctgatgaagactgagtatgtacaagcatctggttcaattccattcgatggcatgcctcgaaaaatcttgtaagcttcatcagaattccctcctttacacaaggcctccaagtagctattgtatgcaagaacatcaaccaagcattttgtatcaagcatttcatcgaacaccttacgagcttgatttccatcaccaacatcaccccaacccctgatcaaaatgctaaaagttttcacatttggctcaaacccacctttgattttatcaaaaaattcatgggcatgcttgacatgcttccttttgcataaagtatacaaaagctgatcaagatcatcaaccccaggcttgattccaaattccaccattctattaaatgccctaatggcatcacgaggcaaattagctctactatatgctctaaaaacaatccggaaaatctgaggactaatctcacaacacttggattctctcatatctatgagaagatcccacaagattgcaaattgcttgctacttcccaagacatcaaccaaaatatgatagctctcaacactgtgttggaaacccggaattgttttagcccaaagaaagaatctgtgtgcagaaaagccaagatttttacaccttttaaggacttgttcgactgttgttgttgatacatgggttgaaaatgtattgagcgaatgttccaagtcatcgtggggattgcggtggtcgcttagaactcgggaaacatcgttcactatatccggtggcgacggtggtaatcgtaggtctgaatgttgtagagcaccagaagaaaatttaagggtagtaacgaaagagcgaaggaatatggattttgaagagagaatcctaattgccatgtttctaactttcgtttgcatgaaagaggcctttgactctttgagtcccaatatataggcattgtaatttgtaagttatattgccaaaattagaatgatgccaaatgtgtgatgagtttattttgtgttgaatttaacatggaacattattgttagacagcgaagaacattattgagcaccaataagaccctttaacaaatctctagactagacaaccaataagttgtctagtgaccaaatcatcataggtggactgtagagccaacctgcccaaggtcttggccaacattttgtaggcaagaagctctcaaggttacgcataaaaagaggagccacaccacctggtagcccctcgcaagtcctccccttttccttttaaaaaaactattctctaaaatatagtcaaatttaacacaataaatattgcaattaattataggcatttcgattaacaattaaaaaaataatgataggaagattatatttcaatgcttcggatttggaatataaataagttaaaagaaataaataaataaataaaaggaaaattaccccttatatcattttttttaactttttttt

SEQ ID NO: 42527 - DNA, 4054 bp, Cannabis sativa
taaatatgtttacaacattttgaacaaagcacaattaagaaagcaagaattccccaatacatgccattttcattaaatctttttgcctaaaacacaagaattgttcagctcaacaaggtattgcaatttgaatgtattttgaaagtctaaatgttcaaagcctccatgtcaactaaacatggaaaatacttactttgattgagttccccatgagattcgtgagaatttggcgaaaccttccaggatcgccaattagcatattaggaacccggtctgagatataaactgccaactgcccgtccaacaaatagtgtcatataagtttcaaaatgacatatttcagataatgataattttgttttataattaattgattgttgtctctatcaatcaaataaaaggaacaaaacaatgaagtttgcaataccatcccatgcatttagaagagagaagagatgaatcaaaaaatggaaaaatatattacctctactcccttttcttgagattttccggaaaagagtgacaaaacatcatcaagaactgctcgcaggtcaaagcgcaccgcctcaagttcaagcttaccagattcaatcttagcttgatccaaaacctcatttataagtgatactagtgcttttccactagcctgggcagttcgtacataatctttttgagttatatctaagtctgtatccataagcatatgcagcattcctatgatataaagagaactaccatgtcagatatcaagctttgtgcagttactaatgttagatttaaatacacataattttattttgcagcaaaatatagacataacttaaaacaaatcaagaacaaactcaaaactcaccaaggacaccattcattggagttctgatctcatgggacacagtagcaaggaactacaagggatttaagtttgattagatcgacatgcacatggaaaaatcctaaagaaaggtattctgtaattaaaaatacctgggatttagcaacatcagctgcctcagctcgttttttgagctccatcatctcgtggtaatcatcctcaacttttgcaattcgatttacagtagcatggaatatataactaatgagcagggctatcaccaaaattccagctgaggtacatatttctaccattggcaatggtggcttatggttgaatctgagataaaaataaatttagctttgtgaatttacattgatcattttatcttttaaatagtgttgaattgcatattgtagctttacaacaaaaatatctactgatgtagtttgaaatggaaaaagaagaagaacaacccttctttaaatgagaaacagaacaattactatgtagtctatggttttggtccttattatagcaatgcaaagtgagaagacatatgatagcaacgaaaaagctacaattgaaattttaattcagttacctgcagtgcatctcatgctttctaataggatctccaaaatttaggcggctaatctgctttaacccatcatctgaaacatttgaaccatacatactgattggttgtgattggttagtagtatcatatacattcacaagtatagtttgcttgctggcaagttgatgcagcaacttctccacaagtgattcgatatcaaagaccccaccaagatacctgcaacagcagtagtattataaataaactaattgcgaattgccactagatctagttgatacaaatattccaatgtaattgaatgcccttttgctatcacaaatgaaccaaaatatcccatttcaatcttcggtataaattcaacaaattagagcataaagaaaagagatagactctgttaacatgtatgcgatttgaagaaaatatacccatccgtagcttgaattctttcatttggagttgcatttgagggaaggtcccttttgtagacagcaaatgtcaatattactccaaggcggtttgttttaataagcggaaaaggagcagttagaactccttttcctgatgctctagcacgcaatacattatcacgatcttcctgtgatacagcatatgaaaagttttgagaatgtcatatgataacaaatcaagagatctaattgaagaagagaagggaaaatgttctagtaaagatgaatttgaggccagcgaattttgcttatatatagcaatgcataatctgtgtgattacaattcaatcaaaaaatgagcaaaccaaaaaactataagaacaagaagtctccaaaaactatgaaagaaaattacctttccagatagcatatcaagagaaaccacgtgtgaaatggtatcctgagcgaagatgacaggagcatattcttcttgaattggggcgggctccaatttttctggtgcatactcatcttgacgaacagggttttgttcgagggcatccatgctcttgatagtccagccttgctgcttctcaaattgttccctttcagagtggaggacccttacagcatatgccaccccacttgtgagaggtctttcaaaagcagttctctcagtgtaaactgcaaaagttgtctacaggttctaaaagtcagtttatattgttaaaaagatgctaacactaactagttaagaaaaagaaggagttcagatctgggactgaacgtaagctaaataagcaaaccttaaaaatcttgacataaacccttggaaaattctctaatttacttattgaactaaacccaaaaattaagtaaaagaataagacaagacaagactcgagtatcctaaagtctgtaagtgaattgagctctacaaaaaaaaaaaaaaaatagatacaattattgaccaaattacagttacaataaaaggccaataatgggttgttaattatgaaaggagatccaggtacctgatcaatggcagatgggtacttgccatggtggaaggtggaaatgaggatggacatagcctgaacatggttcatgctcacattaaactgatcctgcaacattctagccctctcatcacacatacttgcaagagtttcttttctcttctctgtagcttgggagcacatgtaccagaagatccacaaagatgcaatagtccaaccaagtatccaaacaaccaaaagccttttccaccacatgttcctgactcttttggacccaaaacactggcaatagtgatggtggatcttattaaagctccctgagatcttcccccaccatttgaggcataccttgccaccatcaccaagcaaaccagtcttggtgtctataattccactattaaggaaccaattcatggaaatcacatatataatccaggaacatattgcccaaagaagatgacccaccctaaaaccaaacccaaatacatgaagaagcaaactcatccacagcagtaaccagcacaagttaaacaagtcacagtgccaatttcgatgtgggtctcacctagtttgctaattccaggtactaatctgatgtggaaacccgcgcgtgcttgtgcgtgagagagagagagagagagagagagagggagggagacccactatcaaatctacagagaaatgtctgcttcaacacagttaagggaagaagaaagaaaaaataaaaatcaaatctttgaagaagaagaagaagaagaagaagaaataccaccccctcaaattcactataataaagatgccatcttatccatccacaccaaaaaacatcaacttgggaaaatgtatgagaaagcccaatattaacaagacaatcactagttagagcttagaatcaaagaatcccaaagattctggtttcaaattctaagcagaatttaattttatcttgtaaactaccaaccaaaacccagaataaggaacgagccaaagttgcaaacaaagattcccaagtgtttactaatcaaaatcacagacaaagaatctgacaagaaatctagcacacgagatagagttagtgagtgagtgagagaccatgaattagaaagcaaaacaaagaggaaaattcaagcatgtgggtgtttgagttgaggttttggagatttgactgactgagaaaaccaaacaaaactaaact

SEQ ID NO: 42528 - DNA, 2413 bp, Cannabis sativa
gttaaaccaagaaatgccgttagataggtacttttaatatataaagatatacataaaattattatttatataaaataattagaactataataatttattaatataggatttttattagaataataatattctttaaggatattttatttatatattttaagttatacgagactattgtgaatgttaaatttataagttatatatatattttattattgtttcttccaaaattagtattatatattttatatgcaggtgattaatattatttatttaatatgtgtgattactaaaattattcttaaaatacatatatttttttttttttatatatttttcaatctttgtcaaatatttaaaataaaaaaaatcttttaagttttttaacaaacaaaaaaaattagattttttatttaaattattaattttagttgaatatatataatctatctatctatataaatctataaaggagaattataaagaggccatggcatggacccggcccaaagtgacaaatgcctagcccacattgtagttactcacgacaacattgagttctccaaacctggcccaactctttctagggccaagaagattaaggctagcatgaccatcatccctgtcattgctccatgggacaatatcataaacctgggggataaaacgtcctctacgcctgctacgcttcttcctcccctggaaatcaacactttcactccgggcagcagtggtagttttgagggttctacgtctaagagaaagaattacaaaaagaaaacgtggtgggggctcgggaggtacacgaagctccacaagataggggtccagtaatcgaatgattcgtaggagcttggatacgcttgaagttcaagggccaggtacgagtaacaatgaattggaaaataacttggttgatattactattcatgaggtgcaaaaatttcaactgggtgaggaggtggtccttatcaagctccctccttcgccatgaggctcttatcgtggaattgtcgaggtgtgctgagagccccggcaacccaagcccttcatgcttgggtaagaagatgcaagtcggagtgtatcttcttgatggagactaagaccaacaaggaggggagaaaaatgattgaaagagctctggggtatcaattttcttgtatgattcctgctgttggaatggagggaggctttgtattgatttggaataatgatattaatctgaaagtggcagaagctactgatggtatctttgaagtcgttatcaatgatccattaactagttttaagtggagattatttgcggtttatggtagaccgtacgatcgtgagaaaatatcattttgggatagcttggcactgaggattaataagtgctccatgccatggatgattgtaggcgaccttaatcttattgctcactcttgggaaaagagagaggggaaaagagtatcaccatgtgatatgagtactctcttgaatttcatgcaccatactgggggattgatttgggattctacgggtgccatttcacttggcaaaacaatactttttctggtggcttaacgagagagagagattggattgtgtcgtggttttgggtgactggctggcccattttccaaatgctaaggttactaatgcgccaatttcggtttcggaccatgggtatatccttgtggataccggtagtgacagacataggggatttaagccatttcatttttttgaagcgtgggccagggagccatcgtgtgtagattctatcaagcaggcttgggatttggagggaaaaagaagtgatagaattttagtaagattaagtgacactagaagagctcttcaaatttggaaaaaaggagtattttggtgactgtgataagttgataaaagcagcaaagaatagactcggttggatacaaagtcagcctattttggatcatcttcagcaagaggaagctgctactcaacataaaatgttggagctttagatttgtaaagaaagcctttggagacaaaaattgagagaggtctggctgaattaggggacagaaaagttctttcatgcctcaacaatcattagaagaagaaacgagatttcagccataaaggataataatggagcttgggctataaagggaaaaaagattggagatgttttcaacgagtttttcataaagctctatagcttcgactctacgatcatcgatgagacctttcatgaattccttaacccgttggttttggattctgagaatgagatgattaaaagggtttctatgcaacaagaaattttaaatacagtggcagctatgcatatgttgaaagccccagggccggacagaatgtcggggtgtttctacaggcgttattgggagattgttgggatggaggtgactcaaatggtgcaaac

SEQ ID NO: 42529 - DNA, 1062 bp, Cannabis sativa
attaccgcgatagcaaggccttcttggacagagatgaagagaacaccaaagaaggcagtgagcatgacaacgaaatcaaacttgtcagtcctccaaatgttgatagcagctggaacatcaacaaggccaatcaccgccgtgacaattatagctcccaacacaaggttgggagtgtattcgaagagtggcattaagaagaggagtgtcaccataaccgttattgacataactatgttagacaccgctgtctttgctcctgcattgtggttcaccgcagaccgcgaaaatgcgcctgtaaaataaaaacaataatttgagttcacaagtcttgttttaaattcaactaaacataaagtatggtcaagaaaagttacctgttgtaacatagcaggaagtgaaggagccaactatgttcatgaggccaatggccatcatttctttgttgccatctaccctatagtccttaagagcagcaaatgttctcccaaccgcaataccttcctataagttagaatgaaatttgctcttatgattataatggtaaataaataaataaaaaagagggaattatgaggaggatcttacagtgagggaaataatgccagtgacaaatccggtcttgatcacaagtccaagatgggaaccgtggaaaaccaacatattccatgaaggtgggtttagtccttcttgtaactttccaatctaccaaataaaaatggtatttttagaaataaaatttacaaaatgagtatttatgtgtgtaaaatataaggctaattaacaatttttccactcgaacttcacatgtaccaaatcatgctctttgaatttttttagttgttaaaaattcctcctgaactattaagattgttagatttaagaacttttgtttaattttagtaaaaaaattctaacacggataaaagttccgggggcatggtttagtacgtatcgaagtttgaggagcatcatttggtagatatcaaagtgtggggagcatattttagtacataaacaatcattgaaatagtaaaattgaatgaaattaagatcggaagagcg

SEQ ID NO: 42530 - DNA, 4393 bp, Cannabis sativa
acatcacaattcagttttatccaatcctgagtaggagggttccaagtttccctcgagatcggagtaggagcaggcaagagagaatcatgtaactctgcaaaagaagtacaaatattgtgaatacatttcatcacatctggaggagtgctattgtgtaccatttcattacgcgtcctccagatagtatcaacaataatcgatgcataaagaaatacatcctcagcacggatccccctatgcctaagatcccatataaatttaatctagtcccaaacatgaattctagtatcgcacacagggtagttaccccaaggcgaagatcgccataagtgttgcgccacctcgcaggaaagaaataaatattcaatggattcctcccttaaaccatacaaagggcaatttgagttctcaatctgaaaccttcttcaaattactgatctcacagggagcgcattagaaaggatacaccaccaaagaactttgtgacgctccaagattttgctattccaaagcggtggagcaacagtaaaatgagaagctctttccaaggcttgggtcaggtaagccaatttacacgagaactgtccattactttccaagttccaaatccatttatctttaccctgccccgatggcttaccaccttttaagattgcagaaacagtttcccgatcaaaaagactgtttagcttgtggacatcccaattcccattagtcagcaggagatcagccacaaaatggtgatctggtaacacatcaccgtttgatttcgggatgaaacctttacaatgaggtatccaaagatccctccagatgctagtatctctgccatctgccaccaatatacaggcccttacgagatgaaacctttacaatgaaatatgagttgattaagatgtttggtttgttaatagaatgaatatgagaataaatgataaattgacaaaattatcccatacttaatttttatttttatataaaaaacatgtattaaaattatttcagttttactttatttaatcttttgtgaagtaattctcgttatatagtttttctaatgtaataagaattctcgtatatggtgtaattataattacaatatgatcttattacatcatttcaaataaacactgtataaataatttaattccattacaattctccttaaaaacataaactacttgaaaacaagcttgtaaatggctatttggggactaatatgtcaaacctcgcataatttaaggacctgaaacacaaataagtgatgaaaattgttgtccgtgcgatgacgtgcgtaataaggcaacccaggggggtaaaatagtcttttgagctcgaccattccatctgatcgtcagctttgtacaactataaagcaacagtgccctcccggcccatttctctgtgctccaacattctgggttttggtctttcatgaaaccctagaccatctctgtaactttctaagctcaacacaacatctccacctgtgactgagtctcacttttcgatgagcaagagaagtaatgccgaaatttcttgcttattctttttgttgttacatatttccatcgaagtagactaatgcatttgttcgaaactatgttttcttttttttttttttgctctgtttaaggtatatttggactaggttgggttttaatagttaatgttctaggtttgtgttctaagattgtatattggtgttttgtatcctaataataatcccatttcattgtctacgtgactagtcaatattgaagaagttttagctagctcagctctagttaaaatggagggagaaagcagcaagaacaatattcctatgcaagtgaaatcatcaagctttgttgggtattctggcaatgttgttactattgggactgctgaagaagatgatcgaaggggacctgttctaatggaaaatggtggaaggagttggccgaataagaacaatgttttatgtttaccttggtgggatcaagttcaacaccagaaaaatcataactatgtccaatctctaactgaaaaaagctctgcatttcctcaaatgaatttatattcacaagacattttggagaatctttctttagctgaaggtgaaccagcttctgcatatgctgtttccggggtttctgatctccaaagagaagtgctgttgtacaatcacctgggattggcatctggttctacacctacaaatgtaggtgcttggaaggtattatgtgtatattcaaaatgccattagtgaagttgaataatttgctatgcaatattgggtttcgtttgtagttctctgtgtttttatttttagaggttctaacaagttttgattttactcttttaacatatgttggttcctccatacagaatcttacttcattgaacaaaaactcatttgggaaaaactatagttctggagttgatattccaagtgcaaatgttgcttcacctggctctgtatcccaagaccagtccactatacagaggaaaagaaacttaagaaatgatcaagtaagaaaaaaagcaataactgtttgactttcacctgcctaatgagtttctttgtttcataatgaactgatgtagaattgcatgtcatggagaaatttttttggtttcttatatagttttctgttaaagactaatataattagataggatatcaattttgcggaggggctaagaacatataatagttgattaattatgtataggctttgtccaaacagcaacgcaggaaacggtatgctgaaacactcaacaagttacaagagctacttcccaaatctgctgaggtaattctatgtattaattgtgctgccaagagggattatcttaaatgagatgtagttgaaaatcttgccttaaattccttattgtgtgttctctttaccatacaagactcttatatgtggttagttttgaacttgtagggtgtaggaggtagtcaagtatctgtatttgatgatgtgatcgattatatcaagtacttgcagctacaaataaaggtaaaagcatttctttctcagttctcacaaaacaatcacttgattatcaatcaatacaggaatataatcttccttacactgccaccaagtcaaactatgtgtgtaagtaatctaatgtcttatatttgatacgatcaactataacagaacatctacaattgcaggatttgagtgaaagccgattgggaggtgaatcgccaaccaaacctatcattttccgcgaggtatataagtatttacattttaatggaagcttattttctttcccttcaactcatcaagtgaaaattttatctgttttctctgtttcccttgcagggatatggccactacttttacgaccaagaaacgttgaatgagcctttggaagagataatcatggcgaaatggttggaggtaaactctttagctgtgaccaatatgctggagaggaaaggtcttcttctcatgcccattgaatttacggaagcactacaatgatttgttatgcacatttctctcttgatttccacccaaaatagttaccagtattacgtatttttgtaatgaaattaaatgtctctacctctttcttgaagaactttttaagtacaatcaatcgcacctactaactctctttcaatttgggtaattttggttgaatttaggcaattttattatgtactcgtttatgtgtgttctgtcctttaaattacatttggcaaaataatcaataaatttatgcaaataataataaataattaatacaaggatgttagttttaaatattatctttaataaaaagataacaaaatttaagataacaattttaattaaatttgttcaaaaaaaataaaaaataaatatcactataaagatattctattcacggaaggttaaagctttcgggaatacaatttcagtttttatacatataagagcactcttatagcatttctattgtatcctttaaaatatttatcaaaattttatttttaataatcttatatcacatgtttatattacaccatctattaatttctctttatattttttttcataataatttaaataatatatattatatatattttttatttatatatattttattaattaaaataaaaaggacaaaacagtgtaatgaaataataaaaacatagttaaaagaatgaaagacgaaaaataatatataatatttttagctcaccattagttactgagctacgtgtggccgtgacggacccaaaatttttactttgtaggggcttatttatcattaaaaaatatatatatttatattataagggaggagaaatttgattttttatgcttacatattcttaaaaattttcccctaaactcataatatttgatatttgtaggatatgacacattttata

SEQ ID NO: 42531 - DNA, 2838 bp, Cannabis sativa
taataataataataataagaaagtctcttaattttgaataaataaagattttacgagtccaagtaaattttctttttctaataaagcaagcatatctaattttagagtcaatttttttataatttctcttactataattgtagtacgagagtcttatatattttttgcacactgcaaatgttaatgttggtgaggagatttttcaaagaatgcgcaaaaactttcttgctcaaataaaacgaacatcaagctcgatatgtttgatacgcacatgaagcacaaaatcgaagattgtcattacatcataaaataagagactcagagattggacatatcataggtgaagctctaattggaaatgagatcacagccgcaagatcttcacaaatcgtctaacaattaattcacgcaataatgatcagcatcaatatatataacctagcttcaaggttgttaaacatagcatggtgtacttatttattagtagctaacttaattaattaattaaggctttggatattttagtaaaatttaatatattaattaattaattatataaaactccattgctaatttaatttaattatactaataataatataactttttgagtttaatgattttaaatttttaagtaataatgatgcctttaatatttctattacaaatgcagacataaatacatataggggtcgggtaagctagaaataaaaatgaaatagggcgattatatatttttatatcatatgatggagattataaaattttaataaaaattatgaaatcatatataacaaaatatatttaattatgttaaagtgatttttatggaattagattttatattttcaccttacacacatagttgccaactaataatattttagttctttttcaaaaaaaaatgaaaatgtgacttactaataaaaaaattactactatatcaaacgatattactttatattatttaatcagaaaaatatttggataagaacccaaaaaaaacctatttacaactaagttccgaatataattaaagaccgattctaatattttcagttggagctacactcccacctagtctacactggtgggagtcttgtgtaaaagatcattacaattcaccaatgaacttaattagttaataaatccctttaatttttgttgcaaattaagaatttaaagccaaagaaaataacttgcccaatgccaattaatgatagtagtgttataataaccttttcaacatgagtcttgattacatttagctgtgtaaccaaaatatcatcaatcaatgagctatataataaaagacagagaaaattagtactaataatccctttgtacttagtgctgttcttgtacaatataatcatattttatatatatgaataaggatatatatgtgtaagtgggggctataatatatataaatgctaaattaatgttatgaaatgaatgctaaattgtgtgggggagattttttagtttcaatagtgattatagtactagattttatataaaatattataattgatactaaaattaatttattttattttaaattaaaatacgtcaaactttatactaaaataggcaccaaaatttcttatgaaacaattctgaattaatatatatatatatatatatatttctttccacacgttaatgagtagtaaatatcaaatgtcataaattctgagtcttttttctcatattgcaacacgtgagaaggaatcttttacttcctcagtggaccccttcaactttttaaactcccacaactttatatatatagctatagcataattatatattcagatcttaagattaaaaacattatataatatattatgctttatgatgatgaagttgatctatattttcatggccaatatatatgtatacagtactcatacgaagcaaattagatcatgcacacgagcattaactatatctttacaataaactttcatctaataaattaatgaagcatatataattaatataaattactactacattaaagtaatcataatagaatatatagaaagatgcatatgaaactgcatattatatatataattgataagttgtacatagaaaaactccataaaataatgacgacattaattattcatgtttttaatatttatatatattatctgaattttgaatggtagatctctcaaatatgctttattttaactgttgaagcttcaaatatatatatatgtatacattgctttgtccccacatgcatatatatatatatatatatatatgtatacgtactacgttcataacaataagataagcttagctaggtgatggtgatcttaaatatatatattaattttgaccacaaacataaaagacgacaaacgtaccacctaggattctctctatacaattccctcaacaaaatgacatagcttgatcgatttcaacaagattcatcatcacccccacaccacccctatctatgtatcttttatacacatatatatataaactccaaatcaaaagtaaatgtttaatcatatctaaacaaattaacacctgggttttgtcggggttgctttcttacctacctatacgtacttttagggttaattaataagttattattatatattactaatagtaaaagctatatcctatcatcttaatatttcaatattataccttcattaatattatgccatgaatgtattatgagatttgttacaaagattgataaacattctaagattatttctaatgaagtgacaaatttttgatacattcgtatactttaaaatagttactgttagggctgttcatccaatccaatcc

SEQ ID NO: 42532 - DNA, 6321 bp, Cannabis sativa
  modified_base (3063)..(3075): a, c, t, g, unknown or other
  modified_base (5383)..(5398): a, c, t, g, unknown or other
aatgacaaaaaactgttttctattctcacttttaaaaacacaattttaaaaactgaaaactgaaaacacagccaaacaagctcttggtattgaagttttaaggaacatgttggaagggacaatcaactaaaagcagtctaagtacattaagaaagttatttagaagttcaacatgaaagatgcaaaaagtagattcatattgttgggcagatagtttgttttgtcaaaagaacagtttccaaatagtacgaaagagacagaagaaatgaaagatgtaccctatgcagtaattttaggatgtttgatgtatgtgatggtgagcaccagactagacataactcatgctccaaccatcctaagtcggttcatgtccaatctgagtattgaatattagaaggccctcaaatggtcattaaggtacttcaagggcacttgggaatatggtttaacctattagaaagcaagagaagagctggggctgaaagggctcgtggacgctgactaggctatgaatagagatacgagaaaaccaactacttcctatgtttttatgataaactagaattgtatatgctggaaggcctagttacagtccgtggttgccttttttgccacaaaagcaaaatttatggctactacagaagcattcaatgaagccttatggctttgaggatattatgtttgaattgaaacaaataaaaggtggagtgaaaatgtactcagatattcatctatctttgtaagaatcaagtttatcatgaaaaaagcatataaacataagactttactggattagagagaagatagaggaaattggttgaattagagaagctcagatcaaaagataatcttgctgatgttgggactaaggtcttaatagtaaacaagttcaagcattacttggacttaatccatcttagaagttagtatactaagatttctagagcaccaactatgatggctgcgttctttcttcatcaccgttaatattttaatttgaaaaaaataggtggaatttgtggtatattttctccaaatgaaaaggtctccgaaagatattcatcttcctagaaaattagttgtctcccagaagagctttcccgaagagttatcttgtccattcggaaggagtctttggggaaagctagccttctctcggattggagttctgaattgctacttgtttcctcttgaaaaggagtcccggatcaccgactccagctagcacctttcctattaggaaagcccttgggcatgcgattcgatccatggtcccgaaagtttacagtttcatccaaaagcactttgacttatgctgacatggagatctagctaagaggagtttgttaagcttgttaagtcccaattaacttaacaacttagcacttgcaaccatcgactttaggatctatatcctaaacctatatataccaccaacacttagcttttctagaagaatgatagaaaaagttcagacgagtttcaaagaggtgatttcgaagagagatattgagaggtaaggagagaggtaagagaaaagagtgagattgagtttgggttttgtttgaagaatcttctgtagatgaaaaagattattgggtaagaatgtgagagataaatactttgagagaatttaacagagaattgatctcgactgtattgtactctattctttctcaatcgataaagaagatttggtagtgttctagaactggaataaaatcatagatcatattaatctacatgacttgaaccagtgtatatcttagtgttgattttattgttttatcgctttattgttcctaattttaatactatattcatctctgttttaatttttgattagtttttgtaacttattaattgtttgttgattaaaattttagttaatttgattttacttataattttcccacaatatatatgtatatatatatatatatatatatatttatattaggtgatgatgaggagacttttcctttccactcatttctatcaatttatgcatggtattaattctagataaaataacataaaaatgaggagtacactataacatgatgaagtcacaaaataataaattaaaataaaataagaacccttttacatgaataggtttttccttttgttttcaaaattcaaccatctcaccaaccaattacaatacccagtataaaatcaatacaaagaagaaaagaaaacaaaataaaaaattgttcgtatacttttttctactcaacgatgaatgttgaagaacactatatgtatattggcctatatagtatggtgcatggcttgaaaaataaaccacaaccattttttctcacatggttattaatttagcccccaacacaacttaatttctaacattgtgtgtcaataaatcgatgtatatatatgaaaatataattgtaggagaagttatatatctttgtcagtaaagtactgttttaatgttgtctgtcttattattaattttgttgcattgagatagcattaatggagttgtcttgatcattaatgttgttatgataagaagaagaagagcatagagagaaaatctcttccactgttccattcatgtaatccctcaacttttcatacgacatgcattcatctgtcgtttcagacttcataagcttcatctcttctaagttgatctgtgggaagtcatcaagttctaagggtggataagccagttggtaaaggctttcatagcttggcatttccatttcctattaaaaaaaaaacacaattataatatattattaaaaacaagaaataatcaaaacaatcaactctaaagaaaagagaaatgctaaagagtgtcagtggtgtttagcactctcttatgtgtcaatatctctgttagttcaattaagtatcgggtctcatatagtttaatataataatttttaaggagtatcgatagtcaatcctaaggcaacatatttagagatgctaagcaccagtactcactacaaaaaatcttacatttagtcataacaaaaattgtgaaagtaaaaaagttgtgaccaaaagtaaaaaagttgtgactannnnnnnnnnnnnattcctatgttgtgactaaaagattcgtggctaaagatattagtcacaggaattataatttattgtaactaaatgtatttttagtcacaatacttgttgtgactaaaactaaattagtgataacttgtgtttaaatactgtattttagtcacaaataattttttgttgcgactaaaaattatatttagtgacaaaaaatagtagtttttttgtagtgactagtagccagtagtaatactaaaaatagagagaataatttaataatgaatgtgatgattatcaagtgatggtgacttgagtgtgatgaaatgaggtgtataaagaggagcatatttatgtgaggaaaaacaggaggagaaagaggtgggggtgagtagtcagtcaaaaagaagttatagaagagagtgaagaagaaagagatgtgagtcagtagtagtagtataatgtattatataataagaaggggaagctttaggaaattaaagagactagctagtactactcatgacttcaatatttactcatggcaaaaactttttgtcactttaagatccaaaagacaactcaaaggacttgttttgtgggccacattttccaactcctattgaccaatcaatcatgttgtatgatttttcgcgtgtttgaacgtggtcatatcatcatgatctatatccttactatataatatatatatatatatatacaaagaaccctatagaggtgtgaacacgaagctcttaatttgttagtgacataaagcagaatcttatatatggatgaaaatgcatatgtagtattgttaattagcaaaggaggtaataatgacataatgtcttcatttttaatccctaaagtaaaaaaaaaaaagataaccctagaagaagattctcgtaaataatcatcattataatttgttttgactcttactgaaaatatccaaaataaaattattagattgatctacgtacgtctgtatataatataatataatatttatatatatatatatatatatacctgaacaagattggaggaagaattgattagagcaagagagtacaaatctgcagaactatttgcttcattatcagaagcaaaaggagcctggaaatcgtccatgacaccattttcagttggtgtgccttgagtgagatctgaagaagaggtttctgatacaaatttattattattattattattgggataatattcatcttcattattattctctactcttcttgaaatttgatgaggaatcttaagatttgattcatttattattacaagagctgttgattgattatccttctctgtattatttctcccattaatgttattattgtctggattttcttcatctttgttacattttggtatttgaattgtcttcttgaagactcggcacagtgcataagaatcctgaaaaaaataaaataaaattaaattaaagtttaatcaaaagcatccattttgatttcttttcattttcatgtaacaaacaagaaattatataacgatgatctagtggctaaagcaactctcaaaaggaaaagaaaaatttgatagagtctaaaaaacaaaagttaataatattatatatatatataggaagtacatgagctaataaagcctaagaaccaaagacgctttcatcatcatatcatgttgataagctattccttttctattgataaagaagaaaaaaagaatactaaaggggagtagcaaaaatctaaagatatttgcttttgatgatatatatatatatatatatatattaacatatataaaaattagatcacaaacagggatttgggaattgggactgacatataatcgacaccgtggattcggagatctatttagcttagcttttcttttttttttttttcttctttatttcaatcaaatttaggattctctatttaatcacaagcttctttctttattcaattaaacagtagaaatagaataaaaaaacagttatatataaataattatgatgagttttgtagtaataatgattacattgaaatgatatagttatatcatatgcagctcattatttcaatctatgcattgtcatatataaacaatttaaaaaaaaaaaaaaatatgcatctcattgaaaccctaatcatttaactttgaggtatcttcattatttttttcagttgtaagacaatgaaataaacaaattatttaatgcaacagtaacagatttagtgagctaattgatgaaaagaatgtggtggtgcaacacattataatatgttaaattaagtagtaattattattattattattnnnnnnnnnnnnnnnnttattattattattattacctttaaagtagaagaaacagtgccaccaagagaatcatcaagaagacgatactcatgcataacccagttagttctgataccatgaggagctcttcctctgtaataaaccaaggttttcttcatcccaacggggcggcgttgcgactgaaccgccctgtcctttccggttgccttccaataaccagctcttgtggctctatttgttcttgaaccatttgggtactttctatcccttggactataaaagtaccactccatgtccttgctcggcaaatatgacttctctaaaattcagtacacatatacaaatccttaattaatgggtttaacatgaattaattaattactaataataataatatctccttacctggcaaatcccatggctcacacttgtagagatcaacttctgggataatttccagctcaattgtttgacctgtgatttttcgatcaagatagtaagctacgagttcttcatctgttgggtggaacctaaatcctgggggaagactcattggagccattgttgtgttttgagagagagaaagagagagtaagtgagtgtgtggtagaagaaaacaaaactgtagaatatatgaactaaaattggttgtacgacaatgggttatatatatataagccactgttgggggaccaaaattagtgaccccacattaaaagctgagtgggccactagaccggccataccctacaataaataatggtgagttttaatggtgttgaaccatgaaagaagaggcacattaaagggatattgggccacattaaagggatattaaaccccagtcagcaatcgcaaaagctttgagggtgagttttaatggtgttgaaccatgaaagaagaggccttgactaggagaatataaattttttattaaaa

SEQ ID NO: 42533 - DNA, 3922 bp, Cannabis sativa
tattattagaccaaaataataatcccaatattattataagttaacattcatcattattattattcccacactaataataatatgtaccaaaatcaaacaattcatacacccatatattaattaatagccagatatatatatatttattaggcattatgcacatgctaataatatcaaatattatatcatcacaaaaaaatctcatacatatttaaatccataaatatgcaaaataataaaaatactcttagctaaataaaattacaaaaatacccttgcagagttagcggatattacatcgcgtgcgaagcacgttagacccaactattattcaataaaatcttgatacatttgagactaaattaattatattttattatttagtagttataattaagtagagattattgatggtataaattagctcaacaaccaattgatatgataatgaattctttacattaggttcaatctaatcgaaatacaaattctctattattgtatacaattacctctaaatttctacaatctttctagttcaactgtttttcgtgctcggaatgatctcgaggatgtattccgatagagcttcgattagcctactgtgaacaagaatctgtcccccttttaaacgacaaggcccctatttatagacgagagtgactgttggtcctttaattttatcctgttgtgattggttcatgtgaattagtttctctttgtttccttgcacgctctttatccttactcctatgctccaagatcctcaagctctacttctttgatttcttaaagttttgctttacgttgctttctagatgagctctgctttcttcaagctgttttctctttttagtgaaatggtgtgcttagcgactctaccatattattatatcaattttgatttgttactaacgattgaattactattttaccactgagatctttttttctcacttacaattgcccctcagttttatgattttttagctcgcaactattttagttgagctcggatgtcatggaaccagttatccaaaacaattcgtgtctcattaatgagccgtaatttatttaatggagtaatcatttcaaatttctggaaaactattcccacttttctatttacccttatatttttattttattcttaatttcgaattcaaaaattaagatatttaaataaggaaaaaaatcaaaaagttttagtaagttccttgatattgtcttctcttcgaatctttatcgagattctttttccccaaatttctattcttttgcttttttgattttgttgctcttaaattttctcttttttttccctctatttgtattttgaaattatggcttcgagaaattttaggaaaaaatctaagactgtttctgagaaggcctctcctattattaagaggagtgtaaataggggtcagatctgattggatctgaatcaattgctaatctgacctgctcggctcccttggtttacttttttggaatgaattatatccgacccaaattatctgaatcgggtcacatcgaaatctttagatccgtttttttttaattatttattttacaaatttaaatttttgtattaaaacttttttatgattatatctattttcaacccaataaaataaataatttataaatttgatctattatttttaattatcaaattatatttttttaatgtatattattatttacattttatatcaaagatgaagtctaatttataaaagtaaaaaaaaaataattaaaatcatcactctatgtttttaatcaattcaataataagataacctattggaagagtttataaattttttttcttataatttgtcctagtagattttgttttagaaaaagtaaaaaaaaaaatgatattaagaaatagaaaattttccaaatatgatgttgatatttttaaaaatccatactagtaaataataatgtagtatatacattacatgaaatcaatcttttgtaattgatgttaggtcgttggacattatttacttatctcactttcttttaggaaaaaaaaggaaaatgagacgagtctgattcgatttggataattttgtaccagatcgggttcccaatccgagatcttataagaaatccatttgtttggatcagaactgccccgtcaaattagggctccgatccaaactagaaatttagatcatgatgccatgcctagtagttgatcctaactatttatctaagtatgaatcatcctacaatgatatctatacaaataccttattccccaaaggggtggctttttgcatgctatgaaaggatgaattggacaagaacttggaagagcttcaaatggttaattgtgtgactttagtgtgcagtaagaacatggaactattacgattccatattcctcctctgataacttacaatctttccatcatcggtgtttcaatgattcaacttgttccgaactttgtccaaaaagttctgggtctggtcaccatttgtgctctcaagagcacaacgtttctcacttttgatttttccactatgttagaagaacttcttgtagtactccctttatcgtttagtatgtctctacgaaaaactctaatgatctggtttgtggttttccgtcttcaaataaatattatggtgcttttatttttttaatttgtggaaaatgacttcccagggttattaatcctaaaatcttcaccatcattaatttgctacccccttctatttaatgattgctgggaatttccttatagttcgcagagctaccttgttcaaattgggtattatccatcactcgaaagacctcacttaccttattgatagcattctgaccaaggaggtctttatttgtttacctaccctttgtgtgtcttcagtcgtcaattcttctgccctaaaaattaaagcaaatatggttggggttaatcttaatgaattggctatttattactaggatttattgagcagggttgatgctgctatataaagacccattagttttttgtgaaatccctcatgctcaaattgaactcctcaaggaaatgatcaacactcatgatcagtgggtttctgacaataatcaagtgatctttagttttgcattcgatttgaacaaagaagtattggattttatgccctaaataaattcttatttcaatacaatcttatttatataataataaaagatcaaataatatttttgactattgtttattgcttggttcacttgtttacttcatgattaattttaacatataaattcttctaaaatctcaaacatgtaactattcataattatagtgttgtcactatagtagaaaataactgtgattatatgatttaaactatttaagtcccacgatttattagtgcactaaatttatactggcgtgataatcagtgatatagtttacttatacttggctaagtggaataacaaatccaaggcattagcaaagaaaataaggatcaaatgtatacggtttacatcggactggtctgatattcacagtggaatagatattataaacttaccattatattttttctaaattcaatatcacttagttgatcatttgatctcaatcctaggatgattaagtattaagttaattgtattattagagttctttgatttgttcattacaagcttacgcatcgttcaagctcatacttgttagagatattattacaatggaagaaaatcaagatgtattacaactctattgcaatataatacaaggaccaacaaagagattaaataaatgttacaacacataatatacaatatataaatacactatagaagaagataagaacacatgtaagataatatatatgtatatataacaagagaataatatatatataaacactcactcaaaaccttgagagtagattagtgggg

SEQ ID NO: 42534 - DNA, 3020 bp, Cannabis sativa
caagcaaaagagcaagtacacaaagaggataagaatttatttatagcgcgtgtgtattcaattacaatttctaatattattttagcatacacatacataatattaaaaaacatttttatttaatttaattttaaaattcactaataacaccgtatgtcgatacttgatagtgtcgcttagcatttttctaattaaaaatatgtaaataaattaacatatgatgacatgagagaattaatgttcaaaaaacgtaagtgttgagaagagagagctgacaatatatgaatgagagtagctattgagttatgtacatatgtttttaaacttagggttttattattatattaaaaaaaaattagggttattattatacgcgattaagaaagatttttttttccttttatctttttcttttttagggttattaaatcctaaaaaaaattaatctaatatttaatttctttttaaaaaaaaatagtgaaaataagtttaggatttttgttatacggttatgaaaagatatatttttaactttattaactttagggttggtcaagttcatatatatagatatagtttagttgaccttgggatatagaacatgtcagcttctttcaagtgggctatatattcaatcgtatattcataattgtgtacagagaacgagaatctatataagcgccacataactcttccttctactgctctccacaaagtatcgtatatatattttgtactgttcaagttcttcgctcgtcatctcttttactactggaataaatatcttaataatattgtatgttttttcctttttctgaatataaattttacgttttaattatatgcacatatatgtgttatatgcgtgtgttagtgagtactgagttagttaacatttatggcctatattttaggatctaataacaatcttaattattgtatgttttaattacttacacatacatatatatgtatatatatgcaggtgcattcaaaatgagtggaagagttggtgatgaaattcagatgaatgaaacagcaggtggtgagttatcgattgggccattaccatacatccacaagcttgggaaacctcctaagcaaaatctcctcaaagaaatcatcactgctgccaaagagaccttcttttcggatgatcctttgcgctctttcaaagacaaacccaagtcaaaaaagtttgtgctcggtgtccaagctgtttttcctattattggttgggctaggaactatagtctctccaagtttaaaggagatctcattgctggactcaccattgctagtctttgtattcctcaggtttgattaattaatattttaaatactccatttgtttccaatttgagacttattagtgtcctctccatttttattaatgtatatatatatgaaaatcttgtgtattaggatattggctacgcaaagcttgcttatctgcctcctcaaaatggattatgtgagttttatttttttctcatgactagtaagaagagcttttgcttattggtttcccatataatcagctatgtgtatgtacatatgaatatgcagatagtagctttgttccacctcttgtctatgcttttatggggagctctagagacatagccatagggccagtggctgtggtgtctctgttgcttggtgatcttctgcaggctgagattgatccgaatgatctcattccctatcgacgtctcgctttcacagcaacattcttcgccggactcactcaattggcactaggttttttcaggtcaacatatagtttctaacatattcatcattaataataaacaaagtattcttttttttttcttttgtctatctaattgactgaaattactggatcctactgtttcagattggggttcttgattgagtttctatcccatgctgccattgttgggttcatgggaggagctgccattacaattgcccttcagcagctcaaaggattgcttggcataaaaaagaatttcacaaagaagacagatattgtctctgttttgcgctcagtgtttaactccgcccatcatggggtaaacataaaaatattaattttatccttcattttttattataaaagttcttagacatgaataaaaaattcaactaattggtcatttttttacagtggaattggcagactatagtaataggggtcactttcttggcttttcttctagtcgctaaacatatagtaagaacaatccaatacttctcttcaacttttgtgttttatagtttaacacatatgttggacattcagttttatatgaattaattattctctactttgtttggtttggatgaacagggtaaaagaaacaagaagtacttttgggtgccggcagttgctcctatggtgtctgttgtggtgtccactttttgtgtttacataactcgtgcggataaagatggtgttcaaatagtaagtatgacatatatatatatatttcataatttaactgtacaaatgactaatatgtatgcaaatgttacggatgcatttataaatatatacaattagtctaatggtttgatctgcgtttgatttgtgatatattcaggtgaaccatattgaaaagggaataaatccagcctctgccaatgacctattcctctccggagaacacgtgggcaaagcctttaggataggcgttgtggctggaatcatagcgctcaccgtaagtactatatacgcctgacacaattctatgctgaattcgcaattcgttttcaaaaatgatatatacacacataatttacacacatatatatatgtactcaataattttaaggcataatagatgaatgaactaataaggccattttgtttccctaatatactaggaagcaatagcaattggtagaacatttgctgccatgaagagctatcagattgacggcaacaaagaaatggtggcattaggaacgatgaacattattggttctttgacctcttgttacgtagctacaggtgatcagatcgagtaaaa

SEQ ID NO: 42535 - DNA, 5547 bp, Cannabis sativa
  modified_base (3361)..(3380): a, c, t, g, unknown or other
  modified_base (5180)..(5180): a, c, t, g, unknown or other
ttcataacattataaccatttgctgtgttttattgatctaatcagtaatgtgaaagtgaaacatacttgttgaatttgtcaaacaccataaccagcctttctgagttctacaggatgtagtgatgcggtaatagaaaagaggaccggtgaagtgtcgaattttcttgacatgttaaggagtgtctctgaggttggcactgagggatcaaaaactcatgacacagcatctcatccagaatggaaagtatgatatctactctgcctatggtttcttgctgttaattcattcctcttgtagttcagataatttaactcctttttgatcatttattctattcaataatttggagaagtgagagaactataatgcctgaattgttcagttcataagctgttcagtttaatagtttgcctcatttttactttcgtgaattgctgagtttatgctttggcaattaatgaatgaatttgttcatatttttacagttaaagcaggacaatgaagagtttcgtgttatgtatcgcgaagggccacaaggctctccctttcattcattacttgtagaaggctatgtaaatggacctttagatgtttgtaagatcagctgaaactattaaaatacttgagccttgttttacaataatgagtcttcaaatcagttagattactaaagcaaattagatattttgatcaaatcagaacttttttctcattgcaggcttatgtatttcatgggagtcagcactttacaggaaatggtgagtcatagccttcatgtctctgtgattttttttattcttgactaaaatctaataggcacatacaatgataatttggtgactacacttaataaggaaatttctcttcactattttattccttttcgaagtaaaaatagtaaaaatccatcatctgtgctctaacgtctatattgcccaaatttaatgtttcataccaaacatttactgtggaacaatgggagacaactgtgattagatgtagatattaactttgtttccttttttcctaatttctcaggtggcctcaatcgacaatcccaactttcaaaatcctctcttgcaattgtttgcagaaggttcggatcggtgaacagatatctttagtaaggtttgtctagaacgcaactgtagaaaatcgacttgtattttggtttcttctttgaatattgaatgttctttatcttttttggaagaaagggtgaaggtttcgtggccactatcaactagagaagctattgtacactattttttatttgagtaccttgaagatgatcttctagttgtgatcctaaacacggtactaaactaatgggtcattaaatttatttttctatttccttttacttttttgttgattgcaaaacaaattattaagagaaggttgtttcgcaaagtgacattaagaaagagttaatgttcaccaattaatttggtatccatactaaaagaattgcttttgatcacaggtctctgattcgggaagcattgatgctagcactcatggtttctccgatgaggcaattcccaaagcgaaggatgtggttaggattgatgtagtgggaggcttcgctatacagaaggttacatccgaaagaagttactttcggtaagttgtggttgtttggttggcgcccttcgaatgcctcatgtaaaatgaattatcaaagtggtaagacataaatgtttctgaactttgttgaactctgcaggacaatagctagtatggatataaagctggatttcgtcccaccatctcttattaattttatctcaaggcagctcattggcaatggttttagactttatcaaaaggtttatcttttgttccacaagatatgctaagaattagatttataatatgcacagatgcactcagactaaattatgtgaaaaactgcaggcagtggcttcgatgtttacaggtgatgacgaattcaacaaagccttgaaggatccactgtacactagaatacgtgaaactctttgctccactaataaattaaatggatctttgaaagaagaaactgtagatgtagtagtagtcgaagaagaagaactcaagagcgaagcagcagatctctctgaagtaaaagccacgagtaatttggattactcgaaggtaatagatcaaaacagtaattgcaatagccacatagttgaattgcctgagcaagttgctggtagtacagcctcttgtgagattgtggagatcaagagcgaagacagcaagaattttgacaatgaaatattagttgagcaaatgacagaaacatcccatgttaaccgcaagcgaaatattattattagctcagatgtggaacaagctcttggaacattggagaaagttatttctatggttaaagaatacggatttaataccaaaaccccttcttggttcaccagcgaaaggtctcccgaagaaaacaatccagatgaggactcaaaatctgaaggagaaaatacaggagtgtgttcaaatgttgtagttactgttgagtctggaaaagaaaccaccgaaaggacatcgtcccaagagtccgttggaaatggccctgccattcaaaactccaggtgagaatttttgtagttgaagttcagtatgtatgtcatatgtaacgaaaaccatagatttagtacctaaaatcctttttccatgtgtttctttggcttttaggcgaggaggatcgaactcattttcaaaggaggttggccataacagaatagcaccggcttccccagagcataaaatctcaattccttgtgatgatacttacaccaccaatcaggttgttcttagttctgccaaaaccgagccaccagtgataccgattatgaaccataatatggctacagaaaataataagcatcctagcagcgataggaacggcgtctataaaagcagtccgaacaaagtaaagaagcgtaagaagcaaagaagttctaggctttgttgcattggctagagtccttaggagatgaggcagagttgaacaatagaaatctgattttgaagtatggtggtgtagatgaagcctgacatggctaatacattacacaaaagagtgaatttgtaacatcttaatttatttatgaaaataaactttataatatagaaagtattgttggcatacagataagtttaatgttcttagatttgcttgaatacttgttaaaatatgctgtaaagagattatttttttatcttttacaataagagatagctggggagattcgaatttgggacttgttaaatccttctctattcaccaacttgaattcttctcaaaagggtttgtaagcaagtataaatttgtggtttgaataataataataataatannnnnnnnnnnnnnnnnnnnaataataataataataatattgagaggccattttctgtgatgataaaattctatttttccaaatcaatttttaatagctggcaaaagtggtgaatcttatcttggaatttagaatttgctagtccattttatttaggtgcacgttttatttgatttattattgtgtggcattttgatagtgaaagggagttctatacaaagtattagctataaataaagtttggtaatggcatattattcctccaaaaagtaaagatttttgtttggatgatactttcatgatattcccctatcgaatagaaggatctcttactttcaatttgtactagatacgatgcttatgtctttttcatgccttttgggtaaagaaaagaatgctaggggtttgtgcttgtcatgtataaggttcattttctcaacattattaaagaagagtttgagtaatggttgcatggatgttatttagagatgctagactatgaggggctttataacacacgatgggtggttgttggattctctatttctgttatattaagtaactataaaacaaaaccgtgtttcgataattaagttatttataatttttgtctcctgaactatggcgtgtgtgttaggattcatgtcttgaaaaatctatgagggcattcctaattattaataaagagttgaacattttaatatatgcttggatattaaattattaatatttattattgaataatttacatataaataccgaaaaattccttattcatatatgagacagtgacttgtagctgtacaaaaaactaagattgcttagctatgaatgaaatagtcaacaacatattagagttatagaatctttaatcaatagttgctattacggttcactgatgcacgttctttggtgcaagtaatctcagttcagattacggatgtagtatgacatcaaagtgaaagtgttgtatataataaagattatatatgataagaaccgatatgaataaagttgtatttatctaacatgttgtttaatataaagacttaattcatatcagaacgatgagcaatggtagatcaacctaaatcatgagtaatcataaatttttgttcatatcgtttatatataatttacattgagtaggaaaaaatttaccattttaccatttaatgtattttatttttaaaacacttaattaactacttgtaaatgctattttaataaactaatataattactgaaatgagcgcactatatcatttatcgcgttaagccaagctctaaagaaattatcgtttcacttctaataattatagaagctatagattttaaatctataattaacgctcacactcaattgaactactgagtttacaagatgtaaatactgggcaaatcttattggtaagatgtaacgaacaagtcaaagaatctatatagtacaattaagctagaacttaaaaatctcaagattgagatcaatcgacctatgatcaactaagtgacattgacttagaaaagacataaaagtaagtttatgatatcttttctgctgtcaatatcagtccattctgatgtataaccgatacatctgatattagtttactttgctaacgccctgaaaaaggacattccacttatacaagtgtaagtaaaccacatcgctgattatcacgtcagtgtaaatctaatccactgataaatcgtgagactaaatagtttgaagcatatgatcatgatttttttttccattgtgtagacaacactataatcatgaataactatatgttcgggatttaatagaatttatatantaaacatataatcatgaaattaatgatgtgaaccattcaacataaaataatttctgattttttattagttagtaaatcccaacagttaaaaatgcaatctaaacactttagatttgtggattcaagaatttttataagttaaagagaatatgctttagtacatgtcaaagtttgggaacacgatttgatacattcaaggtcggccctaggctaaggtgggctaggcccttgcctagagccaactcattttagggccccgaataaaaaaaatatgttttaaaaaatatacatttttttaataattttaaaaatatcatttatctttatgggtgattctacaatgcaccctcttaaaagggatgtactg

SEQ ID NO: 42536 - DNA, 7489 bp, Cannabis sativa
taagggattaaaagaaatataatgtccgtctaaattatttagccaaaaagttataaatgaaaataaaaaatttgcgtataacttaagaatttatgtggtcgtatgcatcttctatatttctccatttattattgtggacattatcccacatagaataaatggtagagaattgaaccatatataagaacataaactacctcactgttaattgattttgagatggaaccccataaaatttattacaagacaactctcataaagcaaaatcatcaaatataaactaaactatttataataacaaaaaagacaattttaacagcaatttcaactaaaagtctaataagctaccaattatgaagctctcaaatttgagaatctcccaaatttggcaccccaaaattcttagaatacttgttaaactaacaaagtggcgtaacaacacttttattaaaatcataaataaaacaaaagaacaaataaaactactcgcaaaataataacaaaatatataacacaaaaactaataaaattaatctccaaaacctcaccaccaaagacccaaaacttcctaaatccaatcttgcatctttgaacttgtaaaacctaactgtgtcaatttcttcttaattgattttaaacacttattcttatctcagatcgcaagaaactaataaaaaaacacacaaatttacaagcttcattcgatcttgaaaactcattacaggctactatatattgcttgggttcacttgaaccagggtaattaccttcacaatgaattaatcagaatacaatatctagttttgattacaatttctcaaaagtaatctaacatcaattcatacaaggattaccctactgatttgatagtctaagactcctaagacttcagaagacaagatccccttgcttccttgtagctgaaatcccttcagcaacatgatttgaactcccttcagacaaataacagatcattgattctcctttagtccttgaagatccaatcacaaaacaacaaagaaagacaaagaaaagatttgccctagcagagcagaattatccaatcaaagaagaagagttagttagaaaaccgctatccctgattaaatacaaacaactcaataacaatgaacttaacaactcgacacagaaacaagccacctctaccaccatgaacccccatcaaaccaccaatagtgatagatctaaaccttcccaaacaggaagcgacgatctctaacaaacaacgttgagccagaaattcggcaggattcaaaacacacaaaggccactatgaaccaaaatagaaaggaaattaaattggtaagcaagctccaagatccgcaaaagcaataagaagaggagataaacgaccattaaaaagcatttctagagcatggttgacatgaggtgaggtgagtcgggtatgcgccacgggcccgcacgctcaggacctcgaaattgtgatgaaaaatataaaatattaaataataaaaaaaatataacaatgtttagtgtagtagtagagagtgattttaaacaaaaaggtcaaaagattaattcctgacctacttctaaactaaaatattaaataataattaacatatttatatatgaattttaaaatttaattttattttagatttcatatactttaaaattggccctaatccaaaaataagtcggtcagcctggctagagaatgagcagaaaacaattgtaaatggcggcaaagattagaaaattctccagcaaaaaaaaaataaaaatcctaaagaggcgttatgtgatggaagaaaaaactaagaagtaacaagatgatgaggttataatctaatgcatccaaattatgtgtctaattttgttaattgattttattaagaaataaattgatgccaattataagataactaataagttgaatggaaatcatttgttaaaaagtccttattttattttgaacttagtatatgaaaaaaaaaaaaaaaaaaaaaggtaggaaggttgagtatgagttcagatagtgacactgacagtagagaagtgggctgtactgtaattgtattggaattaataaatttgaaaatatcgcatcattcgcatgtattccatcccaatcccgtattaattaattaaataaatatatgttaagtaaaaataataataataataataaatatatattatataaaatctctcagcagaattgcatttcaatctttcttttctttttgccttttttcctcttctctctcaagaaaaatcattttttttttatttgttttaagaataaaagaaagaccccaaaaatgattagccattgacgtttaagctcgtcctgtgtcattatctgtaataatctcccgttgtcttcctttaacgtcacaagcccacaataatccaaattatcgggcgaagaggatcacacacaagaaagatctctctctatctctcactctcacacccttttcattatttgagtattgcacatacatatatatgtgtatttttattttttatttttgttcgctttcattgatgatatgcctttgaattgttcaagtatggctataaaagtcccacataggctggggttgggtccatggagaaggaatcacagaaacgagttggtgcccaaccacagccatttgacaagcttattcctttcttcttttccttgcaagaaaaccctcattgggtgttcgtctaagttcaaccaaacttcttgtttttcggtaatggagcaggaggagaaaagccgggtcagccctgaatctttattggatgcagaagagcactctcctcgtgacgaaaaggaattggaattggctgttagagctgttcaaatggcttgttctctttgccagagagttcaggatagtataatctcaaagacaagcaacgaaatccaatccaaagatgacaattctcctgtcactgttgcaggtcacttactccactcccttttcttcattcattttgatttgggttttcttgttttacatccattttttttataattatgtaaactgggtatttatttttcaatggcgattatacctgggcaatattattcctggtgttttgggtgtagccgcgtagggttttaggtttctttccctccctaagtgcaattttctattattaaatgcagcatgatcttcttttcttgttttcttatgttttaggatttaacactctttgattattttcttattttaaccatctctgttttacaatggagaacttgttaaccccgagggagaaaataaagataaaaataaaacagagaaaaagtaaaggagtacccttttgatttgggaacttggaatttggtcacacttttgacgaaatgaattttatattgaagtaactttgatggaatttttttctatgatgagtcattactaatactataataactgtgttagagaaggtgtaaaagtcatatcattttaaaaagttagaataaggagagggtaaaaattaaaataaatatgttatttaattatgtgggcaaaggagtaatttgaaatttgatttaatttggatcgtctctcttaatgatagttataataattaggctaatacaataaaagagtagcttccaagttctaagtcattttcaagcaatttttagataaatatcatttaaattaatggcataggatacaactttgccctgttttttgctgaaaatccgtaatcttcttcctgttgtgcaatcttacatgatgttcctagtgccacattatcattgtgaatattagcatttacttgtataaactgcagtgcaaacttattgagtaaaactagttatatcttgttaaaagaagccttagatgctatcatggataacatgtcaaagcagtggtaaccaatgatcaaactttctccgagtttcagaagtctctgtaatcctttctaaattcactctcaaaagattgggcaccattagtttaagttgtcaatatatatttagttaaagctgtctgcaaatacaattgcttagtatgttaatttcaccatgttaacagattggagtgtccaagcaacagtgagctgggtactctctgaggcctttggaagcagaaatgtgtccattgttgctgaagaagatgttcaaagtctctccaaggctagtgctgctgggctattagaagctgtagtgacaactgtgaacaagtctctagctgattgtcctcgttttggacttaaaggtcctaacatgccccttgggtcttctgaggttcttgaagcaattagtcgatgcaactcaaatggaggacctaggggaagattttgggctcttgatcctgttgatggaacattgggattcgttcgaggggatcaatatgctatagctttagcgctcattgaagatggggaagttgtacttggcgttcttgggtgtcctaactaccccatgagaaaagaatggcttgcttatcatcaccgctatcatagaattgtgtcaaagttgacgccaacaacttcagaatcatgggataaaggttgtgttctttatgctaggaaaggaagtggcaaggcctggatgcaacctctcgtccctgttaataaaaagttagtttggccaaactctgcgaggccagtacgagtttcccccattgacaatccatcaatggcaaccttctgtgaaccagttgaaaaagcaaattcaagccattcattcacagctggactagctcacagtgtggggctaaggtggataagctttcctttactattattttgctatgtctttggaatccagccaatgaatgtcatatttttaagaagaaaaagaactacctaagtagtggttaacataacatgtgtttcacttgtaaaatcaacacattaaaacgtactgaaactcagactatgctaaaaatttgattgtcatctgactgcaggaagcagcctttacgagtatacagcatggtgaaatacgcagccatagctcggggagatgctgagattttcatgaaatttgctagagctggctacaaggaaaagatatgggatcatgcagctggtgttcttataatacaagaagccggtggaacggtaacagatgctggaggtcagccgctggatttttcaaaaggcacgtaccttgaaggtcttgatcgaggcataattgctagtgcaggagccactcttcatgacaagatcatcaaggctgtggatgctagctgggattcctctagtctgtaaaatgttcttatggtaaacatcaatgataacacaaagccatgaaagcgttaaacaaggcaagggaattataaatcagccatttatcatttttttcccgttctggattaattgggaattatcaatatatatcacccttccagggatgcatgtaaaaacaaacaaagaataatgtttgctttgaagaaagggggctttatgcttgcagttttggcaaactgttacctcctcaccccacctggaaaccaattagctttgagttgaaaaagctgatgaactttgtataattacataatataagagagtcttgatatgttttaggactcgttttctgtacaaaaaataaatgtctttatgtaattggctcttgtgttttttggaatcctagttcacaaattcacacaccatcacattcacagcaataggagactcttaacactataatctgtatcaaagatgctggtatttggatctctaaatttgagtccaaatattctaaacccatcatccatggcaatgaataacacagcctataaaagatgtgcattgattatcttacaaagcaggagtgcagagtaggaccccaaaataaaagagtacagaaatggtacgcgtagcaaattaaataaggaaggccatatcactatttacatttgcagcacatcacaaatcattcttgaaattaaagattttattttgagagaggttcaatattcattaatgcattgtgcacatggtcatggatatatggggcaggggaaggacttctttgcctaactatttgagtgtagttgagaaaggttacacacaaataagtcccatcacagctcattaaatagctagtggttgtctcgactgaggaattatatttagcctctaagatcttttgagatgtatttatttatttatttatttatttatattttgaaatttatctataatgtaattgacagtgtgtcaaattgtccactggggtggtcggtcctccattttcaattctctccctcattgtcaatttgcttggaggtgttaaagaaagagcttattactaaatttaaaatcattttcaagttcaaagtttgtagtggagcaaagtagacattttcccccctttcaaaaaataaattcaagaaaatatttatatatacgcatataattaaatatgtaaaagtaggagaattttacagataaacatagagcactgtatagttgcacttgcatgagatatggaccacatccaccaaacaatattgtgacagaaggagaggaaaatgatttaatgtaacatttatggtggaaaaaatatttccaaagttctggtttgcagcttaccgaattctattgaaaatttatcaaagtgtctttaattataattacaaatactgtacatatgtattacatgtagggtactggaccatgttattattattcctctctatcatgctatcctacgacaaagtgcctcaagaaattgcaatattgggccttgaaattacgtcacctgcaagaagagcattatgtgcatttgtgtggtatatactataaaatcatgagtagcatagtgaatctgtgtgactatatatgaaataattgaagctttacattacatggtaggagactattgtgaaagaacaatacacataccattctcttattaagccttatctattcttgtatattattgcttagataatcattattcaaaatcatgttttttattgattttgatatcatatatggacacaagtcacaaaccatttatggatctttttattactattctaatttttttaagcactgcttttggtctacacgaaaaaaggaagtttgatttgggaagtacatattagtgctatagtatccgattatagttatatatagatgtccacatttgagacaaagcaaaatatgtacgtaaaaattacgttttttttttttttttttttgttataatcacatattcacaattttaagatgtgaaattaagaaatatagattttaatcaagaaaaatcaagcttatatctaatctctataaaaaaatttacttttagtcacaacaaaagttgtgattaattagaaatcatcattttcctatgttgtgattaaaagatctgtagtttaaatgtatttaataaaaatcacaatttgttatgactaaatgtgtttttagtcacaatactcattgtgaataaaactaagttagtgacaattatatctatatattttgttttagtcataaataattttttttaatcacaaaaaaattatgt

SEQ ID NO: 42537 - DNA, 2861 bp, Cannabis sativa
gtttggtttgggcggtttattcgggttgggcggtttgtaaattttattgaacacccctagaagaaacacctctactttttgtataatggtattttttaatctaccctaataagtttaccttaaaaaaaaataataagaaatttttatgcataacaaaagattaataaaatgacaaaattaatttattaaacaagtaaaatgtgacactaattaagatgagaagtaagatattttctcgtaaaaggacttgacaatttctttctttacttttaagtgttattttcattgtctaaagtgacctatttttcaaaagaaacattcaacaaatagaaacattagtctaataacatcaacatcaccagtggagatagtctattaataaacattgctaattaatacaaaatcgtagctattagtaaattaaaatttaaaatgatagcttccaaaaaagaaaataaattatcaaaattaatgatttattgttttcaaatatatttaaattaagcaaaaataaaaaataaaaaaggatctgtagtataaattaaatttattaatttaaaatcattaagcacaaatccgttgtagtctagttggtcaggatattcggctctcacccgaaagacccgggttcaagtcccggcaacggaattttttcttctgtttttttttcccttttcatcaaaatttgttaaaacgatgacgttttaaaacaaagttatatcatttgcagaagcagaacggtgcttttccagtttttcccacattacatctttatccaacttctcaatatggacaaacaatttctgtaaacaaagaaaaaaaaaaatatcctttaattgctatgtaatgagaagtagcactctccattttcatgatgaaaaaacatcaaaaacaacaacctttgttttctcactttttcaccattaatattaaatctcatttcactattggtctaaagcctaaaactcactataaagagacaagagaaaaaaaccattttactggtcacttgccaagcctaaaattctaattggattaattgtgataagagacaatgtatatacagctaaaatgtgtcagattccatttgctctttcctatcctatttttcttttttatttcaaataaagaacagaactttcatttcatggttcttaaatccttaactttctttatcattttagacaccattttcaaaaaaaaaaaataaataacaatgagtttgaaacttttattgttgatttcattacttctccaatgtgttacttcttcaatggttgaagttgaagaagcctatcttaaatgggtgaagcaaattggttcattcaaccactctttgtttcaaaaaccaactaacaagtttgatccttgcttaactatacaagtgagtaaaaacccaagattattaggagcttttacttcaatccaaaaggctgttgattcaatcccattagtcaatgaatgtagagtggttatttccctcagtgcaggaatttacaggtatgaaataatgaatataacactagctttactttgttatgttcttttgctcactttcacaatattaacatgaagttttaatgtagagaaaaagttgagattcctaagactatggcttatattaccttggaaggtgatagtgttgaaaataccattattgaatgggatgacactgctgatagattgggacaaagtggaaagcctttgggtacttttggttctgcaacttttgctgtcaattctccttatttcatagccaagaatgtcaccttcaaggtaacccaattttccttatagtatgaaaatgtattccaatgtggattggattccgctcgtttaaagtttttgaatgggatatttacagcataaatacttatttagttcactttgttgcacttaaattgcaaaaattcgtatataatttcgttagagactcattatgcataaagtgtgtaacggttgataaaatcatacccgaattcttggccaatcaagctaacaaacacactaatcaacagaatagagcgccgtcgccaccctcgggagcactagggaagcaagcagtggctctaaggatctcagcagacacagcagccttcataagttgcaactttataggaacacaagacactctttatgatcacatagggagacattactttgagaattgttacattgaaggctcagtagatttcatatttggaaatggtctttcactctatagagattgtcatttacatgccacttccaacaaatgtggagccttgactgcccaaaagagagaaaatatgcttcaagagactggcttctcttttgttaactctaaggttactggatcaggtgcactatacttgggcagggcatgggggactttctctagggttgtctttgcttatacttacatggacaacattatcaacccaagaggctggtatgattggggagacaaaaacagagacatgtatgtttcctctctaactcttaatattttataagcccacattgatttgataatattcttttagagtaattggcggtcaaagcttatttttttacagttaactccttgtgtacgaaagctttagcaaagctaacagataacagtaaaattgaacgaaactttaattttgctaacgattcactacacaaagggttaactgtataaaaataaaaacataaaagggtttggggccaattactcgttcttttaatggagtttatagttgggattgtcttataattgagataaatagtggaagtgatataaaaaagaatgctagctactaggattatttgtcggtctgttcgggctgcaaaatggagagattgtccggtcaaaattcactttgctttttgttaac

SEQ ID NO: 42538 - DNA, 5073 bp, Cannabis sativa
gtaaaacaaacatattattgggttcatggtgttgggttggagttggcctaagatgggtctgaagttccagcaaaaaaagatgggtctgaagaatactgtcatttgaaagcttcattttgattattcttaattaaatatgcattttaccccaaaaaaaaataatatattgttatgttgaaaaaaataagtgaaaatctattaatccaatatagaaaataaatataaacaaaaatcattactgtaaaatgtttaggataataagcttaattgattaatctaaaataaatcaaaggtcgataattcacaaacattaacatattgctattttttaaaaaatatttacaaaaataatattataattataatataaaattttgctttaaatttaacacattaaaaattgtattaaatttaacacaactcaaattcataccataattttacctttttgcaaataattaatgttgtttacattaatttactttttaattttttatataataatttcttcatattttcaataaacaatatatacttttttcaactttttaagttaatttacagtattggaatacaatttgtaaaaattagatcaaataaaacattggttttggttgatttttaaggtgcaatttttactcgtccaagttagaatattatgaattctgattcaaaaaatcataataggaattcctgttcatatcctccttaccttcgtaatgtccatctctttcttcatctatcaaatagtctaaaagataaaagtttatacaagggtctagaaaacaaagctttagactatagtaaagaaaatgttaacttctatttcaatcagaatctatctagtagtggtcagtgtcctgaaatttacatttgatcttagaaagttacaagaatgacatatagacagagaagtaaaggttcaacggccaaaccagctctgagtgattgcaatgatccttaatctttcacaacaaagacatcataccaccattagtaaatctgtaagataaccatagtaccattaatgaaaatcttagaggaagtataggtaaaagcatagtaccattaatgaaaatcttagaggaagtataggtaaaagcatagtaccattaatgaaaatcttagaggaagtataggtataagcatagtaccattaatgaaaatcttagaggatgtataggtaagagcatagtaccattaatgaaaatcttagaggaagtataggtaaaagcatagtaccattaatgaaaatcttagaggaagtataggtaaaagcacaaccataccaaggagttaacttgattcaattagaagtggcttagcagcagtatggactgtaaagggattaaaatctgatataaagaagaaaagaaaggataacaattttaattaatgatagattcagtataggctaaaacttaaaagttaaatataaaataactaaaaagcaccttgtggttcaacctgcaaccaatcttgggtgcaaatcaaggcctctcgagtatctggactcaatgaacttcgagattgatcgagcaatctgctactagtgctgaatgccaattcggaagcaattgttgacataggagttccaagaacatcgcgagccatcatggataaaatagggtaccttggtgtgtggaccttccaccagtttaacacattgaaatcacaattacgaggaaacactggttcctctaaatatttatccaaatcagatactgaactttgactatgagaagtttcatggaggaacttgtcaaagcccttcagtctatccctggtatcattactaatgctaggcaagctgctgcctggcaaagcagaaccttcatcaaccatggttgagcagatagaatatgcattgaaaagttccttgattccatcagacacttccttgattcgatccagagcagtactaccataaatttgggaatagtaatattccaccagcctcatcttgaaccggggatccaaaattgcagctatagccaaagccaaactacacttgctccaatatttatcaaacttggttttcattttcattgccatagaactaagaaaatcatctgaactcttgcaccattcaattagttgcatgtgtatatcacaaatttcaggaaaataaatgtttgccgtaggagatttatatccagaaatgacattggtgatttcaacaaagagtttcaaataaccagtgatggaaaaggtccattcccattctgtgtcagttagagatgaattatatgcagggtcatgatcttgcaagatagaaaaggcagccctgtactctaaagctgtttcaagcatgaggtaagttgtgttccatcgaactggactatcaagaaataatctcttctgactatcgattccagctcgttgagccatctcatcaaacttttcttgtgttagttgtgaacttttaacaaacttcacacttcctcggatcttctggatcacttcttcaagtgctgcaatgcaatcttgtacaattgaattcagaacatgagcagcagagcgaacatcaaatagttgacggtccaacagtggcctgttttgagagatctggtctttgatctttacaacaatttcatcatcaatggaacaatcatcaaatgtcaaagcaaataacttactctcaatttcccagttggttagacacctaataatcacttctgagagtaagtcttctgtatgagaagaatcaagtgtcacaaaatttgtaatcttcttttgtagcttccagtcttggtcaatataatgtgcagttaaacacaaatactcgccattttcagcagaagaccacagttcgacagaaaggttaattctcccatgaaatttattgatcatttcaaacaccttctgtctttctttctcataaatttccatacaacaatgttggacatcattgtttgggacaacctcaaacagaggttgaagattcttgacaaaaacttgaaaaccaacatgatcaaccatggccattgggtatccatgatatataatcatacgtgcaagatcagatcgactacgttcctggtcaaacttgctacttttaaggttaaaaatttcatcttttttctgatcttgatcaaactttatcatggctggcttgatatagtcatcttttctctgtgtttcgtcacaactgatacttgcaaggctaatggtgctatcttttttcctccttttcgctgcaagtagttgagacacatcaaaattagatctttttaggcatctcatcaagtggtttctaagatgcgtggtaccactattactcgatccactgagcctcttgttacagtggacacaaacagcataacaaatgtcagcctttttaaccctttcaaaatgattccatactacagaggtcaacctctttggtttcttggtagcagaatcatttgatatttccatcgcataagcttgaaattaaccagatatgctctatctgcacatttgaaatgaaccaagtaagacataaaaaacaaaacacgagatatgatcatataaaattaagtgaagactcctcagaacatcatactaatctcatagtcatagtgattcttcaattcaatatcttgaacagtcaataatcactcacaataccaaaaacaccacattcatactatacccaagtcgaccaaaaaaaaaaaacacacattttaaactttttggaaagccaaacaagttacaatgatcacatcacagactaaattatttaacggtatacactcttaaatcattatatgttgatcatagacaatcatgcataaaaactgaatatgtttttatctttaaaaagaatcacctgataaatcaaagtacagaaaaattctaccaaattccacaaaataaatcatgaaatttaagtaaaacgctgaaccaggaaaggaaaagggttaagaaggatattgaattgacaattaattcggaattggatcttacagtgagtgatgcaaaagcttcgaaagaaaacttcaatccgttcttgagtccgatcggatgatccgagaaggtttagggttggattttgaaccgtgtttgggttagggacgaacccgatatgggtagttgagagagatagaaatgatgggttagatccgataagcatgtatgtatccactaccaagattggttggttctaactttgggtgggtcatccgccaaaaaagcatatttagttttcggacctttcttttttattttcactcatttctttccaaaaaaagaataaccaaaaataaattatactttagcttttaataattttcttaatttggtaacttttggtttttttagaatctttgttgaaaaacaagctcctttcttatacataatttgagattttatgtttaattttttatataataagaaaaaatattatttttacattatattggccaagagtgtacatcgatcggtttggtgggattataatgtatttttaccaacccaatataaatgtcgggttgcaaaaatcaaagtgtaactctaaattattaattattaatacatgcaaaattattaattatgaactctaaatttcaaattaaacacaataaaatacaaactttaaatgtaaaatagtttaactattaagagtaatttatatattatattattgatattttaataaaaaatatataaatcggtttatcgagttatttgggccggttagaataatattcaatccgcctaatatattcattaggcggtttgaattttttgtaaagttattcggattgcattttttgtcggtttattcggtttagtttgggtggtttattcgggttgagcggtttgcatatttttttgaacaaccctactcataagtgtagccaacacgtttcttactcaacagtgaccaaaaaggcattaccagcacattttgataaatctaagatctgtgctttcccaactgacaattctaaagaatcaactatcataaccaactcctttatactttggattgcccaactattaagattcttctcctcccaagttccagcccgattccaaacagaacccagttgggttgtgggttgagcagagttagaagagagaatg

SEQ ID NO: 42539 - DNA, 2941 bp, Cannabis sativa
ttttgggggttttgttgtattagctgccatggctgaagaagcaggaatgtttatggttaatcaaaccataggcagtgttctatgttgtaagtgtggtattcctatggtaccaaatgctgcaaatatgtgtgtgaaatgtttacgttctgaagttgatattacagaagggttacaaaaacatgttattattgttcattgtcctgagtgtgatacctatttacaaccaccaagaacatggattaaggcccaacttgaatccaaagaactcttgactttttgtgttaagagattgaagaatttgaataaggttacattggctcatgctgagtttatctggaccgaaccgcattcgaaaaggattaaggttaagctcaaagtaaggaaggaagttcttaatggagctgtacttgaacaatcttacattgttgagtttgttcagcaagaacacatgtgtgaatcttgtactagggttcaggcgaatcccgatcaatggatagctgctgttcaacttcgccaacatgttactcatagaagaactttcttttacttagaacagatgattttgaaacatggtgctgctgctacagctataaagattaagcaaatggatcaagggattgatttctttttctctaatcgaagccacggtgtgaaattcgttgagtttattgggaaagttgctcctgttaggagtagacatgataaacaacttgtctctcatgatattaagagtaataactacaattataagtatacattttctgttgagatatctcctgtttgccgtgaggatttgatttgtttgcctcctaaagtagcggtgagccttggaaatctcggtcctttggtgatttgtactaaagtgactaacagcattgctttactcgacccgcttactcttaggcactgttatctggatgctgatcaatattggagatcatctttcaaatcgcttcttactagtaggcagcttgtggagtacattattctagatgtcgagattgttaaacccgaaattagtcttggtggatacactctagctgatgctcaagttgcccgtgtgtctgattttggaaggaatgatactattttcaacataagaacacatctcggtcatcttctaaacccgggggatcaagctctcggttatgatttgtatgcagctaacagcaatgacatggagttggataagtacaggggtctagtccttcctgatgcaatattagtaaagaagagttacgaagagaaacgccaaaggaagcgtgggaagcctcgttcgtggaagcttaagtcactcaacatggagattgacgacagaattaacaaaggcgatttagagaagacgaacacagagtacgaacagttcttgaaagatttagaggagaatcccgatatgaggttcaatatatctttgtaccgtaacaaagaataccagccatcggagattgcatccacagtcgacggagaagatttgccatctattccattggaggaaatgctagctgatcttgatcttagtgaagatgaagatggagatagtcacatggagtgatttcttttgcatatttaaagggaaacataaactgaatataaagcttattttgataagtagaagaaagctattgattttgtttgtttgtttttctttttgttttttttgggccattttatttacttatgttattgttatgattggtgtgttttatcaaaatttatatagaaaacataagcaagtattatactagcttctttttacatttatgcagccacaccagcttttactttccttctagtacaattgcttttgtttgagttttgaagctttagtttctgatttataataataataataagggtaattaagtatttaaaattttatgtttgtaagtggtataaattaatgtctatttctagtggcacaaatatttaatgtttgtaaaactgtatttttcttaagttcgtgagcacactctgttattgccttatatttgtcatgtttaaaataataacataacgaaattagagaaaaattaaagaaaaaatttatgtcacttacaaacttaaaaattttagatacttatattgttatttacttcaataataataataaattttaaccaaggtcggttgatgtaagattaatatatttgtggaaaaaaatcttatttatttttacaactttaaaacactctgaacactttcattttaattttttattctattttttaaaatacatcatcaaaattttactatttttattttatctcaaatttttacattaatatatcatattctttaaaatacatcaccaaaattttattttttcaaattttattcattttaaatatataatatttatatatacgcatatcctcatacaaaaataattattaaaactcaaaataattaataaaatatatttagagcaacgaatattaatctataaatgtagagtatgaataataaattttttttaaaaaactttaaaatagatgagtttggaatattgtttatgtttttagtttaattctttaaatatttataaacttttctattttgaaacatctgatgagtactcaacaagtactcaacaagtgaggcataagctaatttttttaaggatcattcacaaaacactctccatcaagtgagctaaaataactaaacactattcattctttaaatataagtacatactatttatttctttaaacttattttattttattatttttgtattctttctacttcttttctttttctttctctcatatcttttaattgaataaataaataatatataaatatataatattttaataatataaagtacaaatataaaaaaatttgatacatggtgtgatttaggatggggaaatttgattttttatgcatgatttaagggttaattggttaggaaaacttaaactattggtaattg

SEQ ID NO: 42540 - DNA, 3641 bp, Cannabis sativa
ttaataatttatgtaaataacaaacttttgtcatccttattttagagtagttgacaaccttcattcagttggtatttcagatgtatttgagttgttttagggttgtagtctagttcctgcaacattatctgcactaatttagcataagtgcaacattctccacttgattcgtaatcaatatagtgtttattgtcatcccaatgaccattgctctgtaccaatacttgcagatgttccatatatatcctgaaatttttatagttgttatgagtattagtatttctaaacaactattgtaatccataaaaacaatgtataaataacttttcctgacaacaaacaacaaatgaccttaaatgcagcagtagttgttcaattgtaaattaattgcatcaatttcttcaaatcaactaatttgccctatgaattgtgcttaatctgattgacaaacactaaatgacaacctaattatgaagaaaaacactaaatatattagtaccttgtatttttttgtctgattctttcaagttatttttgggtaagctttaattcccctctgtttgtgttgttatcaaattatctgcacaatataattcgaattattgtttttgggttgtttttgtgtcttttcggatcaatggaggtagaaatctttgttttcttgttctttttttttttggttgaccttttgattttagagttttcaggattagatcgttttgttgttgagatctacattgcggtcttggtagtacacagcttggacaattttttttggagctgaattcgtgccttagttgagaaggaatatagaggagataagcagttgggaatgaagaaggaggaagaaggttcaaacggtatttttgaaataaaaaaaaaaaaaaaaacttttggatttccttttttgtttaatttttcttattaagcaaaaaaatgtaaactttgggcctaaaatacctattatagaaaaaaaaccccttattctgctatctaagagaattttttgatctaatttattccacatgtcgatattgagaaagtacttatcatactcatgagccaagttacaagaaccttgatatagatcttgacttgtttatgaggaaaagctagtggagattttggatcgcaaagaaaaagtcttgagaaacaatgttataccaattagttaaagtatagtggtataaatacggtgttgaaagcacaatgaaagagtcttatccaactttgttcttattttcgagatgaaatttttataaattgtaggtattgtaacatatcgcttttccatgtacatccaaattatttagttatgtgacttttaggtcaaaaattgataatttttgataaattaacaatgagaaatcgaattagtgttactcttgcctttttagaaattatgcgaaactggtacgaaataaaaaattctaactgggtaacatattgaaaattgtaaattcgtaattctataggttatggcaactaatattgggcttagaatattttatttggagtagtagaatttatctcgtgaaattccaagtgattgaacgcaaaaagtgagaattttggtaaaacgggtaccaagtgtgaatctttttgtgctaaataactatttggataaaacaatatttattgatgtgtttgaatgtgatagattcagaatgtgataattatttaatttttgctttcattaaaatggcttttatggaataatttttagagggaaatttagggtatagttttaagggcatctaagcaatatgcatgggaagccccctccattggcaaatttttttattcaaagcattttaagcccatgcaaagcttctccactcttacacttaagtaggcctagctttagggtgtatgacagctacacacacttcactctctcttctctttgtatagggtcgaagccccccctctctctctacactcctctcatattcaaactttcaaaaatagagagaagctctatcttctctcttcaaacaagttccatcaaagctcatccatgcaagctttgatcaaagaaagaactaagagtcaacttctatgccatttcttgatcttttactttcttttcaactctagttattttcctcaccactccatttctcattattcattcatagatcatcatcttccacttaaaggaaaactccattagaggttccttgttcaaagctacgcacactagaggataaaacaaacgatcgggagtctcgaagttcacatttagacatctcatgtgcaaggacatcgtgtaactccggcataatttatttgtattcaagcaactccaacaaactcatccacacccctacgaaactctacagatcgtctatttaaagtcatccagcttatgtcgctcaccatatttctacacaatataaaaagagaaagttcaaattaaagttaaaaaagtgtcatactccaccttctcactccatttctaaaagggtagagaacatatcacattcaagttaataatatacatatagtgcaatctattctcttaagattgcttttttttttcctctcaaaatttcgacagcacctccccacagttctcataagtaagcaaactattaacaagtataccaacttacaagaacgtgtaaggagatgacgtaccaacatctttaacaaagaaacaatcaaatgagcaatagatcacactataggtatacaacaatcccaaactatccatgcgaatataaaaagtcctggataatttggagaagcgtatttaagagtccttactgactcagcctctccaaacgggtctaagaaaaaatacgtgtgtgaaataaattatcactaggtgataatacaaacaaaattattctatcctatctatggtttataaccaaggaaatcaaatgaagataagaatttcattttatgctatattaaatgtcttatggtatcttacaatgtcttatgctattttatataccacctataaacttttattgttaatttaatactttgcaattagttttcatgaataatttatatttttttaaaaaattaactcatatttcttaatttcaaagtttccactttgttaaaagttgaatgttatttttaattcaaaatgttttcaattaaattatgaaccttttaatttatcaaaacttaacttaataaatttcacctattagtgataaacatagtattttttaccttaatatataagtgtatatgttatatttatatgtaaatatgtatgtatatatattatgtgtatatatattatatatatatgtttacatatacatatatatgtgcatatacacacatatttatataaatacacatatatatttatatatacatacatatatacacatatctatatacacacatatttataggatagggaaacagtcacgtatgcgtgagtggtcctgtattttttttttctttttaaagtggtaagggattgagctaaatataatattttttgtgcccaacttaatagtcatttttctttaagatgaattagttatcttttcaaataagaaagaaaaggaggagtaagttgaaagaggtatttttttttagtattttcaattattaatctatttgtctttgtacttaatcttctaaacttaaattttggtggt

SEQ ID NO: 42541 - DNA, 5826 bp, Cannabis sativa
atgcaataactgattttaaaacatgcatgatacatccctggtttggatgaagaaattgctagttcttttgttctcatgattagatttattgcttttctgattatttctatatcatgcactctctaagggatcattttcataatatgtggtgtctgttcctttcttatgtgtttataaatggatttaagtttcatttgctcttaattatccacaaaatttttgtgtaggatttacacagttgagtatatttctttctttcttgtttagttagtcatttcctgtctttaaattcattatttccatgtgtttacactctttctctctctctctctctctctctctctcatttgtatgtgtgtatatttggatggtaacatgaatgtcctgctgcattttcttattttataggaggtcactgcattagagtttgatggagacgcggatttccaaatggcggttggaagtagcggtggaaaggtatggtgtgcataataaacattgtagactttagatgtccaaatatatatcaaaataaagtgaatagtaaaaacaaaattgtggagggatttgtttttacatagtctagcattcccttctctggagtctggattacactacataacatctcctactttagagtatgcatgtgttatgaacgttatgattttttttttattattattagaaaatagagtaaagcatacatccaatttctttttcccataatagagagaaagtcgcaacgaaaagaaagctgaaacaacccaaagtacttgaaatattcccaagccaaactgcattttttttctgtagtaaagatggttaaaaaaaatcaaaatattaaaaaaatgctcgtagataagatattttatttatttattcatttattttatatttaatggtgtgctcaaagcttagagttaaggtaattgctcttggcacgttatctattttgaatgaatagggaggaagatatgtcaaactactctgtataagattattaaaaaacaatataaaaaaggtgaagatgagtcacaaattcaaaactgcttgtattatgatgtatttggagaagatgtcctgctgccttggtagtagttagaatgaaatagaaaaaaaaaagaaagaaagagtaaatatcaaaggcatagcttatgtttcattatggatttaaggtgaaatttgatgtaacattggttcaggagttctttggacaagattatagatttatacttgggaaagattgtaacaatgaacaaaaatatatttaagctgttgcaagaatgaaataagtgatatgattcaattggaattgttgagttctgtgagtagtgactgttccgtgatcagtgctttccactttctttcccacttgttgtagagtctattcttgttgcaaacgctgcttgaaacttttcccttctacctttgtttccccttcaaatgcttgaaacaatgatttaaaatgaattacagtaatttaatccacgtctttttgctatatctttcatttgtttatttactcttttcgaaagatgctattatactatgagtttaagtttgctatgcattaatatggcaggttctgatctatgatttgcgttcatcacagccggtacatgtgaaggatcacatgtaagtctatttcctaacttatagaagtcttttctttctctctcacacagagtaaaagtccatgactgaccacttgtcagctgtcattgttatgcaggtatgacagcccaatattgagtattcagtggcatcaagttcttggttctgaacaaccaaagctaatcaccactgatagtcatatcgtcaaaatatgggactctaaaacggtaccttaatttgaaattctaatatttctaagacagtttggcactttagcgataacttaattagattagaacaatgaactttattattttctcatttctttggcatgaagaaacactattgatatatctcatacagggttagagatgattggctaactttactattgagtattgaaactgtgaattattgactaagatgctattttttggtgtatcgctagaacttgatttggactatatagtattgcagtgaagaaaatccattttatggtaaaatgtgtattaacacattttatatctttaattacaaaaagaaaatatttacgaaaactaaattttaatatttgagaattaaaaaaaaaaaataataatatgagaggtagtttttatctttttccttttaccccatgtaataagaggttttgtattcctcttagatggctgaaagggaaaagctgataatctggataaactagtccatgttttagttgggtacatgcccacctcaaagaccagattaggattatttagtcctatactgtctgtagtctgactctaactggcaaagaaagcttcaagatgcttttgaagaacatgcttctactacgtcaagttacattgaagtagattaatagaactaacattcttcattcatttatttagttttcctggctcttcgttttccttttgtgtttctctactttggctgatattttcttctatttccagggagatggtatgacaagcattgaaccggctgctgggaaaataaatgatatatgtgtatttaaggacactgggttaatattgcttgctttagacagcagtcagataccagcttactttctgcctgtcctgggacccgctcccaagtggagtcctagactgcaacagtgggtaagtttttgaggtgtcatttgttggattcaaatattttgtatgtattactccctaagattgtaagatctttaaacacatctttgatatatcttttgaccttcaatttgcaggaagagctagagctggagggcaataaagaatcattcatatatgataaaactaaatttttgactaaagaagatcttgacaaattgaatttgaccaatcttattggtacggatctagtcagagcctccttgcacggatactttgttgattattcggtctattcgaaggtaagagcagcttgtatattattttatgaagggtataagcctccatgccaaattgtattattttcttcttgtcaaattgctttgacacgatgctgagcgggtttaggaagagcttggcaacatctttgatgggaccttgtacttcgaactttgatcagttaatttaagttctccacaaaatcttgcacaaatgtatatcttaacattattcttcatgctggactatgattgttatggtaatcttccatggagtcctggacatttggagttgcttatttgtttattttgtttatgtactgtgcaggctaaagcattagcagatccttcttcatatgataaatacattgaacagagaaaacaagataagctggataaagaattagccaatagaattacagtaagttgcatttgatttgacaacttttgctgctctcttttttatttttttggttaactattccttattctgttataatcatctgggagatagattatagtcatttcttgcatctacattaaatagaggtgtgtgtgtgtgtgtggaaattggtgtgtttacactcaccttctagagaattgcttgttttactcactattggttctcccacaaggtttggggttcaattgttcaattcttaatgggaagttatctagcttgcaatatgctagagtttcatctcttgaaaattagatggcttagcaggcggacctaaataaatttaggaggaagaagttaaagaattatttgtctagtttaaattcactccagctcattgcctttacacttctgctgactttattatatttattttctggtgcatcagaccaagaggaaactacccaaagttaaccggaatctggctaaacaaattgctgaaaacgaagaggcagaaaatgagaagaaagatgatgacgacaaggacatccaaaaaccatccaggaaaaagaaggcacttggcagtgaaatttttaaagatgaccgatttacgaaaatgtttgaaagcaaggtaaaccaatctgattaatttgacatgggctgatggtaccaagtgccaattacgtggggcttctcctttttattacttttttttttctcttggctaattccttgtatatttttggtgttaaaactattgaatgtttcccaactgtgaaacttctatgtaccaatggtctaataattgcttcattgcttaattgtttgaccgaaagaaataacttctatcctcttcaaatcttgtgtttaggacttcgaaattgatgagttctcacaagagtatcgggccctacatcctgttgcttctactaagaagcaaccatcattggtggaggaacattttgaatctgtttcagagggtgaagaagcttctgatatatccaactcatcagaagatgagctcaacaatgatgagagtaaaaagagaaagaaaggaccagttccaaggtaagatttaacattattttctctgcagtgttttgttccttttgtttctctttgagcagataattgtgagttataattcacgttgctttaaatccttcactgattctaaacttgtgaaatgcatatttctgttaatgttttattcttcttggctcttgagtttgttatcaaaggacgaagactaaaaattatatttcatggctatagaataaaaatcattgatatttaaagttagtaaagttctttcatggaattctgtatatagattgcttgaagtcaaggatgaaaggcacgcagaagcattcttcaatcgcacatcacttgcaaatgaggactcccttccacttggggagagactggcatctctaaataataacccacggacttctaatatcccggatggtgtcaagttagggcctggtggatcacgagagatatcattttcagcaagaagctcatcaaagtatgtagaggatatggaagggagtggaaggcgaggtgaagataggaggggagttggatcgttggggctgaaatcagcatttggaggccgagggagaggagggagaggagggcatcgtgggagaggagggagaggaggagggcgaggggggcgtgggagaggccgtcggtgaatagagcgattgtatctttttctctctctcacttttttttttatttgtttacaatcttctctttgaatagtagtcattctttttgttattcccggcttcttctacatttaactattttattgggtgaatctctatccaaagatgggaccatgtggataaacttttaagttaactagaggaatgaattatgtatcctatttattctttatttgaaatagaaaaggttaggaattcatgatcccaatcctatggatgaaattaggaaattttgtatcggacataccaaaatatagcataagatttggaagtattaaatatatttttctttcactttatcaccaatagcgtttcaatattttgtgtggagttattatgttgcatattgtgtacacggtacaatttattctcatgtccagctccgcatcactgtacttttggctcttctaacagttacgtaactcttattctacaatgttgagtatttaatcatcctcttattctacaatgttgagtatttaatcatccaaattaaccttaaggctaattagtaatttttcccctcgaactttgacatgtactaaatcgtaccccttgaattttttttggccgttaaaaattttcgacttttgtctaattttagtaaaatttttttaacataaatgaaagttggcatgatttagtacatattaaagtttgaggggcatgatttgatagatatcaaagtctgggga

SEQ ID NO: 42542 - DNA, 3284 bp, Cannabis sativa
gttggatttaaggattttttttctaattttagtaaaaaagtctaacatgaataaaaattcaagaggcataatctagtacatatcaaagttcgaagggtatgatttggtagatatcaaagtctgggaacatggtttagtacataaacaatcattgaaatagtaaaattgaataaaattagactatagtccttaaatccaacaatctcaatagtttaggagcattttcaatgcattaaaattcaggggcataatttagtacatgtcaaagttcaggagcaaaaattttaattagcctaattttttttaaaaaaattctaattcaaaagaaaattgttctagaatttgggcagagtagaatttgatttgtaataagttttgactaattgaaattttgactcttctttctcaaccctggccaaaggcggcttcacaatatagcaaccaaagccattatcggttttaatttgactaatatttacgtaccatacctatccccaacttagcccggaagctaaatatcttgatattaaaagcttaaaatacgaaaatgattgtgagactaataataatagttaaacatgttttcaaaatatatgaaatcatcaccttaccattgaccagcaattaatgctatattttataattttgtatgtatataatataatattaaaaggaggcttatatattgcaaaaccacctagcaaaataaaaaaattatgtaattacgtaagtggggtttggttttttaggccttactcagatcttttatgataagtatgatcttccttggattagtttcaaaagcaatgacgttcattcatgtccttaaaaataacctcataaactttttatatatattttttaatttatttttaagttatgagatacacagggtggcattttatgagtacatgtttccactttttatcctcattgttatcctataaatattaataaaacaaaaaataataatgatgatgtaaaagtttcattctccatttgtaaagctaaaacagagtggttagtggtagctcgtcaggaaaattgtacaagaagacataatctgtgtttatttatgttgagataaatttagaaataattaaaaatttatgtattataacaataagacatttaaaattatatatatataaatcaagtttggtggctattgtatagtttttgtggcatagtggggatatagattcttttagtggaatctcatccccaaccaatgctggaattatcaaaaattaatgggaaattgaactggaaagtagcatttccaccatataacggtcctatgatttaaccacccaagattctaactaaaattaatatttgtaatcttaaaaattaatattattataaaagaaacagtttaaccacaaaattaagacaataaaaaaaaacaaaagtaataaatgaaatataataaaaattataagagcaaaacaaaatagaccttaagcaatgacaaatggtgcatgtgatcacatgcactctccaatggggtcggttccaacatacccgcttgattgattggtaacttattagttatttatttttgagtttgatttgtgtgagacttattataaacaagttttataaataatataactacaattttaaattagaattatttaaaattttggtcgtgaagcatacatttagtagtgacgtgtgaatatatatttatatattttattttatatatatatgttactcatatgttaatacgtttagtccaaaccgaataaaatctcaagaatataagcatatggctcaaatgcaaatatttagagaaataatcactcgtcttaccccttatattgggatttcctttttataaaaactaaaaaaatacataaataattgtgaattttattttttttagagtatttgaatgcatatccaataatatatgggtaaaactcaattatagagcaaatttgctaatttgaaaatttgggggaattgagtttaaaatatgtattgacttgactgaattttattgactagatataatatataaaattaaaaaaaagaatgtaattgcgtatctacttatataatatagttacaatatttttaaagggggaagaactagtaacatgaaagatttggttaataataataataaaaaaaaatcagccaaaacaatacatcaactaaaattaacagcacttgcgaaatagttaaggaatttcccagacccagagcatagcaaattaaaatatcaaagatattgtactattttttttttctagaaatttattacatgtttttttttaaaaaaaaaaaaaaatcttatttatgcaacctcagccgatgagtcatgacacatgtcaaagtcagaatgtaaataaccaaatgttttggtggcttcatggatgacctcagtcacactcgattatctctcaataaataaagtacagcaatacgttataaaaatttgtcgttttaaggcgtttaggtattgccgttggctttttatacgaaaaaaaaaaaagaaaagactttaatatttgacgagtaacttgcgcgtgtaaataaagttccaatctttggcttcggccatcactatgtatatagactacaagtccagtcaaaacattgcaccttccatttcatgcccatttcctcttctattcttctcatttaagccctctatttttggaatttattaatattcaaatcttttaaaccctttctcttgtacatatacacccttagtttcaaattttcctcagaagaaaaaaaaaaagaaggaagaaaagaaaaacagagaaagatgggttttttaaaagaagagaaatctaaaagagtgttgagaataataaagacagtgtttttcttaatcactatgttgatttctcttctcttattctcggctcctgttcttcttgctattgccgataccttactcccttcggcgattctctctgcctcgctttctccacaccatacggcgtcgtttcatgatgataatactaatcccattcccacctcttattctccgctcgaaactctctcttttcatttcagaaactacgattttcgatactctctcattgatattccaatcatttccattgtcagatcagccgtaatcatctgtaagtagtagtactaatttattgatacaattattttattttaaagaaagaaaataattattaatgaatcaattaataattagcttttgtatttgtatttgtgtgtaggtgtttatagcttctgtgatggaccaaagttatcgagaggaccatatttggggattacaa

SEQ ID NO: 42543 - DNA, 3292 bp, Cannabis sativa
atatgattaagtttaagcccttgtgacactctgtggaggaggccattggtagaggcttagtgtagaactaataatgaactgaaattagaaacaaatatgaagcttacaatacatatatatgaattatttatatatataataagaaggatgaccaagtaattgtggggtggaactttaaacaaagtagattatagtagtgtaagtattttgttgattagtataaaccaagtcataaagaaaagttacgtgttaaattctaaataatatgccggcctaaattctttgtgaccttgtttaaatcccaagaagggaatggttgactctgtcccatacaatctctactaggtctagctgtttttttctctcttttttcacaatccagttggaaaattggaaaacccttttgtcctgtgtacaccaatataatatattttgtattctaacaaaaaaaaaaaaactagaatgacatttggagattacagaaaaatgcaattcgatttgagcatcaatgtttttgtttctataattcaaagcttatccggcagatgttaacttattaggttttgaacacatttaaacaacaacaattgtagagtgcacataataaaaagttaagaactataacgtccaaattgtactcctttttcctgtcagaaaagtgtacaacataaccatgtgttgttaaagttattctgatcaaatgtagaccacagataaagttatccggaaaaagaaaaattagctagaaagttatcgttgtatataaatctcttttgtgcctgcaatctcatatgcagcaacattgttgtgtctgcaatctcatataattaaaacacaaaacaaaacaaaaaatccaaaaataaagatgaactgacaaggcttgaagaatgaaaaatatgcaaacacaaaaataaaagcataacacatataccatgaaaagccaatcccatcaaagagaatctcagatattttttattttttgagaaaatctcaaactagaatcatcataaaattatagatcaaaaatagcattaagtaattttcatttgtagaagagagaaacaagagctatatctgaagtatttatattattagaaaagtctgaagtggctattgttcagaaaatacatcaattctcataagggattagagtattttgatttgagagatcatataccaccattaaaattatttagattttattaattcatcttgtttgaaattaaaaaaatttacacaatatcttgttacacataagtactctaacgatgtagtttttgtttaaatttagtgtctttgtttctatcaagaagttatgtgtaacaaagattttctcttaaaattcttttaaaagtttttcagttaatttaagtagaacaaaatcttcacaattaattagttcacaagtatttatttaacatctctacctacaaattttttactttaaatacaattttcttttaaattcctttgaacaattagatcaagcatttcaaaggtcttgtaacagtataaatacatatggcacaccattgtaacatcttctgatcttcataatttagttggggattaaatgaatcgagtatttttcttttcaatatacatgtaagcctatttcttgatagcctcttccaactctcgtagccctccaactttttgctcaatttcctcaatgagttcctccctccacaattctgatcttgcagtttcttctatgtcttcttgctgagaaaacccaaaattggcttttagtactactttggtatcaaagccaaatttattggcctctaattgtgaaatttatgtggtgacggaatggagagttatctagtagatttgcctataattgtcaaaacaataataataaaggaaagagaaacaaccttgtcatagatccaatgtccagttccatctcctccatctcccctataactttccgagtcatagaaaggatcctgtatcatgggattaatttctttattgttaattcagttaaaacatgtttcttttgagcaaattcaattaaaacatatcattcagattaaaatagtataatgtttctcaagagaaatattgatatacttactttcatagaaccaaaaactaaacatccccagccagtaaacaacatgtaaccaatatctgtccataataattaatcttttttaaataatttaaatttaatacaaaatataattaagtacagaaataatatgtatatacatataattgaatcaaacacttacagacattctttatggcagtgtcactgagatgccaaacagatttgttaatgataagatctctttggccttcaacatgttccactagtactgccattaaaggccaatctgggaaagcgtttgttttgattaaagagcctcttctacccttatttcttccttcaagctacagtttttttagggggaaaaaacatttattcatacttcaatatcaccaccctgatgaaattagactataacttgtttggaatatgataaaatttaatttttttcttgactaagatttataatgaggttctacttacctggtttgagtgaaaaaaaccagagcatgatgaacactgcctaagctggaaaaaaaaaacgaaattttacttaatagtgaaagtcgaccaaaatagagagagcaaataaaaaactatgaagtatgaacaaagttatgtttaccgatctagaacttgagttgaggtctaacttagtagcactttggacataagttaaggtatgaataggtggcttggtaatgcagaatgacattacagcttcagccattgttttgagtgagaaaatgtaactgaatattgaagcttagattttggtttcatttgttgtgtgggaggggagatgtggataagggagatgtggataaaggaatgattcatatccacccttactaagtggacaatatatgtatgtatggtaataaatattaagtggggaataataagaagatgactggctcttcaaaattactgtaaatatactaattttttttttttttaattttctcattttctcaatttttatttagttaaatttgattatctattttctcttatttttttaaaaaaaaaatcaaattttcaaattataacaagtaattaaactaaaccgtacatataataataatctaaacatacatatacttaactaaattatatatatagtttggttattaatgtacacttaattaaataaataatgtcatttaaaaaaatatatattaaatatttaatattaagcataataaaaagaaaacaatacagtaa

SEQ ID NO: 42544 - DNA, 1803 bp, Cannabis sativa
tatactcctttttcatgttacataaattctagacaacaaaagttatacagcaagaacaaaagagttgtatatataaatgaaattattattcaattgaaacacaattttaaatgaaaagtaataaacaatgaaggactattaacaacagattaacccttcatatgaaccaataagcagtggattattggcttttaatagaaagggaatcaccttctggattttcctaccacgcaatgaaccaacacactaccacctgttctttttgcttcgtcaataaaattgaaacactcatcaaagaactgcttaatatctgtatcttctttatcagcaactacattaatttaaaaaaatatcagaaaattttgaatttaaatcttccataacttatgttgaggaacagtattgaaggtcaaaaaaacgaaattcataccacttatgatcttgtaaacaaactcatctggatatattggcaccaaacaatgagccacagttaaaatatgagtaatttttaactctttcagctcactcttgtttcttgcagcttcaagagatcccaaaaagagacactgataatgaaatttaattagaaactcttacaagttgcaagtaatacaaaatttctagaaatgcatacaatttagtacctcctcaatttttgaaggaactttatccttttgtaaatatcttttcataaccatcactcgccgcattgctgacaatttacttagggattcatccagtgactccatttgtactccaaaaagcttcctaaagcaaataataataagaacaaatgtattttttttatcgaacattaaagattcccaaataacactcaagacaatatcaaatactaaattcagaaaactaaaataaatatctttaaaaaccgtgtaattaaattggcagaaacacagaattccacccataaaaattccaaacgaaacagtgcaaaagcgtggcgattactcatccagaatggcaagaagcaattatacaaattcaaataaagcccaagaagtttggaaagaattgcctttcacaaaagggaaaacattataataacattaggttaatcacgaaataatcaatatgcactaaattaaaatcgatcatgcatttcagaataatgagatttgaacgcaaaaagaagatgattacttagcgaagatgatgaggatgagagtggagaaattaagggattccgaagggagaagagctctgatttaggccttctctgattgattgaatttatgactttttaggtacaatattatttttaatttgttattaattagaaacttagtatgaatacatgcaattgattatgtttttagcttatttgtctttacgatttatataatatgaagtataaattaaatagaatatttatttcaaattcataaaatccattattttcattttgaattatattacactatttaattgttattatttttttaatctttatgggtacccaagagagccccatactcaatgggtattatttccctaccctaaacatgttggggattaagtgaggcgggacaaagatgggagcataaatggggagcgggaacaaggttgggggtgcattccccactcactacttccccaatttccatccttagtttagtaggaaaattattaacaaggagggtatccaattttaatgttttttagaatatgatgatagtgatatggtcattagccaggtatgggtatgtgcgcaaagaaattgagtaataatctgaatctattcagttttgaaattccgtattttaatattcccagtttgattat

SEQ ID NO: 42545 - DNA, 11463 bp, Cannabis sativa
gggggggggggggggggtttggttaaactttagaattagttagaatgatattgttttagattatgctgtaattttgaatgagattatatgtttgatcaagtacaggagtctcactcggaaaaattagacttctttagtgttagtgcataaaattctcatattcatctttttcaattaataaatttaaagtcttaaatagagattgtaagtgtgatactacagtttcggggtgctggctagccaaatgtaaggtaaggaagtttcttggttggatggacattgtaagtgttagtgcccgctagaactatgctaaaagggttttgaaaatcgttttggtgtaaatgtcaaatcttgcaagggaatagggttgactgattgtgagcgcatgggaattgggatgattggctcgtccaaatcgagattgcactatatctaactaaaggtttaacattatactttccttaaggttatgctgttgttaggtggttttaaactagttttatgttgtagtatatagcacatgctcttcacaaaataggcacggtctcatgactgtaaagaaccataaatacacaagcttcttagtatagtttgcaagcatgcacatcccaacacgtagtgattttttaagggagcttaatgttgtgggggtaatatgaaaaagtgtaggaaatttagctttgatacataggaattaatttctgtaattctaacatcaagatcacacttaaacaaacaaaagttaaatcaaaacaaacaaatcaagaacaaaaaccagcaaacacattaaactagaaaaatataacatagatgaatctaaatggctgtcagacacaataacacaagagatttatattagttccgattctaggttcattgtgaacatggtcatacttcaatttgaaacattgccatcaatctttattgataatgagaataagagatatcaatctcaggagctacaaggaaataatcacagtaagtcatccatggtgtaatcgcctcaacactcattaactcactaacccgagccaacataatcaacaatgttgctcaatacaatttcccaatcccaactctctctccctcagatatctctctccatttctcactctaacttctctctctactgtattgtgtctctctccttcttgcccttattcttgtgtttcttctttttttatgattctccctttgaaatgtttgaaatgagacgagtagtccactttatataggccaagggacccaatatacttcctgtcataattgatagttaagttagttaaagactaactaactgaccgaatggttgttgggggtttaaggaataataccacaaaaagattggagtgtgaatggaggagttaaactcaggtagggcatattgctagatgccatctattgttgcaggtaggcccaagttggtttgcatattataggatagatctttcttaatttcgaatccaagttaagtgtacatatgtgttacttaatcctagtttattcagtgagctttcttactcttttacttctgaaggtttgtgaaagattattctttcaagctgcatgcaacatcgatccaattttatattctgcctcattaacgcaaaatatgattgctgtatgatttatcattttcatttctattcattacagccatgatagcacctaaatcttttgtactttgacggaaccatgaagtgcaatttttagacattctcgtgcactacatagttggtgggatgctcatttgatccatccataaagaccaataacgttccttctttccttgcacttgagtcaacacatctttttcttttcttttagtttatataagaatcataatagatttcaatctatattattgataatagagagacaaatcatcgatggtcatgaggaaatgacaaaattacagctatatattaaataacataataaagcagcagaagaaaagatttacaatgtctttggtcttgtgtgtgtgtgtatatatctctataaaattacacataaaaattaactttttaccacaattgctccagctctgacttaatgttccgaaagatgcagctgtcactttcaagagagagttgtcatctgttcatcatctttagagtttagatatggatagttgcatcaaaatctctctaagctttacttgaattggaataaactatcaatattgaaaaactttgaaatacgtgcatgtaataagcatgagttgggggcccatgccaatttaaggattgcaatatgctcacataagagaaagaagagatcaatattcaaccaccattagtcaaagaaatgttcctcactatagacccatatcaccatgccttttgtgactcattaagagtaggttaaggctgtggtttgcaaccattagttttggtgttcaattcctcatgtggactgctatcaatattcttgagtttatgacctctcaaagattgtatggtataataggaagactgagtttcaaaatccctactcctttcgttctatcttttatgttttggctaaaatattgcatggcttacctttaaggcagaagatatttcagatttgagagcagaatgctagtgacgatcataatggttagacaagatctatgtttttgtggaccttccaaggctgatggttgattcaaccactaactttatctaagtgcaactaaaagatcattttttaattttgtcaagttaggcttttagatattagcttggtccagttctcacccttttttttttggccctaagttgcccaaaataattattggggttggaacataccaaccccatgcttctatgtattattttggtgaattgagtaacttcttctttaatgcaataattcatgtcgtattagttgtgtttgttgtcaaaaattgtagggaatatgatctcatggcccagtcttataccttctttaactaaaggttttttattctctcctccctttttatgttctctctctctttccctccctccctccctctttctctctaagcgtagttgcatatgcttatggtatgagctgtagtttaatagcttgcttggatgtgcactatgctgttacgctatacatcttgccttctttttcaaaacagtagacttagggtactttagcgttaactttttgcttacacggataacctcatggagacatgtcagcatatactgggtttagtaatatactttagagagattttcctattctagtattttatttaatttttcttcttatagctgttagagatgacttgaaatctcagagatgtaatgggagctttggattaagttcatctactagagagaaattatcggaaaatgtagctttttctgagagttatataaatgtagactttgcagtaaacaaaacagatggtgaaacactttcagcaaagagccccaagaaataccacaaagaacaaactttggatgtcaatcctgatttgcgtgttagcgacatcacaaacgctaaaaggtccaattcatcttttgctgaaggaaaagatatgggtgctgttttactgatgaataattgtgtcaggcagaaagatgttctctatacgcagtatgaaattaagcaaacggcactgcagtcctgcaatgatgaaaagcgaaaattgtcaaggttggatgatactagatgtatttgttcttcatttttttattttgaaaagaaaaacacaatggcttagcttaggctttttatgatattttatgttgtggccagttatttacgaattccaaagttcttgtacaatttcctgattattaggattttcagattggttgcatctgggaaagagactggaagtcactcccctggtgttgagatcatggatcaaaataaacgtcctgcagtcatatgcgacttttatgcaaaaggctggtgcatcaaaggtagttcttgtaggtttctgcatgtgaaagatcgtcttaataatgatcttctgcaaagcgaggtagatggtgttgcagataataaagtagaagtccaacttgaaggtatatcctatgtcttctagagtgtctctgtgtctatatggccttctataagatgtttctaattaacacattatcctttaacaggtttaagagaaactactcagaaatcgaggtcacctagttttcctgaagccttagcaccttcagttggaaataattctgatagcatcaagtcattggaacacttagaaagaaaagcctctcataatattcttgaaatgcctaaatttgtgtcttttcagagagaagtatttcccctttcatttaaggatgtaggaagggaaaataaaagtcaaatcaagtcggttaatgactatagtggccggagcactctgactaatcgagatggtcctgtattaaataaaagcttgcatccggagtacggagtttcttcaagtggaaatattatatcatcaaccaattatcattttataaatccaccttctcattctagaagtatggaggaacctactagcatccaaagccaacctacactcaataatcagactttaactagccaatctccaaattcaagctcaggcaattctcttttgactactggcatgctatcatccagtcgtatctcagcctggacagaatcttctcttccattaagttattcctctgtaaaaccaagtcctcttggcttgagatcttcatttcttcaaagttcttctcactatggttctgaaccagataatttaccctcaacaaatcgtatatcttattcgaatgattgggagccatctgtaccatttcaaccatctttcttagttcgctctatgatgtcatctactggaagccagtatgatcctcttcgtgatgttgttgagttatccaagtcgggggacgtatccttgagagcttcctactatagtcaagggtcatcaattgtaaatatattgcatccccaaaatcatggtgacgtggttccagatgccccagacctagcatgtaatgatgatatgaagtctgtatcatctcataatacgtatcatgggaaagtcctaggtaagaactgccaaacacaaggaaaagatatgattgaactggaggttgtgggaacttctactggctgggaaaaagggtccgtagcaaagcaaaagaattcttcaggttcatttgatgtcaaggacattaccgaagcaaccagtgatggtagacatcgaagtcagaagcatgggctgtgtggtagtttacatgtaaaagcggaccgcgtaggacaaaaaattgaaactgtagctggacacattgtggaaggagtagttgtacgtaaagaatccaaagcacagttgcaatttcgttctgctctcatagattttgtgaaagagttactgaaaccaaagtggtgtgagggagctctcagcaaggaagcacataaaaagatagttaaaaaatcagttgagaaagtactcagcaccttgcaacctgcacagataccaccttcagtggaattagttaaacaatatcttgcttctttccatgcaaaaatagaaaaacttgttgaggtaagtgttttgttttagaaataatatatgctagaaaatcataaattttggggtttctgatatagtattttcttagcgttgactggtattactatttgttttatttgcagggctacgctggtatatatggcaaagtatgagtgctaggccaagtttagtattttgtaaaattttgaacaacttttgctaacataagtatgaaaagattgtttgtcttagatggatggaataaattgtgtcgcatatgttgttacattatatcagtggttgattgatatcttattagcggtccatttttagggtctttttttcccccatgttatgtgatttagaaattttaggtttacaacagaagataaccctataactgtgaattatttcgttttggtacatgctttatatatattgaagcttccataaaatgtgaattagttttatcttaagtctagcctgtatcgatttactcgtttttcttttaatgttgttaatacctatgggtgggtggtctggaccaatgaaaagacaacaaaaagttaatacaagtatatgcattcaaaatctttgaagctacatgcttagtattagtactttgaagagttttttttgttgctgaacttctgatatgagtacctattggcacttggcaggatgttgaatttttggggtatttgacttcataagttggagtgtttggctaaattttttaaaaaattgagtaatataaaacaagtcacaaaatgttggttttttatgccgtaagtataatttttattattttgtcaagcatattctttttacattttctctcactctggggttgggattggggttgaggcctcggttcgaagttggggttgggatcgggtctaggccagggttgggtttgggttcgtgtcgtgtttgggtttgggtcagggtttgagacttggtatgggtcgtagaccaggtcttggttagggtctaggttcaggatttggtcagggtcctgggtccaggacttgggccgacgtctgtagtccttgttaagatcggggtttgtttggttcaaatttttttaaaaaaataattcgtataaaaaaaaatctaaaacagtttatttgggctgcctcaagtaaacaagatattttgtgggttaaatggatcaattcggtctatttgaagggaaaagatttttgacaggctccgttaaaattggatgccagctggtacttctgaaaactcatgaaatttagagaaaaaattgacaaagaggatgtttatgctgctgttcagaagggtaggtttaaagccaattttttttatactttcctaattgctgctgataaagtggagtatgcaaataatatttggcatagaatgtgtgttcccaagcaccgttttattgcttggcaagccctgaacaaccgactcttgacctgagacaacttgtccaaatttattgtgctcccctcgagcaattgtcccgtgtgtgatgctgaacccgaaactcatcaacacctcttcgttggctgtgagttcactaaaaaagttgttactaagatcaaaaagtggtcaacaagtttgtgtggcctgccactatggaggaatgaaattgtcggtgtaacaagaatcaacatgatttaatatctacagttaataatgctatgatatctgccttgatttactatgtgtggtgtaaccacaatcaatatatctttgaattagtttttattcagtcaagatggttagtttatctattaagctaagccattaaggctagaactagaatgctgaatctttgtaactttaaaaatagggataaaagtacttaaaatataatatgtaacttgtagtactggctgtttaggggatgtcttcttttgtacaactgccttggtttgtattttggattgtgaatttgaatgaattcttccttcttccaaaaaaaaaaaaacatttatcaaacagtcttatattttgaaaactacataaattgttttatgttgtattttccaaaactgaaaatttaaagtagtgccaaaccccttgtttcttgcatgattcactctttaaccactttcacttatagttgtactccgttcaagtacgaaggatgatctcaaatcaagatagtgacagtgagataaaagagaaagaatgttgaagtcacatatagagttaggtgtggcagtgctacacgtgtcgtaaaatccatggaagcaaaagaagaggatgactgactgggattgtagtctctagttaactgcagtggaacaatttgaaatccataaatctttaaaaacttactcaagttaatagtgaaaaggaaaaataaaaaatcctaacccatgtgaacttttattctgatttgctagttgcaaagcctacaatttcaataactaagctatttattctgatgtgaatgaataaaagaaatcaagtcaatatagcttgaaactttctcgtggattagtttgtgtgttgattgtcggggtagctggggtagctgctctgcattctctacaaggagaagaaaatgacttaattagtctccaaccaattcctgatcttgatgtgctatgcttctgttctttcttgtgtttatcagacactccaatggcacttgttctatcacttgatctcttgctaccattggaggttgctggtgatgagcctttccgatgaggcttattcgtcttcgaatgccgctgcttcgattgaaatgggaaagcttgttgttggagcttgccatttgagaccagcagatgagctggagaacacatgctcgaatctgtggcggttgactcttgcccagctatagaaaattcgaactccgggtcttgtttgtgaacttgatggctatgagtggaaggactcatcagtttttgctgttgagtgcataccaagcctgcaaaggaaagtgactcaagtgaacttgcatcagctgcaacatcaaaagagctcttattttgcgggtgattagccattgaattgaatgtgtgaatgatacactattgtttgaagagagccaacttatattatatacacagcagcagcagcagcacgggaggacatggagtatttcagtcattttgtcttgatttctttgttgctatacaaatattctctttgccggtatatatgtactttctacacttgtccgagaaagtgaaagcaaaataattaactcgttaggaaatttaaattaatggatctgatttgcaatgttctcatcacaataatcaacttgaaggtgatttttgtaggtgggtggattcaccaaagtaaacccaggatgtaagtggggatataccaaaggcttttgttttatgtgacgtattaaatattagtttgtgcttcaatcccattagctagtgcagactgcagaccctactacatattttttttttcttctcccaacaatgaaaaattctcactactttgttgagataacccatttgaacgagaatagtttctccaattcattaacaggggaacaaatggaatgatcatggttaagtgggtaattattttaagaaactatgagcattcatctcttctaaggatggcaaacatgggcagtggggaaggtcaggttggagcaggtcgatacccccactgctttactttttttttaaaaaaaaaaaaaaattgctagcaccttaaaaaaatattagcaaacttttgaaaaataataatttaaaaacaaaatgagaaactaaaataaatcattaagtattattacaacgagaataatatatataagcatatatacatatatactaagttcaagttacgtgctatacgtatattcagtaactaaaagaaagttacgtgcaagacacgtatatttagttttatgttaggtgctctgtaattaattgagaaagattcaataaatagacatataatttaaaatggttcgaaaactaattttaattagtgtgtggggttatttgaaaatcaatagtgaaagatcaaattcaaaatttttagaaagagaagaggagaatgaagcttagcttgaaatatatttaaaagataataatgctacacactatggatacttaactcgagtcggtgatgataaaattataaagaatagaagtagcagatatatgactagacatatgaaagaaaaaatataaaaaaaacaagaaatagcttaataatattataacaaagcaatgacatttgctctccaaatctatcttaatatcataacatcataacctcttatacttacatttgggccagctttcttctcttgggcttctatctttatttttctcaattagcccgtaggctatttactaaaatcattcagttcaagcccaagcctcctagggtaatacatgagtcttcttctccacaatgcaagccgcatttatgactttttttttttgaaacttgaactacagctatcgtaatctcattcttctcttaaagcctctcatcaatctcatagcactctatgatagactcaacaaaacatatgtgtttatgtatatttgttttgagcaaaccagtaaacatatatatatattttcgacaaacctgatatatagttaagtattcaaatacgattgtaaaatctaatctgaaaacaaaatcaaatggacaatgtcattcatgctcaactaaaactatatatactgttatgattacatcgacccaaatattcttacttgttataactcaagtaaaaatgaagaagataagcaattaaaaaaaaaaaatcaagaaatagatctagatcccaaatggagaaaaagaaaattaacgaatgaaaaacgaaagatttacattacatggttgataaatctatgagaaatgaaaaccaagagaaagaaaatcaacctccgtcgttgccgtttgcgagagaggagctgagggaatagttgcaccgtcgtcatctgcgagtagggaagaaccatgattcaggtacctaaacatcaataacaaaaatagattaccaaaaaaatccttcaagtaacaaaattttagcagggaagtgtacgatctaggtttaaataaagtattgatttatcacgatgtcttcccaaccctggcaaaagaattaaacaaaccatatgtcaatataatgatcaacccttcattataaatatattataaatatattaaagaaaataatttctcataaatccccccgtttaacctcagcaaaaaaattgttatttttgaatagaaaactttaagaaaagagtcacccaatactttttcataaaccaatacttctgttatatagccacattttatatagaatatattttagttttttctttttaaatactatattataatttttaattattataatatacaataatattgataatttaattaaataaataattttataaataaatatttaatataaagtaaataaaaagaacataatgatacatttaaataaaaacaatgtgtagagttttcgaaagaaacacttaattcttgtttataatttaaaataattataagatgtgtttttaattttttgtcgatttagtgacttaaatattaggcttattagctttgttggataaatcaaaaaccacccagtgttgtgatattttgttagtataatgaaataattatcaataaataacagtaaatagcctatacagtgagtgttcatactaagatatttttcggataaatactattttagatcttgtgttttgcaaaaattttaactgaaccatttattttgtcaaataataaattggattttgtattttctaaactatttcataatttattgatacttgattagagaaaaaaattcattcattaattagttgcctaaaatttaatgttacaaaaagaaaaaaaaaatcaataactttagtacaaggtcatgaacaaatatttacttctcacctgatgcttcttgtaatgcattgagctgccaagtaacctgcatgaaaaacaaa

SEQ ID NO: 42546 - DNA, 1676 bp, Cannabis sativa
ataattgaaaggtagacaagaacttggggctttcagtattaatgatagtgttagattggtctcacactcttggtctcttctttgttctgtaaagtctagattgttgtttagcattggtttctacttttacgaaacgttcttccttttgtaatgagtttggttttttgtaagataatattgcaagtttgatttttagttttattgaggcatttttaatgttcaccgtacaactaataaaaccttctcataaattaattatgcaaacatttaaagtggatagtaaattaattaaaaattacctgtcttttcttattaatatattaaactttaattattgttaataaaagtttaattcctggaaaaaaaaaaaaaagaaagagttatattgtccaacccttgtctatgacatgagtttgggtataactaatacagtcatgtgcattgtaactttggtgacaacaccatttgcgtttaggttattttggattgaaccaggaccactagtttattaacaactactactactaccactcatcatcatcatcctataatattatatatattctgtataattaatgtatatatatatatatatatcttgagtaattgtatcagctttgtacttctttcttgaagacttgaactattcagatagcaaaataagctcactcccttttgtggtcctcttttgatattctaaattaagtttctgtcaaattatagtactatatagactatagtacattttatcaatatcaaataaattaattagaaagtataaaaggaactaataaaatgattgcaccatggaactctctcaaagtagtttctatagccaccacggccataatatgcattatcactttattaagaatatatataatcatggggaagactaataataatttgccacaacaaacaaaaccggaacttaattatatttcattcttaagatgagatgatcattttttttttcttatggtaatattttagtgagtgatctacatttttcaatatttagacagtagaagctattatgacacatggtggaaaaatcttatagataagcattagtataagggaaaaagaattacaaatatatagaggctatattatatacatatattaatttttatttgacatatttttctgaaaaatatacttgttagtaattgtttactccactagtaatggcaccaaatgatattgtctatgtcctgaagttaaaagcgtactggaactctatatttaggagaacccttttaatgctctctcaaagctattatttgtaagaaaaacgtgtgctttcaaatcaattaagctaaaccttttatagggaaaaaaaaaccttttttcaagagcaaaagatccatattttttggcccgcagaatataccgattttgccaatatctaatatctatattatataaggagatcaatatgattatatagatctaatctaatactcgaattgatactgtgatcttctgcttggtggactaaatgtagctcataataaaaattaatttatataaaaaaatatgattttagtaataattgattcagttgtttctcttttacataccctgtatagatttgatccaaaactggcaaatagttatatgtatattaattaataagtgaaatttgattttttggtttgtttttttttttt

SEQ ID NO: 42547 - DNA, 3310 bp, Cannabis sativa
cttcccagtttggattgcttgttcctgattgtcaaggcttattatcttcattaagcaatgtttctaactttctatagtttttgttaaacgatctgctaacaaggtcgctcattgtattgctagagatcttgtttaaagagattgtactttcaatgagcatgatgcaccttttgatttaaagactattgtttctgctcaaagttattaaataaaatcatttttgattaaaaaaaaaaaagttatataagacttaattatactaataacagtataatactaaaaaaaaaaatattaaatattaatagtacttttaccaattctcaatctttttatataattttcagattgagcaaaaaaaaaaaaaaaaaacaacaacaacaaacaaacggcaaaacaagcacatggagccttcgaacacgtggtggaagtaagccacgtgtgaacgagtacagctatattgaaagctcatttaaagcaaattgaattgaagttgctctcaattctgtttcttgttccagtgtgaaacttaaatgcagcctaactacccacaatgggtgtccattaaaagcctcgagctgtgtaaagaaaagaacctaatacacttaatcatcattcatcacgaccgttcattccattcaaatgctgacgtggtcgatcatcaaaaaattatatatgtatgtacaattgtagactaccctgtccaacagtatctttgtagtttagtgattgtgggtgagtgagtatacaaatttgatcaaagaagaagaagaagaagatgatgatgatgaaaagggagatgagttttgtgtcgtttttggtgatatttgtcgttttaatgaggagtagtagtattgtggtggagtgtgctgtgtcgataccagagaagtgtggtagtgattttcaaaagctggctgtttgcctgacctacgcgacgggaaaggcggcgactccgacgaaggactgctgtgattctgtgaagggtataaaagatagtgagccagagtgcttgtgcttcattatgcaacaaacacatagtggaaacgataagattaagagtatgggtattcaggagactaagcttattcagttaccttctacttgtgccttgaaaaacgctagccttgctgaatgtccaagtaagttctttttaaaccaatttctattttcataaaaaagaaaagttcatatgttagatttgttaggcttagctagatttaatataattagatttttttcaaacgatttactcaatgttccataataatatacttgtcatacatgtgaatattataaatttatattttatttattacttttttaaaagataaaacgcaatttattattttcttctacttataataaaaattaattgattttatttaaagagttgtttgtcgagaattttactattaacatgtcatattattatattgatatatgcaaattattcattgaaacatgaagattatgaggatataagtagtggcaaaataggtaattgcaaaattatggtatattgttggtggtagttgctggattatcatgatccgtgacaagaataaattgaccaagtcaaaaagttgtacaaatgctaatgcatgtgagtaaccgaaatagtttttcggtacacttgaaaactatttatgaaaccttccaaaaaaatatatatttttaatcattaagttagaactagatcaccctcgattgtaactagcaccttctattagcaccttctataagtgtcactctcactctataatttgttagggatattttataaaacttactgagatctgttatttaattacactaatagatctgttatttaattacactaatagcgatatgatactaactagctgtagtgccctttatcaattctcctattctcctaagttcaagaaaaaaagaaaaagcaacttcaaaaacacaagtaggatgtgctgcattaattgtgtttgttgggcagtacagcaaaacgtttaactaaatttttaatgtgccataacaaggttgataggtttgacttttgagtaggtgctgcttttattgaaaatttgaaacgatagtagtagtagtatagcagcagcactagtgccacttattttattttgttttctttcttttatttctgccaattactttctcaactatcaactgtaaccattaataatagcttgttctggcctctgtgttttcctacctttttcctttgaaaaatcaatcgacatttgctgtacaagattacattatatgcatgcattttaatgccatgtagtatatgcttcaaatatataatattctgtaaataaacataatcaagagatgtgaaattagagaaagaaaataatttcgaaatgttaattcattcttttgatatatatatttatataatatattttaaaagtagatagatcttctctaaagttattttgtaaattcattttcattgaatgatgctttgtaaaatgagattacataggtagtgttgaatattttttatgtttacaaaatatactttgcaaaaaattaataaaaatgtcattttagctagaaaatattatattgtcacaaatatcatccaaagaccaccttggatggaaaactgttgtgaatatgtaatctgtaaaaaatggatactaagtatcattattggtgttgtcttactagagcttctaggcttagcccctaactccccggacgctgccatattcacaaacgcaaatgccacatcagcaacacctgcggcttcggcgacgccctccacaacaggaacaggatcatcccaaccccagacaagtaacagcgactctagcacgattcagcttgggccttgcattgctgctctgctagcaatggctatggccgccattggagcttttgcctgagaggattaactaggtggccattggctagagcttcaggatcatcaacaacatttaattgtctttagctttctttgtgtttgttttcttagaccgtgtcgtatgtacttgtacccataacgttatgtgtagtcccacgtgtaccgttattgccagacttttctcagtttcctatttatatctttgagatttgctttagtttttttccttttttatttacggatcaaatccaaatcatgaaaagctcattaggagatttttgttcaaatttcaatctactgtttgtttttcctatcaagttttaggggtggggctgaaaaacacaactagtacagttaactttcaacctcgcatcatctttaattctttttctttagttttctcaactaaaaagctatagcaattgatgcgaaggactgaatctc

SEQ ID NO: 42548 - DNA, 3988 bp, Cannabis sativa
caagtctttctcgcggggagggtagatttatgcctataacactaacaatttcaatgaaaaatttgagagagaaaaagatgaaaagccttagcactaatgctagaaaatcatagaattttaggttaaatatttatgtagaaaaggctcatacaaaaaagtatattttgttaacacagttagttacaagaaaacacaaaattaaataatagaaattgaccctaataccaactacttctaactaactgtttagtaagttatcatcccccttaaatgaaaatgggcgttaacaattttgaatttagccttaagataatgaaatcggtccttatgttgagacttggtgagaacatctgcaacctgatcaacagagggaacataccgaacagagatttcattatttaaaatttgatcacacacaaagtgtagatcaatctcaatatatttacatttggcatgaaaaatatgattagcagctaaagcagttgctccttagttatcaacccaaatgatgagaatgttaacaagttggacttgaagttcagtaagtaatgacagaagccacttgatctctgttgcagcattagttagggccttgaattctgactctgtggaggatcgagcaactacctattgcttcttacttcttagcagaataaaagattagattaaggccaaaaaaaacattgcataaccacctgttgaatgtctgtcatcaaggaaactggcccaatcagtaacaggataggcttcaatcaatagtctaggaactaacagaatcaaaagtcttccagagagtgtttctttcagatatctcaacaaccatttacaaacttcctagtgtacattagtaggagcgtgaataaattgagatatcttatttatgatgaatgtaacatcaggtcttgtgagggttaagtatttgcagggtactcatatatagtgttttgtcttcaaaaggagtaccttcatagagataaagtttgtgagcactacttgtaggacaggaacatggtttggctctttctaatagaacctttaactagaatattagtaatgtatttactttgagataaatacataccctttgaatctctatgaatctcaacaccaagaaagtaatgcacttgtccaagatgttttaagtcaaaagatttgttcaaatcatcaattttaccgattcaatccgcactttcaccgatctgattggattagatttgagttattattcgaattagattggatctaatatatgaaatgcgcatttagtgcagattagatgctctcgtatatataggggcatgtttgcgtttatgtggactttaatggttgcttattataattttatcataattaaaggacaaatgcgaaaattgaaaaactttaaggaggtaatgtgaaatataagatagttcgaacaaaatacacagatcggtgaaaaagggagactcatcaattgacaactacggactcagcagagcaatacttcttcttcttcaccgaatcacaccttcatagattggagatttctctgctcgattttgttttacagtaagaatttgcattctgtttacatttattttcattaattttattatcacaaattcctctatcatgaatttgcatcgcaatcaccttgaatccgaaacttgtttctattttttggtattatagcttgaattttgagtctttttgggttatggttatataataatggttactttattccgccattgtttctgagataaaacagttatatgtttttcctctcacactcatcagcctagccgctttccattctgccagtcttgtggtttttaacttggcagatccttttctgattataattagttagtggatttcgctttaaattttattctcttactggattctacttattcgctggaagattgaactttgtacatttcaaaacctagtttgtttgtttttatatattattgttttttatgtcgcttggtaattgtgttcacttcacttctgttgttggagtactgggcgaattgacctggaaaaattggggtatgtatgatcgattttgtgttaacagatgagatatgggatatatctatgtatagggatacacggaattatcttaaattgtagttgagaacagagtgaatatagtgagatcaatgataatgatacaaaggaactcaaggaaggactgtattggtgttggatatgaagatccagtcatctttttagacaaatttatagtatttgagtactaactgcttcagttttttccttctaatttattttgattgtttgttcgttttatttggtataggcccctattttggtttcaattcagtgatattaagttagagtgtagaaaaacaaatctgtagtacttcaattataactgaagagagaaattctttatacaaaacaatgctaagaaatttaaactatgaatttggtatgtaatgatacatttcagtttagttgagcatgaatgtatacattggctcaaccctgtgctgtcttgttgttgaagaatttgtgctgcacacttctatgtattgtgtttgtgtggcaagttgaattattttttagataattaggtttggttgtatcaatttcgtgttgggtcatatttaatgtttgtaatcttgtgtttgggtcacacgacacgtttactaaacttgttagtgtgtcatgtcgtatttgggttttccacccatttaacaatcatgttgtgtcataattgtgtcaaccggaatacaacatgataatacaaattgtcaaccctactcataattagagtatctattgaacgtaatgaagaagtcagacccatggcttcatcatgcttttgtagatattttattgctttccatttgattctgtttcaagtttagattttacaatttgatgaatacttagttatagattgaactgcgcctttcagtaatttgtgctgatatattctattataggaggttttggggtgatcttcacaaatgacacctttttgaaatgtgatttattgtttggtactgaagagttggtcttcatataatttttgttttgtgaaatgggaggacctgacattacataaatgatgtgtcgttatgatcttgatggactgcaaaagactaataatgccttctgtgtgatttgttttaaaaattaattatttgaatttctccattgtgtttgtaatatattatatattatcaattattttttgtgctgtaaatgattactcattatatatagtgataaacaaatgcttgaagcatgagcttctaatatatatgtgctctgtagtgaattttgaatacactagtatgtgagtgagatgattttcttacaactatgttcttttagtagctattttacttaacccaacccacctacatcgccacttaattgggcctttttggatcccactttttagaacacaccatgtaaaagaaccattcaacccgtttgatgtgcacccctatctgtaattatgcttttcattgcaaataacgcttatggaaaatgtgttccttgcagccaacataagcagaaagaatggctggacatgactcaactgggaagaaatcaagtgataccattaatgacttaccaactttcaacactgagaatttgcaaagtaacatgaagactatattttacaggtttgttaatggaagtcctaatttaagctgaatcattggaaatctcactacttgaaatcggtgaaacaagaatattttcttgatatctagaatagcaagttaagagaatatactttatatctttgttattataagaagcaaatgttcaacctcattgacaaaactcaagagtccgctgcagacaaagacattgcttgaaatgtttttgataattctctcttttatttctttatttatatatttttgttgacattaaattgttgactattttatcattttttagccgaacattcatggccatcattgctggtgttgttgctggaattttgggatta

SEQ ID NO: 42549 - DNA, 3005 bp, Cannabis sativa
tgagcgcgctctcaacctcatgaactcatgtgcagtgggtttgttagaggagttccaagacttagtctttgcctatggggtcagtgatgagtacaggtatttgtgtttcatatcttttcagttttgaatacccattttttagactaccaactgaatttatgaaaattttaaaaaatttgaaactgttataaaattgatagctcagaaggatagtatgacatattagaaatttctattgtattagaatatatgaacaaaaagaaaataaacaagaatgaaagacacaagattgtgaacgtggttaggatacccttagtccacgagtctacaccttgacatgaggctatacccagagataagattgagtaaagtcacaaagagtacaagacaattgacttaaaataattttagactgagataagattgaccatttccatatcaggcatacaagtttagaattaagatattttttgattatgtggcaagacattattgtaattaagatttactaagttatttttttgtaattagtttgtattttaagtacatacttgaaaaaatctcaattttttttccataggtttgcttgtttcaattgcaataatattttgtcaaataaatgcgctaaaaaaggattttacaagttcaattttgccaaatacaccatatcataaccatgtttatccctcttgtttcctttcagctttattatgaagaaggattctcagttatatcaaagacaagcaaggtacggtatctttcattgttcccattatcccgtaattgttttgatcataatatcaagtaggcttattagggacccagaatttgaggagctttctctggcatgaagaattcattgcatgaagcaagtgatttttctcctgcttctctctgaatttctgcattgaaggaattttagaacttgctttcttctttgattgcttgttgaaaagcactttgtttattgttctttagtatgtttgccattttctctatttcataattaggattgtattttttatttttattcacgaggaaccttatatttttcttttgtattttagctgttaaacattcacaaaagtttattttcttattaaaaaagtcatggtgagaagaagagaatgaaacgtattacctaaagatatattcatggcattatgttcagcactgacttgaatggtttgacatttaggattttgtcaatccctataacctaacatgccccttgggctcaaatattacccttttaccatgctttgtagttgatatacttgtaatgattttatatattctcttacaatgtcattttgaccttgaacattagcatattgcaattcattttgcagtgacattgtaactgcagttgtatcactcttcacttcgttgtacgtaacaaaatggagagacttcttcccacatagagagttgaagtaccctccttcttttgatggacgtgcagtgtgttatccatcatctgaaattctcactgattatttggcatggagacaagttgattgtgagtacttgaccattttggttctctgacaataaacaagctaatgttcatgagcattgcttgtatctgtttgttttaggcaacaatgaaatttggttttgtctaagatgagattataatttcattcttggggttttgcaggccacataaacaaccagtataatacttgcttctgggaacttgttaagtctggaaaaagcaaaattgaggctcaaaatatattgaaggtgcaagacttgatcactcttgttgtcacattttttttccctttaaggactctttgtttgttgtccatgggatttagtatgcgtcgttgtctacagtaattgaaaatgctaaaattaaactcctagcagagagaaaaagagaaaaagagctcactgttagaatgttttctttaaaactatagaccgttctatacattttgtttcgagataatcatttcctgttggatgtacattgaaatagattaaatgtgtatttaagataatattagtttagttgtacactgatgttcacccatgtattggtattttgcagggtactcaaacgccagagaaaaatgaactgctaaaacaatttggtatcagtgactacaacaccttaccagtgatgtttcggcaaggttcctcggtcttttgggacaaggttacttttctctccttttaaattataatgtcgtataattacttgggttaatcatttacttgagtttataaggtttcttgggctatatctaaccatattctatgtgtggaaatgtggaatgagtgcctccgatttagtttttgtaacgagtaatgatagatacactcccagtgagaagtaataaaaggctttaagatcttttcttaaatatgctcccatagtcaagagctatttacacttgtagccacacaaattgaaagttaaggggattgtagtatgtaaaaatagtctacaattgttggtaaaatgatagtgattatattcaggaattgtttttgttcctatttctagaattctttactgaatcttattagtatactcgtttttctatgcaggaagacattactccagaacatgagaatggaacatgtaatggaacttatcgaaagaaagttgtcgtagaacattgcaatataatcgaaccagacttttggaactcccacccaagcattcttaacctgaagccatagattctttgaaatgaaggctagctttgataggtcactctttttttacacctgaattatggtcatttgaaaggtttaaccagttagcaattttgaaactgcataaatctctcttagcaattctaattgaacatttaaaagccttattattatataacaaacagtatgggtaatcaaatcatattgttttttgtgtggctgttacagttattatgtcaatgatgtctaagatgtttgtagcgagctaaacagagcaacagtgatccaattagcaattgagaaaaaaatatttgaattttctatggata
